United States Patent Application Publication US 2011/0277190 A1 - sequence listing, part 10

SEQ ID NO: 41316 - protein, 703 aa, Pneumocystis carinii
MAHNLSSQYFMNPGPAPAPPIKIPSYSSSNIYAGRCFDVSHTYKGSKGVLKAGWANVKEEGIKSWIWSKKYLVLTDKVLRVMKNESSTSPGLSIPLREIMNVSRAELKDYCFEILRDPGIGSGTKKSYFISLKSDNDLYSWMDEIYSRCPLMMVSNPTNFTHKVHVGFDPKSGGFTGLPEEWTRLLTASAITKEDYAKNPEAVIEVLQFYSDTQLREKEEFGEPSTLGPDLYNIENQDIKSLEQNKMTMEKHYVNNGFNSQYPVSSTSKGAVPLREWLKKMDIKDSEKMVPQRVPPALPSNLPTRLNTDMASFPHESDSFLTCGSSNVDKGFGVTAKKRQNVPLETLKHKQSQNNLAFISQAPTQPLPKIPTSSKNIPDIPTTFPETTMKQPNATKLPLSLSNARAIKQEPSSDEKVNDLTRSQVMERLRNVVSTNDPNTLYTKIKKVGQGASGSVYVARVAIKQMDIAHQPRRELIVNEILVMKESHHPNIVNFLDAYLAKNSELWVIMEYMEGGALTDIIDNNTLTEDQIAAISLEGLQHLHQQKIIHRDIKSDNVLLDFHGRVKITDFGFCAKLTEQKNKRATMVGTPYWMAPEVVKQKEYGAKVDIWSLGIMAIEMIETEPPYLNEEPLKALYLIATNGTPTLKKPDKLSKELKSFLAVCLCVDVKSRATAEELLEHDFLKKSCSLSNLSSLLAFKSGK

SEQ ID NO: 41317 - protein, 342 aa, Listeria monocytogenes str. 1/2a F6854
MKNNVLVTGGTGFLGMHIIFQLLQQGYQVKTTVRSLKSKEKVIEILQNNGITDFTHLSFVELDLSKDEGWKEAMLDCEYVLSVASPVFFGKFKNEEELISPAIEGITRILQAAKEAKVKRVVMTSNFGAIGFSNADKNSITTEAYWTDELAKGLSAYEKSKLIAEKEAWKFMENETELEFATINPVAIFGPSQSNHVSGSFDLLKNLLNGSMKRVINIPLNVVDARDVADLHIRAMITPEANGERFIASVDGEISMADIAHLLQRERPELVDKMPKKTLPNAAIRAAALFSKHAKEGELMINMNRQISNSKARDVLGWKPISTKEEAVLAAVDSLAKYGLLD

SEQ ID NO: 41318 - protein, 459 aa, Pyrobaculum aerophilum str. IM2
MMNFLTLIPTVSRPPRRLPLSKRLFWTAVVAIVYIMMTITPLYGVQHTTQQGTQPLQQLLSIIFGTAYGTLAHLGIGPIVIAGILLEVFAFSGILNLDLNKREDRLKFTLLLKWTALGIAAVEAVAYVLSGQFGPVTPLGGLLIVLQLLIATVIIILLDDLMSKGWGIGSAISLIIFLSVSKQIFLSLFSWDVAVDNADQRHIVGLIPALGAALYDLFAHGNAASIMGLINREVWLKGQQTPTYLPDFIGLISTLLLAYIILYLEMMKVNIPVTAGQYRGIKFTIPLRFVYVSVLPIIFTTYSLLLVGQLLSPFQQNPVIEAILMIIFPLHRDFSNVPALVLHYLIYVALAIAFAWVWVQLAGLSAEDQARQFARSQLHVPGFRQSEKILAKILERPINALTIISGFIAGSFAALGNILGVWGGGTGLILLVEIALQYYALVMREQMLEMYPGLRQILE

SEQ ID NO: 41319 - protein, 214 aa, Saccharophagus degradans 2-40
MNVKFPKANAPIKLYRHPLSGHCHRVQLMMSLLDVPYETIDLDMDNGAHKTPSYLKISPFGQVPAIDDNGITLTDSNAIIIYLEKKYNNDYEWYPQDPVQAAEVQRWLSVAAGEIAYGPNAARLVKVFGANIDYEIAQRKTYTLFSVLERILNTRNYLAGNTITVADVAGYSYISLAPEGDISLESYPAIRGWLERIESQPRFIGTQRAPLSTI

SEQ ID NO: 41320 - protein, 136 aa, Triticum aestivum
  misc_feature (81)..(81): Xaa can be any naturally occurring amino acid
  misc_feature (107)..(107): Xaa can be any naturally occurring amino acid
  misc_feature (112)..(113): Xaa can be any naturally occurring amino acid
  misc_feature (116)..(116): Xaa can be any naturally occurring amino acid
  misc_feature (120)..(120): Xaa can be any naturally occurring amino acid
  misc_feature (128)..(128): Xaa can be any naturally occurring amino acid
  misc_feature (130)..(130): Xaa can be any naturally occurring amino acid
  unsure (1)..(136): unsure at all Xaa locations
EFEGAVIALFHLLITRSDKVRALREAFYRQNLPNVTNLLATVLVFLIVIYFQGFRVVLPVRSKNARGQQGSYPIKLFYTSXNMPIILHSALITNLYFISQLLLTGSXMGNFXXNFXRIWXKEPEYPGXSXPVGGPA

SEQ ID NO: 41321 - protein, 547 aa, Bordetella parapertussis 12822
MAAKQVLFADEARVRIVRGVNVLANAVKTTLGPKGRNVVLERSFGAPTVTKDGVSVAKEIELKDKFENIGAQLVKDVASKTSDNAGDGTTTATVLAQAVVQEGLKYVAAGFNPIDLKRGIDKAVAAAVEELKKLSKPVTTSKEIAQVGSISANSDASIGQIIADAMDKVGKEGVITVEDGKSLENELDVVEGMQFDRGYLSPYFINSPEKQVAALDDPYVLIYDKKVSNIRDLLPVLEQVAKSSRPLLIIAEDVEGEALATLVVNNIRGILKTTAVKAPGFGDRRKAMLEDIAILTGGTVISEETGMSLEKATLQDLGQAKRIEVAKENTTIIDGAGDGKSIEARVKQIRAQIEEATSDYDREKLQERVAKLAGGVAVIRVGAATEVEMKEKKARVEDALHATRAAVEEGVVPGGGVALLRAKQAITGLKGDTADQNAGIKLILRAVEEPLRTIVTNAGDEASVVVNTVLNGKGNYGYNAATGEYGDLVEQGVLDPTKVTRTALQNAASVASLLLTAEAAVVELMEDKPAAAPAMPGGMGGMGGMDF

SEQ ID NO: 41322 - protein, 598 aa, Oryza sativa
MASAFGSTSACGIKITPTAFATKKHLCLVPPPVVSLPRKNRPQRKCNFRVNAAKELYFNKDGLAIKKLQNGVNKLADLVGVTLGPKGRNVVLESKYGSPKIVNDGVTVAKEVELEDPVENIGAKLVRQAAAKTNDLAGDGTTTSVVLAQGMITEGVKVVAAGANPVQITRGIEKTAKALVSELQKMSKEVEDSELADVAAVSAGNNYEIGNMIAEAMNKVGRQGVVTLEEGKSAENNLYVVEGMQFDRGYISPYFVTDSEKMSVEYENCKLLLVDKKINNARDLITILEDAIRGGYPILIVTEDIEQEALATLVVNRLRGALKIAAIKAPGFGERKSQYLDDIATLTGGTVIREEVGLSLDKADRDVLGTAAKVVVTKDSTTIVGDGTTQDEVNKRVTQIKNQIEVAEQEYEKEKLNERIAKLSGGVAVIQVGAQTETELKEKKLRVEDALNATKAAVEEGIVVGGGCTLLRLASKVDAIIETLENDEQKVGAEIVRKSLSYPLKLIAKNAGVNGSVVTEKVLANDNFRYGYNAATGKYEDLMAAGIIDPTKVVRCCLEHAASVAKTFITSDAVVVDIKEPEKAAAAGNPMGGSGFGF

SEQ ID NO: 41323 - protein, 335 aa, Zea mays
MGRTPCCEKVGLKRGRWTAEEDQLLANYIAEHGEGSWRSLPKNAGLLRCGKSCRLRWINYLRADVKRGNISKEEEDIIIKLHATLGNRWSLIASHLPGRTDNEIKNYWNSHLSRQIHTYRRKYTAGPDDTAIAIDMSKLQSADRRRGGRTPGRPPKASASRTKQADADQPGGEAKGPAAAASSPRHSDVVNPGPNQPNSSSGSTGTAEEEGPSSEDASGPWVLEPIELGDLVWGEADSEMDALMPIGPGGHDSAALEGLGAVGCEAQVDDLFDMDWDGFAAHLWGGPEQDEHSAQLRQAAEPLEVAAAAAAATAARTPDDRELEAFETWLLSDSF

SEQ ID NO: 41324 - protein, 432 aa, Oryza sativa
MLAPATIRTAVRASQASRLGFVSLPAVRQYKSTWAHVKAGPPDAILGVTEAFKRDQDPRKINLGVGAYRDENGKPYVLPSVRQAEELVITSKGDKEYLPITGLADFTKNAAILAYGKDSAPVKENRIAITQSISGTGALRIGGAFLQRHYPEAKSIYLPTPSWGNHTPIFRDSGLEVKQYRYYDKKTVGLDFKGMIDDIKAAPAGSIVLLHACAHNPTGVDPTVEQWKEISNVVKEKGHFPFFDMAYQGFASGDTDKDAFAVRHFVSEGHQIALSQSFAKNMGLYGERVGAFSVVCADPDERARVDSQIKIIVRPLYSNPPMHGAKIAATILADQQLYQQWLGEVKGMADRINGMRSTLKNLLVEDLNSKLNWDHITNQIGMFAFLGISPEQVAKLVNEHHVYLTGDGRISVAGITNHNVKHLAESLHKVTS

SEQ ID NO: 41325 - protein, 633 aa, Gracilaria tenuistipitata var. liui
MYSKILEISSKFDFKINFSRFIVFITLMISVIMSSLTFWSLTMLQEDLMIADKRFCKDLGFLLASSIIDSSEMNKQKDIAYFLEKIYLSTASIRYILYFDQNGSLLLGLPIYNTKIQNILQLHQNLLQLDNKEFLFNTPLINSSKLLNNNIIDIIIPLTKAGHNLGSLDLGIDVNIRFSSSRLIRDLSIFVFVLVWLMLFIGVAFNTLSVATPQKKLLLGIQNIASGNFNQRLTVPVNYQLSTLIISFNEMAEKLQSYEKKNVDKIISEKTKLETIVSLIAEGTILIDAELRILFVNKKAQEIFNWFNIDLTGGYICSYLPIHINEALLPILNNLVQSSYISTNKSQTEEICINLDYNSRKICRFLLTTLLDRILKVLTGVVIIIQDISKEAKLNEAKNQFIGNISHELRTPLCNIGSFLETLIDYNSTLKEKEKINFLTIANNETKRLSSLVNDILDLSVLESEHDYKLDYIDLTQILYNVVNTFQITANKNNIRLIVELEKNITYVFAHESSILQVISNLLNNALKFSPYHSLIIVRVYKLICNNTFTSHIHNRDLVRVEILDQGIGIAEEDQKIIFDRFVRVENNIHTLEGTGLGLSIVKNILAKYKISVNVQSQLNVGTSIWFNLKYVS

SEQ ID NO: 41326 - protein, 427 aa, Pyrobaculum aerophilum str. IM2
MAHISGVYINSAFLENTLYTIKRGIELSGLPVEFYEIITKPKRIHIVYIPVKMDSGRIEVFEGYRVQHNDALGPFKGGIRFHPEVTLADDVALAILMTLKNSLAGLPYGGAKGAVRVDPKRLSQRELEELSRGYARAIAPLIGDLVDIPAPDVGTNSQIMAWMVDEYSKIAGRNAPAVFTSKPPELWGNPVREYATGFGVAVVAREMAKRLWDGIEGKTVAVQGLGNVGRWTAYWLAKLGAKVVAVSDINGVAYKKEGLNVDIIANNRGLGGPALLEAFVSKDGAQYVKDPDAILAVDVDIFIPAAIENVIRSDNAGRVKARLVVEGANGPTTPEAERVLYQRGVVVVPDILANAGGVIMSYLEWVENLQWLSWDEEETRKRLEAIMVNNVARVYQRWQKEKWTMRDAAIVTALERIYKAMKLRGWI

SEQ ID NO: 41327 - protein, 535 aa, Zea mays
MALAFDEFGRPFIILREQEKKTRLRGLDAQKANIGAGKAVARILRTSLGPKGADKMLQSPDGDVIITNDGATILEQMDVDNQIAKLMVELSRSQDYEIGDGTTGVVVMAGALLEQAEKLLERGIHPIRVAEGYEMASKVAFDHLERISEKFEFSADNIEPLVQTCMTTLSSKIVNRCKRALAEIAVKAVLAVADLERKDVNLDLIKVEGKVGGKLEDTELVYGIIVDKDMSHPQMPKRIEDAKIAILTCPFEPPKPKTKHKVDIDTVEKFQTLREQEQKYFDEMVQKCKDAGATLVICQWGFDDEANHLLMHRKLPAVRWVGGVELELIAIATGGRIVPRFQELSPEKLGKAGLVREKSFGTTKDRMLYIEQCANSRAVTIFIRGGNKMMIEETKRSLHDALCVARNLIRNNSIVYGGGSAEISCSIAVETAADRHPGVEQYAIRSFADALDAVPLALAENSGLSPIDTLTAVKAQQVKESNPHCGIDCNDVGTNDMKEQNVFETLIGKQQQILLATQVVKMILKIDDVISPSEY

SEQ ID NO: 41328 - protein, 245 aa, Zea mays
GMEKATVSEPEKHGHKEEEHEVGEKKEGLFAKLHRTSSSSSSSSDEEEEAIDENGEIIKRKKKKVGLKEKIKEKLPGHKDGHHTAAPSPAPAPVETHAHHQEEAHHRPHVVPAPAPAPPPHVETHVHQHEHDHGVVVQKVEDDVKTGTPLHAPEEEKKGLLDKIKEKLPGGHKKPEDAAAAAPAPAVHAPAPAPHAENVSSPDGKEKKGLLGKIMDKIPGYHKSSAEEADHKADAAGEHRTSSSN

SEQ ID NO: 41329 - protein, 181 aa, Candida albicans SC5314
MASASAKKLAVANTNILNQLLIISASINIIVFLIISIFHRPSSYKPWIIFSIPSIFLQYSLEKFGRPKYTNGNSLVSSGEDIRLSGSLYEYYFDVIYLTWGFDILMIIFGSNKVWYGYLIIPGFAIYKLSNFILPFIKKNKSNGSTPEEQQAETKQTNSATSKRQQKLQARREKGPAVKYR

SEQ ID NO: 41330 - protein, 339 aa, Arabidopsis thaliana
MKTIFLVLIFVSFAISPATSTAPEECGSESANPCVNKAKALPLKVIAIFVILIASMIGVGAPLFSRNVSFLQPDGNIFTIIKCFASGIILGTGFMHVLPDSFEMLSSICLEENPWHKFPFSGFLAMLSGLITLAIDSMATSLYTSKNAVGIMPHGHGHGHGPANDVTLPIKEDDSSNAQLLRYRVIAMVLELGIIVHSVVIGLSLGATSDTCTIKGLIAALCFHQMFEGMGLGGCILQAEYTNMKKFVMAFFFAVTTPFGIALGIALSTVYQDNSPKALITVGLLNACSAGLLIYMALVDLLAAEFMGPKLQGSIKMQFKCLIAALLGCGGMSIIAKWA

SEQ ID NO: 41331 - protein, 479 aa, Pseudomonas putida KT2440
MSVQTTTTRNASAHTFKQDMQTRHIVMLALGGVIGTGLFLTSGYTVNQAGPLGAVIAYILGAIMVYLVMMCLGELAVHMPEVGSFSSYATRYLGPGTGYMVAWMYWLTWTVAIGSEFTAAGILMVRWFPDTPVWMWSALFGAAVFISNIISVRSFAETEFWLSLVKVLAVIAFLVVGGGAILGGFEIQQAHSAGLGNFTREGLFPTGFWSIAMTLLAVAFAFSGTELIGIAAGETKDPEKNVPKAIRTTVLRLALFFIGTIFVLATLLPREQAGVIESPFVMVFAMIGIPYAADIMNFVIITALLSAANSGLYAASRMLWTLSDQGNMPRRYATLSRRGTPFNAIVLSMAGGMASLLSSVFAPDTIYLALVSISGLAVVVVWISIAASQIAFRRHYIASGGKLEDLKFRVRGYPFVPLGAIFCCVLACVGIAFDPAQRVALYFGLPFIAWCYLAYWLTCKYRSRRTAPLEIVAPGSEAA

SEQ ID NO: 41332 - protein, 301 aa, Arabidopsis lyrata subsp. lyrata
GDSPITCIVYDAFMPWALDVAREFGLVATPFFTQPCAVNYVYYLSYINNGSLKLPIEDLPFLELQDLPSFFSVSGSYPAYFEMVLQQFINFEKADFVLVNSFQELELHENALWSKACPVLTIGPTIPSIYLDQRIESDTDYDLNLIESKDDSFCTNWLDTRPQGSVVYVAFGSMAQLTNEQMEELASAVSNFSFLWVVRSSEEAKLPSGFLDTVNKDKSLVLKWSPQLQVLSNKAIGCFLTHCGWNSTMEALTFGVPMVAMPQWTDQPMNAKYIQDVWKAGVRVKTEKESGIAKREEIEFS

SEQ ID NO: 41333 - protein, 224 aa, Triticum aestivum
  misc_feature (149)..(149): Xaa can be any naturally occurring amino acid
  misc_feature (200)..(200): Xaa can be any naturally occurring amino acid
  unsure (1)..(224): unsure at all Xaa locations
MEEDYVFKVVVIGDSGVGKTQLLGRFTRGDFCLDSKSTIGIEFQTRTVDIAGRRVKAQIWDTAGQERYRAVTSAYYRGALGAMLVYDVTRRDSFSHAARWVAELRAHADKSIVVALVGNKADLTAAAPGRREVGAEEAEAFAEEQGLFXYDASALSGDNVEAAFLGLLEEIHAAVSRKPLEAARGNGDGDDDVLVLKGIXLSQELSMMETSAMKTPSRCSSCSS

SEQ ID NO: 41334 - protein, 319 aa, Chaetomium globosum
LGQSGAGNNWAKGHYTEGAELVDQVLDVVRREAEGCDCLQGFQITHSLGGGTGAGMGTLLISKIREEFPDRMMATFSVVPSPKVSDTVVEPYNATLSVHQLVENSDETFCIDNEALYDICMRTLKLSNPSYGDLNYLVSAVMSGVTVSLRFPGQLNSDLRKLAVNMVPFPRLHFFMVGFAPLTSRGAHSFRAVSVPELTQQMFDPKNMMAASDFRNGRYLTCSAIFRGKVSMKEVEDQMRNVQNKNSSYFVEWIPNNVQTALCSIPPRGLKMSSTFVGNSTAIQELFKRIGEQFTAMFRRKAFLHWYTGEGMDEMEFTE

SEQ ID NO: 41335 - protein, 546 aa, Chromobacterium violaceum ATCC 12472
MTKYIFVTGGVVSSLGKGIAAASIAAILESRGLKVTMLKLDPYINVDPGTMSPFQHGEVFVTEDGAETDLDLGHYERFIHAKMKKSNNFTTGQVYESVITKERRGDYLGGTVQVIPHITDEIKLKMGEGAADADVAIVEIGGTVGDIESLPFLEAIRQMRSNHGRKNTLYVHLSYVPYIATAGEIKTKPTQHSVKELREIGIQPDILLCRMDRELPEDEKRKIALFCNVEENAVIGCYDSDSIYKVPGMLHAQGIDDIIAEQLQLDLPQADLSAWDRIIDAIEKPDHAIKIAMVGKYVDLTESYKSLTEALKHAGIHTRTKVDIIYVDSEEIERDGAESLRDMDAILVPGGFGKRGVEGKIKAVKFARENDIPYLGICLGMQIALIEYARDVAGMAGANSTEFDLDTNFPVVALIDEWVNHDGKIEKRDENSNMGGTMRLGGQQCDLVPGSLAARVYGSTEITERHRHRYEVNNYYIQRLEQAGLTISGRSAGHEKLVETIELTGHRWFFACQFHPEFTSTPRDGHPLFIAYVKAALAHQADKQAS

SEQ ID NO: 41336 - protein, 326 aa, Chaetomium microascoides
FGPDNFVFGQSGAGNNWAKGHYTEGAELVDQVLDVVRREAEGCDCLQGFQITHSLGGGTGAGMGTLLISKIREEFPDRMMATFSVVPSPKVSDTVVEPYNATLSVHQLVENSDETFCIDNEALYDICMRTLKLSNPSYGDLNYLVSAVMSGVTVSLRFPGQLNSDLRKLAVNMVPFPRLHFFMVGFAPLTSRGAHSFRAVSVPELTQQMFDPKNMMAASDFRNGRYLTCSAIFRGKVSMKEVEDQMRNVQNKNSSYFVEWIPNNVQTALCSIPPRGLKMSSTFVGNSTAIQELFKRIGEQFTAMFRRKAFLHWYTGEGMDEMEFTE

SEQ ID NO: 41337 - protein, 187 aa, Magnetospirillum magnetotacticum MS-1
MGGDIVPAFVEKGTAAVYDFIRNDVPGSTDRDRDYWRDVGTIDSYYDANKDLIAVTPVFNLYNEEWPLHTGYTGLPPAKFVHAGRGRLGHAADSIVSPGVIISGATAVGSVLSPGTYLHSWSSVSDSVLMDGVQVHRHAQVHRAIIDKNVVVGEQARIGLDPEQDRARGFTVTESGITVVPKGTVVE

SEQ ID NO: 41338 - protein, 326 aa, Chaetosphaerella phaeostroma
PDNFVFGQSGAGNNWAKGHYTEGAELVDQVLDVVRREAEGCDCLQGFQITHSLGGGTGAGMGTLLISKIREEFPDRMMATFSVVPSPKVSDTVVEPYNATLSVHQLVENSDETFCIDNEALYDICMRTLKLANPSYGDLNYLVSAVMSGVTTCLRFPGQLNSDLRKLAVNMVPFPRLHFFMVGFAPLTSRGAHSFRAVSVPELTQQMFDPKNMMAATDFRNGRYLTCSAIFRGKVAMKEVEDQMRNVQNKNSTYFVEWIPNNVQTALCSIPPRGLKMSSTFVGNSTAIQELFKRVGEQFTAMFRRKAFLHWYTGEGMDEMEFTEAE

SEQ ID NO: 41339 - protein, 381 aa, Fragaria x ananassa
  misc_feature (107)..(107): Xaa can be any naturally occurring amino acid
  unsure (1)..(381): unsure at all Xaa locations
MQIFVKTLTGKTITLEVESSDTIDNVKAKIQDKEGIPPDQQRLIFAGKQLEDGRTLADYNIQKESTLHLVLRLRGGMQIFVKTLTGKTITLEVESSDTIDNVKAKIXDKEGIPPDQQRLIFAGKQLEDGRTLADYNIQKESTLHLVLRLRGGMQIFVKTLTGKTITLEVESSDTIDNVKAKIQDKEGIPPDQQRLIFAGKQLEDGRTLADYNIQKESTLHLVLRLRGGMQIFVKTLTGKTITLEVESSDTIDNVKAKIQDKEGIPPDQQRLIFAGKQLEDGRTLADYNIQKESTLHLVLRLRGGMQIFVKTLTGKTITLEVESSDTIDNVKAKIQDKEGIPPDQQRLIFAGKQLEDGRTLADYNIQKESTLHLVLRLRGGF

SEQ ID NO: 41340 - protein, 477 aa, Pseudomonas fluorescens PfO-1
MNKLTTAAGAPVVDNNNVQTAGPRGPMLLQDVWLLEKLAHFDREVIPERRMHAKGSGAFGTFTVTHDITRFTKARLFSSVGKTTDVFVRFSTVAGERGAADAERDIRGFAIKFYTEQGNWDLVGNNTPVFFLRDPLKFPDLNHAVKRDPRTNMRSARNNWDFWTLLPEALHQVTIVMSDRGLPRTYRHMHGFGSHTFSFISPANERFWVKFTWKTQQGIENLTDQQAATLIGDDRESAQRDLYNAIEEGHFPQWKLYVQVMPELDAETYPINPFDLTKVWPHADYPLIEVGVLELNRNPDNYFADVEQAAFNPANVVPGISFSPDKMLQARLFSYGDAQRYRVGVNHHQIPVNAPRCPVNSYHRDGQMRTDANAGSTIGYEPNSYGQWAEQPDFSEPPLALKGSAGHWNHREDDDYFSQPGALFRAMSTAQQQVLFENTARSIHGASAQTRQRHIDNCTRADPAYGAGVAQAIEALG

SEQ ID NO: 41341 - protein, 363 aa, Arabidopsis thaliana
MAKDGPNWDGLLKWSLSHADGTRPTRQLSEEDRKWFMEAMQSQTVDVVKRMKEITLVMQTPEQVLVEHGVTPEDIQDLLDELQEHVESIDMANDLHSIGGLVPLLSFLKNSHANIRAKAADVVSTIVQNNPRSQELVMETNALESLLSNFTSDTDIHARTQALGAISSLIRHNKPGVTAFKLANGYAGLRDALASDSVRFQRKALNLLQYLLQQDDSDRSIATGLGLPRVMMHLASSDDAEIREAALRGLLELSREKNDGSSSIDKSDEKLRQLLEERIKGITLMSQEDLETVKEERQLVDLLWSICYNEPSSLREKGLVVLPGEDALPPDVASKLFEPPLRASAANRNATEKKDEPMKLLGP

SEQ ID NO: 41342 - protein, 257 aa, Clostridium thermocellum ATCC 27405
MLVNKVEICGVNTSKLPVLTNEQKKELFERMHKGDTSAREEFIKGNLRLVLSVIQRFNNRGEYVDDLFQVGCIGLIKAIDNFDVTQNVKFSTYAVPMIIGEIRRYLRDNNAIRVSRSLRDIAYKALQAKEKLTNQNSKEPTIEEIAKELGLPKEEVVFALDAIQDPISLFESVYHDGGDAIYVMDQVKDEKNNDENWLEGIALSEAMRKLNDREKLILNLRFFDGRTQMEVAEEIGISQAQVSRLEKTALMHMRKYI

SEQ ID NO: 41343 - protein, 384 aa, Pyrobaculum aerophilum str. IM2
MFKRFAQRRILTPGPTELPHGVKAALVRETTNPDLDPQFFQEYKQVIELLRPLLGAWQSRVYIWVGEAMLGLEAALANAVRPGTKVLVIDNGVYGSGFADLVKMYGGNPITPGLSWRRSADPSAIERILDKEKDVEVVTLVHCDTPSTVYNNLREIAKIVSSHGAYLIVDAVSSIAADEIRVDDWGVDVLIGGSQKALNAPPGLTILSISKRAWDRALEVARPSFYMNYQIWEEWLEKGGFPYTMSDVLIYALKESLQRIHNEGFESVFQRHKAARAAFRAGIEALGLEPYIERVDDTCPTATAFKTPLPSPELRRFIWEKYGVLFAGSWGPLEREIMRISHMGIQASADSIAASISILGAALRDLGFNVQVGKAVEVAIETFR

SEQ ID NO: 41344 - protein, 770 aa, Arabidopsis thaliana
MVAPALLLELWTEILVPICAVIGIAFSLFQWYVVSRVKLTSDLGASSSGGANNGKNGYGDYLIEEEEGVNDQSVVAKCAEIQTAISEGATSFLFTEYKYVGVFMIFFAAVIFVFLGSVEGFSTDNKPCTYDTTRTCKPALATAAFSTIAFVLGAVTSVLSGFLGMKIATYANARTTLEARKGVGKAFIVAFRSGAVMGFLLAASGLLVLYITINVFKIYYGDDWEGLFEAITGYGLGGSSMALFGRVGGGIYTKAADVGADLVGKIERNIPEDDPRNPAVIADNVGDNVGDIAGMGSDLFGSYAEASCAALVVASISSFGINHDFTAMCYPLLISSMGILVCLITTLFATDFFEIKLVKEIEPALKNQLIISTVIMTVGIAIVSWVGLPTSFTIFNFGTQKVVKNWQLFLCVCVGLWAGLIIGFVTEYYTSNAYSPVQDVADSCRTGAATNVIFGLALGYKSVIIPIFAIAISIFVSFSFAAMYGVAVAALGMLSTIATGLAIDAYGPISDNAGGIAEMAGMSHRIRERTDALDAAGNTTAAIGKGFAIGSAALVSLALFGAFVSRAGIHTVDVLTPKVIIGLLVGAMLPYWFSAMTMKSVGSAALKMVEEVRRQFNTIPGLMEGTAKPDYATCVKISTDASIKEMIPPGCLVMLTPLIVGFFFGVETLSGVLAGSLVSGVQIAISASNTGGAWDNAKKYIEAGVSEHAKSLGPKGSEPHKAAVIGDTIGDPLKDTSGPSLNILIKLMAVESLVFAPFFATHGGILFKYF

SEQ ID NO: 41345 - protein, 320 aa, Shewanella sp. ANA-3
MLDTLLPFKRHFLSRNGNKLHYINEGQGEPVVMVHGNPSWSFYYRNLVSALKDTHQCIVPDHIGCGLSDKPDDSGYDYTLKNRIDDLEALLDSLKVKENITLVVHDWGGMIGMGYAARYPERIKRLVILNTGAFHLPETKPLPLALWICRNTLLGTVLVRGFNAFSSIASYVGVKRQPMSKYIREAYVAPFNSWANRISTLRFVQDIPLKPGDRNYQLVSDIAASLPKFAKVPTLICWGLQDFVFDKHFLAKWREHMPHAQVHEFADCGHYILEDASDEVITHIKHFMAEAQTPEPEVQPVETEQVAEPEAETQAPQAAH

SEQ ID NO: 41346 - protein, 178 aa, Streptomyces avermitilis MA-4680
MTTGATIWLTGLPSAGKTTIAYELAGRLREEGHLVEVLDGDEIREFLTADLGFTRADRHTNVQRIGYLADLLARNGVKALVPVIAPYADSREAVRKRHGASGAAYLEVHVATPVEVCSQRDVKGLYAKQAAGEISGLTGVDDPYEAPASPDLRIESHTQTVQESAAALHALLTERGLA

SEQ ID NO: 41347 - protein, 435 aa, Bradyrhizobium sp. BTAi1
MALDSPSDAPPTFFAPWPDRLRHSAIILLAAALALTGLVLLDELLPFRALAVFLCIAGAALVPWRLHSAVAKREEERHANPVEAAAVSAVVAGIPVPAVLLDRAGRVIHLNAAAAQLAPALRKGELAQFALRTPEIITALREAIASTELRRATYHDHVPVDRWTELIITPVPVPTAFGGTDKCMLMTFHDLTPLRRVEEMRADFVANASHELRTPLAALSGFIDTLQGPAKDDAKARERFLGIMHTQATRMARLIDDLLSLSRVELSAHVQPHTMVDMVAIIRQVTDGLEPLARERQVEIETSLPDAPVTIAGDREELLRVFENLIENALKYGASGGRVIVSLEQAVSGEGTPEIRVKVRDFGPGIAPEHLPRLTERFYRVDVGDSRAQGGTGLGLSLVKHILNRHRGRLLIESVPRKGAAFTACFPQSKPARAA

SEQ ID NO: 41348 - protein, 441 aa, Candida glabrata CBS138
MPLPPIYTNRFGYENSNISLPSFSELTSMLNLPRYTLPKPRIQICSHLRPRTQATTGGIDGTANNKPISAYIFMERQPQTTPKIPIVSGSSVSPGAATPYYGALPYDVSRRKLSIASLDNGIRPVNSLSPTISITPVSSYGSVPPKLASVALDNPGVPEPSFAPPSMPRINGVCSHRYKIKVTPERETSSMRARCNNSGADKLHSLSAVASALVEEECMVKTENSYPLSPDSINNSVLKSRNNSIDSLISGAIPKFDKEARNNCDGAAQELPAKASYIVSATDDVKEVPSVTLTSSATSNDVTVESQLITAERDAIILAGSQRRESQRSSGSSGSHGSALSQDSSEPKFNTIGSSIRRRKSKPGKVSKSGKNRNVFGYCLQCGKVDTPEWRNGPQGKATLCNACGLFYKKLKKYFADENMAIQFMQHRSIVDPEDRTMPKF

SEQ ID NO: 41349 - protein, 476 aa, Sphingomonas paucimobilis
MTAYPSLHMIIDGEAVTGGDRRTQTIVNPATGETLGELPLADTADLDRALETAQRGFQRWRNSTPQERAAVLSGAARLLMERQETLARIATMEQGKTLAESRIEVMMVAGLFNFYAGEVFRLYGRALVRPAGTRSTVTYEPVGPLAAFSPWNFPLGNPGRKLGAPIAAGCSVIMKSAEETPASALGVLQCLLDAGLPSDVAQAVFGVPDEVSRYLLASPVIRKLSFTGSTVVGKHLAKLAADDLKRTTMELGGHGPVLVFNDVDVDRVLEVMVGHKYRNAGQVCVSPTRFIVQEDVYETFRDGFAERAKALRVGNGLEDGIQMGPMANARRPDAMERLNRSAVDAGATLNAGGERIGNQGFFYAPSVLSDVPLDAEIMNEEPFGPVALINPYRTADEMIAEANRLPYGLAAYSWTNDVKMQRRIAREVETGMLGINSVAIGGADSPFGGVKWSGHGHEDGPEGVQACLVTKAVHEG

SEQ ID NO: 41350 - protein, 857 aa, Vibrio sp. Ex25
MVFAVQQFSDNALRVSRLNQTVINIQGFQLISQASHFIYSIEKARRQPTLQASAALNIEEQDGVISSMHQKFVSNPNTAEYADELKEAMLGVLSGRLDEMDDLGDWAFQLLQNMSRSLLQNHQWYGSEDGIRMQNFIAYLAQLSFWTQKEAWLTHRLVQDPKSRLSQSLFFQAIDRQQQNLDAFLNLGGSYDQVDKLLGLFTSPRYQRNLASRGRLMSGDMSRSDYEAYLRELDFRVQRLQVLIDGFTKQTEQSLLTQVHEQKTNIAMITSGVILVIVMLCWLGFGTWFRVNSKLDAIIHTLTALINDEEKQTKVKVDGSDELTIFAQQVNRVVEEKQRQTDEILHAKESAVSANRAKSVFLANMSHEIRTPLNGIMGMTEILSQSELSSHQQEVVDDIDSSSQTLLTLLNDILDLSKIESGRLELSLVEADIREVVYQSMVLFQSKATSKQLELGINLAENIPTRVMVDDHRIKQVITNLVSNAVKFTESGHIRVDVSYDELSEKECGVLMFKVEDTGIGIEQDKLTTIFEPFTQEDEGVSRQFGGTGLGLAICRQLVSMMGGQLIATSTKGVGTCFEFSIEVDVIPVFGWRSDVINKGLLICTNYDYADQLLKECRLAKINLFGANNVNEVKAINDDFDVIFLCHRDDSNTDEALDELSLKYDLRRVIICQHHLSTPYDNAERVHAVLTLPFLGNRFKHVIDDLAKVEKTISSDAVTNGIPKSEYRTSRSHRRILIAEDNLMNQKIASFFLDKAGYDYLITSNGQEALEAITKGEEFDAILMDCMMPVMDGLTATKEIRRWEKKAGREKTTIIALTASVLEEDIHNCFAAGMDAYLPKPYKSNQLFELFNELKLA

SEQ ID NO: 41351 - protein, 167 aa, Listeria monocytogenes
ARGAGAHGKFVTKKSMKKYTIAKFLQEEGTETEVFARFSTVIHGQHSPETLRDPRGFSVKFYTEEGNYDFVGNNLPVFFIRDAIKFPDVIHSLKPDPRTNIQDGNRYWDFFSLTPEATTMIMYLFSDEGTPASYREIRGSSVHAFKWINEEGKTVYVKLRWIPKAGI

SEQ ID NO: 41352 - protein, 472 aa, Oryza sativa (japonica cultivar-group)
MAFFRGLTAVSRLRSRVAQEATTLGGVRWLQMQSASDLDLKSQLQELIPEQQDRLKKLKSEHGKVQLGNITVDMVLGGMRGMTGMLWETSLLDPDEGIRFRGLSIPECQKVLPTAVKDGEPLPEGLLWLLLTGKVPTKEQVDALSKELASRSSVPGHVYEAIDALPVTAHPMTQFTTGVMALQVESEFQKAYDKGMSKSKFWEPTYEDCLNLIARLPAVASYVYRRIFKGGKTIAADNALDYAANFSHMLGFDDPKMLELMRLYITIHTDHEGGNVSAHTGHLVGSALSDPYLSFAAALNGLAGPLHGLANQEVLLWIKSVIGETGSDVTTDQLKEYVWKTLKSGKVVPGFGHGVLRKTDPRYTCQREFALKYLPEDPLFQLVSKLYEVVPPILTELGKVKNPWPNVDAHSGVLLNHFGLSEARYYTVLFGVSRSIGIGSQLIWDRALGLPLERPKSVTMEWLENHCKKVAA

SEQ ID NO: 41353 - protein, 301 aa, Arabidopsis lyrata subsp. petraea
SDSPITCIVYDAFMPWALDVAREFGLVATPFFTQPCAVNYVYYLSYINNGSLKLPIEDLPFLELQDLPSFFSVSGSYPAYFEMVLQQFTNFEKADFVLVNSFQELELHENALWSKACPVLTIGPTIPSIYLDQRIESDTDYDLNLIESKDDSFCTNWLDTRPQGSVVYVAFGSMAQLTNEQMEELASAVSNFSFMWVVRSSEEAKLPSGFLDTVNKDKSLVLKWSPQLQVLSNKAIGCFLTHCGWNSTMEALTFGVPMVAMPQWTDQPMNAKYIQDVWKAGVRVKTEKESGIAKREEIEFS

SEQ ID NO: 41354 - protein, 301 aa, Arabidopsis lyrata subsp. petraea
SDSPITCIVYDAFMPWALDIAREFGLLGTPFFTQPCAVNYVYYLSYINNGSLKLPIEDLPFLELQDLPSFFSVSGSYPAYFEMVLQQFTNFEKSDFVLVNSFQELELHENALWSKACPVLTIGPTIPSIYLDQRIKSDIDYDLNLFESKGDSFCTNWLDTRPQGSVVYVAFGSMAQLTNEQMEELASAVSNFSFLWVVRSSEEAKLPPGFLETVNKDKSLVLKWSPQLQVLSNKAIGCFLTHCGWNSTMEALTFGVPMVAMPQWTDQPMNAKYIQDVWKAGVRVKTEKESGIAKREEIEFS

SEQ ID NO: 41355 - protein, 126 aa, Brassica napus
  misc_feature (31)..(31): Xaa can be any naturally occurring amino acid
  unsure (1)..(126): unsure at all Xaa locations
MSASRFIKCVTVGDGAVGKTCLLISYTSNTXPTDYVPTVFDNFSANVIVDGNTINLGLWDTAGQEDYNRLRPLSYRGADVFLLAFSLVSKASYENVSKKWVPELRHYAPGVPIILVGTKLDLRDDK

SEQ ID NO: 41356 - protein, 485 aa, Oceanobacillus iheyensis HTE831
MTKGNNDEQNNSRNYSQGFGSQGLHGYPGNASDKSHANPAAFNWNIDLPAEIHSQTVGKRGPILKQDNIEHETLQTFIHEKITERPVHVKGWGAFGYFETLYSMSDYTTLSFLQIPGTQVPVFVRFSLAVSTKGTPDTSRNVRGFATKFYSEDGIFDLICNHIPVFSVRDTIRFPEAIKAFLPSPVNNLIDPTRYWNFVARAPESLLFTLLVYSNLGTVKSLRHLPGHSVNTYVWKNAEGKRYFIKYTWAPIAGEEYIRNEEAVKLAGENPDIAGQDLHDAIERGEPVEYGLYIQIMDPKDAASLPYDPLDDTKLWDQQQFPFKPVGVMKLNKNPDNYMEQVEKAAFSPTNLLEGVELSDDKMLQGRANIYSDSQRYRIGPDFRNVPVNNQSNWWPGDLVTSGDGRFVEGELQRSDIEKQDDFTQPGLFYESLSEEDKEDLITNMAEGLSVVSNDVFNTVHGYIQEASRDLANRLNKTVILKRKK

SEQ ID NO: 41357 - protein, 467 aa, Micromonospora echinospora
MTRPADPSAERRTMVPSKFIFGLSPVGSAALRAAPPSRRPPLAPGGSGLGVRAVVIGSVATASLAAGLAAAAGTALRHGRPAGRRRFAREVARTVARLGPTFIKAAQVLGTRRDVVPALLCDELSMLQDDVPPMDAAQSRAALREVYGDRLDTVFASVEETPVASGSIACVYRATLPDGATVAVKLRRPGIGPQMAADLGLLRRGASVVARLPMFRGVPVREVVDSLCESVLGQLDLGREGRDLDRLREDLGGVPRVRVPRVHAAASRPAAIVMDFIPDLAVDTGARCPRAMRRTFAASTLTVVYQMLFINGFVHCDLHPGNLYFTRSGQVVVLDAGFSVQLSDKMRGLFADFFLNMSIGRGDRCAAIVLESAIGVADDADVPAFTEGVKDLVARSYRLSAKEFSLIAFAGELFDLQRRYGVAASPELVFPLLSLLVVEGTVRSLDPDIDFQETAKPVLNRALFGIR

SEQ ID NO: 41358 - protein, 485 aa, Arabidopsis thaliana
MILLPEPSPTTGSLFKPRPVHISASSSSYTGRGFHQNTFTEQKSSEFEFRPPASNMVYAELGKIRSEPPVHFQGQGHGSSHSPSSISDAAGSSSELSRPTPPCQMTPTSSDIPAGSDQEESIQTSQNDSRGSTPSILADDGYNWRKYGQKHVKGSEFPRSYYKCTHPNCEVKKLFERSHDGQITDIIYKGTHDHPKPQPGRRNSGGMAAQEERLDKYPSSTGRDEKGSGVYNLSNPNEQTGNPEVPPISASDDGGEAAASNRNKDEPDDDDPFSKRRRMEGAMEITPLVKPIREPRVVVQTLSEVDILDDGYRWRKYGQKVVRGNPNPRSYYKCTAHGCPVRKHVERASHDPKAVITTYEGKHDHDVPTSKSSSNHEIQPRFRPDETDTISLNLGVGISSDGPNHASNEHQHQNQQLVNQTHPNGVNFRFVHASPMSSYYASLNSGMNQYGQRETKNETQNGDISSLNNSSYPYPPNMGRVQSGP

SEQ ID NO: 41359 - protein, 489 aa, Candida albicans SC5314
MSIRLYSKQSLNTFKKATFIPLTTTATAITTTQFRYFHDTPNKQNVTVNNMMPRVTKPTPTNTFTTSPQLPSTEYLKAFNNKELISFFMIGLATLNKPILQLCIKLFPYVPMSIIKALVYRIYCGGETIDQVKKTGLRLHERGINNMMISLTIEACDGNDNVDPKYIVEETAKSIETILVPHTVAMIEQATDDINDIPPGYVALKPTGFAKDAANVLKNYNTTMIKEFDELVDKAIIVCQKIYDSNKELSQKYPERVSPFVVGVIDAEKHELQEGVYELQRRLYQKFNKLNQPISIVGTLQMYLSDSANLLTKEENLANENNYRLGLKLVRGAYIHSEKNRDIVIHKTKQDTDNNYNSGISYCIDSILNQNQNQNGSTIGHLVVASHNAESMRLASDKVYNPMNESNKNKTNVVLGQLLGMADNVTYDLITNNKIGNVIKYVPWGPPLETKEYLLRRLEENGDAVKNDNGWPLVKASFKMLTKRLFGSG

SEQ ID NO: 41360 - protein, 217 aa, Listeria monocytogenes str. 1/2a F6854
MNDIIHDYLLKNIPKSSPFFEELEAYAKENEVPIMEPDSLYCLLQILDIQKPKRILELGTAIGYSALKMADKLPDAEIITVERDEERYEQAIHNIQRYGASDRVKVLLTDAIEGAEEILAHGPFDAIFIDAAKAQYEKFFHIYTVSLAENGVIYSDNVLFKGLALDMTPEKQRKLRVARKMRHFNDFLVTHPDFETTTIPLGDGLSISKRKKTGGVS

SEQ ID NO: 41361 - protein, 509 aa, Legionella pneumophila str. Paris
MNWKRFLIAAMTKKKYQVFLNDTKHPKEARERLWNSEIVPLLKKSSYWQKLLKDQSSVALNDFGITEYEDYQEGLLAAQHSTIQPFNGEELIFWSETSGTSGVRKFFPITDSFQKQFQRTMAPYIYSLTQRFPGFFKEKMLYLVAVDTHKTTPAGIPTGWISNFNYRHLPSFIKKFYAMPDEVFASHEAYNQWGPIYGLASDLSAIFAVTPMVIDAFYQRCIDGFKEYLPYLLGNKPLPSHLPPLNMTRKRRRHLQALAKVDHLSFKQLWPSLEMAGCWTSGLCEYPAQQLQKLLGSEIKLVDGTYSATEGWLTVPVETNSVGGILHPGAHIVEFIPEGAAIEKENLLQCWELEVGKKYEVFLTTAMGFIRYRLKDIVKCTGYLNSSPKLEFCYKTQLLKLETCSITGSELQSAVLATPLNIEPYWYFARNSVGSRIVLVTDDEADISELSLKKLHEQLIHISPTYAHSVETEEVLPVTLLQLPKEKLLAGMHGQTKPKFISQEVIAER

SEQ ID NO: 41362 - protein, 361 aa, Pyrococcus horikoshii OT3
MQAVLLAGGKGTRLLPLTVYRPKPMIPFFNKPLMEYMLMNLIGIGVEEIIVLVGYLKEKIIEYFGRGDKFGVEIKYSNGENIKLGTAGALKKAEKFIDDTFIVASSDVLTNLSFDSFIRFHREKGGIATMALTKVEDPTPYGVAVLDNENRILYFKEKPKREEAPSNLVNAGIYIFEPEILDLIPRGKAFDFSLDLFPKMLEEGIPIYGFPFDEYWNDVGRPSTYLQATEDVFLGKLRLPQINVGRDKGNIERGGSLFTGSKCLIRNPKIVGFAVLGNNVKVGRDVKIERSVIFSNVTIEDEVEIREAIIGENVYIGRGAVIEPGSVIGDNSVIEEYSKIGANVKIWTDSKVGRESIVLPD

SEQ ID NO: 41363 - protein, 1153 aa, Candida albicans SC5314
MHKFRYSLHQHYSKRNSSDKSKDSPISQNSNEENDSTKLSSSSLQDLHDDLDDIYNNYTLAQGTNNNSVDTLDSENNQAINKFIDKPPAIHGMEPQLPVMHVSSRLSSLGNTTNETGESIAKSAPGTPLSSHSFDFRPHHPRAVTNSSLNVLLDTPNVSSEFNHLVDQTPPNESVERFDDSNNTVDNTEEEENNDDTDEIPKSETLKQNEENWEKKGAAVKTIKTMDGEMKTIRRNVTDFKFGKELGEGSYSTVILATDKITGKQYAVKVLDKRHIIKEQKVKYVNIEKHALNRLSNRLGVISLYFTFQDKDSLYFVLDYASNGELLTLIKRYNTLNEECTRHFGAQILDAIKYMHDNGVIHRDLKPENILLDDKMRIQITDFGTARLLEKKNDESEEYPVDVRAKSFVGTAEYVSPELLENKYCGKPGDIWAFGCIIYQMIAGKPPFKATNEYLTFQKITKLQFAFSAGFPTIIRDLIKKILVLQPSRRATIPEIQKHYFFQSVDFKDFDSIWLSDPPEIGPYKMTAKSMMKVPELNKAPVTTVIKKNVKKSTNSNSNTNNVTTAVGGGSSNGHKGSSPTPEKEPSPATINNKSTEKVSAASVAAYVLNKPATNQNSSTSEDSSKRSSNSNETRKLSYSQQDYIPGTNILRPQISTRPSVGSYVKTTPSKDRKTLTKVPSNIHQQQEKVKPKVMEVKPATTLEAAWEPYLTHPDERILRIGPVIAHKEPTEPFEKKNKASLHISPLDINKEQRSRSNTSLLTQIVNEVNNNTSELKKVENADESLAIIEPQYNMKRSPTSDSKKSMDIERSASTSGSRISKKAIFKKLGFSHLEKNDTEESNGPSLTEKPQTCTLVVTTHGRALLFIRNDIESNYLLIAEIKLKYPFIHFQELVISQNKFSKLVPSVGVFVISSIDNSLIFEVEKFEVNQWTEALAKSKYNEIERGKLAAYESQVSLKEPVVIKKQSSSTYNTTRSSPKLLDAPEFDSSAAKTNNHKKSQQHSSPTVRKSSETSSPSSHSPRTVATNMFKMKLQSGTPKRKPPPPVSPPQELNSHTGLPRRSTENGTLHAAQLAVSQVSPKGYSNNRRSSFTKEDGSKIDPNKMRKAAHTYNHSHSHNGNNGNSNSNSNGNKSGSGVTALNSKFLARSTRKK

SEQ ID NO: 41364 - protein, 349 aa, Lycopersicon esculentum
MGVQEKDPLLQLSLPPGFRFYPTDEELLVQYLCKKVAGHDFPLQIIGEIDLYKFDPWVLPSKATFGEKEWYFFSPRDRKYPNGSRPNRVAGSGYWKATGTDKVITSQGRKVGIKKALVFYVGKAPKGSKTNWIMHEYRLFESSRKNNGSSKLDEWVLCRIYKKNSSGPKPLMSGLHSSNEYSHGSSTSSSSQFDDMLESLPEMDDRFSNLPRLNSLKAEKFNLDRLDSANFDWAILAGLKPMPELGPANQAPGVQGQAQGHVNNHIHSDNNNMNFLNDVYAHPPNFRGNTKVESINLDEEVESGKRNQRIDQSSYFQQSLNGFSQAYTNNVDQFGIQCPNQTLNLGFKQ

SEQ ID NO: 41365 - protein, 227 aa, Lycopersicon esculentum
RKRRLNMEQVKTLEKNFELGNKLEPERKMQLARALGLQPRQIAIWFQNRRARWKTKQLEKDYELLKRQFDAIKAENDALRNSKSKSLHAEIMSLRIESTTESINLNKETEGSCSNRSENSSEIKLDISRTPAIHSPLSNHHPNISSRPFFPPSMIRSNNNNNNNGVVVPHQLFHINSSSSRQDLKLMDQNTTTNNSSSVKEESLSNMFCGIDDQTSFWPWLEQQHFN

SEQ ID NO: 41366 - protein, 277 aa, Salmonella bongori
QKRSDIEIVAINDLLDAEYMAYMLKYDSTHGRFDGTVEVKDGHLIVNGKKIRVTAERDPANLKWDEVGVDVVAEATGLFLTDETARKHITAGAKKVVMTGPSKDNTPMFVKGANFDTYAGQDIVSNASCTTNCLAPLAKVINDNFGIVEGLMTTVHATTATQKTVDGPSHKDWRGGRGAAQNIIPSSTGAAKAVGKVLPELNGKLTGMAFRVPTPNVSVVDLTVRLEKAASYEEIKKAMKAASEGAMKGVLGYTEDDVVSTDFNGEVCTSVFDAKAG

SEQ ID NO: 41367 - protein, 279 aa, Schizosaccharomyces pombe
MRKRKVITIFDLKIQMEFKGETKDGVEATGSITCPELSYDLGYSDYVFDIDIYSASKEKEPIKELVREKIIPQIRQLFSGFSQVLLQTHGDDVYLSTEEHNGNAARGLPVHSSFKQNNSSQTSSNKGTTTVAAGSGSDGSRVSAVVNTADISENYTFDAPANELYATFLDPARVAAWSRAPPQLDVRPQGAFSLFHGNVVGKFLVLEENKKIVQTWRLSSWPTGHYAEITFTFDQADSYTTLRMIMKGVPIGEEEVVQGNIQDYYIRPIKTVFGFGAVL

SEQ ID NO: 41368 - protein, 167 aa, Listeria monocytogenes
ARGAGAHGKFVTKKSMKKYTMAKFLQEEGTETEVFARFSTVIHGQHSPETLRDPRGFSVKFYTEEGNYDFVGNNLPVFFIRDAIKFPDVIHSLKPDPRTNIQDGNRYWDFFSLTPEATTMIMYLFSDEGTPASYREIRGSSVHAFKWINEEGKTVYVKLRWVPKAGI

SEQ ID NO: 41369 - protein, 448 aa, Zea mays
MASTKAPGPGEKHHSIDAQLRQLVPGKVSEDDKLIEYDALLVDRFLNILQDLHGPSLREFVQECYEVSADYEGKGDTTKLGELGAKLTGLAPADAILVASSILHMLNLANLAEEVQIAHRRRNSKLKKGGFADEGSATTESDIEETLKNQTVDLVFTAHPTQSARRSLLQKNARIRNCLTQLNAKDITDDDKQELDEALQREIQAAFRTDEIRRAQPTPQDEMRYGMSYIHETVWKGVPKFLRRVDTALKNIGINERLPYNVSLIRFSSWMGGDRDGNPRVTPEVTRDVCLLARMMAANLYIDQIEELMFELSMWRCNDELRVRAEELHSSSGSKVTKYYIEFWKQIPPNEPYRVILGHVRDKLYNTRERARHLLASGVSEISAESSFTSIEEFLEPLELCYKSLCDCGDKAIADGSLLDLLRQVFTFGLSLVKLDIRQQPLLPLVLG

SEQ ID NO: 41370 - protein, 248 aa, Triticum aestivum
  misc_feature (30)..(30): Xaa can be any naturally occurring amino acid
  misc_feature (46)..(46): Xaa can be any naturally occurring amino acid
  unsure (1)..(248): unsure at all Xaa locations
TKGPARRPGHLVGQGIVLSIITEFFKGYLXENSLDDLMQLLKKGKXMEDNLLEFFPSGKRTSEALSEHFTKEGLTSLVEYNTKKMFEVKLKEIKSTLTTMINEEAEISEVTEVVKQQVKDAKFPDIEVVRMLWDVLMEAVQWSGKNQQQNSNSALRQVNAWAGLMNAFCTSGKLELELIYKVQTQCYEDAKLMKLFPEIIRSLYDQDVLAEDTILLWFRKGSNQKGRQSFVKALEPFVKWLEEAEEEE

SEQ ID NO: 41371 - protein, 280 aa, Arabidopsis thaliana
SVKPIWGRTKETDEHMGWVFPGSDTEVPGADPDHLNGAKSVRELYEIASPNYTGKYTVPVLWDKKLKTVVNNESAEIIRMFNTEFNHIAGNPDLDLYPSHLQAKIDETNEWIYNGINNGVYRCGFAKKQGPYEEAVEQVYEALDRCEEILGKHRYICGNTLTETDIRLFVTLIRFDEVSSYFQSKKKKYTICERISNVETLIQVYAVHFKCNKKLIREYPNLFNYTKDIFQIPGMSSTVNMNHIKQHYYGSHPSINPFGIIPHGPNIDYTSPHDRHRFSK

SEQ ID NO: 41372 - protein, 167 aa, Listeria monocytogenes
ARGAGAHGKFVTKKSMKKYTMAKFLQEEGTETEVFARFSTVIHGQHSPETLRDPRGFSVKFYTEEGNYDFVGNNLPVFFIRDAIKFPDVIHSLKPDPRTNIQDGNRYWDFFSLTPEATTMITYLFSDEGTPASYREIRGSSVHAFKWINEAGKTVYVKLRWVPKAGI

SEQ ID NO: 41373 - protein, 301 aa, Arabidopsis lyrata subsp. petraea
SDSPITCIVYDAFMPWALDVAREFGLVATPFFTQPCAVNYVYYLSYINNGSLKLPIEDLPFLELQDLPSFFSVSGSYPAYFDMVLQQFINFEKADFVLVNSFQELELHENALWSKACPVLTIGPTIPSIYLDQRIESDTDYDLNLIESKDDSFCTNWLDTRPQGSVVYVAFGSMAQLTNEQMEELASAVSNFSFLWVVRSSEEAKLPSGFLDTVNKDKSLVLKWSPQLQVLSNKAIGCFLTHCGWNSTMEALTFGVPMVAMPQWTDQPMNAKYIQDVWKAGVRVKTEKESGIAKREEIEFS

SEQ ID NO: 41374 - protein, 298 aa, Chromobacterium violaceum ATCC 12472
MAMLFPLLAVLIWAANTIVSKAAAQVLDPAAISIYRWLLAALVLTPFCLPVLRRRMGELKPWLGKLLVLAMLGMVMFQCLAYYAAHSTSATNMGVITALVPLLGLLLNAAVFRQKVAALAWLGVAVSLSGVVYLLGKGDPASLLANGVNTGDALILAGAASYALYGILLRRWAPPFGAWLNLYLQASLAVLLLLPLTLTAQSMAIPAKGIGLVLFAGIGSSLVAAYFWMRGIQKLGSERTAIFMNLLPLFTALLASALLGETIHHYHWLGGGLILLGVALGQGLLRLGGAKRPAFVNK

SEQ ID NO: 41375 - protein, 331 aa, Yersinia enterocolitica
MSQNTLKVNELHEDADFDENSTETEIFDEKALVEDEPTESELAEDELLAQGVTSGADATQLYLGEIGYSPLLTAEEEVYFARRALRGDVPSRRRMIESNLRLVVKIARRYSNRGLALLDLIEEGNLGLIRAVEKFDPERGFRFSTYATWWIRQTIERAIMNQTRTIRLPIHIVKELNVYLRTARELSHKLDHEPSAEEIAEQLDKPVDDVSRMLRLNERITSVDTPLGGDSEKALLDILSDENENGPEDTTQDDDMKQSIVKWLFELNAKQREVLARRFGLLGYEAATLEDVGREIGLTRERVRQIQVEGLRRLREILQAQGLSIEALFRE

SEQ ID NO: 41376 - protein, 471 aa, Chromobacterium violaceum ATCC 12472
MSKRYRTALVWLRRDLRLDDHAAFYHALKHSEAVLPVFVFDASILAALPRDDRRVDFIWQSAAALKAELNQLGGDLLIRHGLPQHEIPRLAAELGAEAVFCNRDYEPAARARDAEVAQRLAEQGVAFRDSKDQVIFETDEVLTGAGKPFSVFTPYKNAWLKKLTPFHLQAYPVRRYLDALMPREPQSMPSLADIGFLPSDLASLPVKAGAAGAEALFADFAGRIERYKAQRDFPGVKGVSYLSVHLRFGTLSIRRLAAYAWHDGGEGAMTWLSELIWRDFYQQVLWHRPDAAKHAFKPEYDALPFPNDPEWFDAWREGRTGYPLVDAAMRQLNRSGYMHNRLRMVAASFLVKDLLIDWRWGEQYFAEKLLDFDLAANNGGWQWAASTGCDAQPYFRIFNPVSQSEKFDPDGRFIRRYVPELAALPDKLIHAPWQAKPEQLMSAGVRLGRDYPHPIVDHAVQRELALALFKR

SEQ ID NO: 41377 - protein, 399 aa, Capsicum annuum
MEGTSSIDQESTTSDSLSIAPAASSSMVVKQQPSMTTTKPPESLCRMGSGTSSVIIDGENGVEAESRKLPSSKYKGVVPQPNGRWGAQIYEKHQRVWLGTFNEENEAARAYDVAAQRFRGRDAVTNFKPLLENQESDDDVEIAFLNSHSKAEIVDMLRKHTYIDELEQSKKLFGYTKDGTMAKNKDGLIDISSFFGGGGTIDKVNNKVREQLFEKAVTPSDVGKLNRLVIPKQHAEKHFPLQNGNNSKGVLLNFEDLNGKVWRFRYSYWNSSQSYVLTKGWSRFVKEKNLKAGDIVSFQRSTSGDKQLYIDFKARNMAPTNPVVTNQVQAQVQVPRVQMMRLFGVNICKIPATINNVVDNNNNNNNNMANCSGGKRMMEMELLTFESCRKKQRVIIDAL

SEQ ID NO: 41378 - protein, 390 aa, Burkholderia sp. 383
MSETKDAAAPAAAGAFKPKKSVALSGVTAGNTALCTVGKTGNDLHYRGYDILDVAESCEFEEIAHLLVHGTLPNLTELAAYKNKLRALRGLPNALKAALEQIPASAHPMDVMRTGVSVLGTVLPEKDDHNLPGARDIADRLMASLGSMLLYWYHFSHNGKRIETETDDDSIGGHFLHLLHGKTPSKSWVEAMHTSLILYAEHEFNASTFTGRVIAGTGSDIYSAITGAIGALRGPKHGGANEVAYEIQSRYSSPDDAEADIRRRVENKEVVIGFGHPVYTISDPRNKVIKGVAHKLSKEAGDLKLYNIAERLESVMWDAKKMFPNLDWFSAVSYHMMGVPTAMFTPLFVISRTSGWSAHIMEQRIDNKIIRPSANYTGPEDLQFVPIEKR

SEQ ID NO: 41379 - protein, 379 aa, Oceanobacillus iheyensis HTE831
MENLYHSLDSLYEEIVQIRRHLHQHPELSFQEVHTPKYIAEYHEKLGHRVRTNVGGNGVVAYLQGGKPGPTVAMRADFDALPIKEETGLPFQSQNEGVMHACGHDAHTATLLGLAKALNGMKEELEGTVVFIHQHAEEVIPGGAKLMIEDGCLDGVDVIFGTHIQAQTPLGEVNYRVGPLQAAADFFEIDIQGKGGHGAYPHQTKDSIVIGSQLVNNLQQIVSRKVDPLHSAVVSVGSFEAINANNVIADTAELKGTVRTFDEGVRDLIEAEMERVVSATCELANAKGVLHYRRGYPSLVTHEKETLFVANLAEGIPGVEVVQESPQVMGGEDFSYYLQQVKGTFFFTGAEINGRKSPIHIIILNLILMKEDYLLQQKC

SEQ ID NO: 41380 - protein, 540 aa, Azoarcus sp. EbN1
MNLSQALLTALRDHGAREIFGIPGDFALPFFKIIEESGILPLHTLSHEPGVGFAADATARYRCCLGVAAVTYGAGALNMVNPVAGAYAEKSPVVVISGAPGAGESHSGLLLHHQAKTLDSQFEIYREITCDQARLTDARSAPREIARVLASCLRESRPVYIELPRDMVGVPCEPVIPLVPPASDREVLSACVDEILVRLRSAASPVLMVGVEVRRFGLEAKAAELARRLGVPVVTSILGRGLLAGTDAPLVGTYLGVAGQQQVTDLVEQSDALLLLGVIISDTNFGVSSKQIDLRKTIQALDRRVTLGYHTYPEVPLAALVDALLERLDKKIAPAMRFDPPHYPRGLQADDASITPNDIALAINDLMDTHGRMPIAADVGDCLFTAMDIEPTALVAPGYYATMGFGVPAGLGLQAASGVRPLILVGDGAFQMTGWELGNCRRYGWDPIVIVFNNSSWEMLRTFQPESAFNNLDDWRFAAMADGLGGDGARVGTRAELKAALDHALATRGRFQLIEAIIPRGVLSDTLSRFVAGVKRLSQK

SEQ ID NO: 41381 - protein, 326 aa, Lycopersicon esculentum
SGNGQSCYNQQQQKNPPQQQTQGFFTRELNFSEFGFDGSSNRNGNSSVSCKPESGEILNFGDSTKKSASSANVNLFTGQSQFWGLGEENNNKNQEKISYFRGSNEEGMLSFVSGTVCFFGHEVRWRRRQDSEHSDLEASVVKEADSSRVVEPEKRPRKRGRKPANGREEPLNHVEAERQRREKLNQRFFSLRAVVPNVSKMDKASLLGDAISYINELKSKLQNTESDKEDLKSQIEDLKKESRRPGPPPPPNQDLKMSSHTGGKIVDVDIDVKIIGWDAMIRIQCNKKNHPAKANGSAHGIRPRRASCQCFSCQRFDDPTSHSENG

SEQ ID NO: 41382 - protein, 154 aa, Lupinus luteus
MGVLTDVQVALVKSSFEEFNANIPKNTHRFFTLVLEIAPGAKDLFSFLKGSSEVPQNNPDLQAHAGKVFKLTYEAAIQLQVNGAVASDATLKSLGSVHVSKGVVDAHFPVVKEAILKTIKGVVGDKWSEELNTAWTIAYDELAIIIKKEMKDAA

SEQ ID NO: 41383 - protein, 853 aa, Serratia sp.
MKFGFIAHPTSVGLKRYVKMIDLLQRNSTELHSGYKRDLWRRENLVPFMNFAKITSATGATCEGVIKYMPLVADEMLADARGIANRVVSGIEELVEDGAELVGLGGFTSIVGRRGEATAEKSPVPVTSGNSLTTYAGYKALMQIQSWLDIQPEQEPVAIVGYPGSICLALSRLLLAQGFSLHLLHRAGHKDEDELLSHLPEQYRSRVTLTSDPEDLYPRCKLFVAATSAGGVIDPYKLQPGSVFIDVALPRDINSDTRPDRDDILIIDGGCVTATDAVKLGGESLNVTIKQQLNGCMAETIVLALENRRENFSLGRYLALDNVLEIGELAEKHGFLVYPLASYGERIDRQRVINLKRYYHHDIYSDEPDTEQPPASQLAFIDAIIAQDPAREDTLDRYHQFINPMMVEFLKLQHCDNVFRRASGTQLFTADGEAFLDMVAGYGCINLGHNPQPIIDALKAYLDAQGPNFIQYISIPEQAAKLAEVLCHFAPGNMGRVFFSNSGTEAVEAAMKLAKASTGKAGIAYLKNSYHGKTLGALSITGREKHRRHFKPLLASMIEVPFADIEALRQTLSRDDIGALMIEPIQGEGGVHVPPPGYLRTVQEICRQTDTLLMVDEVQTGLGRTGKLFACEWEGIEPDVLMLSKSLSGGVMPIGATLCRAIFGNGPYGTADRFLMHSSTFGGGNIAAVVALSALREILAQDLVGNAERLGTYFKQALTDVAARYPFVAEIAGRGLMLGIQFDQTFAGAVGASAREFATRLPGDWHTTWKFLPDPVQAHLKAAMERMEQSLGEMFCMKFVTKLCQDHNILTFITANSSTVIRIQPPLTISKAEIDRFVSAFATVCDELSTFLE

SEQ ID NO: 41384 - protein, 1032 aa, Glycine max
MTDITGDIAEEISFQSFDDDCRLLGNLLNDILQREVGTNLLDKIERTRVLAQSGCNMRQAGIVNMAEMLEKQLASELSKMTLEEAFTLARAFSHYLTLMGIAETHHRVRKGGNMAQIAKSCDDIFNQLVQGGVPPEELYDTVCKREVEIVLTAHPTQINRRTLQFKHIRIAHLLDYNDRPDLSTEDREMVIEDLVREITSIWQTDELRRQKPTPVDEARAGFNIVEQSLWKAVPHYLRRVSNALKKHTGKPLPLTCTPIKFGSWMGGDRDGNPNVTAKVTKDVSLLSRWMAIDLYIREVDSLRFELSMNQCSDRLSRLAHEILEAKHENRRENWNQSANRSLTLPTQLPARAHLPSIAENGESRHPRLDIPAPDYMQSNHKDGGVSVSSTTSKLANPNTRLPGTSSANSSASSAALGQKKLYAESQTGKSTFQKLLEPMLPQLPGIAPYRIVLGNVKDKLEKSRRRLEILLEDVACDYDPLDYYETSDQLLEPLLLCYESLQSCGSGVLADGRLADLIRRVATFGMVLMKLDLRQESGRHAEALDAITQYLDMGTYSEWDEEKKLDFLTRELKGKRPLVPVSIEVHPDVKEVLDTFRIAAELGSDSLGAYVISMASNASDVLAVELLQKDARLAAIGELGKACPGGTLRVVPLFETVKDLRGAGSVIRKLLSIDWYHEHIVKNHNGHQEVMVGYSDSGKDAGRFTAAWELYKAQEDVVAACNDYGIKVTLFHGRGGSIGRGGGPTYLAIQSQPPGSVMGTLRSTEQGEMVEAKFGLPQIAVRQLEIYTTAVLLATLRPPIPPREEKWRNVMEEISNISCQCDRNVVYENPEFLAYFHEATPEAELGFLNIGSRPTRRKSSVGIGHLRAIPWLFAWTQTRFVLPAWLGVGAGLKGACEKGYTEELKAMYKEWPFFQSTIDLIEMVLGKADIPIAKHYDEVLVTKERQELGHELRSELMTAEKFVMVISGHEKLQQNNRSLRRLIENRLPFLNPLNMLQVEILKRLRRDDDNRKIRDALLITINGIAAGMKNTG

SEQ ID NO: 41385 - protein, 671 aa, Listeria monocytogenes str. 1/2a F6854
MKKTLDRQAVDTIRSLSIDMIEKANSGHPGMPMGAAPMAYMLFAKHLVFNPANPEWFNRDRFVLSAGHGSALLYSMLHLFGYDVKMEDLKQFRQLDSLTPGHPEFGWTAGVDATSGPLGQGIGMAAGMALAESHLAAEYNQPNYPIVDHYTYAICGDGDLMEGVASETASLAGHLGLGKLIVLYDSNDICLDGDLSATFSENAADRFRAYGWQVLRVEDGNNLAAIQEKIVQAKLETSKPTLIEVKTVIGYGAPTKAGSSASHGAPLGEKEANGAKEHYEWAEEPFTVPAEVRDYLRNYKARGEKLEGAWNTMLANYKKEFPELASQLDRVLAGEVAADWNANLPTFEAGTNVATRSASGKMINAIAAELPELFGGSADLGCSNKTFIDASPAYSIQDPAGKNIWFGVREFAMGAMLNGMALHSGLRVFGSTFFVFSDYVRPAMRMAALMQLPVTYVFTHDSIAVGEDGPTHEPIEQLASLRAMPGLTVIRPADAKETRAAWEIAATNTNGPIALVLSRQDLPVLENDQEEVDAGIEKGAYIVAPANSSKPDAIIIATGSEVSLAIEAKAELAKKDIDVSVVSLSSWERFEKTTDTYKESILPKEVTARFAIEAGATFGWKEFIGSEGDMLGIDHFGASAPAKDLFNAYGFTPENVADRVEAVIAKAGVRV

SEQ ID NO: 41386 - protein, 94 aa, Bacillus anthracis str. A2012
MLKPLGDRVVIELVQAEEKTASGIVLPDTAKEKPQEGKVIAVGTGRVLENGERVALEVAAGDLIIFSKYAGTEVKYEGTDYLILRESDILAVIG

SEQ ID NO: 41387 - protein, 343 aa, Listeria monocytogenes str. 1/2a F6854
MKAVVKTNPGYDQMELKDVEEPQVYGDKVKIKVAFTGICGSDIHTFKGEYKNPTTPVTLGHEFSGVVVEVGPDVTSIKVGDRVTSETTFETCGECIYCKEHDYNLCSNRRGIGTQANGSFAEFVLSREESCHVLDERISLEAAALTEPLACCVHSALEKTTIRPDDTVLVFGPGPIGLLLAQVVKAQGATVIMAGITKDSDRLRLAKELGMDRIVDTLKEDLAEVVLGMTGGYGAERVFDCSGAVPAVNQGLPLTKKKGDFVQVGLFAEKKNAIDEESIIQREIAYIGSRSQKPSSWILALDLLANGKINTDKMITKVYGLDDWREAFEAVMAGNEIKVLVKS

SEQ ID NO: 41388 - protein, 350 aa, Listeria monocytogenes str. 1/2a F6854
MRAAVLYENNVIKAEQIDEATCGKDQVRVEVKAVGICGSDIHKMQTRWKYPLPAVMGHEFAGVVTEIGSEVTNVAIGDRVAGIPLEPCMECNYCKAGDFALCDNYRMVGSHFHGGFAENVVMKADNVISIGDLDFEEGAMIEPLAVSMHGVLGIQPRLGDTVIVFGIGTIGILVVQCLLLAGVKDIIAVDISDKKLADAREFGCKYTINPKNEDLKERVFAYTNGLGADIALECAGSKITQEQCLLVTKKKGKVGFLGIAYADVLLHEEAFENIFRRELTLKGFWNSYSAPFPGEEWRTSIEFVKQGRIKLKPLISHRYKLEETKEAFDMILSREHDYNKVMILPQKGDD

SEQ ID NO: 41389 - protein, 167 aa, Listeria monocytogenes
ARGAGAHGKFVTKKSMKKYTMAKFLQEEGTETEVFARFSTVIHGQHSPETLRDPRGFSVKFYTEEGNYDFVGNNLPVFFIRDAIKFPDVIHSLKPDPRTNIQDGNRYWDFFSLTPEATTMIMYLFSDEGTPASYREIRGSSVHAFKWINEEGKTVYVKLRWIPKAGI

SEQ ID NO: 41390 - protein, 134 aa, Aspergillus niger
DTAGQEDYDRLRPLSYPQTDVFLVCFSVTSPASFENVREKWFPEVHHHCPGVPCLIVGTQTDLRDDPAVREKLARQKMQPIRKEDGDRMAKELGAVKYVECSALTQYKLKDVFDEAIVAALEPAPKKSKKCVLL

SEQ ID NO: 41391 - protein, 478 aa, Streptomyces avermitilis MA-4680
MENMNTPDVIVIGGGTGGYSAALRAAALGLTVVLAERDKVGGTCLHRGCIPSKAMLHAAELVDGIAEARERWGVKATLDDIDWPALVATRDDIVTRNHRGVEAHLAHARVRVVRGSARLTGPRSVRVEGAPDDLPGGAGDFTARRGIVLATGSRPRTLPGLVPDGRRVVTSDDALFAPGLPRSVLVLGGGAIGVEYASFHRSMGAEVTLVEAADRIVPLEDVDVSRHLTRGLKKRGIDVRAGARLLDAELLEAGVRARVRTVRGEIRTLEAERLLVAVGRAPVTDGLDLAAAGLATDERGFVTPSDWDRLETAVPGIHVVGDLLPPPSLGLAHASFAEGLSVAETLAGLPSAPVDYAAVPRVTYSSPQTASVGLGEAEARARGHEVDVNTMPLTAVAKGMVHGRGGMVKVVAEEGGGQVLGVHLVGPHVSEMIAESQLIVGWDAQPSDVARHIHAHPTLSEAVGETFLTLAGRGLHQQ

SEQ ID NO: 41392 - protein, 167 aa, Listeria monocytogenes
ARGAGAHGKFVTKKSMKKYTMAKFLQEEGTETEVFARFSTVIHGQHSPETLRDPRGFSVKFYTEEGNYDFVGNNLPVFFIRDAIKFPDVIHSLKPDPRTNIQDGNRYWDFFSLTPEATTMIMYLFSDEGTPASYREVRGSSVHAFKWINEEGKTVYVKLRWVPKAGI

SEQ ID NO: 41393 - protein, 210 aa, Arabidopsis thaliana
  misc_feature (73)..(73): Xaa can be any naturally occurring amino acid
  misc_feature (75)..(75): Xaa can be any naturally occurring amino acid
  misc_feature (77)..(77): Xaa can be any naturally occurring amino acid
  misc_feature (85)..(85): Xaa can be any naturally occurring amino acid
  misc_feature (93)..(93): Xaa can be any naturally occurring amino acid
  unsure (1)..(210): unsure at all Xaa locations
MLAPSDPRARGYWGECGQLGGYFEMTNLPPRVVEERDGVASIALSPNVSAQIFLSQSDYFPLLMGLMVNPPKXGXFXYGQFAREXKGVLESLXRKARLMPDGFTSCKNVVCNFTEGAMYSFPQKRLPTGALQAAKQAGKVPDVFYCLKLLEATGISPVPGSGFGQKEGVFHLRTTILPAEDKMPEIMYSFKKFNDEFMTQYDNNFGYSKM

SEQ ID NO: 41394 - protein, 509 aa, Candida albicans SC5314
MITKRLYSTIESSKKVLGTLSNPNLVKTEAYINGKWVPSSSGETFTVTNPALYPNPESELATMQSMSEEDFNSAIESADIAFNKFKKTTGRYRSELLLKLYNLMISNKDDLAKLVVLENGKPYADALGEVNYAASFFQWFSEEAPRIYGDIIPSANGTNRILTFKQPIGVCGILTPWNFPLAMITRKLGAAIATGCTAVIKPASETPLSATALAFLAEEAGFPPGVINVLPSADASGSGKYLTEHPLIKKVSFTGSTPVGKILMNQSASTLKKLSFELGGNAPFIAFDDVDVDKAVNGAIASKFRSSGQTCVCANRIFVHEKIYDEFAKKFVDKLKNETVLGNPLASGVTHGPVIHDRSMKKVRQHIEDAVDKGATILLGGSKRPDLGENFHDLTVLGDVTTEMLITQEETFGPVAPLIKFKTDDEVIKMANDTTVGLAGYFYANDVAKVFKIAEALNVGMLGVNTGAISEAALPFGGVGESGFGREGSKFGVEDYLVIKSAVLGGIEN

SEQ ID NO: 41395 - protein, 602 aa, Zea mays
  misc_feature (463)..(463): Xaa can be any naturally occurring amino acid
  unsure (1)..(602): unsure at all Xaa locations
TLWTRVNNTVANRITWPRGPHRSVPPVPVGVAVAAATVATAVAAATTTVAAAATTVAAATAVAAAAITAPATAVAAKVSSPSVIGTAMPSLDFETSVFKKEKVSLAGHEEYIVRGGRDLFPLLPEAFKGIKQIGVIGWGSQGPAQAQNLRDSLVEAKSDIVVKIGLRKGSKSFEEARAAGFTEESGTLGDIWETVSNSDLVLLLISDSAQADNYEKIFSHMKPNSILGLSHGFLLGHLQSLGFDFPKSISVIAVCPKGMGPSVRRLYVQGKEINGAGINASFAVHQDVDGRATDVALGWSVALGSPFTFATTLEQEYRSDIFGERGILLGAVHGMVEALFRRYTEQGMDEDSAYKNTVESITGIISKTISKKGMLEVYNSLTEEGKKQFIEAYSAAYYPCMDILYECYEDVSSGSEIRSVVLAGRRFYEKEGLPAFPMGKIDQTRMWKVGERVRSTRPQGDLXGPLHPFTAGVYVALMMAQIEVLRKKGHSYSEIINESLIESVDSLNPFMHARGVAFMVDNCSTTARLGSRKWAPRFDYILTQQAFVTVDKKAPINQDLISNFMSDPVHGAIEVCAQLRPTVDISVTADADFVRPELRQSS

SEQ ID NO: 41396 - protein, 463 aa, Oceanobacillus iheyensis HTE831
MIQDKKISSKFIYFFGAFGGILFGYDIGVMTGALPFLQSDWNLQNDPTAIGWITSSLMLGAIFGGALSGQLSDRIGRRKMILIASIIFALGSIMAGISPHNGILFMIVSRIILGLAVGAASALVPAYMSEMAPARLRGRLSGINQTMIVSGMLLSYIVAFVLKDLPETMAWRLMLSLAAVPALILFFGVLRLPESPRFLIKNNKINEARKVLSYIRPKEKIESEISQIQASTKYEEKASQKTSWGTLLSGKYRYLVIAGLGVAAFQQFQGANAIFYYIPLIVENATGNAASSALMWPIIQGIILVLGSLLFLLIADKFNRRTLLTLGGTVMGLSFILPAILNIVIPNASPMMIVVFLSIYVAFYSFTWAPLTWVIVGEIFPLVIRGRSSGLASSFNWIGSFLVGLLFPVMVASMAQEAVFAIFGAICLLGVLFVRLCVPETRGRSLEEIEKIGESKQLHKKTV

SEQ ID NO: 41397 - protein, 682 aa, Medicago truncatula
MLQTLIPFLLFFFVPVLSQVDQLLYTGFKDVGPKNLTLNGIAEIEKNGIIRLTNETSRLLGHAFYPQPFQIKNKTTGKVFSFSSSFALACVPEYPKLGGHGMAFTIVPSKDLKALPSQYLGLLNSSDVGNFSNHLFAVEFDTVQDFEFGDINYNHVGIDINSMRSNATITAGYYSDDDMVHNISIKGGKPILVWVDYDSSLELISVTLSPTSNKPKKPILTFHMDLSPLFLDTMYVGFSASTGLLASSHYVLGWSFKINGPAPFLDLSKLPKLPHPKKKHTSLILGLSLGSALIVLCSMAFGFYIYRKIKNADVIEAWELEVGPHRYTYQELKKATKGFKEKQLLGQGGFGKVYNGILPKSKIQVAVKRVSHESKQGLREFVSEIASIGRLRHRNLVMLLGWCRRRGDLLLVYDYMANGSLDKYLFEDSEYVLSWEQRFKIIKGVASGLLYLHEGYEQVVIHRDVKASNVLLDFELNGRLGDFGLARLYEHGANPGTTRVVGTLGYLAPELPRTGRATTSSDVFAFGALLLEVVCGRRPIEPKASQDELVLVDWVWERFKEGRAFEVVDPKLNGDFVETEVMMVLKLGLICSNDVPTIRPSMRQVVRILDGEVELPNEMRKPGGIDSQEGFDEFLNSLGTSNSFDQMSSSSYNGKRDIDNTSFITFGNSPQSSLLNARGETR

SEQ ID NO: 41398 - protein, 480 aa, Neisseria meningitidis MC58
MKQLAMYINGRFENDFNGEWRDVLNPSTEEAIAREPKGGKADVDRAVAAARAAQPAWERLPAVERGAYLRKIAQGIRERADELTDTIVAEGGKTKDLARVEVMFTADYLDYQAEWARRYEGEIIQSDRPRENILLFKRPLGVIAGILPWNFPFFLIARKMGPALVTGNTIVVKPSSVTPINCHIFAEIVDAVGLPAGVFNVVNGPGAEIGNALSAHPQVDMVSLTGSVEAGRQVMEAASANITKVSLELGGKAPAIVLKDADLDLAVKSILASRVGNTGQICNCAERVYVHSSLKDAFIEKMTAAMKGVRYGNPAEAEAGALEMGPLIEERAVKAVAEKVERAVKQGAKLVCGGKRAEGRGYFFEPTLLTDTDNSMDIMKEETFGPVLPVSAFDTLDQVIALANDCEFGLTSSVYTTNLNEAFYVTRRLQFGETYINRENFEAMQGFHAGWKKSGIGGADGKHGLEEYLQTQVVYLETDI

SEQ ID NO: 41399 - protein, 301 aa, Arabidopsis halleri
SDSPITCIVYDAFMPWALDIAREFGLLGTPFFTQPCAVNYVYYLSYINNGSLKLPIEDLPFLELQDLPSFFSVSGSYPAYFEMVLQQFTNFEKSDFVLVNSFQELELHENALWSKACPVLTIGPTIPSIYLDQRIKSDTDYDLNLFESKDDSFCTNWLDTRPQGSVVYVAFGSMAQLTNEQMEELASAVNNFSFLWVVRSSEEAKLPPGFLDTVNKDKSLVLKWSPQLQVLSNKAIGCFLTHCGWNSTMEALTFGVPMVAMPQWTDQPMNAKYIQDVWKAGVRVKTEKESGIAKREEIEFS

SEQ ID NO: 41400 - protein, 608 aa, Ipomoea batatas
MATITASHFVSHVCGGATSGESKVGLGQLALRSQAVTHNGLRPVNKIDMLQLRTSARNLAKMEGKMRVEWQAGTIVCKQQGMNLVFVGCEEGPWCKTGGLGDVLGGLPPALAARGHRVMTVCPRYDQYKDAWETCVVVEPQVGDRIEPVRFFHSYKRGVDRVFVDHPMFLEKVWGKTGSMLYGPKAGKDYKDNQLRFSLLCQAALEAPRVLNLNSSKYFSGPYGEDVVFVANDWHTALLPCYLKTMYQSRGIYMNAKVAFCIHNIAYQGRFAFSDFSLLNLPDEYKGSFDFIDGYDKPVKGRKINWMKAGIREADRVFTVSPNYAKELVSCVSKGVELDNHIRDCGITGICNGMDTQEWNPATDKYLAVKYDITTVMQAKPLLKEALQAAVGLPVDRNIPLIGFIGRLEEQKGSDILYAAISKFISMDVQILILGTGKKKFEQQIEQLEVMYPDKARGVAKFNVPLAHMITAGADFMLIPSRFEPCGLIQLHAMRYGTPCICASTGGLVDTVKEGYTGFHMGAFNVDCETVDPEDVLKVITTVGRALAIYGTLAFTEMIKNCMSQELSWKGPAKNWETVLLSLGVAGSEPGVEGEEIAPLAKENVATP

SEQ ID NO: 41401 - protein, 205 aa, Arabidopsis thaliana
MRVFELIGSNEQFAEMFNRTMSEASTLIMKKVLEVYKGFEDVNTLVDVGGGIGTIIGQVTSKYPHIKGINFDLASVLAHAPFNKGVEHVSGDMFKEIPKGDAIFMKWILHDWTDEDCVKILKNYWKSLPEKGKVIIVEVVTPEEPKINDISSNIVFGMDMLMLAVSSGGKERSLSQFETLASDSGFLRCEIICHAFSYSVIELHK

SEQ ID NO: 41402 - protein, 568 aa, Zymomonas mobilis
MSYTVGTYLAERLVQIGLKHHFAVAGDYNLVLLDNLLLNKNMEQVYCCNELNCGFSAEGYARAKGAAAAVVTYSVGALSAFDAIGGAYAENLPVILISGAPNNNDHAAGHVLHHALGKTDYHYQLEMAKNITAAAEAIYTPEEAPAKIDHVIKTALREKKPVYLEIACNIASMPCAAPGPASALFNDEASDEASLNAAVDETLKFIANRDKVAVLVGSKLRAAGAEEAAVKFTDALGGAVATMAAAKSFFPEENALYIGTSWGEVSYPGVEKTMKEADAVIALAPVFNDYSTTGWTDIPDPKKLVLAEPRSVVVNGIRFPSVHLKDYLTRLAQKVSKKTGSLDFFKSLNAGELKKAAPADPSAPLVNAEIARQVEALLTPNTTVIAETGDSWFNAQRMKLPNGARVEYEMQWGHIGWSVPAAFGYAVGAPERRNILMVGDGSFQLTAQEVAQMVRLKLPVIIFLINNYGYTIEVMIHDGPYNNIKNWDYAGLMEVFNGNGGYDSGAAKGLKAKTGGELAEAIKVALANTDGPTLIECFIGREDCTEELVKWGKRVAAANSRKPVNKVV

SEQ ID NO: 41403 - protein, 205 aa, Magnaporthe grisea
MSSRKKVLLKVIILGDSGVGKTSLMNQYVNKKFSASYKATIGADFLTREVLVDDRQVTMQLWDTAGQERIQSLGVAFYRGADCCVLVFDVNNSKSFDALDSWRDEFLIQASPRDPDNFPFVVLGNKIDVEESKRVISTKRAMTFCQSKGGIPYFETSAKEAINVEQAFEVIARNALAQEESEEFSGDFQDPINIHIDNDRDGCAC

SEQ ID NO: 41404 - protein, 449 aa, Arabidopsis thaliana
MEEKLSRRRRVVLVPVPAQGHITPMIQLAKALHSKGFSITVVQTKFNYLNPSNDLSDFQFVTIPENLPVSDLKNLGPGRFLIKLANECYVSFKDLLGQLLVNEEEEIACVIYDEFMYFVEVAVKEFKLRNVILSTTSATAFVCRFVMCELYAKDGLAQLKEGGEREVELVPELYPIRYKDLPSSVFASVESSVELFKNTCYKGTASSVIINTVRCLEMSSLEWLQQELEIPVYSIGPLHMVVSAPPTSLLEENESCIEWLNKQKPSSVIYISLGSFTLMETKEMLEMAYGFVSSNQHFLWVIRPGSICGSEISEEELLKKMVITDRGYIVKWAPQKQVLAHSAVGAFWSHCGWNSTLESLGEGVPLICRPFTTDQKGNARYLECVWKVGIQVEGELERGAIERAVKRLMVDEEGEEMKRRALSLKEKLKASVLAQGSSHKSLDDFIKTL

SEQ ID NO: 41405 - protein, 461 aa, Fusobacterium nucleatum subsp. vincentii ATCC 49256
MKVLFATGEAFPFVKTGGLGDVSYSLPKALVQKEKVDVRVILPKYSKISKDLLKDAKHLGHKEIWVAHHNEYVGIEEVELEGVIYYLVDNERYFKRPNVYGEFDDCERFLFFCKAVVETMDITGFKPDIIHCNDWQTALIPIYLKERGIYDIKTIFTIHNLRFQGFFFNNVIEDLLEIDRAKYFQEDGLKYYDMISFLKGGVVYSDYVTTVSDSYAEEIKTSELGEGIHGLFQKYDYRLSGIVNGIDKSSYPLFKKSHKTLKADLQKKLGLNVEENTPMVAIITRLDRQKGLDYIVEKFDEMMSLGIQFVLLGTGEKRYEHFFAYQEYLHKGSVCSYIGFNQQLSTEIYAGADIFLMPSVFEPCGLSQMIAMRYGCIPVVRETGGLKDTVKPYNEYTGEGDGFGFRQANADDMIKTLRYAIKMYHRTNVWQEIIKNAKKRDNSWDKPAKRYKELYQRLIEG

SEQ ID NO: 41406 - protein, 221 aa, Prunus dulcis
MGRGKIEIKRIENTTNRQVTFCKRRNGLLKKAYELSILCDAEVALIVFSSRGRLYEYSNNNIRNTIEGYKKACSDSSGSTSITEINAQYYQQESAKLRQQIQMLQNSNRHLMGDALSTLSVKELKQLENRLERGINRIRSKKHEMLLAEIEYLQKKEIELENENVCLRTKISEVERLQQANMVGPELNAIQALASRNFFSQNMMEGGATYPQQDKKILHLG

SEQ ID NO: 41407 - protein, 388 aa, Fusobacterium nucleatum subsp. vincentii ATCC 49256
MVRNYMAIIYLAENKENISPLTKVRALASIPVGGSYRIIDFSLSNVVNAGIRNVGLFCGNEELNSLTDHIGMGAEWDLARKKDGIFIFKQMLDSNFSLNQSRIRKNMEYFFRSTQKNIVVLNAHMVYNLDIADLIEKHEASEKEITMVYKKVKNANEHFNHCSSVKIDENNRVIGIGQNLFFKEEENISLDAFVLSKELMLKLLVDSIQEGKYNILSEIIARNLPSLNINAYEFKGYLQCINSTREYFDFNMNLLNQEVRDDVFGLKSGRKILTKVKDTPSTFFKETADVENSLVSNGCIIEGTVKNSILSRGAIIEKDVVLEECVILQDCHIKKGAHLKNVIVDKNNIIHENEKLSASREYPLVIEKSMKWNTKQYQDLMDYIRNKE

SEQ ID NO: 41408 - protein, 177 aa, Lactobacillus delbrueckii subsp. lactis
TVDLYRNADVKVGAFLSEGVDSSFLTALLDPDEVFSIGFDDSTYDEASKAKALADINGWHFYADKVYSEEAMRDFPEMQYHMDEPDANPSIIPLWYLCKLARKHVTVALSGEGADELFAGYVNYGMHTHNNVIKVFTDKLKKLPKGKRVKLAHKIKKMPNFPGKVHLYTNLAEPSEF

SEQ ID NO: 41409 - protein, 384 aa, Fusobacterium nucleatum subsp. vincentii ATCC 49256
MRMKKKRIIAMILAGGQGTRLKELTEDLAKPAVAFGGKYRIIDFTLTNCSNSGIDTVGVLTQYEPRILNNHIGRGSPWDLDRMDGGVTVLQPHTRKNDKKGWYKGTANAIYQNIKFIEEYDPEYVLILSGDHIYKMNYNKMLQFHIQKEADVTIGVFKVPLKDAPSFGIMNTNDDMSIYEFEEKPKEPKSDLASMGIYIFNWDLLKEYLDEDEKNPNSDNDFGKNIIPNMLNDGRKLFAYPFKGYWRDVGTIQSFWDAHMDLLSEDNELDLFDKSWRVNTRQGIYTPSYFEKGSKVQNTIIDKGCLIEGEIKHSVIFSGVKVGKNTKIIDSIIMADTEIGNNVTIRKAIIANNVKITDNINIGDGEKIAVVGEKKIIDSQSLVK

SEQ ID NO: 41410 - protein, 554 aa, Xylella fastidiosa Ann-1
MTPLIFVTGGVVSSLGKGIAAASLASILEARGLKVTMVKLDPYINVDPGTMSPFQHGEVYVTDDGAETDLDLGHYERFVRTRLSRKNSVTTGRIYQNVICKERRGDYLGATVQVIPHITDEIRRCIDEATASFDVALVEIGGTVGDIESLPFLEAIRQVRIERGAERTMFMHLTLVPYIAAAGELKTKPTQHSVKELRSIGIQPDVLLCRSEQVIPDSERRKIALFTNVSERAVIGCPDIDVLYGMPLELRRQGLDEIVIDQFKLSGTTSLADLSEWEDVVDAIKHPLDEVTIAVVGKYVDYRDAYKSVGEALKHGGLRQRTKVNLKWVEAQDLEGSDMAALKDIDGILVPGGFGDRGFEGKVLASRYAREQRVPYFGICYGMQAAVVDYARHVAGLEGANSTENDRQSSHPVIALITEWRTTTGEVERRDEKSDLGGTMRLGLQEQRLKAGTLARELYGRDVVGERHRHRYEFNNRYRTQLEDAGLVIAAKSMDDTLVEMIELPREMHPWFLACQAHPEFLSTPRDGHPLFIGFVKASRARKAGGKLLREVCV

SEQ ID NO: 41411 - protein, 199 aa, Aspergillus niger
MATGPATQSLKCVVTGDGAVGKTCLLISYTTNAFPGEYIPTVFDNYTASVMVDGRPISLGLWDTAGQEDYDRLRPLSYPQTDVFLICFSIVSPPSFDNVKAKWFPEIEHHAPNVPIILVGTKLDLRDDRGTIDALRQRKMEPVSYEQALAVAKEIRAHKYLECSALTQRNLKSVFDEAIRAVLNPRPAAKPKNKKCVIL

SEQ ID NO: 41412 - protein, 589 aa, Glycine max
  misc_feature (116)..(116): Xaa can be any naturally occurring amino acid
  unsure (1)..(589): unsure at all Xaa locations
MEPAKTIHNNVKYSPIFLAIFVLILASALSSANAKIHEHEFVVEATPVKRLCKTHNSITVNGQYPGPTLEINNGDTLVVKVTNKARYNVTIHWHGVRQMRTGWADGPEFVTSVPDXPGGSYTYRFTVQGQEGTLWWHAHSSWLRATVYGALIIRPREGEPYPFPKPKRETPILLGEWWDANPIDVVRQATRTGGAPNVSDAYTINGQPGDLYKCSSKDTTIVPIHAGETNLLRVINAALNQPLFFTVANHKLTVVGADASYLKPFTTKVLILGPGQTTDVLITGDQPPSRYYMAARAYQSAQNAAFDNTTTTAILEYKSPNHHNKHSHHRAKGVKNKTKPIMPPLPAYNDTNAVTSFSKSFRSPRKVEVPTEIDQSLFFTVGLGIKKCPKNFGPKRCQGPINGTRFTASMNNVSFVLPNNVSILQAHHLGIPGVFTTDFPGKPPVKFDYTGNVSRSLWQPVPGTKAHKLEFGSRVQIVLQDTSIVTPENHPIHLHGYDFYIVAEGFGNFDPKKDTAKFNLVDPPLRNTVAVPVNGWAVIRFVADNPGAWLLHCHLDVHIGWGLATVLLVENGVGKLQSIEPPPVDLPLC

SEQ ID NO: 41413 - protein, 377 aa, Erwinia carotovora subsp. atroseptica SCRI1043
MKDVRIGLIGTGYIGRAHAIAYAQAPTVFPLKGNLVKAMLAEVSPELAAKRAQEFGFQRSTADWRELVADPDIDVVDICAPNFLHKTMAMAAIQHGKHVYSEKPLALNARDAREMVDAAQRAGVKTLVGFNYMKNPTSQLAKEIIANGEIGEVVHFYGTHNEDYLADPNKHADWHCFKETAGLGALGDLAAHIVNMAQYLVGDIASVCGDLQTVITQRPTALGSSEWVQVENEDQAHAMVRFASGARGVIETSRIACGRKMGLTYVVTGTTGTLSFTQERMAELKLYRHDEPENRQGFKTLLTGPQHPDYAAFCASAGHGIGFNDQKTVEVRDLIDGIAADVPMWPDFEEGWKVSRVLDAIVQSHETARWVNVDEVG

SEQ ID NO: 41414 - protein, 509 aa, Oryza sativa
MSAAAAIASPIPAAIAVVQQQRRGRSRGGGSGAAAVRCSAVAPTSAIAPILADLRLRCAAPLPVLRRVADAMASGMRAGLADDGAGELKMIPSHVYSLPTGNETGLFYALDLGGTNFRVLRVQLGGKDKRIIDTEFEQVSIPREIMHGITEDLFDFIASGLSRFVATEGDKFHLPQGRKRELGFTFSFPVNQTSIDSGILIKWTKGFAVSGTAGKDVVACLNAAMERQGLDMRVSALVNDTVGTLAGARYWDDDVMVAVILGTGTNACYIQRTEAIPKLQHLKLETGNTIINTEWGAFSDGLPLTEFDREMDDESINPGEQIFEKTISGMYLGEIVRRVLVKMAEVSDLFGHSFPKKLAEPFVLRTPHLCAMQQDTSDNLGEVESILSDVIGVSQASLLARRVTVEVSDCIIRRGGRLAGAGIVGILEKMENDSRGHIFGRRTVVAMDGGLYEKYPQYRRYMKEAVAELLGPERSNRIAIEHTKDGSGIGAALLAAANSKYAAAQISTR

SEQ ID NO: 41415 - protein, 634 aa, Erwinia carotovora subsp. atroseptica SCRI1043
MSKEKTFDVICMGRVAVDLYGQQIGARLEDMGSFSKYLGGSSGNVAYGTARQGLRSSMLARVGDEHMGRFLREELNQVGCDTSHLITDKERLTALVLLGIKDRDTFPLIFYRDNCADMAISPEDFTEDYIASSRCLAITGTHLSHPNTRAAVLTALQYARRNGVKTALDIDYRPVLWGLTSLGDGETRFVEAQAVTAQLQQVLSLFDVIVGTEEEFYIAGGSTDTLQALRTVRQHTQAELVCKRGALGCSVFSDAIPDHLDKGITIKGVRVDVLKVLGAGDAFMSGLLRGYLNGEGWEKACAYANACGALVVSRHGCAPAMPSKIELDNYLARAASVPRPDLDEELNHLHRVTTRRKQWDELCVIAFDHRSQLEDMALNCGTEISRIPALKKLILRASYDAAQQAGLEGKAGLLCDGTFGQDALNDITGKGWWIGRPIELPGSRPLIMERGNIGSQLVSWPLEHVVKCLVFFHPEDAHALRREQEMKVMEVYQACRQSGHELLLEVILPAGMPHSDALYLRAIQRFYNLGVRPDWWKLPPLSSDGWEQLTPLLAERDPYCRGVVILGLDAPLETLQQGFSAAVNFPIVKGFAVGRTLFAQPAQKWLRNEIDDAELIEQVKHNYLQLIAVWRQRG

SEQ ID NO: 41416 - protein, 649 aa, Synechococcus elongatus PCC 7942
MTGTALAQPRAITPHEQQLLAKLKSYRDIQSLSQIWGRAASQFGSMPALVAPHAKPAITLSYQELAIQIQAFAAGLLALGVPTSTADDFPPRLAQFADNSPRWLIADQGTLLAGAANAVRGAQAEVSELLYVLEDSGSIGLIVEDAALLKKLQPGLASLSLQFVIVLSDEVVEIDSLRVVGFSDVLEMGRSLPAPEPILQLDRLATLIYTSGTTGPPKGVMLSHGNLLHQVTTLGVVVQPQPGDTVLSILPTWHSYERACEYFLLSQGCTQVYTTLRNVKQDIRQYRPQFMVSVLRLWESIYEGVQKQFREQPAKKRRLIDTFFGLSQRYVLARRRWQGLDLLALNQSPAQRLAEGVRMLALAPLHKLGDRLVYGKVREATGGRIRQVISGGGSLALHLDTFFEIVGVDLLVGYGLTETSPVLTGRRPWHNLRGSAGQPIPGTAIRIVDPETKENRPSGDRGLVLAKGPQIMQGYFNKPEATAKAIDAEGWFDTGDLGYIVGEGNLVLTGRAKDTIVLTNGENIEPQPIEDACLRSSYISQIMLVGQDRKSLGALIVPNQEAIALWASEQGISQTDLQGVVQKLIREELNREVRDRPGYRIDDRIGPFRLIEEPFSMENGQLTQTLKIRRNVVAEHYAAMIDGMFESAS

SEQ ID NO: 41417 - protein, 145 aa, Listeria monocytogenes str. 4b F2365
MDESKKNERLQQLTDIQYNVTQKAGTERPFQNEFYDNEAKGIYVDIVSGKPLFSSNDQYDAGCGWPSFTKPIDEAEVIEHRDLTHGMIRTEVKSADADSHLGHVFPDGPQDKGGLRYCINSAALRFIPVDKLEEEGYQAYKKIFE

SEQ ID NO: 41418 - protein, 177 aa, Listeria monocytogenes str. 4b F2365
MTKESLEKATFAGGCFWCMVKPFDTQPGIEKVISGYTGGHTVNPTYKEVCSGTTGHTEAIQITFDPAVFPYEKLVEVYWQQTDPTDAAGQFVDRGDSYRPVIFYHNEEQKEIAEKSKAALDASGRFKKPIVTEIAKAETFYPAEEYHQDFYKKEKAHYEGYQVASGRAAFIDANWKG

SEQ ID NO: 41419 - protein, 586 aa, Arabidopsis thaliana
MDLDFDDQPSDHAAPAVRAGARFKPKGRPQPKKKQVSLSTTQTTLSPDVAQEKLSTQNALPSETNVPDSGSINKSTIGTLSEENEDAFPRGVHWSVKPSILRACNNVNLVGNRRDDGIEATTSFPDDPRTQDSAIFGDYVTPETGADEGRVDMETLDIVQEEGTTSSYVQHTGKLQPKPRLLETVVEEPEPHYSAGDTGYFPMGTNESEFMANVESRNGFSTYEDLQEEELNIPEAPRETVGEMEAQNASGGWEQEEQGVSPCINNTVTGEEENCMGNTVEEQSKRESKTGKSKRATSRKRKKTSEEPNKSSEKTEQKKFKHSSRRQKRTLEKELLETPDHEIRSLPLRDMLRLVEYKEWMQKKEAKGAGVQPSQESNNMNGSGSQYHSQGFDEEDEFGDFGIESSEYQENNVVKPDSPVNYQTYMNKTSRTRWSKEDTELFYEGIQEFGSNLSMIQQLFPERTREQMKLKFKLEERRNPLKLNDALSSRSKHFTHFKNVIKKLQQEAAAAKEGEEEEEAGAEAETTDVPENEEPEKSEETERASDGVAAGVKESDGGDVENGVRSDGGDECDDDEDFWNSYKSDM

SEQ ID NO: 41420 - protein, 519 aa, Ipomoea nil
MATLTLIFCTLVFAIFLYFLILRVKQRYPLPLPPGPKPWPVLGNLPHLGKKPHQSIAAMAERYGPLMHLRLGFVDVVVAASAAVAAQFLKVHDSNFSNRPPNSGAEHIAYNYQDLVFAPYGPRWRMLRKITSVHLFSAKALDDFCHVRQEEVATLTRSLASAGKTPVKLGQLLNVCTTNALARVMLGRKVFNDGGSKSDPKAEEFKSMVEEMMVLAGSFNIGDFIPVLGWFDVQGIVGKMKKLHARFDAFLNTILEEHKCVNNQHTTLSKDVDFLSTLIRLKDNGADMDCEEGKLTDTEIKALLLNLFTAGTDTSSSTVEWAIAELLRNPKILNQAQQELDLVVGQNQLVTESDLTDLPFLQAIVKETFRLHPSTPLSLPRMGAQGCEINGYFIPKGATLLVNVWAIARDPNVWTNPLEFNPHRFLPGGEKPNVDIKGNDFEVIPFGAGRRICSGMSLGIRMVHLLVATLVHAFDWDLVNGQSVETLNMEEAYGLTLQRAVPLMLHPKPRLQPHLYTLN

SEQ ID NO: 41421 - protein, 292 aa, Hordeum vulgare subsp. vulgare
MARMGASVLSILLASCALAAASFDKEFDVTWGDGRGKILNNGQLLTLGLDKVSGSGFQSKHEYLFGKIDMQLKLVPGNSAGTVTAYYLSSQGPTHDEIDFEFLGNVTGEPYTLHTNVFTQGQGQREQQFRLWFDPTNDFHTYSILWNPKHIIFMVDDMPIRDFKNLEGKGIAFPKNQPMRLYSSLWNADDWATQGARVKTDWSHAPFSASYRGFKADACVVTAGGRPRCGASMGTEAAPGTGASGAAGEWYNQELDLTLQQRMRWVQSNYMIYNYCTDPKRVAKGVPAECSM

SEQ ID NO: 41422 - protein, 853 aa, Serratia marcescens
MKFGFIAHPTSLGLKRYVKMLDLLQRNSTEQHSGYTRELWERQNLVPFMNFARITSATGATCEGVIKYMPLVADEMLADARGIAARVVQGIEELAGDGAELVGLGGLTSIVGRRGEATAEKSPVPVTSGNSLTTYAGYKALMQIQSWLEISPEEEPVAIVGYPGSICLALSRLLLAHGFSLHLLHRAGNHDRSELLSHLPEEYHSRVTLTSDPEDLYPRCKLFAAATSAGGVIDPARLQPGSIFIDVALPRDIASETRPARDDILIIDGGCVTATDAVKLGGESLNVTIKQQLNGCMAETIVLALENRRENFSLGRYLAPEKVLEIGEIAERHGFFAYPLASYGERIDRQSVTNLKRYYHHDIYAGEPADAALPASRLAFIDAVIAQTPAREDTLDRYHQYINPMMVDFLKLQRCDNVFRSAAGTQLYDDAGEAFLDMVAGYGCLNLGHNPQPVVNALKNYLDAQGPNFIQYISIPEQTAKLAEVLCRLAPGNMGRVFFSNSGTEAVEAAMKIAKASTGKPGIAYLRNSYHGKTLGALSITGRDKHRRYFTPLLDAMVEVPFGDLAALREALNREDVGALMIEPIQGEGGVHIPPAGYLQAVQQLCRETGVLLMVDEVQTGLGRTGKLFACEWDGIEPDVLMLSKSLSGGLIPIGATLCRTELWQKAYGTADRFLVHSSTYGGGNLASVVALSALREILAQDLVGHAERMGAYFKQALSEIAARYPFVSEVRGRGLMLGIQFDQAFTGAVNASAREFATRLPGDWHTTWKFLPDPVQAHLRAAMDRMEQALGEMFCMKFVTKLCQDHKILTFITANSSTVIRIQPPLIISKAEIDRFVGAFATVCEELSTFLD

SEQ ID NO: 41423 - protein, 301 aa, Arabidopsis halleri
SDSPITCIVYDAFMPWALDIARDFGLVGTPFFTQPCAVNYVYYLSYINNGSLKLPIEDLPFLELQDLPSFFSVSGSYPAYFEMVLQQFTNFEKSDFVLVNSFQELELHENALWSKACPVLTIGPTIPSIYLDQRIKSDIDYDLNLFESKDDSFCTNWLDTRPQGSVVYVAFGSMAQLTNEQMEELASAVSNFSFLWVVRSSEEAKLPPGFLDTVNKDKSLVLKWSPQLQVLSNKAIGCFLTHCGWNSTMEALTFGVPMVAMPQWTDQPMNAKYIQDVWKAGVRVKTEKESGIAKREEIEFS

SEQ ID NO: 41424 - protein, 286 aa, Hordeum vulgare subsp. vulgare
MRTVELGIVAMACLVAVARAGNFFQDSEMSWGDGRGKVVDGGRGLDLTLDKTSGSGFQSKSEYLFGKIDMQIKLVPGNSAGTVTTFYLSSQGTAHDEIDFEFLGNVTGEPYTLHTNVFAQGQGQREQQFRLWFDPTKAFHTYSIIWNPQHVIFAVDGTAIRDFKNHEARGVSFPKSQPMRLYASLWNADDWATQGGRVKTDWSKAPFVASFRNFNADACVMSGGAQRCPAGTMEASAAGGGSWWNQELSGMGYRRMRWVQRKFMIYNYCTDPKRVAQGVPAECKLR

SEQ ID NO: 41425 - protein, 425 aa, Glycine max
MLLLLSPPQPQLQPFFTSLHMAALVKPISNVTPKFVSSPRMGSSHSSKFSTIIRMSATATPPPSTSTKPASSKKGNIKETLLTPRFYTTDFDEMETLFNTEINKNLNQDEFEALLQEFKTDYNQTHFVRNKEFKEAADKLEGPLRQIFVEFLERSCTAEFSGFLLYKELGRRLKKTNPVVAEIFSLMSRDEARHAGFLNKGLSDFNLALDLGFLTKARKYTFFKPKFIFYATYLSEKIGYWRYITIYRHLKANPEFQCYPIFKYFENWCQDENRHGDFFSALMKAQPQFLNDWKAKLWSRFFCLSVYVTMYLNDCQRTAFYEGIGLNTKEFDMHVIIETNRTTARIFPAVLDVENPEFKRKLDRMVEINEKIIAVGESDDIAVVKNLKRIPLVAALVSELLATYLMPPIESGSVDLAEFEPQLVY

SEQ ID NO: 41426 - protein, 301 aa, Arabidopsis halleri
SDSPITCIVYDAFMPWALDIAREFGLVGTPFFTQPCAVNYVYYLSYINNGSLKLPIEDLPFLELQDLPSFFSVSGSYPAYFEMVLQQFTNFEKSDFVLVNSFQELELHENALWSKACPVLTIGPTIPSIYLDQRIKSDIDYDLNLFESKDDSFCTNWLDTRPQGSVVYVAFGSMAQLTNEQMEELASAVSNFSFLWVVRSSEEAKLLPGFLETVNKDKSLVLKWSPQLQVLSNKAIGCFLTHCGWNSTMEALTFGVPMVAMPQWTDQPMNAKYIQDVWKAGVRVKTEKESGIAKREEIEFS

SEQ ID NO: 41427 - protein, 519 aa, Trametes versicolor
MGLQRFSFFVTLALVARSLAAIGPVASLVVANAPVSPDGFLRDAIVVNGVVPSPLITGKKGDRFQLNVVDTLTNHSMLKSTSIHWHGFFQAGTNWADGPAFVNQCPIASGHSFLYDFHVPDQAGTFWYHSHLSTQYCDGLRGPFVVYDPKDPHASRYDVDNESTVITLTDWYHTAARLGPRFPLGADATLINGLGRSASTPTAALAVINVQHGKRYRFRLVSISCDPNYTFSIDGHNLTVIEVDGINSQPLLVDSIQIFAAQRYSFVLNANQTVGNYWVRANPNFGTVGFAGGINSAILRYQGAPVAEPTTTQTTSVIPLIETNLHPLARMPVPGSPTPGGVDKALNLAFNFNGTNFFINNATFTPPTVPVLLQILSGAQTAQDLLPAGSVYPLPAHSTIEITLPATALAPGAPHPFHLHGHAFAVVRSAGSTTYNYNDPIFRDVVSTGTPAAGDNVTIRFQTDNPGPWFLHCHIDFHLDAGFAIVFAEDVADVKAANPVPKAWSDLCPIYDGLSEANQ

SEQ ID NO: 41428 - protein, 681 aa, Cryptococcus neoformans var. neoformans B-3501A
MPDTPPHKHHYTSLRSLMHSPDPGNPAKRDSLTPRQPRPSRNSSSSRSRERRLDPPRKADKDKGRLSTWKLMCLTVSMGGSQIAWTVELGYGTPYLLSLGLSEQLTSLVWLAGPISGLIAQPLIGAISDSSHSRYRRRYWIVTSTMLLVFSGLGLAFTEPIAKALVDLIGGGQGDWDPKTIRLVKNTAIGIAVFSFYCLDFALNALQASLRNLVLDITPGEQLATANAWHGRFNHVGNIVGFTMGFLNLSHVPIIRLVGGGQFRKVCIVALVLLVMTVWITCWTQEEKETDSIFGERRSKIRDVVGTIYEAVLHLPKPIRRVCIVQIAAFMGWFPYLFYSTTYVAEVMAKELHHKPDIDRATRAGSLALLIYSFVAIIAGTLLPYLAARDRRLLKPTSEKLRDGEIEIENEDEEDEEHVEMERIREMVQQWKAEAAREGRPLKLPTMPFMLRNIWTAGLVIFGCLMMSTFFITKVWQATVMIALVGICWAIACWVPFAIIMEFLKELDDKPPPRISDGRPRPTHARTTSTPLGWRSHPTSPAGRASPDERTPLARSYSTADLDGANEMEYTGQGPVAGGTIMGIHNLAIVFPQFIASLILSPFLRYQLIVVVLADTQPDIQPTSPEIGGPHGQDKNGVAWVLRFGGLMAFVGALVSRKVPPTKTEKAMRRRLADMREESAE

SEQ ID NO: 41429 - protein, 301 aa, Arabidopsis halleri
SDSPITCIVYDAFMPWALDIAREFGLVGTPFFTQPCAVNYVYYLSYINNGSLKLPIEDLPFLELQDLPSFFSVSGSYPAYFEMVLQQFTNFEKSDFVLVNSFQELELHENALWSKACPVLTIGPTIPSIYLDQRIKSDNDYDLNLFESKDDSFCTNWLDTRPQGSVVYVAFGSMAQLTNEQMEELASAVNNFSFLWVVRSSEEAKLPPGFLDTVNKDKSLVLKWSPQLQVLSNKAIGCFLTHCGWNSTMEALTFGVPMVAMPQWTDQPMNAKYIQDVWKAGVRVKTEKESGIAKREEIEFS

SEQ ID NO: 41430 - protein, 527 aa, Trametes versicolor
MGKFHSFVNVVALSLSLSGRVFGAIGPVTDLTISNADVTPDGITRAAVLAGGVFPGPLITGNKGDEFQINVIDNLTNETMLKSTTIHWHGIFQAGTNWADGAAFVNQCPIATGNSFLYDFTVPDQAGTFWYHSHLSTQYCDGLRGPLVVYDPDDANASLYDVDDDTTVITLADWYHTAAKLGPAFPAGPDSVLINGLGRFSGDGGGATNLTVITVTQGKRYRFRLVSISCDPNFTFSIDGHNMTIIEVGGVNHEALDVDSIQIFAGQRYSFILNANQSIDNYWIRAIPNTGTTDTTGGVNSAILRYDTAEEIEPTTNATTSVIPLTETDLVPLDNPAAPGDPQVGGVDLAMSLDFSFNGSNFFINNETFVPPTVPVLLQILSGAQDAASLLPNGSVYTLPSNSTIEISFPIITTDGALNAPGAPHPFHLHGHTFSVVRSAGSSTFNYANPVRRDTVSTGNSGDNVTIRFTTDNPGPWFLHCHIDFHLDAGFAIVFAEDTADTASANPVPTAWSDLCPTYDALDSSDL

SEQ ID NO: 41431 - protein, 545 aa, Sodalis glossinidius
MAAKDVKFGNDARVKMLRGVNVLADAVKVTLGPKGRNVVLDKSFGAPVITKDGVSVAREIELEDKFENMGAQMVKEVASKANDAAGDGTTTATVLAQSIVNEGLKAVAAGMNPMDLKRGIDKAVIAAVEELKKLSVPCSDSKAIAQVGTISANADETVGTLIAEAMAKVGKEGVITVEEGSGLQDELDVVEGMQFDRGYLSPYFVNKPETGAVELESPFILLADKKISNIREMLPVLEAVAKAGKPLLIIAEDVEGEALATLVVNTMRGIVKIAAVKAPGFGDRRKAMLQDIAILTAGTVISEEIGLELEKATLEDMGQAKRVVITKDTTTIIDGEGDKALIDSRVTQINQQRDEATSDYDREKLQERVAKLAGGVAVIKVGAATEVEMKEKKARVEDALHATRAAVEEGVVAGGGVALIRVANRIAELRGDNEDQNVGIKVARRAMEAPLRQIVANAGEEPSVIANKVKAGEGNTGYNAATEEYGNMIDMGILDPTKVTRSALQYAASIAGLMITTECMVTDLPKEDKPDLGGAGGMGGMGGMM

SEQ ID NO: 41432 - protein, 318 aa, Persea americana
  misc_feature (151)..(151): Xaa can be any naturally occurring amino acid
  unsure (1)..(318): unsure at all Xaa locations
DIIKNAAEIIAKTSFGMNHQYAERVFEKLKAMQVTLYRSGRLLGVPFGRLVYLKQTLEERKLGKEIDDLLLSIITARKASHIAEPPKDLLGLLLPDNHVNELLGKKLSPRELVDECKTFFFGGHETTALASLWTLFLLAKQPKWQTLLREXIMEVTGGEPLDFTMLPKLEKMGWVMNEVLRLYPPAPNVQRQVREDIQVGDTIIPKGTNIWIDLVGMHHDPALWGEDVNEFRPERFKEDVLYGGCKHKMGYLPFGFGGRMCVGRNLALMEYKTVLSLILTRFSMSLSPNYLHSPTHLLSLRPSCGMPLILQPITPNHP

SEQ ID NO: 41433 - protein, 301 aa, Arabidopsis halleri
SDSPITCIVYDAFMPWALDIAREFGLVGTPFFTQPCAVNYVYYLSYINNGSLKLPIEDLPFLELQDLPSFFSVSGSYPAYFEMVLQQFTNFEKSDFVLVNSFQELELHENALWSKACPVLTIGPTIPSIYLDQRIKSDIDYDLNLFESKDDSFCTNWLDTRPQGSVVYVAFGSMAQLTNEQMEELASAVSNFSFLWVVRSSEEAKLPPGFLDTVNKDKSLVLKWSPQLQVLSNKAIGCFLTHCGWNSTMEALTFGVPMVAMPQWTDQPMNAKYIQDVWKAGVRVKTEKESGIAKREEIEFS

SEQ ID NO: 41434 - protein, 433 aa, Clarkia breweri
MNVTMHSKKLLKPSIPTPNHLQKLNLSLLDQIQIPFYVGLIFHYETLSDNSDITLSKLESSLSETLTLYYHVAGRYNGTDCVIECNDQGIGYVETAFDVELHQFLLGEESNNLDLLVGLSGFLSETETPPLAAIQLNMFKCGGLVIGAQFNHIIGDMFTMSTFMNSWAKACRVGIKEVAHPTFGLAPLMPSAKVLNIPPPPSFEGVKFVSKRFVFNENAITRLRKEATEEDGDGDDDQKKKRPSRVDLVTAFLSKSLIEMDCAKKEQTKSRPSLMVHMMNLRKRTKLALENDVSGNFFIVVNAESKITVAPKITDLTESLGSACGEIISEVAKVDDAEVVSSMVLNSVREFYYEWGKGEKNVFLYTSWCRFPLYEVDFGWGIPSLVDTTAVPFGLIVLMDEAPAGDGIAVRACLSEHDMIQFQQHHQLLSYVS

SEQ ID NO: 41435 - protein, 255 aa, Prunus dulcis
MGRGRVQLKRIENKINRQVTFSKRRSGLLKKAQEISVLCDAEVALIVFSTKGKLFEYSTDSCMERILERYERYSYSEKQLLANDHESTGSWTLEHAKLKARVEVLQRNCSHFMGEDLQSLSLKELQNLEQQLDSAPKHIRSRKNQVMYESISELQKKDKALQEQNNLLAKKVKEKEKALAPQAESWEQQVQNQGLDCSSTLLPEALQSLNFGSGSNYQGIRNDGAGGDHEDENETPTASRPNTLLPPWMLRHLNE

SEQ ID NO: 41436 - protein, 456 aa, Photorhabdus luminescens subsp. laumondii TTO1
METIRMSKHYDYIAIGGGSGGIASINRAAMYGQKCALIEAKALGGTCVNVGCVPKKVMWHAAQIAESIHQYGPDYGFDATINRFNWKTLIASRTAYIDRIHQSYGRGLGNNKVDVIQGFARFVDAHTVEVNGEKITADHILIATGGRPVWPDIPGAEYGIDSDGFFALEEMPKRVAVVGAGYIAVEIAGVLHALGSETHLFVRQHAPLRSFDPMIVETLLEVINTEGPTLHTESVPKSVSKNADGSLTLQLQNGKEQTVDTLIWAIGREPVTDNLNLSVAGVELNEKGYIRVDEYQNTNVKGIYAVGDNTGAVELTPVAVAAGRRLSERLFNNKPEEHLDYTNIPTVVFSHPPIGTVGLTEPQAKAQFGEEQVKTYQSSFTAMYTAVTQHRQPCRMKLVCVGPEEKIVGIHGIGFGMDEMLQGFAVALKMGATKKDFDNTVAIHPTAAEEFVTMRG

SEQ ID NO: 41437 - protein, 739 aa, Mangifera indica
MESCNCIEPQWPADELLMKYQYISDFFIALAYFSIPLELIYFVKKSAVFPYRWVLVQFGAFIVLCGATHLINLWTFSMHSRTVAIVMTTAKVFTAAVSCATALMLVHIIPDLLSVKTRELFLKNKAAELDREMGLIRTHEETGRHVRMLTHEIRSTLDRHTILKTTLVELGRTLALEECALWMPTQTGLELQLSYTLHQQNPVGYTVPIQLPVISQVFTSNHAVKISPNCPVARLRPLAGKYMPGEVVAVRVPLLHLLNFQINDWPELSTKRYALMVLMLPSDSARQWHVHELELVEVVADQVAVALSHAAILEESMRARDLLVVQNIALDRARREAETAICARNDFLSVMNHEMRTPMHAIIALSSLLQETELTPEQRLMVETILKSGNLLATLINDVLDLSRLEDGSLQLQLGTFNLHAVFKEVLNLIKPIASVKKLLVALNLAPDLPEYAVGDEKRFMQTLLNVVGNAVKFTKEGNILITAFVAKSESFLDSRTPEFFPVPSDNHFYLRVQVKDSGSGISPQDIPKLFTKFAQNQSIATRNSHGSGLGLAICKRFVNLMEGHIWIESEGLGKGCTAVFVVKLGIPESSNESKLSFMPKMSGPQTNFTGLKVLVLDDNGVSRSVTKGLLVHPGCDVMTVGSSEECLHVVSQEHKVVFMDVGIPGIDGYEVAVHIHQKFTRRHERPLIVALTGNTDKITKENCMSVGMDGVILKPISLEKMRSVLLGLLEHRVLFEAI

SEQ ID NO: 41438 - protein, 301 aa, Arabidopsis halleri
SDSPITCIVYDAFMPWALDVAREFGLVATPFFTQPCAVNYVYYLSYINNGSLKLPIEDLPFLELQDLPSFFSVSGSYPAYFEMVLQQFTNFEKSDFVLVNSFQELELHENALWSKACPVLTIGPTIPSIYLDQRIKSDNDYDLNLFESKDDSFCTNWLDTRPQGSVVYVAFGSMAQLTNEQMEELASAVNNFSFLWVVRSSEEAKLPPGFLDTVNKDKSLVLKWSPQLQVLSNKAIGCFLTHCGWNSTMEALTFGVPMVAMPQWTDQPMNAKYIQDVWKAGVRVKTEKESGIAKREEIEFS

SEQ ID NO: 41439 - protein, 339 aa, Oryza sativa (japonica cultivar-group)
MERYEVIKDIGSGNFGVAKLVRDVRTKELFAVKFIERGQKIDENVQREIMNHRSLRHPNIVRFKEVVLTPTHLAIVMEYAAGGELFERICSAGRFSEDEARFFFQQLISGVSYCHSMQICHRDLKLENTLLDGSIAPRLKICDFGYSKSSLLHSQPKSTVGTPAYIAPEVLARKEYDGKVADVWSCGVTLYVMLVGAYPFEDPDEPRNFRKTITRILSVQYMVPDYVRVSMECRHLLSRIFVANPEQRITIPEIKNHPWFLKNLPIEMTDEYQMSVQMNDINTPSQGLEEIMAIIQEARKPGDGSKFSGQIPGLGSMELDDVDTDDIDVEDSGDFVCAL

SEQ ID NO: 41440 - protein, 183 aa, Acetabularia peniculus
MAAAMMNKTVVVGKESVKGGVAPKVAMSRGGFLNSGIMKKDRDMMVWQPFNNKMFETFSYLPPLTDEQISKQVDYILANSWTPCLEFAASDQAYAGNENCIRMGPVASTYQDNRYWTMWKLPMFGCTDGSQVLSDMQACTKAFPDAYIRLVCFDANRQVQICGFLVHRPPSATDYRLPADRQV

SEQ ID NO: 41441 - protein, 182 aa, Acetabularia peniculus
MAATMMSKTIISSKQCSKPIAPPKVSINKGFVNTSAAIKNREMMVWQPFNNKMFETFSYLPPLTDEQISKQVDYILANAWTPCLEFAASDQAYAGNENCITMGPVASTYQDNRYWTMWKLPMFGCTDGSQVLTEIQACTKAFPDAYIRLVCFDANRQVQISGFLVHRPPSATDYRLPADRQV

SEQ ID NO: 41442 - protein, 389 aa, Digitalis purpurea
MSWWWAGAIGAAKKKLEEDDAPPKHSSVALIVGVTGIIGNSLAEILPLADTPGGPWKVYGVARRTRPAWHEDNPINYIQCDISDPDDSLAKLSPLTDVTHVFYVTWANRSTEPENCEANSKMFRNVLDAVIPNCPNLKHISLQTGRKHYMGPFESYGKIESHDPPYTEDMPRLKYINFYYDLEDIMLEEVEKKEGLTWSVHRPGNIFGFSPYSMMNLVGTLCVYAAICKHEGKVLRFPGCKAAWDGYSDCSDADLIAEHHIWAAVDPYAKNEAFNVSNGDVFKWKHFWKVLAEQFGVECGEYGEGVDLKLQDLMKGKEAVWEEIVRENGLTPTKLKDIGIWWFGDVILGNECFLDSMNKSKEHGFLGFRNSKNAFISWIDKAKAYKIVP

SEQ ID NO: 41443 - protein, 80 aa, Larix laricina
EFEEDGEIKRVYGNSPGYYDGRYWVMWKLPMFGCTEASQVLNEVNECAKAYPNAFIRVIGFDNVRQVQCISFIVHKPEYN

SEQ ID NO: 41444 - protein, 171 aa, Larix laricina
APSKTGNSNVVSAFTGLKSMAQFPSSKTMSNAGAEWERKTTSNGARVRCMQVWPPYANKKWETLSYLPRLTPEQLVKEVEYLLKNKWVPCLEFEEDGEIKRVYGNSPGYYDGRYWVMWKLPMFGCTEASQVLNEVNECAKAYPNAYIRVIGFDNVRQVQCISFIVHKPEYN

SEQ ID NO: 41445 - protein, 168 aa, Triticum aestivum
PLLNQPPIPHSFPNPPPRSPVSPPPPPPPRRKPSPKSAESRGPGTKVDRWRRASFKLEHPLERRQAEATHIREKYSDRIPVIVEKAGKSDIPDIDKKKYLVPADLTVGQFVYVVRKRIKLSAEKAIFIFVKNTLPPTAALMSAIYEENKDEDGFLYMTYSGENTFGLL

SEQ ID NO: 41446 - protein, 375 aa, Triticum aestivum
MEGCACIEQFRRTDELLIKYQYISDFFIALAYFSIPLELIYFAKKSGSFPYRWVLLQFSAFIVLCGATHLINLWTFTKHTQTVDIVMTVTKVTTAVVSCATALTLIHIIPDLLGVKTRELFLKKKADELDREMSLMRSQEDTGRHVRMLIHEIRSTLDRHTILKTTLVELGRTLGLEECAFWMPSRSGSSLELTHTMRHHIPTGSSVEINLPVVNQVLSTNRAIIVPHTSPLARIHPVQGRHVPPEVAAVRVPLLHLSNFHPELLAKSYAIMVLMLPSDSVRKWLAHELELIEVVANQVAVALSQAEILEESMRARDLLTEQNVALDLALREAEMAIHARNVNRVGVELVGPEDADNVATINSSASAAKVHNAEP

SEQ ID NO: 41447 - protein, 61 aa, Larix laricina
DGRYWVMWKLPMFGCTEASQVLNEVNECAKAYPNAFIRVIGFDNVRQVQCISFIVHKPEYN

SEQ ID NO: 41448 - protein, 380 aa, Actinidia chinensis
MGLPKSFVSMSLLFFSTLLILSLAFNAKNLTQRTNDEVKAMYESWLIKYGKSYNSLGEWERRFEIFKETLRFIDEHNADTNRSYKVGLNQFADLTDEEFRSTYLRFTSGSNKTKVSNRYEPRVGQVLPSYVDWRSAGAVVDIKSQGECGGCWAFSAIATVEGINKIVTGVLISLSEQELIDCGRTQNTRGCNGGYITDGFQFIINNGGINTEENYPYTAQDGECNVDLQNEKYVTIDTYENVPYNNEWALQTAVTYQPVSVALDAAGDAFKQYSSGIFTGPCGTAVDHAVTIVGYGTEGGIDYWIVKNSWDTTWGEEGYMRILRNVGGAGTCGIATMPSYPVKYNNQNHPKPYSSLINPPAFSMSKDGPVGVDDGQRYSA

SEQ ID NO: 41449 - protein, 279 aa, Rhizobium etli
MTARMDKRFAELKAEGRPALVTYFMGGDPDYDTSLGIMKALPEAGSDIIELGMPFSDPMADGPAIQLAGQRALKGGQTLKKTLQLAADFRKTNDLTPIVMMGYYNPIYIYGVEKFLDDALAAGIDGLIVVDLPPEMDDELCIPAIRKGINFIRLATPTTDEKRLPTVLKNTSGFVYYVSMNGITGSALPDPSLVSGAVQRIKQHTELPVCVGFGVKTAEHAKVIGGSADGVVVGTAIVNQVATSLTKDGKATPDTVQAVATLVRGLSSGARSARLVAAE

SEQ ID NO: 41450 - protein, 554 aa, Vibrio parahaemolyticus RIMD 2210633
MCSVFGILDIKSDAAALRPIALEMSKKLRHRGPDWSGIYSSERAILAHERLAIVGLNSGAQPLYSPDKKLILAVNGEIYNHKEIRARYEGKYEFQTDSDCEVILALYQDMGADLLEELNGIFAFVLYDEEKDEYLVGRDHIGIIPLYQGYDEHGNYYVASEMKALVPVCKTVSEFPPGSHYSSKDAEPQRYYIRDWNEYAAVQGNSTSKEELTEALEAAVKRQLMTDVPYGVLLSGGLDSSITSAVAKRYAAMRIEDDEKSEAWWPQLHSFAVGLEGAPDLKAAREVAEKIGTVHHEMTYTIQEGLDAIRDVIYHIETYDVTTIRASTPMFLMGRKIKAMGIKMVLSGEGADEIFGGYLYFHKAPNAKEFHEETVRKLLALNMFDCARANKSLAAWGVEGRVPFLDKEFIDVAMRLNPADKMCGNGKMEKHILRECFEHYLPDSIAWRQKEQFSDGVGYSWIDTLKAVAEEKVTDQQMETAQYRFPYNTPTTKEGYVYREIFEELFPLPSAAECVPGGPSVACSSAKAIEWDESFKNCVDPSGRAVQTVHNDAY

SEQ ID NO: 41451 - protein, 648 aa, Serratia marcescens
MSVHAVDSAANAHEAVRQSVLHTFARLTEYEPSALALTSHLENDLGVDSIALAEIAMVLNRQFQLNTPLAIQEIKTIQDALDGILQRGFTLPTPNAAAQPAPQTPQAWLSALVRQVFATHSGYEVRDLSPDAAIEGDLGIDSVAVVMARNELLKTLGLDDNAALAECRTLAELEHNLAARLVQEQGEAWFSRFGQHTTASAAPQPTKAPASPDARDELGDPRTMRDFVGIEHPDLFHKTREFGAFYRDKKQRQLYWYGMPLETPCKNRAVMFDEVTGKSREFLMFGSNSYLGLSNHPEVIHAIQDAAGLYGATNTGCRIIAGSNVLHLELERKLAKLKGREDCIVYPSGYSANLGCISALTSRHDLVFTDAINHMSIQDGCKLAGAQRKIYDHSLTSLEKSLAKYADHPGGKLIVTDGVFSMHGDIVDLPRLMKLAERYGARVLVDDAHATGVLGKTGSGTAEHFNMKGQVDLELGTMSKALSGLGGFVCADGEVVEYLRFYSNSYVFAATIPAAVAAGVIASIDVMLREPERLTKLWDNIYYFRTLLLNAGFDLEHSDSAIIPVVVGDDAKTLLFGRAVRARGLFCQTVVFPGVSVGDARLRISVTSEHTREDLDEANAILVAAALETGVPVNGDVRREERARATEV

SEQ ID NO: 41452 - protein, 522 aa, Ipomoea tricolor
MATLTLILCTLVFAICLYFLILRVKQRYPLPLPPGPKPWPVLGNLPHLGEKPHQSIAAMAQSYGPLMHLRLGFVDVVVAASAAVAAQFLKVHDANFSSRPPNSGAEHIAYNYQDLVFAPYGPRWRMLRKITSVHLFSAKALDDFCHVRQEEVATLTRSLASAGKTPVKLGQLLNVCTTNALARVMLGRKVFNDGSSKSDPKAEEFKSMVEEMMVLAGSFNIGDFIPVLGWLDLQGIVGKMKKLHARFDAFLNTILEEHKFVNNQDTTLFKDMDFLSTLIRLRDNGAAMDGEDGKVTGVTDTEIKALLLNLFTAGTDTSSSTVEWAFAELLRNPKILNQAQQELDLVVGPNRLVTESDLTQLPFLQAIVKETFRLHPSTPLSLPRMGAESCEINGYFIPKGATLLVNVWAIARDPNVWTNPLEFNPHRFLPGGEKPNVDIKGNDFEVIPFGAGRRICSGMSLGIRMVHLLVATLVHAFDWGLVDGQSVDTLNMEEAYGLTLQRAVPLMLHPKPRLQPHIYTLN

SEQ ID NO: 41453 - protein, 206 aa, Mesorhizobium loti MAFF303099
MSRTLVLVRHGQSEWNLKNLFTGWRDVDLTEQGHAEAKAAGQKLKARGLKFDIAFTSALSRAQKTCQHILDAVGQSDLKTIRDQALNERDYGDLSGLNKDDARKKWGEEQVHVWRRSYDVSPPGGESLKDTGARVWPYYLHDLQPHVLRGGTVLVAAHGNSLRALIMALDGKSGEEIVKLELGTGVPVIYQLNADSTVASKEVLEG

SEQ ID NO: 41454 - protein, 344 aa, Rhodopseudomonas palustris CGA009
MNLADLNQIARAMVAPGKGILAADESSGTIKKRFDVIGVESTETNRRDYREMLFRSKEAMSDYVSGVILYDETIWQNAADGTPLVKLIEQAGSIPGIKVDEGTQPLPNCPGETITVGLDKLAERLAKYYKQGARFAKWRAVIDIDTARGVPSHTAIMTNAHALARYAALCQQAQIVPIVEPEVLMDGAHDIDTCYNITEWVLKETFQQLYFQRVALEGMILKPNMAVPGKKSAKKASVQEVAEKTVKLLKACVPSAVPGIAFLSGGQSDEEATAHLDAMNKIGGLPWGLTFSYGRALQAAPQKAWSGKAENVAAGQAAFTHRARMNSLAAKGEWSAELETKKAA

SEQ ID NO: 41455 - protein, 315 aa, Gossypium hirsutum
ATLTVPTTVPSVSEDCEQLRKAFSGWGTNEGLIIDILGHRNAEQRNLIRKTYAETYGEDLLKALDKELSNDFERLVLLWALDPAERDALLANEATKRWTSSNQVLMEIACTRSANQLLHARQAYHARYKKSLEEDVAHHTTGDFHKLLLPLVSSYRYEGEEVNMTLAKTEAKLLHEKISNKAYSDDDVIRVLATRSKAQINATLNHYKNEYGNDINKDLKADPKDEFLALLRSTVKCLVYPEKYFEKVLRLAINRRGTDEGALTRVVCTRAEVDLKVIADEYQRRNSVPLTRAIVKDTHGDYEKLLLVLAGHVEN

SEQ ID NO: 41456 - protein, 512 aa, Arabidopsis thaliana
MCGILAVLGCSDDSQAKRVRVLELSRRLRHRGPDWSGLYQNGDNYLAHQRLAVIDPASGDQPLFNEDKTIVVTVNGEIYNHEELRKRLKNHKFRTGSDCEVIAHLYEEYGVDFVDMLDGIFSFVLLDTRDNSFMVARDAIGVTSLYIGWGLDGSVWISSEMKGLNDDCEHFETFPPGHFYSSKLGGFKQWYNPPWFNESVPSTPYEPLAIRRAFENAVIKRLMTDVPFGVLLSGGLDSSLVASITARHLAGTKAAKQWGPQLHSFCVGLEGSPDLKAGKEVAEYLGTVHHEFHFSVQDGIDAIEDVIYHVETYDVTTIRASTPMFLMSRKIKSLGVKMVLSGEGADEIFGGYLYFHKAPNKKEFHQETCRKIKALHKYDCLRANKSTSAFGLEARVPFLDKDFINTAMSLDPESKMIKPEEGRIEKWVLRRAFDDEERPYLPKHILYRQKEQFSDGVGYSWIDGLKDHAAQNVNDKMMSNAGHIFPHNTPNTKEAYYYRMIFERFFPQVRVL

SEQ ID NO: 41457 - protein, 584 aa, Phaseolus vulgaris
MCGILAVLGCSDHSRAKRVRVLELSRRLKHRGPDWSGLHQHGDCFLAHQRLAIVDPASGDQPLFNEDKSVIVTVNGEIYNHEELRKQLPGHKFRTGSDCDVIAHLYEEHGEGFVDMLDGIFSFVLLDTRDNSFIVARDAIGVTSLYIGWGLDGSVWISSEMKGLNDDCEHFECFPPGHLYSSKDRGFRRWYNPPWFSEAIPSAPYDPLVLRRAFEQAVIKRLMTGVPFGVLLSGGLDSSLVASITSRYLANTKAAEQWGSKLHSFCVGLEGSPDLKAAKEVADYLGTVHHEFHFTVQDGIDAIEDVIYHVETYDVTTIRASTPMFLMSRKIKSLGVKWVISGEGSDEIFGGYLYFHKAPNKEEFHRETCRKIKALHQYDCLRANKSTFAWGLEARVPFLDKEFINAAMNIDPEHKMIKRDEGRIEKWILRRAFDDEDQPYLPKHILYRQKEQFSDGVGYSWIDGLKAHAAKHVTDKMMLNAGNIYPHNTPVTKEAYYYRMIFERFFPQNSARLTVPGGASVACSTAKAVEWDAAWSNNLDPSGRAALGVHISAYENQNNLANKGVEIEKIIPMDAAPLGVAIQS

SEQ ID NO: 41458 - protein, 301 aa, Arabidopsis halleri
SDSPITCIVYDAFMPWALDIAREFGLVGTPFFTQPCAVNYVYYLSYINNGSLKLPIEDLPFLELQDLPSFFSVSGSYPAYFEMVLQQFTNFEKSDFVLVNSFQELELHENALWSKACPVLTIGPTIPSIYLDQRIKSDTDYDLNLFESKDDSFCTNWLDTRPQGSVVYVAFGSMAQLTNEQMEELASAVNNFSFLWVVRSSEEAKLPPGFLDTVNKDKSLVLKWSPQLQVLSNKAIGCFLTHCGWNSTMEALTFGVPMVAMPQWTDQPMNAKYIQDVWKAGVRVKTEKESGIAKREEIEFS

SEQ ID NO: 41459 - protein, 492 aa, Arabidopsis thaliana
MDPYKYRPSSAYNAPFYTTNGGAPVSNNISSLTIGERGPVLLEDYHLIEKVANFTRERIPERVVHARGISAKGFFEVTHDISNLTCADFLRAPGVQTPVIVRFSTVVHGRASPETMRDIRGFAVKFYTREGNFDLVGNNTPVFFIRDGIQFPDVVHALKPNRKTNIQEYWRILDYMSHLPESLLTWCWMFDDVGIPQDYRHMEGFGVHTYTLIAKSGKVLFVKFHWKPTCGIKNLTDEEAKVVGGANHSHATKDLHDAIASGNYPEWKLFIQTMDPADEDKFDFDPLDVTKIWPEDILPLQPVGRLVLNRTIDNFFNETEQLAFNPGLVVPGIYYSDDKLLQCRIFAYGDTQRHRLGPNYLQLPVNAPKCAHHNNHHEGFMNFMHRDEEINYYPSKFDPVRCAEKVPTPTNSYTGIRTKCVIKKENNFKQAGDRYRSWAPDRQDRFVKRWVEILSEARLTHEIRGIWTSYWLKADRSLGQKLASRLNVRPSM

SEQ ID NO: 41460 - protein, 301 aa, Arabidopsis halleri
SDSPITCIVYDAFMPWALDIAREFGLVGTPFFTQPCAVNYVYYLSYINNGSLKLPIEDLPFLELQDLPSFFSVSGSYPAYFEMVLQQFTNFEKSDFVLVNSFQELELHENALWSKACPVLTIGPTIPSIYLDQRIKSDIDYDLNLFESKDDSFCTNWLDTRPQGSVVYVAFGSMAQLTNEQMEELASAVSNFSFLWVVRSSEEAKLPPGFLETVNKDKSLVLKWSPQLQVLSNKAIGCFLTHCGWNSTMEALTFGVPMVAMPQWTDQPMNAKYIQDVWKAGVRVKTEKESGIAKREEIEFS

SEQ ID NO: 41461 - protein, 258 aa, Arabidopsis thaliana
MQVLVVSPPLIAAASLSKPLNSLSKAALSFSRAKPICPFPQTSRRPISVYKSPMNNLFNRLGFGSRPQAQADPSSAAIAQGPDDDVPSSGQQFAQFGAGCFWGVELAYQRVPGVTKTEVGYSHGIVHNPSYEDVCTGTTGHNEVVRVQYDPKECSFESLLDVFWNRHDPTTLNRQGGDVGTQYRSGIYYYTDEQERIAREAVEKQQKILNKKIVTEILPATKFYRAENYHQQYLAKGGRMGLRQSAEKGCKDPIRCYG

SEQ ID NO: 41462 - protein, 332 aa, Oryza sativa
MAASTSQHALVSVKSLCTGANFGFEKRTSKVRFVLVGRCCSGTRKLGLVCASNSHSSVMEPAQLPLSPESGNTPKKSSESALILIRHGESLWNEKNLFTGCVDVPLTPKGVDEAIEAGKRICNIPVDVIYTSSLIRAQMTAMLAMMQHRRKKVPIVVHSESEQAHRWSKIYSEETKKQSIPVITAWQLNERMYGELQGLNKQETADRFGKEQVHEWRRSYDIPPPNGESLEMCAERAVAYFKDQIVPQLVAGKHVMIAAHGNSLRSIIMHLDKLTSQEVISLELSTGIPMLYIFKEGKFIRRGSPAGPSEAGVYAYTRSLAQYRQKLDNMFQ

SEQ ID NO: 41463 - protein, 493 aa, Zea mays
VRRSGSSSSLATAMDPYKHARRAPSTPVLDHNSAPRVEQRQLLTVGARGPILLEDLVVEKLANFDRERIPERVVHRCGASAKGFFEVTHDITTDVADSAGRTAGMQAVIAVSLNCVALALRYHDGSPETLGPRVASVYTGGNWTVETLPSLIRDGIKSGHVHALKPNPRTHIQDNWRILDFFSHHPESLHMFSFLFDDSGIPADVRPHGGSGVHTYTLVSRAGTVTYVKFHWRPTCGVRSLMDDEAVAVGAQPQPRTKDLTDAIAAGNFPEWTLYIQTMDPEMEDRLQHLDPLDVTKTWPEDVPLEPVGRLVLNRNIDNFFAENEQLAFSPGLIVPGIYYSDDKLLQTRIFSYSDTQRHRLGPNYLLLPANAPKCAHHNNHYDGSMNFMHRTEEVDYFPSRYDAVRNAPRYPIPTAHIAGRREKTVISKENNFKQPGERYRAMDPARQERFITNGSTLEIPGYRARIRNHGHSCFLCEIVIRSQFHTTYEPEA

SEQ ID NO: 41464 - protein, 104 aa, Brassica rapa subsp. pekinensis
YSSMFHPFNGSMDAEERRHISSTTEHSAIDNHCSANSSSVGRTQQSLQREAALNKFRMKRKDRCFDKKVRYESRKKLAEQRPRIKGQFVRQVQSTETSTQEAPQ

SEQ ID NO: 41465 - protein, 271 aa, Triticum aestivum
  misc_feature (195)..(195): Xaa can be any naturally occurring amino acid
  misc_feature (209)..(209): Xaa can be any naturally occurring amino acid
  misc_feature (234)..(234): Xaa can be any naturally occurring amino acid
  unsure (1)..(271): unsure at all Xaa locations
HCRTSLYKKAGWYRSGIPGISSTHASACTSSRSLHSQWKKGKLLGSGTFGQVYLGLNSEGDQMCAIREVKVIADDSELKECLRKLNQEMCILNQLSHPNIVQYYGSELSSETFSLYLEFVNGGSIHKLLREYGPFEEAVLRNYTAQILSGLAYLHRRNIVHRDIKGSNIFVNRNGDIRLADFSMTNHISEATSIXSFKGSPYWMAPEVXMITNGDSLSVDIWSLGCTIIEMGTXGPPWNQYEGVAAIFKIANSKDLPDMPDHLSSEAKAFL

SEQ ID NO: 41466 - protein, 451 aa, Cryptococcus neoformans var. neoformans B-3501A
MTSLNFKVAPAVQATEAPPIPKAQAWGCQYVPSPSAPLLDLSQGVPRAAPHPNVLAALSKVASDPQAARYGPILGEPGLRQALAEEIKVQYHVSGQGVTFEDVAITTGCNMAFLSLLMTLCPPGKSSVLLPLPAYFNHTMSLSLQDVKPVYVLCEPDNMFKASLPSARSYLASLRKGNGDRREPRMIVLVSPSNPTGTVYTNEEIKQWYDLAREYKVALVLDETYRDFVEGESGQRGLPHRLFEEPDWRSTLVSLGSFSKGYRIPGHRLGSIIASPELLQHITTICDCMQICPPRPPQIALTPLLPSLRPDLFAASSQLSHRRHLFETTVNAIPGWEVISSGGFFAYVQFPEDYIYASSILGLKRKKLGSEDVARVLALRCGVVTLPGSFFMPPLADDEQWDDILNGETLRQDKWLRFAVANVEDDVILSLGPRLKLMNKIMGVDNEGVAS

SEQ ID NO: 41467 - protein, 285 aa, Glycine max
MAKHDVEGGSFSAKDYHDPPPAPLIDAEELTQWSFYRALIAEFIATLLFLYITVLTVIGYKSQSDVKAGGDVCGGVGILGIAWAFGGMIFILVYCTAGISGGHINPAVTFGLFLARKVSLIRAIMYMVAQCLGAICGVGLVKAFQKAYYNRYGGGANELSEGYSTGVGLGAEIIGTSGGVYTVFSATDPKRNARDSHVPVLAPLPIGFAVFMVHLANIPVTGTGINPARSLGAAVMYNQQKAWDDHWIFWVGPFIGAAIAAFYHQFILRAGAAKALGSFRSNPTI

SEQ ID NO: 41468 - protein, 623 aa, Xylella fastidiosa Ann-1
MRSPIMSNERTAQQSDIKQLISKGLEQGYLTYAEVNDHLPEDLVDPDQIEDIIGMINGMGIEVHEVAPDAETLLLNEGNTGNREVDDTAAEEAAAALSALDTEAGRTTDPVRMYMREMGTVELLTREGEIAIAKRIEEGLSEVQAALGAFPLSTELLLSEYELHKEGKRRLTEVVVGFNDLIEDDNSVTSSVDVTDESIVEVDEEDDDSVGNDEDAPMIGPDPAEVASRIESLSTEYAKFKKLYAKHGPEHKAVIKVREDMAAIFVTFKLSLPLTDLLVQQLQNMVNSVKDHERKVLHLATNVAKMPRKDFIRSWENNQTNLEWVEDAIKRKQKWSSALRDIKDQITAEQQSSIDLEKVNSLTLADIKEINRMMVYGEAKASKAKKEMVEANLRLVISIAKKYTNRGLQFLDLIQEGNIGLMKAVCKFEHRRGFKFSTYATWWIRQAITRSIADQARTIRIPVHMIETINKLNRISRQMLQQFGREATPEELAKEMDMPEDKIRKVMKIAKEPISMETPIGDDEDSHLGDFIEDPNVESPVDTTTNVNLSETVREVLAGLTPREAKVLRMRFGIDMNTDHTLEEVGKQFDVTRERIRQIEAKALRKLRHPSRSEQLRSFLDID

SEQ ID NO: 41469 - protein, 286 aa, Lycopersicon esculentum
MAAYRWKSFNDDGDRPEKPRRYGVTEMKGPNYSLFSRGLLEDVLESMGHFVDGLKLCDGSHTVMPKNYIKEVTDMAHKHNVYVSSGDSADQMLFRGPSSLKEYIEECKQLGFDSIELDVASLGLPEETLLRYVRLIKSSGLRAKPQFSVKFNKSDIAFAGDRAFGAYVIPAPQTSEMVEDVDLLVRRAERCLEAGADMIMINADDLCRQAGLLRSDIVAKIVGRLGLEKTMFEASNPKISEWFVKRYGPKVNLIVDHSQVMDLECLRGRNLGQNHSSVLGRSYFLL

SEQ ID NO: 41470 - protein, 182 aa, Pseudomonas fluorescens
MFKYIGDIVKGTGTQLRSLVMIFGHGFRKRDTLQYPEEPVYLAPRYRGRIVLTRDPDGEERCVACNLCAVACPVGCISLQKAETEDGRWYPDFFRINFSRCIFCGLCEEACPTTAIQLTPDFEMAEFKRQDLVYEKEDLLISGPGKNPDYNFYRVAGMAIAGKPKGAAQNEAEPINVKSLLP

SEQ ID NO: 41471 - protein, 302 aa, Oryza sativa (japonica cultivar-group)
MAMRRWREDAVALSLRGCGFGDGDDDRPEKPRRYGVTEMRSPFYAFRPAHHALQEILDSLGPFVDGLKFTGGSHSLMGKELVREITDLAHKHDIYVSTGDWAEHLLRQGPSFFKQYVEECKALGFDTIELNAGSLKLPEEALLRLVRLIKTSGLQAKPLFSVKFDSSDIPPSGDRAFGAYIVPVKQNSERVEDVDLLIRRAERCLEAGADMIMIDADDICQRADSLRADIVAKIVGRLGLEKTMFEASNPNTSEWFVRRYGPRVNLFVDHSDVMNLERLRGFNMRGVCNSPLFGIGSPFFLM

SEQ ID NO: 41472 - protein, 542 aa, Streptococcus mutans UA159
MAKDIKFSADARSSMVRGVDILADTVKVTLGPKGRNVVLEKSFGSPLITNDGVTIAKEIELEDHFENMGAKLVSEVASKTNDIAGDGTTTATVLTQAIVREGLKNVTAGANPIGIRRGIETAVATAVDELKAIAQPVSGKEAIAQVAAVSSRSEKVGEYVSEAMEKVGNDGVITIEESRGMETELDVVEGMQFDRGYLSQYMVTDNEKMVADLENPYLLITDKKISNIQDVLPLLEEVLKTNRPLLIIADDVDGEALPTLVLNKIRGTFNVVAVKAPGFGDRRKAMLEDIAVLTGGTVITEDLGLELKDTTIDALGQAARVTVDKDSTVIVEGSGGKEAVANRVNLIKSQIETATSDFDREKLQERLAKLSGGVAVIKVGAATETELKEMKLRIEDALNATRAAVEEGIVAGGGTALINVIEKVAALDLTDDAATGRNLVLRALEEPVRQIAKNAGYEGSVIIDKLKNSSAGTGFNAANGEWVDMIDAGIIDPVKVTRSALQNAASVASLILTTEAVVADHPAPEAPAAAPAMDPSMMGGMM

SEQ ID NO: 41473 - protein, 95 aa, Streptococcus mutans UA159
MLKPLGDRVVVQLKEEKEQTVGGFVLAGASQEKTKKAQVVAVGEGVRTLTGELVASSLVQGDTILIENHVGTPVKDDGKDCLIIREADVLAVVND

SEQ ID NO: 41474 - protein, 661 aa, Rhodopseudomonas palustris CGA009
MAQVDHSRMANAIRALAMDAVEKAKSGHPGLPMGAADVATVLWTQFLKFDAVDPHWPDRDRFILSAGHGSMLLYALLYLTGNEELTLDQIKNFRQLDSKTPGHPENCITSSVETTTGPLGQGVASSVGTALAERLLQAEFGDIVDHYTYVLCSDGDLMEGVSHEAIALAGHLRLSKLIFLYDDNGISIDGPLSLTDTVDQVARFQAHGWNSFRIDGHDHKAIADAIRKAQASDRPTMIACKTTIGFGAPHKAGTSKAHGEPLGAEELAGAKKALGWDYGPFEIPDDVLSAWRNVGKQGASARADWLARFDALPADKRGDFKRRVIDRKRPAAIADAIRTLKDKLVAEPQTIATRKASELALEALTPVVPELLLGSADLTPSNNTRVKQAKDVTPDDFSGRYIHYGIREMGMAAAMNGLAMHGGFAPAGGTFLCFTDYARPSMRVAALSHVPVVYIMTHDSIGLGEDGPTHQPVEHLAALRAMPNMRVFRPADAVETAECWQLALENTNGPTLLALSRQNLAQVRTATSEANLCATGGYELIPAPGKAQVSIFATGSEVEIAVAAQKLLEVQGVAARVVSVPSLDLLLAQDDATRAAIIGDAPVKVAVEAAVRFGWDAVIGPDGGFVGMTGFGASAPAKDLYKHFGITAEAVADAAKRRLAA

SEQ ID NO: 41475 - protein, 145 aa, Myxococcus xanthus
MAIERTLSIIKPDGLEKGVIGKIISRFEEKGLKPVAIRLQHLSQAQAEGFYAVHKARPFFKDLVQFMISGPVVLMVLEGENAVLANRDIMGATNPAQAAEGTIRKDFATSIDKNTVHGSDSLENAKIEIAYFFRETEIHSYPYQK

SEQ ID NO: 41476 - protein, 456 aa, Arabidopsis thaliana
MCGILAVLGCSDDSQAKRVRVLELSRRLRHRGPDWSGLYQNGDNYLAHQRLAVIDPASGDQPLFNEDKTIVVTVNGEIYNHEELRKRLKNHKFRTGSDCEVIAHLYEEYGVDFVDMLDGIFSFVLLDTRDNSFMVARDAIGVTSLYIGWGLDGSVWISSEMKGLNDDCEHFETFPPGHFYSSKLGGFKQWYNPPWFNESVPSTPYEPLAIRRAFENAVIKRLMTDVPFGVLLSGGLDSSLVASITARHLAGTKAAKQWGPQLHSFCVGLEGSPDLKAGKEVAEYLGTVHHEFHFSVQDGIDAIEDVIYHVETYDVTTIRASTPMFLMSRKIKSLGVKMVLSGEGADEIFGGYLYFHKAPNKKEFHQETCRKIKALHKYDCLRANKSTSAFGLEARVPFLDKDFINTAMSLDPESKMVTTKLTSQTQYLPSQVNVEQIFYMGFSRSSQRKEGSRNGF

SEQ ID NO: 41477 - protein, 390 aa, Thlaspi goesingense
MESSSHIIEVNGGRSDEERRVVASKVCGEAPCGFSDAKNASGDAQERNASMRKLCIAVVLCLVFMSVEVVGGVKANSLAIMTDAAHLLSDVAAFAISLFSLWAAGWEATPRQTYGFFRIEILGALVSIQLIWLLTGILVYEAIIRLLTETSEVNGFLMYAVATFGLLVNIIMAVMLGHDHGHSHGHGHGHDHGNHSHDVTVTTHDHDHDHDDGHGHSHGEDKHDEAHGDVTEQLLEKPKQEKEKKKRNINVQGAYLHVLGDSIQSVGVMIGGAAIWYNPKWKIIDLICTLVFSVIVLGTTINMIRSILEVLMESTPREIDATKLEKGLLEMEEVVAVHELHIWAITVGKVLLACHVNARPDADADMVLNKVVDYIRREYNISHVTIQIER

SEQ ID NO: 41478 - protein, 266 aa, Triticum aestivum
  misc_feature (221)..(221): Xaa can be any naturally occurring amino acid
  misc_feature (230)..(230): Xaa can be any naturally occurring amino acid
  misc_feature (236)..(236): Xaa can be any naturally occurring amino acid
  unsure (1)..(266): unsure at all Xaa locations
HYRTSLYKKAGWYRSGIPGISSTHASDKVKDAFSSSGPETGKGKTKLSGRRVKHGYHLVKGKSNHPMEDYLVAEYRQVGEHDLGLFAIFDGHLGHTVPDFLRAHLFDNILSEPEFLSDTKNAIRKAYLLTDEKILEKAAELGRGGSTAVTAILISSNDSVKLVVANIGDSRAVISKNGKAEQLSVDHEPSMEREIIEEKGGFVSNLPRDVPRVDGQLAVAXAFGDGSLKXHLTSEXPVAEEIFDESSKFLIPASDGLWKGMTNQEA

SEQ ID NO: 41479 - protein, 474 aa, Rhodopseudomonas palustris CGA009
MVRAMTAPGSNIAAGALAPAKSSAWRTELIETLWLAWPMALTQLGQIAMMTTDLALIGRLGDAAVAAAALAHFVLFSTFTMGLGLVSAVTPLAAQAFGARAPRQVRASLRVGLWAGVIAGVPLTLGQLYGEELLVALGQNPATSRLAGDYLDGLAWSLVPGWLFIALRGLMGAVNRPEPALWIMLTAIPINLGLAYVLIHGSFGLPRLEIFGAGLATSIVSWAMCIAAAVVCVTMRPFRKYQVFGELFRFDGELMRRLLQLGLPISGASVLEYGVFGAAALLMGKFGTTALAAHQIALQVAAIMFMVPMGISVAATVRVGHAVGRGDPPSARRAGFAAIGLGFVFMAAMTLLVALTRHQIPQLFLGDSDTSIETATLTAALLIVGASFFIADGLQVVANGALRGRNDTKVPLLFAVLGFWVIGFPFCWVLGFHTDLGPFGVWIGLAVGLVVYAALLVWRFHRLTRDAMAAAVAA

SEQ ID NO: 41480 - protein, 286 aa, Geobacter metallireducens GS-15
MWDYTEKVREHFLNPRNVGDIPDADAVGEVGSLACGDALKLYIKLDDAKERIVDAKFQTFGCASAIASSSALTEIIKGKTLDEALATTNQEIADFLGGLPEEKMHCSVMGQEALEVAIAKYRGGPVPTHHDHGHEEVEPGEIVCKCFGLTDTFLKKVIAANKLTTAEQVTHFTKAGGACGGCIPKIKELISEVLGAQPTEERKKPEKLTNLRKMQLIQETLEKEIRPLLWADGGDLELVDISGSEVQIAFRKACAGCASSGNTAKFVELKLRDLVADDIVVQEVEG

SEQ ID NO: 41481 - protein, 673 aa, Bifidobacterium longum DJO10A
MADEFNPQGVDQTPRNNENPNSTADTGNAEPKNPFVGGDSVDAGNASDSSEQQAPVSSAALAADQQPTQAATEPIPDYASAKGESTVVSSSPASPAAPAAGQTSATTPLYRPAPEYGAYGPTPTQAQGQQGGQAGSNAQPTQQFPFGQPTQQTPQGQQDNRNPYYTNNPQPQGNGNPFNPPTQPQQNNGNPFASQSGQNGQNGQQPQQGGLFGFGAPGTGTPNGQGPTQPGQPGQPGQPGPAKQGMSKTASNILIAVVAAVLAAALCLGLGYGALTSGLITLPTSNSLTNVSSNKSGSGSATAKSGEAPDWQTVASDVSGSVVSIQTALSNGTAKGSGAIIDTEGHIITNNHVISGAQQIQVTLANGNMYSATLVGTDATTDLAVIKLDNPPSDLKAVEFADSDKLAVGENVMAIGNPLGYDDTATTGIVSALNRPVTVTDDNNNEIVTNAVQIDAAINPGNSGGPTFNAAGQVIGINSSIASTATSSDSAGSIGIGFAIPSNLVKRVADEIIKDGKVKHVALGVVIKSDTVEADGVTRGGATITKSSATGSAVVSGGPADKAGLKEGDTIVAFNGNAVNNNYSLLGYVRAAALGDKVTLTIVRDGKTMNVDVTLDQEESSVNGSSGSDSNGNSQNNQNNQNGNGQNGYGNGNGNSDGGTGDGGGFSDPFGLW

SEQ ID NO: 41482 - protein, 754 aa, Campylobacter upsaliensis RM3195
MKNAIISYPRIGANRELKFAIEKYFKKQSSKEELLACAKDLRARHWREIKEAGIDFIPSNDFSFYDNVLDAAVLFNIVASRYRALNLEPLEQYFAQSRGYQGEKGDTTALAMKKWFNTNYHYLVPECDEAELIALSGDKIFKEYLEAKEQGIETKPVLVGIFTLFKLIAFKDESTQKLAQKKLLNAYLELFEKLNDLGVQWLELDEPYLVYDLSEKDLALFDEFYKELLSHKKGLKILLQSYFGDVRDIYAKLLEYNFDGLGLDFIEGKESLNLIKQYGFSKDKILFAGIVNGKNIYANDYAKSLKLVKELQKYTQNIVLNTSCSLLHVPYSTEFETKLEKNYLKLFAFAKQKLKELKDLKEILNSSEENPLFKANQELFTNIPNRFDEKVKARLNSLKKEDFVRKPEFKERIKIQEGVLNLPLLPTTTIGSFPQSADVRSNRLAFKQQKISAQNYTEFNQQKIKECIQIQEEIGLDVLVHGEFERNDMVEYFGENLQGFLFTQNGWVQSYGTRCVKPPVIWGDISRTKPITLSWSKFAQSLSKKIVKGMLTGPVTILNWSFPREDISLKESTEQIALAIRDEVLDLEKEGIKIIQIDEAALREKLPLRKSDWHSEYLNWAIPAFNLVHSGVKASTQIHTHMCYSEFNDILKDIDALDADVISFEASRSNLELLDTLKAVNFKTQVGPGVYDIHSPRVPSEEEIKTTIEKILARLPKEQIWINPDCGLKTRGYEEVVLALKNLVAATRKVRNSL

SEQ ID NO: 41483 - protein, 429 aa, Vibrio parahaemolyticus RIMD 2210633
MADKKATLHVEGQAPIELPIMDGTLGTPVIDVRKLGANGYFTFDPGFLATASCESSITYIDGGKGILLHRGYPIDQLANNADYLEVCYILLYGEAPTREQYEQFKTTVTRHTMVHEQIASFFHGFRRDAHPMAVMCGVVGALAAFYHDSLDINNDEHREIAAYRLLSKMPTLAAMCFKYSVGQPFIYPRNDLSYAENFLHMMFANPCEEYEVNPVVARAMDKIFTLHADHEQNASTSTVRLAGSSGANPFACIAAGIASLWGPAHGGANEACLKMLEEIGSVDNIPEYVERAKDKDDPFRLMGFGHRVYKNYDPRATVMRETCHEVLKELNIKDPLLDVAMELERIALSDEYFVSKKLYPNVDFYSGIILKAIGIPVSMFTVIFAISRTIGWIAHWNEMHSDPLNRIGRPRQLYKGETQREFSPLHERE

SEQ ID NO: 41484 - protein, 250 aa, Zea mays
MATAAAAAAMEEPDVVNGRDVVSWVASGVVLWSTAFLLVRALFPKRSYDFCNRAVSTMHAVAAVCLACLSVDDWSCPVCPLAAASSPRQMKALAVTLAYMVYDAACCHLNGDTRLDNAVHHLVSIVGIGAGLAYQRCGTEMVASMLVTEMSSPLLHLREMLKELGVRDTELNLLVDVLFAATFSAARMGVGPYLTYVTVTADNPILIKAMATGLQLVSAYWFLRILRMVRYKLAGKKKPTPAKLAAAAAN

SEQ ID NO: 41485 - protein, 637 aa, Glycine max
MSCLLPHFNCHLDTFRTHPYALPTHLSKTRPNLCFQPQCVLSATSPSTLLSLEKKLALDAPSDPNTSWPYIAAVSPPLQLGMQFSLFNLPLWMGGHNNVPSAQLVFLGLHQVHGSKTSKIVPKDPSHISSLVAQRNLACQAYPGTNYIYAFNQANFKSTLSAESLLTNEEAVIAAAASEALALAKAAVKVAKDAVLLVKKKPPAEAEYKSHVSSKSDDLLLKWFHQMEAEDGVAEESMGAGAEIMEGVDISPSEEESDLEPSHEELECLQERLSDNIAVRSRRLTERKAKRVRAAEKATTNFASLKPGSSSRRKRVSMQEVDYSDPLRYLRTTTSASRLLTPTEEIKLSAGIQDLLKLEKIQEDLAERFGDQPTFAQWAAVAGVDQKTLRKRLNYGIFCKDKMIKSNIRLVISIAKNYQGSGMNLQDLVQEGCRGLVKGAEKFDGTKGFKFSTYAHWWIKQAVRKSLSDQSRTIRLPFHMVEATYRVKEARKQLYSENGRQPDDEEVAEATGLSMKRLNAVLMTPKAPRSLEQKIGINQNLKPSEVISDPDAETAEEQLLKQFMKKDLEEALDSLNARERQVVRWRFGMDDGRTKTLQEIGEMLGVSRERIRQIESSAFKKLKNKKRTNHLQQYLVS

SEQ ID NO: 41486 - protein, 328 aa, Xanthomonas campestris pv. vesicatoria str. 85-10
MKAPVRVAVTGAAGQIGYALLFRIASGEMLGKDQPVILQLLELPIEKAQAALKGVMMELEDCAFPLLAGMVGTDDAEVAFKDVDIALLVGSRPRGPGMERKDLLLANAEIFTAQGAALNKVAKRDVKVLVVGNPANTNAYIAMKSAPDLDPKNFTAMLRLDHNRALSQLSAKLGKPVAGIEKLAVWGNHSPTMYPDYRFATADGASVGDAINDQEWNASTFIPTVGKRGAAIIEARGLSSAASAANAAIDHIRDWVLGTNGKWVTMGVPSDGSYGIPEGVMFGFPVTTENGKYTIVKDLPIDDFSQKYIDKTLAELEEERSGVAHLLG

SEQ ID NO: 41487 - protein, 588 aa, Vibrio parahaemolyticus RIMD 2210633
MSIPVREFDAVVIGAGGAGMRAALQISEQGLSCALLSKVFPTRSHTVSAQGGITVALGNSHKDDWQWHMYDTVKGSDYIGDQNAIEYMCKNGPESVIELEKMGLPFSRFDNGTIYQRPFGGQSKEFGGEQAARTAAAADRTGHALLHTLYQQNVKHKTTIFSEWYALDLVKNQDGAIMGCTAICMETGEICYFKSKATILATGGAGRIYASTTNAHINTGDGVGMALRAGVPMQDMEMWQFHPTGIAGAGVLVTEGCRGEGGYLLNKDGERFMERYAPNAKDLAGRDVVARSMMIEIREGRGCDGPWGPHIKLKLDHLGKEVLESRLPGICELSRTFAHVDPVKEPIPVIPTCHYMMGGVPTQVSGQAIKQLADGSEAEVQGLYACGEIASVSVHGANRLGGNSLLDLVVFGRATGLHLGETLAAQVEARPATESDIEASLARTMRWENSTGGEDPVQIRKDLQRCMQNSFSVFREGDAMATGLEELKVIRERLKDAHLADKSSEFNTQRIECLELDNLMETAFSTAVAANYRTESRGAHARFDFPERDDENWLCHSIYNPETEAMTKRDVNMTPVHRDAFPPKVRTY

SEQ ID NO: 41488 - protein, 614 aa, Nostoc sp. PCC 7120
MERESPRSDSWNPPFSKRGRMSTYRQAFAGISSRFEAPYGHRVYEVHVLPVRNDDGEIFAGMTITQEITERKQSELALQNALQLLNLHIDTTPLAVVQWDCHLCVTRWSSAAEKIFGWLAEEVIGKYIQDLHIVYEEDMTAVAEVSDRLLSGQEAQIIQYNRNYTKDGRVIYCEWYNSSITNEEGSVTSVLSLVLDVTERIQAEKALRQSELMVTEERAQALERERAARIELERASRMKDEFLAIVSHELRSPLNGILGWSRLLRTRKLSPEKIEQALESIERNAQAQTQLIEDLLDISRIIRGNIRLLVRPTKLIPVIQAALDTVRPIANTKSIQIISRLNFDIGLVSADPERLQQVIWNLLSNAVKFTPEGGRVEICLEQVETNVQIQVIDTGTGISPEFLPYVFDRFRQADATTTRNQGGLGLGLAIVRNLVELHNGKVSVASPGEGQGATFTVQLPLLATYSTLTPEEPLIQRQTAWDTKVQIKGLKILAVDDEPDTREFLKTALEQYGAIVTTAASTREALKLLQLVKPDVLLSDIGMPNEDGYALIRQIRALSSEQGGNVPAAALTAYTRQSDRLQALTAGFQIHISKPIEPIQLLKIVATLAGNNSN

SEQ ID NO: 41489 - protein, 188 aa, Triticum aestivum
MPHLAASPASAFAVAGFRPPPRAPTRARASATAGGAARTATAVQQQTQQPTFYDLLGISPEGSTFEDVRAAYRRMARKYHPDVSPPDATKEHTRRFIQVQEAYETLSDPSRRTSYDRALARGVCRLAFSPAARRHDASAFYHQEQEERSGWRTSWEGQISELKKRSTVKDAEENLSWGAQMRRRAEQL

SEQ ID NO: 41490 - protein, 550 aa, GIBBERELLA ZEAE PH-1
MICLSKADESFYQRLTWNQAPSPLAASQTTRQDLNGISNLREHVDAAQDDGSGGTAGSLLNGHDDSNQAGSHPAEPFKGSLKDAGRQSRISGLSSCLKTVNGGVDHFRLPRGTLSSCASHIWSWTVWVLSVLAVSTLISYWNSPAPVAVVMTSPPIVQESIPIHLSPLHKRASTCESGGVNKDEYNTPLHVGALFIILFVSTLACAFPIMASKFPGLRIPNRFFFAVRHFGTGVLIATAFVHLLPTAFISLGNPCLSSFWNKDYPAIPGAIALAAIFLVTVIEMVFHPSRHVSPAEITTPKEGSVGSNSGGCMGGTGMLPIRDMGPIRGRSSSIGQNLSTLNSRDVRMQDLEEEACEDDDNVQSGRKNLEETSLEAVQMPVLTPEQQQRKELLQCVLLELGILFHSVFIGMALSVSIGNEFIILLIAIVFHQTFEGLALGSRIASVKWPQGKMQPWFMALAYGCTTPLGQALGLATHTLYSPNSETGLIVVGVMNAISAGLLTFASLVELLSQDFLSDESWQFLRGRKRIYACLLVFFGAFFMSLVGAWA

SEQ ID NO: 41491 - protein, 841 aa, Cryptococcus neoformans var. neoformans B-3501A
MGNDQSRTSSGDGKQVDEKPPDYYELLQVDEEAGYDEIKRSYRKLALINHPDKNPHRIEEATKLFADLQHAYEVLSDPQERAFYDSHRNAPVAATDDDIFEHVRTGDKATNDPKSKLNRRRQGDPGVTIAQLMRFFDPKIASKMDDTSEGFYSIYRTLFALLASDEALHTTSTTPLSYPSFGNSSTAYAPPPGLTRAQKDSQVWARDFYAVWGEFVTEKKFEWLNKWDAERGDDRMVRRAMEKENKKAREETRKEYNETVRQLVVFIQHRDPRYKAHQTKLAQERAASKSAKTSGASTPAGKPVVDAEAAKRRHEERLRAAAQYEEQDWQKFSSRNSDDEEMEEEEPEEELGDGTGVRLDDGQGGEIFECVACGKTFASEASWINHERSKKHKQAVWRLKKEMRAEAKAMGLTEPQSEEEPGDERAEDADAGEGEIGGETKGVGMTEEEQLAELQALEAEMIDLALEESEDVDYGNKKSKKKGKKNRRDGVIDEVDAATGLSPSRNESQPDASNTPSAAVSDDGVARESDKTSELSKRDKRRAREARKKIEEEERKAAFKEARKAAKKAGASVETFASPRQSDRKDKVDDDGFVAPKQKGKNSIKSGKGTKGGREQGENDYSDERVAKVVAGIQEKREKMVEKWGDTWADLVSKLKHLLSGDSHLPLSILCLGLGKPFSDRTAQIQLALALELADALNCTVHDLEMYDPVWDEGDKKVLSSIGVTLLQDNLLGRHTLETGRPYLLYLPHAPKQLYESILSTNYAPSLCGNKPGRILLGNDLAEYLPGFVRPSQKKEPSGEADGDGEFVKPKKKRRGRGEVKPQIKDGVLSRVGESHSALLR

SEQ ID NO: 41492 - protein, 321 aa, uncultured bacterium 442
MELIAVCDSKVNTAPDFPMGWWSLARSHELQVGEVKSVSALDRELVLYRTRSGAVRVHDAYCPHLGANLGVNGRVVGESIQCPFHGWQFGGDGVCEKIPYCEEIPSRAKLNNWPATEINGEIYMWFHPTGEEPQWQVPKVEQLDDENWTAPRQVEFLVPTHVQDIAENSCDPEHFQYVHKQSETPPSSVTVEEDGAVHLRAEMNASGMPGQLHATMFQPGLATVLTSYGPGAEMIVYNSAQPYSREETLLRWTLTVRKEIADLAGDQVMNGIIDGLQDDYPIWKNKVHRKQPIFCKGDETLVLFRKWVRKFYLPNSERGVQ

SEQ ID NO: 41493 - protein, 698 aa, Glycine max
MATVTQPCPSWTRGSVPLSKRVLPRRRFTTRLTTYPQAALVQAPPPPPPSSPRDSSSSIQLLTLSRANDLQAEARAMARAANATVYNPQLIASMYGSQPIKVVRRTLQILTALGSFGLKLLLDQRNGALDKNRRVRAVELKDIFTKLGPTFVKLGQGLSTRPDICPPEYLEELTELQDGLPTFPDEEAFACIERELGLSIDFIFSTISPTAVAAASLGQVYKARLKYSGKLVAVKVQRPDIEEAIGMDFYLIRGLGIFINKYIDIITSDVVALIDEFARRVFQELNYVQEGQNARRFKKLYADKEDICVPDVFWDYTSAKVLTMEWVDGVKLNEQEAIERQGLKVLDLVNAGIQCSLRQLLEYGYFHADPHPGNLLATPEGKLAFLDFGMMSETPEEARYAIIGHVVHLVNRDYEAMARDYYDLNFLSRDVDVSPIVPALRNFFDDALNYTVSELNFKTLVDGLGNVLYQYPFNVPAYYALILRSLTVLEGLALYADPNFKVLAASYPYFAKRLLTDPNPYLRDALIELLFQDGRFRWGRLENLLAQGRMDRDFSAKEALQPVLKVLLSPDGEEIRTLVIKEAVRVTEAFTLSTISDTYKSVPDFMRVLVFNGNANGPIITSETEMQNLIELRDQVIRIWELLRSSNDYDPDLLLPILQVLQQPEARRLGERVMGGITQRLAARFLQQVLRVPMPASS

SEQ ID NO: 41494 - protein, 333 aa, Synechocystis sp. PCC 6803
MGHKYDVYGMGNALVDMEFEVTPEQLASLGIDKGVMTLVEEARENELIAQLAQQRGKQSSGGSAANTLVSLAQLGGTGFYACKVGKDEAGAFYLQDLNDCGLDTNPHHETAGEGITGKCLVFVTPDADRTMNAFLGISGSLSVTEMDWSALKQSQYLYLEGYLVTSPSAKAACIEAKAIAEQSGVKTCLSLSDPNMAKFFQDGLKEMLGSGVDLLFANEAEALEMAGTSDLNQAIAYCKSIAKNFALTRGGAGSLIFDGENLLTIGTPKVQPIDTVGAGDMYAGGFLYGLTHGMDYEKAGQLASETAAKVVTCYGPRLDTEILQEILQSVQAV

SEQ ID NO: 41495 - protein, 480 aa, Pseudomonas syringae pv. tomato str. DC3000
MQLKDSTLFRQQAYINGQWLDADGGQSIKVNNPATNEILGTVPKMGAAETRRAIEAADKALPAWRALTAKERGNKLRRWFELMIENQDDLGLLMTLEQGKPLAEAKGEITYAASFIEWFAEEAKRVYGDVIPGHQPDKRLIVLKQPIGVTAAITPWNFPAAMITRKAGPALAAGCTMVLKPASQTPFSALALAELAERAGIPAGVFSVVTGSAGDIGSELTGNPIVRKLSFTGSTEIGRQLMAECAKDIKKVSLELGGNAPFIVFDDADLDKAVEGAMISKYRNNGQTCVCANRIYVQDGVYDAFAEKLKVAVGKLKIGNGLEDGITTGPLIDEKAVAKVKEHIADAVSKGATVLTGGNSLEGSFFEPTILVNVSKDAAVAREETFGPLAPLFRFKDEAEAIALANDTEFGLASYFYAQNMSRVFRVAEALEYGMVGINTGLISNELAPFGGIKSSGLGREGSKYGIEDYLEIKYLCLSV

SEQ ID NO: 41496 - protein, 323 aa, Arabidopsis thaliana
  misc_feature (7)..(7): Xaa can be any naturally occurring amino acid
  misc_feature (31)..(31): Xaa can be any naturally occurring amino acid
  misc_feature (37)..(37): Xaa can be any naturally occurring amino acid
  misc_feature (68)..(68): Xaa can be any naturally occurring amino acid
  misc_feature (151)..(151): Xaa can be any naturally occurring amino acid
  misc_feature (165)..(165): Xaa can be any naturally occurring amino acid
  misc_feature (176)..(176): Xaa can be any naturally occurring amino acid
  misc_feature (188)..(188): Xaa can be any naturally occurring amino acid
  misc_feature (218)..(218): Xaa can be any naturally occurring amino acid
  misc_feature (287)..(287): Xaa can be any naturally occurring amino acid
  misc_feature (305)..(305): Xaa can be any naturally occurring amino acid
  unsure (1)..(323): unsure at all Xaa locations
ASWFDRXFGFVDLKGIVFWFFHKLEPPSPSXPAVAAXNGFFHDFTTYVLDNGDSAVTSGNFFEVLTSXELYKNTKVRDISGTFRWAPFFALQKENSFLTILLLLSKYKMKSIPVVDLGVAKIENIITQSGVIHMLAECAGRRGAEEGFFKXLSEDALPIMSKDHXVKIYEDEPVLXSLKLMRRKRIGXYPVIEINIEKPVGNISLRDVQFLLTAPDIXAHDYSAHITTKNFLASLIEHLEKCGDTSAPVIIVVIACTNNHTLKALIFMLYAEKIHRIYVVDDFVNLXGLITFINIIARLAHEPSXLFGDFFDGVMPLPENYRV

SEQ ID NO: 41497 - protein, 442 aa, Thermus thermophilus
  misc_feature (1)..(1): Xaa can be any naturally occurring amino acid
  unsure (1)..(442): unsure at all Xaa locations
XASSLDELVALCKRRGFIFQSSEIYGGLQGVYDYGPLGVELKNNLKQAWWRRNVYERDDMEGLDASVLTHRLVLHYSGHEATFADPMVDNAKARYWTPPRYFNMMFQDLRGPRGGRGLLAYLRPETAQGIFVNFKNVLDATSRKLGFGIAQIGKAFRNEITPRNFIFRVREFEQMEIEYFVRPGEDEYWHRYWVEERLKWWQEMGLSRENLVPYQQPPESSAHYAKATVDILYRFPHGSLELEGIAQRTDFDLGSHTKDQEALGITARVLRNEHSTQRLAYRDPETGKWFVPYVIEPSAGVDRGVLALLAEAFTREELPNGEERIVLKLKPQLAPIKVAVIPLVKNRPEITEYAKRLKARLLALGLGRVLYEDTGNIGKAYRRHDEVGTPFAVTVDYDTIGQSKDGTTRLKDTVTVRDRDTMEQIRLHVDELEGFLRERLRW

SEQ ID NO: 41498 - protein, 141 aa, Saccharophagus degradans 2-40
MAIERTLSIVKPDAVEKNIIGKVISRFEKAGLKIVAAKMMHLTEEKARGFYAEHEGRPFFAGLVEFMTSGPVVVQVLEGENAIALNRELMGATNPAEAAEGTLRKDFADSVGRNAVYGSDSPASAEREINYFFDASEICPR

SEQ ID NO: 41499 - protein, 114 aa, Brassica napus
  misc_feature (27)..(27): Xaa can be any naturally occurring amino acid
  misc_feature (101)..(101): Xaa can be any naturally occurring amino acid
  unsure (1)..(114): unsure at all Xaa locations
PRVRVTSDGYVRVFNLRDKEHSTIIHXSPEPDIPLVHHGWNKHDPTYMATIITDSAKVVMLDSRFPALPVVELQRHHASVNAITWAPHSSCHICFAGDDSXALIWEISSMGHHG

SEQ ID NO: 41500 - protein, 66 aa, Ipomoea batatas
MSSGCKCGSDCKCGSDCACEEVTTTVTIIEGVAPVKLALEGSSEKATEGGHACKCGSNCTCDPCNC

SEQ ID NO: 41501 - protein, 174 aa, Saccharophagus degradans 2-40
MLACTFTASTHAAEESAQCPSYLDHSFKKLHSTQTVNLCELYTGKPLLIVNTASHCGYTKQFGGLEKLYQSYKDQGLQVIGFASDDFKQAAKSEMEAATICYKNYGVTFTMLAPTTVTGEKANAVFSHLNANTSAPSWNFNKYLITKNGQNIEKFNSDVTPLASDLEKKVQKAL

SEQ ID NO: 41502 - protein, 76 aa, Ipomoea batatas
MSCCGGNCGCGSGCKCGSGCNGCGMYADVEKPTTVSSLIQGVAPVKNSFEGGAEKATEGGHACKCGDNCQCNPCNC

SEQ ID NO: 41503 - protein, 121 aa, Glycine max
MARTFVLMLVAAAALLLSSTMAQSPASSPALSPTNTPVATPPRRALSPSPVPAAVPPSSSPPAPPTSSPSEPPIAAATPNIPPSTISTPPSEAPGPAANGAVFNRVGGSALILIIASAMLV

SEQ ID NO: 41504 - protein, 54 aa, Triticum aestivum
MGSETFVEILLAILLPPVGVFLRYGIGVEFWICLLLTVLGYIPGIIYAIFVLVA

SEQ ID NO: 41505 - protein, 545 aa, Mycoplasma penetrans HF-2
MRKITIGNYLLERLSEIGIKDIFGVPGDFNLGFLDDIIKNEDLNWIGCTNELNASYSVDGYARVNGIGAILTTYGVGELSAVNGIAGSYSEDVPVIHIVGTPKREYFKRHMILHHSLGTSDSFGAYKKIYENITSLTVWLDAKNAINQINNAIKYAVFYKKPVYIMIPQDVASFEIMADSDLLSFASGFDLEEHKEIIEDVKNKINNSNQAVIISGHKVIRYGLKSDLEKFVNRNGINVVTTGFGKGSVDETNELYLGVYSGLKTPDAAIAKIIDTADLVLIIGNKFTDLTSSFFQLNFNKDNVVEISDTHVKYDNKIFTNHSFGFLVKMLANDTNINYKGLSVLENRVAVEFNPTEEKITYNRLQVALNNYFVEKDILVSDVGTCTFLSQYIQLKKDMKFIMQPLWASIGFSFPASIGAQIASNSKVVNILGDGAFNMVFNELITVINKQIPITTILLNNNGYTIEKVIHGDGKPYNELPKVNYSQLIKAFDPEGEKSISLRVTNEIELQEALVISRSSDKFVFIEVCLEQNDIPEALKGFFNK

SEQ ID NO: 41506 - protein, 502 aa, Pseudomonas fluorescens
MTRSLTMNSSLPAIDGLRLPHQMLIGGQWVNAQSDKTLNVYNPATGDTLTDVPDGDVEDVNAAVESAAATLQSDAWRRMPPSARERILLRLADLLEAHGDELARLETLNNGKLLIYSKMMEVGASAQWLRYMAGWATKLTGSTLDLSLPLPPDVRSRASTQRVPVGVVAAIIPWNFPLLMAVWKIAPALACGNTVVLKPAEETPLTALRLAELAMEAGLPAGALNVVTGRGETAGDALVRHPKVAKVAFTGSTEVGRIIGSACGRSLKAVSLELGGKSPVIVLADCDPQEAAEGAAAAIFFNHGQVCTAGSRLYVHESIYEDVIQRLAVIGESIVVGSGLEQGVHMGPMVSKKHHENVLRHIRNGIEDGADLICGGTEAPCAQGFFVKPTIFANREKKDIRLLSQEVFGPVLVATPFSDIAEVVNEANRSVYGLGASIWTNDLSAALRINDELEAGTVWVNTHNMVDPNLPFGGFKDSGVGREHGAAAIEHYTTTRSLVIAY

SEQ ID NO: 41507 - protein, 309 aa, Rhodopseudomonas palustris CGA009
MTTLFLTHSACLDHHTPEGHPERAARLVAINKTLGEERFAPLARAESPIGSLEHIALCHTDHHIVELRHMSPSTGIVYVDGDTSMSPGTFEAALRGVGGSVAAVDAVMKGEAANAFVATRPPGHHAEITKPMGFCFFGNAAIAARYAQRQYGIERAAVVDFDVHHGNGTQDIFWGDRTVMYCSTHQMPLFPGTGSQGERGEYDNIVNAPLASEDGGTEFRFAFEQLILPQLKRFSPELIVISAGFDAHYRDPLASLNLRAEDFGWVTERLMEVAAQTAGGRIVSVLEGGYDLQGLSESVAAHVGALMGA

SEQ ID NO: 41508 - protein, 301 aa, Lycopersicon peruvianum
MSQRTAPAPFLLKTYQLVDDAATDDVISWNEIGTTFVVWKTAEFAKDLLPKYFKHNNFSSFVRQLNTYGFRKIVPDKWEFANENFKRGQKELLTAIRRRKTVTSTPAGGKSVAAGASASPDNSGDDIGSSSTSSPDSKNPGSVDTPGKLSQFTDLSDENEKLKKDNQMLSSELVQAKKQCNELVAFLSQYVKVAPDMINRIMSQGTPSGSSLEELVKEVGGVKDLEEQGSYNDNDDKEDDDEKGDTLKLFGVLLKEKKKKRGPDENIETCGGRGKMMKTVDYNGPWMKMSSPAGESSKVCN

SEQ ID NO: 41509 - protein, 458 aa, Listeria monocytogenes str. 4b F2365
MAQTSTIQNDTKAAEEYAARVFETIKLRNPGETEFHQAVEEFLNSVIPALAKEPKYEANGILEQLTEPERLISFRVPWVDDSGTVHVNRGYRVQFNSAIGPYKGGLRFHPSVTGSIVKFLGFEQIFKNSLTGLPIGGGKGGSDFDPKGKSDSEVMRFCQSFMTELQKHIGPDTDVPAGDIGVGGREIGYLFGQYKRLRGAYDAGTITGKGLSYGGSLARTEATGYGLVYFTVEMLEAAGETIRGKKIVVSGSGNVAIYAIEKAHELGAKVVACSDSAGFVYDKEGIKVETVKQLKEVERKRISEYTTIHPSAEYYAGGDVWSVPCDIALPCATQNEINADQARALVKNGVIAVAEGANMPSTLDAVDIYHENKVLFGPAKAANAGGVAVSALEMAQNSTRMSWTFQTVDEHLQNIMKDIYKNSSNAASEYGAPGNLVIGANIAGFLKVADTMISQGII

SEQ ID NO: 41510 - protein, 311 aa, Glycine max
MFCVSVGVNFIGGFAFASGIPKSSVSATMASNSVRVAAAQMTSISDLAANLATCSRLIKEAASAGAKLLCFPEAFSYVGTKDGDSVRVAEPLDGPIMSHYCSLARESSIWLSLGGFQEKGSDPQRLSNTHVIVDDTGKIISSYSKIHLFDVDVPGGRVYKESSFTESGKDIVAVDSPVGRLGLSVCYDLRFPEMYQLLRFQHEAQVLLVPAAFTTVTGEAHWEILLRARAIETQCYVIAAAQAGKHNDKRESYGDTLIIDPWGTIVGRLPDRLSTGIVVADIDLSFVDSVREKMPIAKQRKPIGFWKAASL

SEQ ID NO: 41511 - protein, 512 aa, Petunia x hybrida
MEILSLILYTVIFSFLLQFILRSFFRKRYPLPLPPGPKPWPIIGNLVHLGPKPHQSTAAMAQTYGPLMYLKMGFVDVVVAASASVAAQFLKTHDANFSSRPPNSGAEHMAYNYQDLVFAPYGPRWRMLRKICSVHLFSTKALDDFRHVRQDEVKTLTRALASAGQKPVKLGQLLNVCTTNALARVMLGKRVFADGSGDVDPQAAEFKSMVVEMMVVAGVFNIGDFIPQLNWLDIQGVAAKMKKLHARFDAFLTDILEEHKGKIFGEMKDLLSTLISLKNDDADNDGGKLTDTEIKALLLNLFVAGTDTSSSTVEWAIAELIRNPKILAQAQQEIDKVVGRDRLVGELDLAQLTYLEAIVKETFRLHPSTPLSLPRIASESCEINGYFIPKGSTLLLNVWAIARDPNAWADPLEFRPERFLPGGEKPKVDVRGNDFEVIPFGAGRRICAGMNLGIRMVQLMIATLIHAFNWDLVSGQLPEMLNMEEAYGLTLQRADPLVVHPRPRLEAQAYIG

SEQ ID NO: 41512 - protein, 514 aa, Methylobacillus flagellatus KT
MRWLRLFHIILVTLRFGLDEFILGHTSLRPLQRPVQVLLFWRDTSRPRGERLRLALESLGPIFVKFGQMLSTRRDLIPLDLADELAKLQDRVPAFGYDDVETILKQAYGKPVLEVFQSFDVEPIASASVAQVHFAQLPDGRPVAVKILRPGISKVIEKDLKLLDSAAWLLQTLSSDGKRLKPREVVAEFARHIHSELDLMLEAANCSLLGRNFADKRLLLVPDVYWDWCHEQVMVMERMNGTPVSQVDHLREIGVDIPKLARDGVEIFFTQVFRDGFFHADMHPGNVQVADDGRYVALDFGIMGTLNDEDKQYLARNFLAFFRRDYREVARAHIESGWAPKDTPIDEFETAIRAVCEPIFDKPLKEISFGKVLLRLFQTSRRFGVEIQPQLAMLQKTLLNVEGLGRDLDPNLDLWKTARPYLERWMSEQVGWRSALDNLRAELPYWSKILPQMPRLIHQQLERGLQYSPTNAELERMREEHQRQTRWLRLITVALILLVLLQSTALLLWWLARH

SEQ ID NO: 41513 - protein, 216 aa, Glycine max
  misc_feature (72)..(72): Xaa can be any naturally occurring amino acid
  unsure (1)..(216): unsure at all Xaa locations
KDSQKGGPQNALVVGPTMPSTTPNDTGFQSKSTAVVSASGSSERNLSTSALMERMPSKWPRPVWHAPWKNYXIWDLASGVLKLTLTGHIEQVRGLAVSNRHTYMFSAGDDKQVKCWDLEQNKVIRSYHGHLSGVYCLALHPTIDVLLTGGRDSVCRVWDIRSKMQIHALSGHDNTVCSVFTRPTDPQVVTGSHDTTIKMWDLRYGKTMSTLTNHKK

SEQ ID NO: 41514 - protein, 1292 aa, Arabidopsis thaliana
MQALQSSSLRASPPNPLRLPSNRQSHQLITNARPLRRQQRSFISASASTVSAPKRETDPKKRVVITGMGLVSVFGNDVDAYYEKLLSGESGISLIDRFDASKFPTRFGGQIRGFSSEGYIDGKNERRLDDCLKYCIVAGKKALESANLGGDKLNTIDKRKAGVLVGTGMGGLTVFSEGVQNLIEKGHRRISPFFIPYAITNMGSALLAIDLGLMGPNYSISTACATSNYCFYAAANHIRRGEADMMIAGGTEAAIIPIGLGGFVACRALSQRNDDPQTASRPWDKARDGFVMGEGAGVLVMESLEHAMKRGAPIVAEYLGGAVNCDAHHMTDPRADGLGVSSCIERCLEDAGVSPEEVNYINAHATSTLAGDLAEINAIKKVFKSTSGIKINATKFLLQSMIGHCLGAAGGLEAIATVKAINTGWLHPSINQFNPEQAVDFDTVPNEKKQHEVDVAISNSFGFGGHNSNLGVLYRLEEIKRAKQARRQETRLRHKRDFIQFLDSMYMEEIKALVHQKRHRLIINISDIHHHFREVASRILKNPNEYMQSFCDAATEATRAIDPKYLKEGELVLVGFEGYFVSRVVTPRELLSDFIGSMVCVEGIVTKCKLIIFTLFLCFSSVSFVFYVEDFEPLTHALLSGSLVRPKVVKSVHFCPSTGEFTNRDYRDITSHAGLPTGSVYPTRDDKGNLLVTEYGLCKYKDHQTLSIQEVPENAAPGQLPRSVDVIAEDDLVDSCKPGDRVSVFGIYKALPGKSKGSVNGVFRTILIANNIALLNKEANAPIYTKQDLDNIKNIARRDDAFDLLARSLAPSIYGHAWIKKAVVLLMLGGVEKNLKNGTHLRGDINMMMVGDPSVAKSQLLRAIMNIAPLAISTTGRGSSGVGLTAAVTSDQETGERRLEAGAMVLADKGIVCIDEFDKMNDQDRVAIHEVMEQQTVTIAKAGIHASLNARCSVVAAANPIYGTYDRSLTPTKNIGLPDSLLSRFDLLFIVLDQMDAGIDSMISEHVLRMHRYKNDRGEAGPDGSLPYAREDNAESEMFVKYNQTLHGKKKRGQTHDKTLTIKFLKKYIHYAKHRITPKLTDEASERIAEAYADLRNAGSDTKTGGTLPITARTLETIIRLATAHAKMKLSSEVTKADAEAALKLMNFAIYHQELTEMDDREQEERQREQAEQERTPSGRRGNQRRNNEDGAENDTANVDSETADPMEVDEPSVEQFSGTVSAARIETFERVFGQHMRTHRLDDISIADIETVVNNNGVGASRYSADEIMALLEKLQDDNKVMISDGKVHII

SEQ ID NO: 41515 - protein, 339 aa, Zea mays
MLEVGAMDMTPKSPEPESETPTRIQPAKPISFSNGIIKRHHHIHHHTVTVTYKECLKNHAAAIGGHALDGCGEFMPSPSSTPSDPTSLKCAACGCHRNFHRRDPDDSSLISAVPPPSLPPSSTTAAIEYQPHHRHHPPPPAPPLPRSPTSSSPPPISSSYMLLALSGNNKPGGNSLPFSDLNFAANNLSTHHHHNHNTPGSRKRFRTKFSQTQKDKMHEFADRIGWKIQKRDEDEVRDFCREVGVDKGVLKVWMHNNKNTFNTRRDQPFSGDTTVQKIDNGVAVSGGENINNNNNNNNNAVDVGVHGGNGLKHDLHGGDGGRFESDSGGAAANGSSSTS

SEQ ID NO: 41516 - protein, 421 aa, Nostoc sp. PCC 7120
MTVAALDDCPEPMKSAKRAFQASLKLGTTKGIDRSRAVLAMAQALENAFDDILEANTLDLEASREMAVPELILDWLKLTPTRLEITVEILQRLGEISDPLRRVRNADYQPEDSQSYSQLMPLGVIGFIYEAFPDLGAIAAGLCIKTGNSIILKGSTEASHSNAAIVEALQHAIVEVGLPSGCIELVTTEHGGSLRDLITQDQYINLVIPYGRSSLVQQVMRQATCPVLKSAMGNCYLYWSLNSSLDMVRWMILDSHESEPDPVNAIEKVLIHRQAMPSSLAVLWNSLKEKGFEIKGDGELVEAFPQLQLAKDNEWGNAYLTKTVAFKLVDSLDGAIAWINQYSSGHADSIATESYQESRQFALGVNSAATYINTSPRFSRNPSRGDSVFLGMSNQKGHRRGFISLETLTTLKHIIQGNGRF

SEQ ID NO: 41517 - protein, 1028 aa, Cryptococcus neoformans var. neoformans B-3501A
MRFSSRDEEPEDGEVVEDDAVWKNPLATTKYLKGAPSVSSSQKTSSYKKSRPSFIPSLDPADDDGHRPRRPPPPSLSSPPYQQSRHRSSSHNRKTISYEDEERGSGMQHALPKNPQTRLYPHSTEMREPEQRREDKYAKEPRSPHRREGYYSSRRGDGRDYPPQLDRERYGPARRLESGGDGGYGDRSRDRNMDRGGYRDKDDRRSYGRPSDSSAWGRPPREEYRDRRPEEFARHPTGERYREDSRERFPVDRDTGQRRSCSPVRIRSPERSSDRPLTPVPDNGRTSSPDHGAKNIASSRGHRSSPSHSSNHEDHNGEKGNGPIKLNRNRHRPSLPLKHISTQPPRSPSAPPPPPPPDPSTVPPSPTEPPPPMPGNLSLEQTVPHAPNPRAQMATRPPSPKREEGEIRQETESVVFKFKLWTAEEELKALGKNFGGSSTLMRYNMGTKLGEGTFGVVTKAVENDTKRAVALKKITQHNFRDGAHITTLREIKILKSLQHPNVVPLLNMVISRHDNHSENTFIKNEVFMVFPYMDHDLCGLLSNNDFKVNHSGAKCIMKQLLDGMAYIHSNNIIHRDIKTANILVDKHGQIMIADFGLARPWTDNKKMPPHLATEYTNMVVTRWYRAPELLLGWCNYGPAVDIWSIGCVLGEMYLRRPILPGGGDREQLSMIFAKCGPLNEETWSGWQDLPGFPEAHGFAWDKTPRDTSILEESKSWHMDRGGADLLVKLLSLDPSKRPTASEALDHPWFWVSPKPAETINLDFAASHEMSAWHKQPAAAPVQPPPQKAYQTQQAYQSQQTHHAQQIYQPQQPYVAYQSGYGNQQRGHGGYQQQTANATRHNLAMNPYASSQVGNAQGYNQQPYMQAQGVSNMPPGADAYGGINPYGAPVAYNTASLPPPNMAYNGQSSFNGGGGLTGGGGQQYSLPHQPYLPSGPPPMMHGNVNRPSRPPPPTSSEGRPLAAAPFPLAGGGGGGMKTFAPPPPFSLAGGGGGGRGGMPPTMKRPPSDSRRDFGGDHKRQRTEAPLPYD

SEQ ID NO: 41518 - protein, 353 aa, Zea mays
MAKYGEGDKRWIVEERADGTNVHNWHWAERDCIEWSRARLSSLLAGLTVLDGEDGLTLRTVALDNLDGEAYVNIRKGKVIPGYELSLTLSWEAEAASESGAVKVAGTAEVPYLADENADEDPDLHITVRGDETPLALRAKDAFLSRGKPMVLEKIREFVAAMAKGGPAKDELDSKKTPAKVAAAAPGAAPAKKEEVVAPAPAAGKKKAKGKDKEGFKTIKMTETFYCRSKDIYEILMDENRWKGFTQSNAKISREVGGEFSLFDGCITGVNEDLQEGKLIAQKWRFGSWPDGLYSSVRLMLDEPESGVTVIKLKQTGVPEEDKYGNSTVVENTERGWRDLIFQRIRGMFGFGI

SEQ ID NO: 41519 - protein, 141 aa, Oryza sativa
ENIPGGGIASCISPPSSFGEIIYDPFHAVFYLTFILTACALFSKTWIEVSGASARDVAKQLRDNQMVMKGHRDSALIHVLNRYIPTAAAFGGMCIGALSVIADFMGAIGTGTGILLSVTIIFQFYEAFIKEQREGMGAFGF

SEQ ID NO: 41520 - protein, 421 aa, Polaromonas sp. JS666
MSAAARTPVRPLYAQASGSPIRAMLALAGQPGMISLAGGHPDPALLPADWLRECMLAVASGLQGHSLQYGATEGLPALRAASAELLQQRGLQAQAEQVVITTGSQQAIDLLARVLVEPGAGVAVESFNYPAALQAFRFAGAQLVEVPADAQGLDVERLESVLTSARPRVLYVVPNFANPTGAVMPLARRVRLLELAARHEVTLIEDDPYGELWFGAAPPPSLAQINQQTGSHAQVAYMTSYSKVVAPALRLGVLMAPPDVLRAVVLAKQAADVHSGSLEQLTLTAMLASSRLVEHLAMLRKAYAAKARTLAAALHAHCGGLLEFSEPQGGMFVWARLASALPLMPSQAWVDFGLQHQVLAVPGAAFSLHNTAQPWLRLSFANPGADALLQGAQRLGRGLRSLAATADTPSSRQHFPERTSP

SEQ ID NO: 41521 - protein, 398 aa, Polaromonas sp. JS666
MKQVQEAYIVAATRTPIGRSHRGFFRNTRPDDLLVKALQAALAQVPTLDPKAIEDIICGCAIPEGPQGLNIARIGAVLAGLPTSVGGITVNRFCASGLSAVQMAADRIRVGEADVMIAAGTESMSMVPMSGNSPSLSPEMFANDENVGIAYGMGLTAEKVAQQWKVSRDAQDQFAYESHMKALKAQQAGEFTNEITPVEVTDRTANLETGEVIATTRTVSLDEGARPDTTVEGLAKLKTVFAARGSVTAGNSSQTSDGAGALILASEKAVKEFGLKPLARFVSYAAKGVPPHIMGVGPIEAIPAALRYAGLKQDDIDWFELNEAFAAQSLAVINTLGLNAAKVNPMGGAIALGHPLGATGAIRAATVIHALQRHQLKYGMVTMCVGMGQGAAGIFERV

SEQ ID NO: 41522 - protein, 486 aa, Oceanobacillus iheyensis HTE831
MLKTDKQSYLNFINGRWKSSEGGETKEVLNPADKNDVVGVIQRSTIDDVNEAIASAKSAKESWRKLSGNERGNYLYKVANILESRLDDVAETLTREMGKTLPEAKGETARGVAILRYYAGEGLREVGDVIPSTDSSGIMYTTRTPLGVVGVITPWNFPVAIPIWKMAPALIYGNTVVIKPATEAAATAAKVMECFADAELPDGVVNMVTGSGSIVGNRIAEHPDVNGVTFTGSDQTGKHIGQTALARGAKYQLEMGGKNPVIVADDADLDLAVKATISGGLSSTGQKCTATSRVIVQRSVYDAFKEKLLTQIQALTVGNGLEDGNWMGPSVSESQLETVLHYIKKGKEEGATLLTGGHRLTDAEHKDGNFVEPTVFEDVTNDMTIAQEEIFGPVLALIKVETFEEAMKLANDTEYGLSAAVFTENIRKMLTFIDDIEVGLVRVNAETAGVELQAPFGGMKSSSSHSREQGKAAIEFFTSIKTVFIK

SEQ ID NO: 41523 - protein, 567 aa, Vibrio cholerae
  misc_feature (520)..(520): Xaa can be any naturally occurring amino acid
  misc_feature (522)..(522): Xaa can be any naturally occurring amino acid
  unsure (1)..(567): unsure at all Xaa locations
MISKNMRSHLKLSFKSIFSIKFIVISHLVKRVIYPYILAGQKRAFDFFILRNVGQNGRSHWRATMHMSKSFLIISMGFVAVSVQAQTLTRDNGAPVGDNQNSITAGEHGSVLLQDVHLIQKLQRFARERIPERVVHARGTGAHGEFVASGDFSDLTLSAPFTSKGKITPVFVRFSTVIHSKGSPETLRDPRGFATKFYTEQGNWDLVGNNLPVFFIRDSIKFPDMVHSLKPSPVTNLQDPNRFFDFFSHEPGSTHMLTWVYTNLGTPASYRTMDGFGVHAYKWINQKGDVNYVKFHWKSLQGIESLRPDEVVKVQGQDFNHLTNDLYTQINAGNHPKWDLYVQVLTPEQLSKLDYNGLDATKVWLDVPEKKVGTMTLNKVPDNFFLETEQSAFAPSNLIPGIEPSEDRLLQGRLFAYADTQLYRLGANLFQLPINRPLVEVNSHNQEGASNSAQTASDINYQPSRKLELKEDPQFKAVQTQLVGSVQQKAISNPRNFYQAGVLYRSLNEQDKQDLITNLXGXLNKVTDKEIKATMVSHFYRADKDYGTRLARATNTDLKQVAKLAAM

SEQ ID NO: 41524 - protein, 423 aa, Lactobacillus acidophilus NCFM
MILGNMRGELSMVENQNNNQRPRKNSNAKIITTAAIVGVVGGLIGGGVSYYAADQMNNATDTTTAQTSVSSNSSKVSEKSAKTSGTMTTAYNDVKGAVVSVINLKRQSSSSSANSLYSSLFGDDSDSSSGKSGKLETYSEGSSVVYMKSNGKGYIVTNNHVISGSDAVQVQLANGKTVSAKVVGKDSTTDLAVLSIDAKYVTQTAEFGDSKSLQAGQTVIAVGSPLGSEYASTVTQGIISAPARTISTSSGNQQTVIQTDAAINPGNSGGALVNSAGQVIGINSMKLAQSSDGTSVEGMGFAIPSNEVVTIVNELVKKGKITRPQLGVRVVALEGIPEAYRSRLKIKSNLKSGIYVASINKNSSAANAGMKSGDVITKVDGKKVDDVASLHSILYSHKVGDTVNITINRNGRDVNLKVKLEGN

SEQ ID NO: 41525 - protein, 527 aa, Lycopersicon peruvianum
MEPNSSGSGKAAVGDGGGGGAPMLQPAPAPAPMPSANAPPPFLVKTYDMVDDPSTDKIVSWSPTNNSFVVWDPPEFAKDLLPKYFKHNNFSSFVRQLNTYGFRKVDPDRWEFANEGFLRGQKHLLKSISRRKPAHGHAQQQQQPHGHAQQQMQPPGHSASVGACVEVGKFGLEEEVERLKRDKNVLMQELVRLRQQQQSTDNQLQGMVQRLQGMELRQQQMMSFLAKAVNSPGFLAQFVQQQNESNKRIAEGSKKRRIKQDIESQDPSVTPADGQIVKYQPGINEAAKAMLRELSKLDSSPRLENFSNSPESFLIGDGSPQSNASSGRVSGVTLQEVPPTSGKPLLNTASAIAGQSLLPATSEMQSSHLGTCSEIINNQLSNIIPLVGGEDLHPGSLSASDMIMPELSQLQGILPENNTDVIGCDSFMDTIAVEGKMGLDIGSLSPGADIDWQSGLLDEIQEFPSVGDPFWEKFLQSPSSPDAAMDDDISNTSETKPQINGWDKTQNMEHLTEQMGATNIKQQKHMI

SEQ ID NO: 41526 - protein, 260 aa, Zea mays
  misc_feature (63)..(63): Xaa can be any naturally occurring amino acid
  misc_feature (248)..(248): Xaa can be any naturally occurring amino acid
  unsure (1)..(260): unsure at all Xaa locations
MGGTSSSTYLAIGRKTLNPAPSVATAATSVSFPATQNPCLVAASADRRRAVAAKVSSPSVIGXAMPSLDFETSVFKKEKVSLAGHEEYIVRGGRDLFPLLPEAFKGIKQIGVIGWGSQGPAQAQNLRDSLVEAKSDIVVKIGLRKGSKSFEEARAAGFTEESGTLGDIWETVSNSDLVLLLISDSAQADNYEKIFSHMKPNSILGLSHGFLLGHLQSLGFDFPKSISVIAVCPKGMGPSVRRLYVQGXEINGAGINASFA

SEQ ID NO: 41527 - protein, 357 aa, Legionella pneumophila str. Paris
MMSVDNIKNDNQVLAEEDFLEYALSHGFGDLHFKVDPQTGMKAMIAIHSTKLGPALGGCRFIEYPNTAAALKDAMRLARGMSFKAASVNLPLGGGKSVIIKPKGFFNRAEYMHRFGEFVNELNGRYITALDSGTELSDMDIIAEHTDYVASLSRYNGDPSPSTAKGVLRGIQAAVAFKLGKDSLKGLHIAIQGLGHVGYALAKQLHELGATLTVADISPAAVNMAVQELGAKAVGTDIIHKVPCDVFAPCALGAIINDLTIPQLQTSIIAGAANNQLAHTYHGKILHEKGILFAVDYVINAGGLIFAASKYLQTPEDKVSEQIDSIYTSLTEIFTRSAKDNSPTSEIADTLAKEKLA

SEQ ID NO: 41528 - protein, 218 aa, Legionella pneumophila str. Paris
MKHLSLTPELYEYLLDISLREHPALTALRKETSTMELANMQVAPEQAQFMQMLIRSTRAKKVLELGTFTGYSALAMSLALPDDGQVITCDINEGWTKHAHPYWREAKQEHKIKLRLGPALDTLHSLLNEGGEHQFDFIFIDADKTNYLNYYELALKLVTPKGLIAIDNIFWDGKVIDPNDTSGQTREIKKLNQVIKNDSRVFVSLLAIADGMFLVQPI

SEQ ID NO: 41529 - protein, 394 aa, Arabidopsis thaliana
MVMAMDRIALFSSSSSVYHHGSSHSHGSKSSRVFTIRSDSTAVGRKLYIPPREVHLQVKYSMPPQKLEIFKSLEGWANDNLLAYLKPVEKSWQPTDFLPEPESEGFYDQVKELRERCKELSDDYLIVLVGDMITEEALPTYQTMINTLDGVRDETGASPTPWAVWTRAWTAEENRHGDLLNKYLYLSGRVDMRQIEKTIQYLIGSGMDPKTENNPYLGFIYTSFQERATFISHGNTARLAKDLGDLTLGKICGTIAADERRHEHAYTKIVEKLFEIDPDTTVVGFADMMRKKISMPAHLMYDGRDDNLFDHFSSVAQRLGVYTAKDYADILQHLVERWNVEKLSDLSSEGNRAQDYLCGLPARIRKLEERAQGRTKEAAKNIPFSWIFGREVRA

SEQ ID NO: 41530 - protein, 307 aa, Methanosarcina mazei Go1
MRYLNKLLKQSTQTQYLNKVLKYLVDLHLQLKGREVTSIITACIQMNISPCSKHENLDHALSLAEEAVSKEAELLVFPEVFSTGFCYERIEEVAETVSGPTIEALSDFSREYGCILAGSMIEKREIKDKGAISPEKRAPYQYNLGFCIESGKLAGIRRKVQLYGPEKKYFASGDSIAPIRLQKYSLSLGLIVCNELRYPEVARKMTLDGADLLVSAAEIPDFYIYPWRIMSISRAIENQLPHIACNRVGKDRYSTYPGSSFITDGWGRILAKAGKEECVILGEIDLDEARKIRQTGSILEDRRPDLY

SEQ ID NO: 41531 - protein, 608 aa, Staphylococcus aureus subsp. aureus MRSA252
MKWLKQLQSLHTKLVIVYVLLIIIGMQIIGLYFTNNLEKELLDNFKKNITQYAKQLEISIEKVYDEKGSVNAQKDIQNLLSEYANRQEIGEIRFIDKDQIIIATTKQSNRSLINQKANDSSVQKALSLGQSNDHLILKDYGGGKDRVWVYNIPVKVDKKVIGNIYIESKINDVYNQLNNINQIFIVGTAISLLITVILGFFIARTITKPITDMRNQTVEMSRGNYTQRVKIYGNDEIGELALAFNNLSKRVQEAQANTESEKRRLDSVITHMSDGIIATDRRGRIRIVNDMALKMLGMAKEDIIGYYMLSVLSLEDEFKLEEIQENNDSFLLDLNEEEGLIARVNFSTIVQETGFVTGYIAVLHDVTEQQQVERERREFVANVSHELRTPLTSMNSYIEALEEGAWKDEELAPQFLSVTREETERMIRLVNDLLQLSKMDNESDQINKEIIDFNMFINKIINRHEMSTKDTTFIRDIPKKTIFTEFDPDKMTQVFDNVITNAMKYSRGDKRVEFHVKQNPLYNRMTIRIKDNGIGIPINKVDKIFDRFYRVDKARTRKMGGTGLGLAISKEIVEAHNGRIWANSVEGQGTSIFITLPCEVIEDGDWDE

SEQ ID NO: 41532 - protein, 476 aa, Geobacter metallireducens GS-15
MKHWTLKSAGKISLLTAFLLISLIFLGGCDGRSKTEFVGFPQSFADLAEKIRPAVVNISTTSTVKVPGNPFRHFFGPEEEGPFGDFFKHFFGDMPDRELKQQSLGSGIITDKDGYIVTNNHVVDNAEEIKVKISDGREFKAKVIGRDPKTDLALIKISSPFRNLPVLPLGDSDKMRVGDWVLAVGNPFGLEHTVTQGIISATGRVIGSGPYDNFLQTDAPINPGNSGGPLVNLKGEVIGINTAIVPGGQGLGFAIPSSMAKMVLKQLQEKGKVVRGWLGVTIQTVTPDLAASFGLKEAKGALVSDIAEGGPAAKGGIRRGDIILSFDGKNVKDSMELPRIVAETPVGKEVDVTVLREGKEVHCRVRVEELTEQRIAAQTEAPTDSFGMTFVDITPKVRQQLGIKEKTGVVVAGVEPGSIAEDAGIRAGDVIKEVNRKPVRNLADLSSALEKSAKGQPVLLLLNRGSQTFYVTLETS

SEQ ID NO: 41533 - protein, 583 aa, Zea mays
MAMIDEPLYPIAVLIDELKNEDIQLRLNSIRRLSTIARALGEERTRKELIPFLSENNDDEDEVLLAMAEELGVFIPYVGGVEHAHVLLPPLETLCTVEETCVRDKAVESLCRIGAQMKETDIVDWFIPVVKRLAAGEWFTARVSSCGLFHIAYPSASDQLKTELRTIYGQLCQDDMPMVRRAAASNLGKFAATVEQNHLKTEIMSIFDDLTQDDQDSVRLLAVEGCAALGKLLEPQDCVAHILPVIVNFSQDKSWRVRYMVANQLYELCEAVGPEPTRADLVPAYVRLLRDNEAEVRIAAAGKVTKFCRILNPQLSVQHILPCVKELSSDSSQHVRSALASVIMGMAPVLGKDATIEQLVPIFLSLLKDEFPDVRLNIISKLDQVNQVIGIDLLSQSLLPAIVELAEDRHWRVRLAIIEYIPLLASQLGVGFFDDKLGALCMQWLEDKVFSIRDAAANNLKRLAEEFGPEWAMQHIIPQVLEKINNPHYLYRMTILQAISLLAPVMGAEITCQKLLPVVINSSKDRVPNIKFNVAKVLQSLVPILDQSTVKPCLVELSEDPDVDVRYYANQALQACDQMMVSS

SEQ ID NO: 41534 - protein, 102 aa, Glycine max
  misc_feature (29)..(29): Xaa can be any naturally occurring amino acid
  misc_feature (48)..(48): Xaa can be any naturally occurring amino acid
  misc_feature (84)..(84): Xaa can be any naturally occurring amino acid
  unsure (1)..(102): unsure at all Xaa locations
HGSRHGRCGVCGPVFINKLHEDIVLRGLXIRSLVLLDHIYVGHKSAGXCIIYMPRSIGKIMCHWYGYDTSNDVSYLMHQHIAKXEVIQLLLMGQMMTSDTNC

SEQ ID NO: 41535 - protein, 328 aa, Xanthomonas axonopodis pv. citri str. 306
MKAPVRVAVTGAAGQIGYALLFRIASGEMLGKDQPVILQLLELPIEKAQAALKGVMMELEDCAFPLLAGMVGTDDAEVAFKDVDVALLVGSRPRGPGMERKDLLLANAEIFTAQGAALNKVAKRDVKVLVVGNPANTNAYIAMKSAPDLDPKNFTAMLRLDHNRALSQLSAKLGKPVAGIEKLAVWGNHSPTMYPDYRFATADGASIGDAINDQEWNASTFIPTVGKRGAAIIEARGLSSAASAANAAIDHIRDWVLGTSGKWVTMGVPSDGSYGIPEGVMFGFPVTTENGKYTIVKDLPIDDFSQKYIDKTLAELEEERSGVAHLLG

SEQ ID NO: 41536 - protein, 313 aa, Sphingobium chlorophenolicum
MGLLIDGVWRDAWYDTKSSGGRFVRKESQYRGGLDAGFRGEPGRYHLYAGFACPWAHRVLIMRALKGLEEMISVSMVNAYMGENGWTFLPGDDVVPDSINGADYLYQVYTAADPTYTGRVTIPILWDKVEKRILNNESSEIIRILNSAFDDVGALPGDYYPAEFRPEIDRINARVYETLNNGVYRSGFATTQEAYEEAFYPLFDTLDWLEEHLTGREWLVGDRLTEADIRLFPTLVRFDAIYHGHFKCNLRRIADYPNLSRLVGKLASHERVAPTINLRHAKAHYYGSHPSVNPTGIVPVGPAQPLPGLTLQS

SEQ ID NO: 41537 - protein, 212 aa, Wolbachia pipientis
ASCSSAITFIDGDEGVLKYRGHSIADLAENNNFTTVIYLLLYGELPNLEQHKKFLLKIGELSELPEQVVNVVKAFPKTAHPMSILIACFAGLSALYHERHGNNVNSEDLDFGISAIAQVPAIIAMIYRYINNQEFTNANNGLSYSENFLRMMFGDTFDNDKSALFAKALDKIFTLHADHEQNASTAAVRLVGSAGSSLFTSLSAGVATLWGP

SEQ ID NO: 41538 - protein, 388 aa, Oryza sativa
  misc_feature (127)..(127): Xaa can be any naturally occurring amino acid
  unsure (1)..(388): unsure at all Xaa locations
SCDRYSCSIRLKAGCCWPREALHAAASYEAVAIAGARAQVHINLLPVRELYFDPRKKMDAFSHVPPGFRFHPTDEELVDYYLRKKVALKKIDLDVIKDIDLYKIEHEAQTEQCKIGNEEQNEWYFFXHKDKKYPTGTRTNRATTAGFWKATGRDKPIYVKNCLVGMRKTLVFYRGRAPNGQKSDWIMHEYRLETNEYGAPQEEGWVVCRVFKKRVAAVQRAAGDGGDSPFWFNEHVAFMAPAPGLDSPYHGHRQSHPCKLEVEYHHHLLPQEAAPFMHLPRLESPKLPAADIIVATAASSALQPCGHTTAQQLQLQIEPVYVTADASAADWRDLDKLVASQFGHGDSTAKEPSYCNPVQVFQVEGKQEDSLDYVSTSASCGGEEDLWK

SEQ ID NO: 41539 - protein, 383 aa, Bacillus subtilis
MQKLSEEMKQTIMDIFEHLHANPEVSWKEYETTSFLKQKLEDLGCRTRTFSDCTGVVGEIGSGSPVVAVRADIDALWQEVNGTFRANHSCGHDSHMTMALGTLMLLKKQPELPKGTIRFIFQPAEEKGGGALKMIEEGVLDDIDYLYGVHVRPIQETQNGACAPSILHGSSQHIEGTIIGEEAHGARPHLGKNSIEIAAFLVHKLGLIHIDPQIPHTVKMTKLQAGGESSNIIPGKASFSLDLRAQTNEAMEALIAETERACEAAAAAFGAKIELHKEHSLPAATQNKEAEAIMAEAITEIIGAERLDDPLVTTGGEDFHFYAVKVPNLKTTMLGLGCGLQPGLHHPHMTFDRNAMFTGIHILANAVLKTFQKAESLAAANAS

SEQ ID NO: 41540 - protein, 663 aa, Azoarcus sp. EbN1
MAREKTKDSRKDSPKGRASRAKDKGVLVAEGPQVAPLDAEVRRTRLKTLITLGKERGYLTYAEISDHLPDDVADAEQIEGIIATFNNMGIRVFDEAPAAEDLLMSDAVPSSVDEDVAEEEAEQALSSVDSEFGRTTDPVRMYMREMGTVELLTREGEIEIAKRIEDGLRHMVQAISACPTTIAEMLEITDKVARDEMRIDELIDGLIDPNAAQAAEASAAETADDERAADDEVESEDGGDDDDESDEDKEAAANAATLLQLKNDALVRFAIIRELHERKMAALATVGSQDRSYLDLQQQISGELLNIRFTAKAIERLCDSVRHMVEQVRGHERHILQLCVDRAGMPRQHFIKVFPGREIDLDWLKDEIGAGKNYAEGLMRVHPAVLEEQQKLIDLQTRIGIPLKELKDINRQMSTGEAKMRRAKREMTEANLRLVISIAKKYTNRGLQFLDLIQEGNIGLMKAVDKFEYRRGYKFSTYATWWIRQAITRSIADQARTIRIPVHMIETINKMNRISRQILQETGQEPDPATLAEKMEMPEEKIRKIMKISKEPISMETPIGDDDDSHLGDFIEDQATLAPADAAMYSSLRDATGEVLDSLTAREAKVLRMRFGIEMNTDHTLEEVGKQFDVTRERIRQIEAKALRKLRHPSRSERLRSFLDSDA

SEQ ID NO: 41541 - protein, 330 aa, Enterococcus faecalis V583
MKMKALKKSGLSKEELIQAYREVLRGRRLDERLWQLTRIGKTSFNISGQGAEVAQVAMAMAFDPQKDYFLPYYRDMTACLVWGMTSKDILMGSFGKEADPSSHGRQMPNHYGSKEHNIVSFSSTVSTQMPLATGVGYAAQLQKADFVALTTTGEGSANQGEVQEAMNFAGVKKLPVIFVVENNEYAISVPIEEQYANKRMADRAKAYGFEGVTVDGSDFTEVYLAFKEAVKAARGKKGPKLIELMVSRLTSHSADDDQSVYRSKEEIEEMKKNDAVKLFEKQLLEEGYLTDEDIAKIDEEIRAEINQATDEAEAMPDPVPTSILEEVYAK

SEQ ID NO: 41542 - protein, 469 aa, Enterococcus faecalis V583
MAEQTDLLILGGGTGGYVAAIRAAQKGLNVTIVEKYKLGGTCLHKGCIPTKALLRSAEVFDTLKQAASFGIETEAASIDFSKIQQRKEGIIEQLHKGVEGLCKKNKIKILAGEGAILGPSIFSPVSGAVAVTFNDPTREEEIIVPKNVIIATGSSSKTLPNLPLDEEFILSSDGMLELEELPESIAIIGGGVIGVEWASLLNSLGVNVTIIEFLDRLLINESATISKELKKRLEQRGINILLGSKVQEAKVTGQKVQVEVAGQETLTVDKVMVAIGRQPNINKLGLQNTSVKYTDKGIEVNEFYQTTEGHIYAIGDCIDTLQLAHVAMKEGELAVQHLLGETVEPLNYTNVPRGVYTNPEIASVGYTRETLPAEKEVVIGTFNFNGNGKSLVYGETDGFIEVIRDKKTDDLLGVSMIGPHVTDLIAEASTAMYLDAAPIEIGEAIHAHPTMTEVLQEAALDTYGLAIHK

SEQ ID NO: 41543 - protein, 457 aa, uncultured bacterium 442
MSYSNHFVPPHPKPLPALPALARVLWHGDGNLLELMPGEAYRFDFGNLGYSRRSTVLFNQPELVREILRDDGSRFPKSDLMVNALEPLIGQSIFVTDGARWKRQRGMIDPAFSQLRVSHAFDAMQSAVLDHLDVLDGHADSGDSFSLDMAMSHLTADVICRTIFSTPLAAGVSSDVFEDFTEFEQSVAQVDIFRLIFQKAWAKMPQPPGVLAACQRIRGHLGDLVDPHLENPGAFNDIASDVIAAKDSDTGEAFTREELIDQLGVFFLAGHETSASALTWVFYLLAEQPTLVLRLRNELEHVVGSGPINFNHVKQLPLVRAVFRETLRLYPPITFIPRVALEDCEIGPRKLRRGALVMVSPWTIHRHQRYWSDPDAFIPDRFLVEGESSIQEGAYIPFGVGPHTCIGAGFAQAEAVLIIAELVRRFDFSRADRQSVRPAARLTTRPAQQIKLHCQRL

SEQ ID NO: 41544 - protein, 504 aa, Glomerella cingulata
MGSDEKSPSTYRYDETPTYTTSNGAPVANPQHWQRPGPSGPLLLQDFHLIDLLAHFDRERIPERVVHAKGAGAYGEFEVTHDISDIASIDMLKEVGKKTKAVVRFSTVGGEKGSADSARDPRGFASKFYTDEGNWDWVYNNTPIFFIRDPSLFPVFIHTQKRHPRTNLKDATMMWDYWSTHQECVHQLMHLFSDRGTPYSYRHMNGYSGHTHKWTKPDGSFVYVQIHLKTDQGNKTFTNEEAAKLASENPDWHTQDLFESIQRGEHPSWTVYVQTLTPEQAEAFRWNVFDLTKVWPQSEVPLRPFGRLTLNRNPDNYFAEIEQVAFSPSHLVPGVEPSADPVLQSRLFSYPDTHRHRLGVNYQQIPVNRPLNAFNPHQRDGAMSVDGNYGANPNYPSSFRPLNYKPVKAAGAHKQWAGKVVEDLFGPVTAQDYEQAAGLWAVLGRQDGQQRNFVLNVSGALAGARADVRARVYDMFSKVDAGLGAAIETETEAVAKPADVRSKL

SEQ ID NO: 41545 - protein, 461 aa, Phaseolus vulgaris
MSMTGSSAYYVAHAIPPFLRLSNKTMLLLSTPPTTFFPTSTTPRVTLLSSTSSSSSSSISLRSSTAPSPSCSSVTPKDNCLASAKHSPPNMSASVSSRTFLNAQSEQDVFAGIKKEVEAGSLPANVAAGMEEVYNNYKKAVIQSGDPKANEIVLSNMIALLDRVFLDVTDPFVFQPHHKAKREPFDYYVFGQNYIRPLVDFKNAYVGNMPLFIEMEEKLKQGHNIILMSNHQTEADPAIISLLLETRLPYIAENLTYVAGDRVITDPLSKPFSIGRNLICVYSKKHMLDDPALVEMKRTANIRALKEMAMLLRNGSQLVWIAPSGGRDRPDAQTREWVPAPFDISSVDNMRRLVEHSGPPGHVYPLAILCHDIMPPPLKVEKEIGEKRIICFHGAGISVAPAISFSETTATCENPEKAKEVFSKALYNSVTEQYNVLKSAIQGKKGFEASTPVVTLSQPWK

SEQ ID NO: 41546 - protein, 183 aa, Arabidopsis thaliana
MGFISSSSPVEESHYHTHKIFLFSNYILLGAASSCIFLTLSLRLIPSICGFLLILLHATTIAAAVSGCAAASCGRNRWYAAHMVATVLTAIFQGSVSVLIFTNTSKFLGSLKSYVREEDAAVILKLGGGLCIVIFCLDWIVLVCAFFLKYYAYVDGGDGVAMKRTGKVQSEENPKDWPWPFQV

SEQ ID NO: 41547 - protein, 416 aa, Magnaporthe grisea 70-15
MAVERLGSILKHLTPGNALSTITSKNDDDIVITYAARTPLGKARKGGFKDTSLEYMVFALLDQVRQRSKIDPSLVEDICMGNVSDGKAAYKLRAAALAAGFPNTHSASSVNRFCSSGLKATADIAHAISNGSIEVGIALGAESMSIGGDALDQPFDEDVTSQNQESKDCMMPMGWTSENVSSDFGISREEMDKFAALSFQKAEKAQNAGWFDDEIVPIRTKVKGPDGEVKEVTLTKDEGIRPGTTAESLGKIRAAFPQWGSTTTGGNASQVTDGAAAVLLMKRSTANKLGQPIMAKYVGSTTAGLAPRIMGIGPTVAIPKLLAKHGITLADCDVVEINEAFASMAVYCRDNLGLDAETKMNPRGGAIALGHPLGATGTRQIVTGLSECRRTGKKILLTSMCIGTGMGMAGLFVNEQ

SEQ ID NO: 41548 - protein, 687 aa, Sinorhizobium meliloti
MAKKPSAPNNTKPATIHDQKATRGNGGELHQIAEGDTPVLTTAQGGPVADDQNSLRAGERGPTLIEDFHFREKIFHFDHERIPERVVHARGYGVHGFFETYESLAAYTRADLCQHPGERTPAFVRFSTVAGSKGSFDLARHVRGFAVKIYTKEGNWDLVGNNIPVFFIQDAIKFPDVIHSVKPEPHREFPQAQSAHDNFWDFISLTPESMHMIMWVMSDRGIPRSFRFMEGFGVHTFRFVNAKDESTFVKFHWKPKLGLQSLVWNEAVKINGRDPDFHRRDMWQAIQSGNFPEWDLHVQLFDQDFADKFDFDILDPTKVIPEEVLPTKPVGRLVLDRMPENFFAETEQVAFMTQNVPPGIDFSDDPLLQGRNFSYLDTQLKRLGSPNFTHLPINAPKCPFQHFQQDGHMAMRNPVGRVNYQPNSWSEGPKLRIRAESFADHYSQARQFFISQTPPEQRHIADALTFELSKVETPVIRERMVAHLLNIDETLGKKVGHALGLETMPKPADAAVATRQDLDPSPALSIIQRGPKRFEGRKLGILATDGADGALLDALIGAVENEKAAFELIAPKVGGFTASDGKRIAAHQMLDGGPSVLYDAVVLLPSAEAVADLIDVATARDFVADAFAHCKYIGYAGAAVPLLERAGIAELLDEGTIELTDAASAAAFLTEIGKLRVWGREPSVKLK

SEQ ID NO: 41549 - protein, 363 aa, Xylella fastidiosa 9a5c
MATIIPTAWQPFKSETPLTTFPFRFPAEWEPQSAILIAWPHANTDWSAHLADVEETYIALVAAITRFQMVIICVLDDDLQTYTEARLRSASVAMQQVRFTVASYNDTWLRDSGPITLIGTNRDFRLLDFRFTGWGGKFEAKADDQLVSVLHANGLFKNTQMHSINFALEGGAIETDGAGTLLTTWRCLHERHPQRTRKTLDANLTAWLAQNRVLWLEHGYLEGDDTDAHIDTLARFASTDSIVYQSCDNTTDSHYAELQAMANELTALRTTEGRAYRLFPLPWTKPILDQDRRLPASYANFLIIEGAVLMPTYDDPADTIAQSVLAEAFPTREIVPVPCRPLIWQNGSLHCITMQIPAGLLAT

SEQ ID NO: 41550 - protein, 59 aa, Zea mays
NPKSSDKEGGAGSKKGDTKTCPVPIWFETWERADTYAALAVVAAAAAVLVSFRIYKNLN

SEQ ID NO: 41551 - protein, 116 aa, Arabidopsis thaliana
  misc_feature (99)..(99): Xaa can be any naturally occurring amino acid
  unsure (1)..(116): unsure at all Xaa locations
MDGTNTGTNDESGCTMSGSRYVNTTLAKYDIGENSTPKDATIQIINHELMLDGNPRLNLTSFATTWMEPECHKLIMDSINENYLDMDEYPGTTELQTRXVNMIGRLFNAPLEASAT

SEQ ID NO: 41552 - protein, 424 aa, Psophocarpus tetragonolobus
MGNSEEGKSIKTGSPSSPATTDQTNQPSIHVYPDWAAMQYYGPRVNIPPYFNSAVASGHAPHPYMWGSPQAMMPPYGPPYAAFYSHGGVYTHPAVAIGPHPHGQGVPSPPAAGTPSSVESPTKLSGNTDQGLMKKLKGFDGLAMSIGNCNAESAERGAENRLSQSADTEGSSDGSDGNTAGANKMRRKRSREGTPTTDGEGKTETQEGSVSKETASSRKIMPATPASVAGNLVGPIVSSGMTTALELRNPSTVHSKANNTSAPQPCAVVPSEAWLQNERELKRERRKQSNRESARRSRLRKQAETEELARKVEMLSTENVSLKSEITQLTESSEQMRMENSALREKLRNTQLGQTEEILLTSIDSKRGATPVSTENLLSRVNNSSSNDRTAENENDFCENKPNSGAKLHQLLDANPRADAVAAG

SEQ ID NO: 41553 - protein, 432 aa, Corynebacterium glutamicum
MSSTTLTDDQIRDNERTEVLAKATAAKNIVPDIAVLGTGPKNAILRAAADELVARSAEIIEANASDIEAGRANGMEESMIDRLALDESRIEGIAGGLRQVAGLTDPVGEVLRGHVMENGIQMKQVRVPLGVMGMVYEARPNVTVDAFALALKSGNVAFVRGSSTAVHSNTKLVEILQDVLERFELPRETVQLLPCQTRGSVQDLITARGLVDVVIPRGGAGLINAVVTGATVPTIETGTGNCHFYIDAEAKLGQAIAMVINGKTRRCSVCNATETALLDAALSDSDKLAVVQALQEAGVTIHGRVAELEAFGATDVVEATETDWDSEYLSFDIAVAVVDGVDGALAHIAKYSTKHTEAIATQNIETAQRFADRVDAAAVMINASTAYTDGEQYGMGAEIGISTQKLHARGPMALPELTSTKWILQGTGQIRP

SEQ ID NO: 41554 - protein, 402 aa, Xanthomonas axonopodis pv. citri str. 306
MTTAPAALTAHYAAELDAIQAQGLFKSERIITGPQSAEITLADGRSVLNFCANNYLGLADHPDIIQAAKDALDSHGFGMASVRFICGTQDLHKQLERTIATFFGTEDTILYAACFDANGGLFEPLLGEHDAIISDALNHASIIDGVRLCKAKRFRYANCDMADLEAQLQAADAAGCKTKLITSDGVFSMDGFIAPLDEITALARKYNALVHIDECHATGFLGATGRGSAEVKGVLDQIDIFTGTLGKAMGGALGGFTTAKREVIELLRQRSRPYLFSNSLPPHVVAAGIKAFEMLDAAGELRTQLVENTTYFRARMTAAGFDVKPGVHPISPVMLYDAPLAQKFAERLLEEGIYAIGFFFPVVPKGQARIRTQISAAHTREHLDQAIEAFIKIGRELKVIEA

SEQ ID NO: 41555 - protein, 334 aa, Burkholderia pseudomallei K96243
MNGTQRFPMDIPFGWFCIGYSDEVAVGDVKPLRYFGKDLVMFRGESGEIGVLDAYCPHLGAHMGHGGTVEGDSLRCPFHHWAYRKDGFCTSIPYAKEMPLIAKREPIAVPYPVVERNGAIWVWHHPQQIAPTYEVLEHEEFVAPGWSKPVRRFWSFASNPQEIAENGVDTAHFKCIHHMDAMPEGEVTYEGHIRRSRTTGETSMIFPDGVTRTVETGTNVINSGAGQKISRFTGFVTISLMEMATPVEADQVELRFCFAFPECPEGSPEWQGAMNTIDYFSGQLGIEGGDIPIWSHKIHREKPILCDGDGAIMRFRRYFEQFYAPRVVPVTASA

SEQ ID NO: 41556 - protein, 453 aa, Campylobacter upsaliensis RM3195
MSECPFFPKPYKNKASTLLTFLLKRRSWLDGLYERSYQMQTGYVKMPNFDLYVINDTKEVKRIMVDEVREFPKSELLHRLLSPLLGESIFTTNGEVWHKQRELLKPSFELTRISKVFNLMSEAVADLMMRFEKYPDNSYIEVDEMMTFVTADVIFRTIMSSKLNEVQGRQILEAFATFQEESVKTAMRGMFYFPKWLSYLLGDRKRAKAGELIRKVLSDIIKPRYEANLEKSDYGDILSSLLLVVDAKTNQRFSFEEILDQVAMLFLAGHETTASSLTWTLYLLSLYPKEQERAYNEICEVLQDSKEIKIAHLRQFKFLTNVFKESLRLYPPVGFFAREAKKDTQVRNKLIKQGSGVVIAPWLIHRHELFWQNPHGFDPSRFEREYKKEAYLPFGMGERICIGQGFAMQEAILILANILKTYKLELKEDFVPDVVGRLTIRSLNGMWIKFSKR

SEQ ID NO: 41557 - protein, 414 aa, Burkholderia pseudomallei K96243
MRSSERDEILITGVGVVSAIGQGRQPFIDALLDGRHAFGVMRRPGRQLPDDAGAGPAPAFFGAEIDSIALPPMLDAHRRTASYSAQAAVACVREAWDDAALGDVDPLRIGLVVGGSNVQQREQALVHDTYRGRYAFLRPSYGLSFMDSDLCGLCTELFGIRGVAFTVGGASASGQLAVLQACRLVESGSVDACIAVGALMDLSYWECQALRSLGAMGSDRFADEPDAACRPFDQDRDGFIYGECSGAIVVERAARMRRAHVSPYAKWLGGCIRMDGTREPAPSLDGEMAVIEGALRDAGIGADSIDYVNPHGSGSTLGDATELDALGRSGLAHARINTTKSLVGHGLSAAGIVELIATLLQMRARRLHPSRNLDRPIDERFDWVRSTCGSDIRRALKLSIGFGGINTALCLERC

SEQ ID NO: 41558 - protein, 277 aa, GIBBERELLA ZEAE PH-1
MEQTKALNALEPFLALSKSATSPRAAADLVTRATSAPNTFLFSELLQTPAIQNLAESEFASHLALLKTFAYGTYSSYKSTPGLPELVEAQAIKLRQLSLLSLASDRQNLSYKALQSSLDLPGSREVENLVISAVYAGLLHATLDAARATVQVSSVAPLRDLAPGAIPDMATALKTWYNRCTTTHSDVELQIKEIRTTAAARQREQRATDERLQQAMQDHQEGTGGRKYDLPNMSRDTMARRGFNKRSVMDVGNLVDNDSMDVDESEEEKKRASKRKL

SEQ ID NO: 41559 - protein, 340 aa, Xanthomonas axonopodis pv. citri str. 306
MKALVKREANKGIWLEQVPVPTPGPNEVLIKLEKTAICGTDLHIYLWDEWSQRTIEPGLTIGHEFVGRVAELGSAVTGYQIGQRVSAEGHIVCGHCRNCRGGRPHLCPNTVGIGVNVNGAFAEYMVMPASNLWPIPDQIPSELAAFFDPYGNAAHCALEFDVIGEDVLITGAGPIGIIAAGICKHIGARNVVVTDVNDFRLKLAADMGATRVVNVSKTSLKDVMADLHMEGFDVGLEMSGNSRAFNDMLDCMYHGGKIAMLGIMPRGAGCDWDKIIFKGLTVQGIYGRKMYETWYKMTQLVLSGFPLHKVLTHQLPIDDFQKGFDLMEEGKAGKVVLSWN

SEQ ID NO: 41560 - protein, 283 aa, Yarrowia lipolytica CLIB122
MTQDTPKAEGIVLFVDIDNTLYSKDKGVDALMGERINNYFQTKLGLDKEHATELHHRYYKEYGIALDGLLRHHNIDIDEYNRLVDDSLPLDKILKRDEPLRQMFQRLDRTKVSKLWLFTNAYKTHGERVAKLVGVDDLIDGLTYCDYYHTPLHCKPKPEAFEKAMKQAGVTDKSKCWFVDDSALNIKASKKFGWAENAYLHYPGAPEIPAGTPGVVEISHIEDLPKVWPDLFLPEPVKNTNGTINGTTNGTTNGTTNGIINGTNGGINGDGTNGSTNGGNPPS

SEQ ID NO: 41561 - protein, 425 aa, Azoarcus sp. EbN1
MDIHDYMQTLGRQARAASRVLATASTADKNAALVAMAAAIREQTGELLAANARDLDEARAAGLEAALIDRLTLTAKGIEAMAEGLEQVAGLPDPIGEITDVKRRPSGIQVGKMRVPLGVIGIIYEARPNVTADAAALCLKSGNAAILRGGKEALHCNQAIAQCVRTGLAAAGLPETSVQVVETTDRAAVGHLITMPEFVDVIVPRGGKGLIERISKEARVPVIKHLDGNCHVYIDRDADVAKVVPIVENAKTQRYGTCNTAESLLVAREVAPRLLPEIGRMLATKGVEMRGCEQSLAILRAAGIAADKLRAASEQDWSEEYLAPVIAVKVVADLDEAIAHINTYSSGHTEAIVTENYTSAMRFLREVDSSSVMVNASTRFADGFEYGLGAEIGISTDKIHARGPVGLDGLTSQKWIVFGNGEIRG

SEQ ID NO: 41562 - protein, 371 aa, Listeria innocua Clip11262
MASKTKKAIIDVKKQFEAVHKQFELVQILNEKGEIVNPDLMPDLTDDELVELMTRMVWTRVLDQRSISLNRQGRLGFYAPTAGQEASQLASHYALEKHDYILPGYRDVPQLIWHGLPLTKAFLFSRGHFVGNQFPEDLNVLSPQIIIGAQIVQAAGVALGLKKRKKDAVVITYTGDGGSSQGDFYEGMNFAGAYHAPAIFVVQNNKFAISTPREKQSAAETLAQKAVAAGIPGVQVDGMDPLAVYAVTKFARERAVAGEGPTLIETMTYRYGPHTLSGDDPTRYRTKELDGEWELKDPIVRFRTFLEGKGLWNEEKENAVIDQAKEEIKVAIKEADATPKQTVTDLLKNMYETPTAPIKEQLAIYEAKESK

SEQ ID NO: 41563 - protein, 381 aa, Nostoc sp. PCC 7120
MAINHLLEIKEYGQSIWMDNLSRDIIQSGELKNLVENQGICGITSNPAIFEKAIANNVIYDADIEAGVRAGLPTYKIYESLIFADIRNACDILRPVYEASNKLDGYVSIEVPPTIAHDTQATINEARRYYQEIGRENVMIKIPGTEAGLPAVEQVIAEGINVNVTLLFSVQSYINTIWAYIRGLEKRLAEGKDISQIASVASFFLSRIDINIDGKIDAKLARGVDDISLEAKLMVVKGKVAIANAKIAYQEYKKIIESDQWQALAAKGAKVQRLLWASTSTKDPNYSDVMYVDELIGPDTVNTLPPATITACADHCEVANRVETGVAEAYQLIESLKDPDINIDINAVMDELLIEGINKFVQPFQSLMNSLEGKVKLLSPV

SEQ ID NO: 41564 - protein, 467 aa, Listeria innocua Clip11262
MVVGDFPEERDTIVIGAGPGGYVAAIRAAQLGQKVTIIEKEYYGGVCLNVGCIPSKALITIGHRFKEAGHSDNMGITADNVNLDFTKAQEWKGGVVNKLTSGVKGLLKKNKVEMLEGEAFFVDDHSLRVIHPDSAQTYTFNNVIIATGSRPIEIPGFKYGKRVLSSTGALALTEVPKKLVVIGGGYIGTELGGAFANLGTELTILEGGPEILPTYEKDMVSLVKRNLKSKNVEMVTKALAKSAEETENGVKVTYEANGETKTIEADYVLVTVGRRPNTDEIGLEQAGVKVTERGLVEVDKQGRSNVSNIFAIGDIVPGVPLAHKASYEAKIAAEAIAGEKAENDYTALPAVVFSDPELATVGLTEKEAKEKGFDVKAAKFPFGGNGRALSLDAPEGFVRLVTRKEDGLVIGAQVAGMNASDIISEIGLAIESGITAEDIALTIHAHPSLGELTMEAAELALGRPIHM

SEQ ID NO: 41565 - protein, 398 aa, Coemansia mojavensis
KRTIEKFEKEAAELGKGSFKYAWVLDKLKAERERGITIDIALWKFETPKYVVTVIDAPGHRDFIKNMITGTSQADCAILIIAGGVGEFEAGISKDGQTREHALLAYTLGVRQLIVAVNKMDSVKYDQARFLEITKEVSNFIKKVGFNPKKVAMVPISGWEGDNMIEPSANMPWYKGWTKEVMKGDTTVTGKTLVEAIDAVEPPVRPSDKPLRLPLQDVYKIGGIGTVPVGRVETGVIKAGMVVTFAPANVTTEVKSVEMHHELLADGGVPGDNVGFNVKNVSVKDIRRGNVCSDSKNNPAKAAANFTAQVIVMNHPGQIGAGYAPVLDCHTAHIACKFSELLEKIDRRTGKVVEENPKFVKSGDAAIVKLIPSKPMCVESFTEFPPLGRFAVRDMRQT

SEQ ID NO: 41566 - protein, 57 aa, Zea mays
MPFTASDICKILLAIILPPVGVFLERGCGADFFINILLTILGYIPGIIHALYIILKY

SEQ ID NO: 41567 - protein, 421 aa, Oryza sativa (indica cultivar-group)
MERVFSVEEISDPFWVPPPPPQSAAAAQQQGGGGVASGGGGGVAGGGGGGNAMNRCPSEWYFQKFLEEAVLDSPVPNPSPRAEAGGIRGAGGVVPVDVKQPQLSAAATTSAVVDPVEYNAMLKQKLEKDLAAVAMWKASGTVPPERPGAGSSLLNADVSHIGAPISIGGNATPVQNMLSGPSGGSGSQLVQNVDVLVKQPTSSSSREQSDDDDMEGEAETTGTARPADQRLQRRKQSNRESARRSRSRKAAHLNELEAQVSQLRVENSSLLRRLADVNQKYNDAAVDNRVLKADVETLRAKVKMAEDSVKRVTGMNALFPAASDMSSLSMPFNSSPSEATSDAAVPIQDDPNNYFATNNDIGGNNNYMPDIPSSAQEDEDFVNGALAAGKIGRPASLQRVASLEHLQKRMCGGPASSGSTS

SEQ ID NO: 41568 - protein, 412 aa, Prochlorococcus marinus str. NATL2A
MQSLKKTPRLCLSPFRLGRYINRSVFLATQILPSVDNQHRKDFGPTVSPERLLLGPGPSNADPAVLKALSQPPIGHLDPFYVDLMSEVQELLRYAWQTSNRLTLPMSGTGSAAMEATLANVVEPEDTVLVAIKGYFGHRLADMAGRYKANVETIHKEWGNAFSLQEIEDALKKHTPAVLAIVHAETSTGVCQPMDGIGDLCRKYNCLLLVDTVTSLGGVPLYLDEWKIDLAYSCSQKGLSCPPGLGPFSMNERAENKMSNRKDKVPNWYLDVSLLNKYWGSDRVYHHTAPVNMNFGIREALRLLAEEGLEVSWGRHRTNAKSLWNSLENIGLELHVKEELRLPTLTTVKIPEGLDGKAFTKHLLNNFGVEIGGGLGDLAGKVWRIGLMGYNSTSENVDKIINIFETELPKFR

SEQ ID NO: 41569 - protein, 395 aa, Dimargaris cristalligena
KRTIEKFEKEAAEMGKGSFKYAWVLDKLKAERERGITIDIALWKFETPKYHVTVIDAPGHRDFIKNMITGTSQADCAILIIATGQGEFEAGISKDGQTREHALLAFTLGVRQIIVALNKMDTTNWSEDRYKEIVKEVSGFIKKVGYNPKSVPFVPISGFHGDNMIEATSNAPWYKGWEKETKAGPAKGKTLLEAIDSIDPPSRPTDKPLRLPLQDVYKIGGIGTVPVGRVETGVIKPGMVVTFAPSGVSTEVKSVEMHHEQLKEGLPGDNVGFNVKNVSVKEIRRGYVCSDSKNDPAKETGSFTAQVIILNHPGQISAGYAPVLDCHTAHIACKFNELLEKIDRRSGKSLEASPKFVKSGDAAIVKMTPSKPMCVESFQEYPPLGRFAVRDMRQT

SEQ ID NO: 41570 - protein, 241 aa, Triticum aestivum
  misc_feature (47)..(47): Xaa can be any naturally occurring amino acid
  unsure (1)..(241): unsure at all Xaa locations
AYLGDTIDQVCTKKQAVPVPDFPDIVDPRVRDTIDNVKAKIQDKEGXIPPDQQRLIFAGKQLEDGRTLADYNIQKESTLHLVLRLRGGMQIFVKTLTGKTITLEVESSDTIDNVKAKIQDKEGIPPDQQRLIFAGKQLEDGRTLADYNIQKESTLHLVLRLRGGMQIFVKTLTGKTITLEVESSDTIDNVKAKIQDKEGIPPDQQRLIFAGKQLEDGRTLADYNIQKESTLHLVLRLRGGQ

SEQ ID NO: 41571 - protein, 396 aa, Syncephalis depressa
KRTIEKFEKEAAELGKGSFKYAWVLDKLKAERERGITIDIALWKFETPKYQVTVIDAPGHRDFIKNMITGTSQADCAILIIAAGTGKFEAGISKDGQTREHALLAFTLGVKQLIVAINKMDTAKWSEGRYNEIVKETSGFIKKVGYNPKTVPFVPISGWHGDNMLEGSANMPWFKEWEKEIAGGKKVTGKTLLEAIDAIVPPERPSNKPLRLPLQDVYKIGGIGTVPVGRVETGVIKAGMVVTFAPANVTTEVKSVEMHHEVLVEGVPGDNVGFNVKNVSVKDIRRGNVCSDSKNDPAKEAASFTAQVIVLNHPGQVGAGYSPVLDCHTAHIACKFEELLEKIDRRTGKTTEANPKFVKSGDAAIVKMVPSKPMCVESFTEYPPLGRFAVHDMRQT

SEQ ID NO: 41572 - protein, 591 aa, Vibrio vulnificus YJ016
MMYIKRYLQPISEAVIIFSVSSKTLLRHPMNNDKRPLYIPFAGPALLSTPLLNKGSAFSAEERISFNLEGLLPETTETIQEQVERAYMQYKAFESDMDKHIYLRNIQDTNETLFYRLVQNHITEMMPIIYTPTVGAACENFSNIYRRGRGLFVSYANRDRIDDILNNASNHNVKVIVVTDGERILGLGDQGIGGMGIPIGKLSLYTACGGISPAYTLPIVLDVGTNNPQRLADPMYMGWRHPRITGADYDAFVEEFIQAVQRRWPDALIQFEDFAQKNAMPLLERYKNRICCFNDDIQGTAAVTVGSLMAACQAAGSKLSEQRITFLGAGSAGCGIAEAIIAQMVSEGISDKKARSQVFMVDRWGLLQEGMPNLLDFQQRLVQKHSVTAKWETEANGFSLLDVVKNAKPTVLIGVSGAPGLFTQEVIQEMHKHCPRPIVFPLSNPTSRVEAVPADIIRWTNGDALVATGSPFDPVIHEGKTYPIVQCNNSYIFPGIGLGVLAVNAKRVTDEMLMESSRALATCSPLAINGKGALLPPLEEIHTVSKRIAYAVAKKAIEQGVALEIADDALQVAIEQHFWQPVYRRYKRTAF

SEQ ID NO: 41573 - protein, 410 aa, Bacillus licheniformis ATCC 14580
MSASGFVRQINNQLDAHYDEMVKLRRHFHQHPELSFQEKKTAAFIASYYEALGIPIRTNVGGGGVLAYIEGGSPGPVIALRADFDALPIHDEKDAPYRSTVPGVMHACGHDGHTATLLVLAKVLNEHADRLKGKIVFIHQHAEEYSPGGARPMIEDGCLDGVDVIFGTHLWATEPTGTVQYRTGPIMAAADRFTITIKGKGGHGAQPHKTKDAVLIGSQIVTSLQQIVSRRLDPTQPAVISTGSFVADNSFNVIADKAVLIGTARSFNEEIRTLIENEIEQVAKGICGMHGADCDYSFERGYPPVCNHPEETSFLAKIAKQTEGVEKVEESGMQMGGEDFAYYLQHVKGTFFFTGARPEDPEAVFPHHHPKFDIDEKAMLIAAKVLANAAVSYQEKEQAVRETPAMEQPK

SEQ ID NO: 41574 - protein, 467 aa, Listeria monocytogenes str. 4b F2365
MTSVMWFRRDLRVNDNKALYHACKENDLLLLFQVNPAQFITGSPSHQAFFASVAHFKQEIDKTAHLQIMFGEPIECFQQLKDSLPSWDKVYFNRDETGYGAKRDEAAQAFFDEQKIEVQAFHDSYLHSAEEVKKSPTEYYKIFTPYYKKWREEIKETPFKVTLKHENIRKESLFLKYEEQFAEMTSDLPILDIGERAANTRLANFIKHDVADYDKARDFPELDKTSHLSRYLRTGEISIRTIWQSLQETEATEGRATFEKELCWRDFYNMIYVSFPNQKNEPIQENYRFIEWENNREYFKAWQEGKTGFPLVDAAMRQLKETGWMHNRLRMITASFLTKDLLIDWRFGEKYFQQMLIDYDPASNIGGWQWAASTGTDAVPYFRIFNPTTQSQKFDSTGKFIRKYVKELANLPDKYIHQPEKMSETEQKEHGLLLGKDYPFPIVDHKERRKLAIARYEFSKEHSRGNI

SEQ ID NO: 41575 - protein, 471 aa, Arabidopsis thaliana
MCILIFVGNNGETYFNTAALVSGVQNFPKSRGPVVGILKGFAGLGGAILSQVYTMIHSSDRASLIFMVAVAPSVVVVPLMFFIRPVGGHRQIRSSDATSFTVIYAVCILLAAYLMAVMLVEDFIDLSHSIIIAFTVVLFAILLVPIFIPIATSCFTASTDPCDTLEEPLLGDQQGQDPGQSTTPDHGPELIFSEVEDEKPKEVDLLPAVERHKRIAQLQAKLMQAAAEGAVRVKRRRGPHRGEDFTLTQALVKADFWLIFFSLLLGSGSGLTVIDNLGQMSQSLGYDNTHVFVSMISIWNFLGRIGGGYFSELIVRDYAYPRPVAIAVAQLVMSVGHIFFAYGWPGAMHIGTLLIGLGYGAHWAIVPATASELFGLKKFGALYNFLTLANPAGSLVFSGLIASSIYDREAERQAQGSLFNPDDVLRCRGSICYFLTSLIMSGFCLIAAALSMILVQRTKPVYTNLYGKTRN

SEQ ID NO: 41576 - protein, 489 aa, Escherichia coli
MVSETKTTEAPGLRRELKARHLTMIAIGGSIGTGLFVASGATISQAGPGGALLSYMLIGLMVYFLMTSLGELAAYMPVSGSFATYGQNYVEEGFGFALGWNYWYNWAVTIAVDLVAAQLVMNWWFPDTPGWIWSALFLGVIFLLNYISVRGFGEAEYWFSLIKVTTVIVFIIVGVLMIIGIFKGAQPAGWSNWTIGEAPFAGGFAAMIGVAMIVGFSFQGTELIGIAAGESEDPAKNIPRAVRQVFWRILLFYVFAILIISLIIPYTDPSLLRNDVKDISVSPFTLVFQHAGLLSAAAVMNAVILTAVLSAGNSGMYASTRMLYTLACDGKAPRIFAKLSRGGVPRNALYATTVIAGLCFLTSMFGNQTVYLWLLNTSGMTGFIAWLGIAISHYRFRRGYVLQGHDINDLPYRSGFFPLGPIFAFILCLIITLGQNYEAFLKDTIDWGGVAATYIGIPLFLIIWFGYKLIKGTHFVRYSEMKFPQNDKK

SEQ ID NO: 41577 - protein, 656 aa, Schizosaccharomyces pombe
MSNSQSIKIKKPRSNENFASGSYSSRRSQQIHRLSHSPMAEGFHKPKLNISPSESNLPNNVAENTTDTPVNYGSIRDENHNSRKGKDVTLNSDEAHSENVPSTSEDPDVVRRHLGGQAADDDNFSSLQLQGGDMHRQVYRWQQEVDQNKQIRRGRSRSFSAKVSDPNLHLRSVQDMKQAGGMRRDFLRNRASSISMSSNAHGNPNFLNRNFIEFLSVYGHFAGEELSEEDEDEDTDDFAMPRDVNPSLIHSTVPSEQEPLISRHGRYKLQTPGNASNGKAVLLLLKSFVGTGVLFLPKAFKLGGLVFSSATLLIVGVLSHICFLLLIQTRMKVPGSFGDIGGTLYGPHMRFAILASIVVSQIGFSSAYISFVASTLQACVKVISTTHREYHLAVFIFIQFLVFVPLSLVRKISKLSATALIADVFILLGILYLYFWDVITLATKGIADVAMFNKTDFSLFIGVAIFTYEGICLILPIQEQMAKPKNLPKLLTGVMAAISLLFISIGLLSYAAFGSKVKTVVILNMPESTFTVIIQFLYAIAILLSTPLQLFPAIAIIEQGIFTRSGKRNRKIKWRKNYLRVLIVILAILISWAGSSRLDLFVSMVGSVCCIPLIYMYPPMLHYKACANNWILRTLDIFMFTIGAFAMAFTTYMTFF

SEQ ID NO: 41578 - protein, 375 aa, Saccharomyces cerevisiae
MLKVNNVFGSNPNRMTKLEDEHYFIDDIVSIKNRQKSKMYVREGKRIGHGSFGTVTQSILSSNSIEWLGPYAIKRVVKSPKVQSLELEILQNIRHPNLVTLEFFFESHCTTKDGGHLYQKNFVMEYIPQTLSSEIHEYFDNGSKMPTKHIKLYTFQILRALLTLHSMSICHGDLKPSNILIIPSSGIAKVCDFGSAQRLDDNTELKTYFCSRFYRAPELLLNSKDYTTQIDIWSLGCIIGEMIKGQPLFKGDSANSQLEEIAKLLGRFPKSSIKNSQELQDSLNDQKFKKFMHWFPSIEFFDVEFLLKVLTYDATERCDARQLMAHEFFDALRNETYFLPRGSSMPVHLPDLFNFSASEKRALGEYYNLIVPSLD

SEQ ID NO: 41579 - protein, 106 aa, Arabidopsis thaliana
  misc_feature (60)..(60): Xaa can be any naturally occurring amino acid
  unsure (1)..(106): unsure at all Xaa locations
MGLLPISLTARASKVAVENRKRPSILALSRQKLPHLPGTSVEVVVKGGYVISDNSTGDKXDVILMGTGSELEIAAKAGEKLREERKAVRVVSLEIWTHRGYGYCSR

SEQ ID NO: 41580 - protein, 407 aa, Vibrio parahaemolyticus RIMD 2210633
MNRRVVVTGMSGVTAFGNDWQSVEPKLRDCQNATQYMPSYEQYDGLNTKLAAPILDFELPKHYKRKQVRGMGRVSKLATVATENALSQAGLIGNDVLTNGQTGIAYGSSTGSTDAIGAFGVMLNEKTTKAITATTYVQMMPHTTAVNVGLFFGLKGRVIPTSSACTSGSQAIGYAYEAIKHGYQTVMVAGGAEELCPTESAVFDTLFATSLKNEYPKSTPRPYDSDRDGLVIGEGAGTLVLEEYEHAVARGAKIYAEVIGFASNCDAAHVTQPQMETMQICMEMAMQNAGIPAEKIDYVSAHGTATDRGDIAESNATANALGKVPISSLKSYFGHTLGACGAIEAWLGLEMMHTGWFNPTLNLENLDEQCGDLDYIAGQGRELDVKYLMSNNFAFGGINTSIIFKKM

SEQ ID NO: 41581 - protein, 216 aa, Zea mays
MSKLQSESVKDAISQIVGDAKEKNRKFTETVELQIGLKNYDPQKDKRFSGSVKLPHIPRPKMKVCMLGDAQHVEEAEKMGLDYMDVEALKKMNKNKKLVKRLAKKYHAFLASEAIIKQIPRLLGPGLNKAGKFPTLVTHQESLESKVNETKATVKFQLKKVLCMGVAVGNLAMEEKQIQQNIQMSVNFLVSLLKKNWQNVRCLYVKSTMGKPYRVF

SEQ ID NO: 41582 - protein, 584 aa, Zea mays
  misc_feature (510)..(510): Xaa can be any naturally occurring amino acid
  unsure (1)..(584): unsure at all Xaa locations
MAAASTLAFGHPKTLAAAGAKPLPAATSTSVSFPATHQPACLLSSPAPGSLRRRDVAAMVSAPPAVGTAMPSLDFDTSVFNKEKVSLAGHDEYIVRGGRNLFPLLSEAFKGVKQIGVIGWGSQGPAQAQNLRDSLADAKSDIVVKIGLRKGSKSFEEARAAGFTEESGTLGDIWETVSGSDLVLLLISDAAQADNYEKIFSHMKPNSILGLSHGFLLGHLQSLGLDFPKNISVIAVCPKGMGPSVRRLYVQGKEVNGAGINSSFAVHQDVDGRATDVALAWSVALGSPFTFATTLEQEYKSDIFGERGILLGAVHGIVEALFRRYTEQGMDEESAYKNTVEGITGIISKTISKKGMLEVYNSLSEEGKKEFNKAYSASFYPCMDILYECYEDVASGSEIRSVVLAGRRFYEKEGLPAFPMGNIDQTRMWKVGEKVRSTRPEGDLGPLHAFTAGVYIALMMAQIEILRKKGHSYSEIINESVIESVDSLNPFMHARGVAFMVDNCSTTARXLGSRKWAPRFDYILTQQAFVAVDKDAPINQDLISNFLSDPVHGAIEVCAELRPTVDISVPANADFVRPELRQSS

SEQ ID NO: 41583 - protein, 395 aa, Vibrio parahaemolyticus RIMD 2210633
MPNRSPQPLYIQACGFHSAMGQDDAIIHQCLSGAKPSNMVVDQDILNSGRQTVIGRIAQPLPQLPPAFSRFDTRNNRLALSALQQIESDVHNAIAEYGRDRIAIVIGTSTSGISDGEIAFGEKQANGEFPADYHYTKQELGNCSDFIAAYFDLSGPHYSVSTACSSSGRVFLTAQRLIRSGIVDAVIVGGVDTICRLTLNGFNGLEALSDTLCKPFDQHRNGINIGEAAALMLLSKTPAPVALLGAGDSSDAHHISAPHPEGLGAEEAMKKALTNAGLTAQDIGYINAHGTATPLNDAMESKAIHRCFGDSVPVSSTKPLTGHTLGAASATEAAIAWHILKYNLDLPMQHCETKADDIHISLVETPTKLGNKAILSNSFAFGGNNISLIFGYAHD

SEQ ID NO: 41584 - protein, 345 aa, Zea mays
MNDAAGGGLRLPPGFRFHPSDFEIVSFYLTNKVLNTRFTCTAITEADLNKIEPWDLPSKAKMGEKKEWYFFYQKDRKYPTGLRANRATEAGYWKATGKDKEVYNAAEGVAVLVGMKKTLVFYRGRAPRGDKTNWVMHEYRLEGSGRLPAGLASATGSAAANAAAALKASAYKDEWVVCRVFHKTTGIKKTTTAAPAYQVAMAGAEMDQNQNNNPFPMPMQFSMLPDFSLDPVPPYYPYPNAGAGMPMLPMAAGIGGGAGGLHLNGAALFGNPMAAPQPMSFYHQMGTGTACAGGFDVSAPESRPSSMVSQKDDQANGAEISSMMSVAGPGPATTTTIEMDGVWKY

SEQ ID NO: 41585 - protein, 484 aa, Brassica napus
  misc_feature (32)..(32): Xaa can be any naturally occurring amino acid
  misc_feature (404)..(404): Xaa can be any naturally occurring amino acid
  unsure (1)..(484): unsure at all Xaa locations
MEKGSNGSAALEMQTSELDQPAALRKIISVSXSIAAGVQFGWALQLSLLTPYVQLLGIPHKWASLIWLCGPISGMLVQPIVGYHSDRCTSRFGRRRPFIVAGAGLVTVAVFLIGYAADIGHSMGDQLDKPPRTRAIAIFALGFWILDVANNTLQGPCRAFLADLSAGNAKKTRTANAFFSFFMAVGNVLGYAAGSYKNLYKAHAFTMTESCDLYCANLKTCFFLSITLLLLVTFMSLCYVTEKPWTPEPTADGKPSSVPFFGEIFGAFKELKRPMWMLLIVTALNWIAWFPFLLFDTDWMGREVYGGNSDATASVASKKLYNDGVRAGALGLMLNAIVLGFMSLGVEWVGRKMGGAKRLWGAVNFILAICLAMTVVVTKQAENHRRDHGGAKTGPPGNVTVWGXAGALTLFAVLGIPQAITFSIPFALASIFSPNSGAAQALSLGVLNLAIVVPQMVVSVGGAPFDELFHGGNIPAFVLGAIRA

SEQ ID NO: 41586 - protein, 268 aa, Triticum aestivum
MAQLPPKIPTAATGAHHWPGAGVEHHGHGPAAVWADEFAEFAAARRGAHRRSLSDSVAFVEMAPGGCGGAGDFDRLDDDQLMSMFPDEGGSTAPGSENGTSDSDGDKHGKDRYDDGHNDDANPEEPGPGQATPTSSTETIRDPKRVKRILANRQSAQRSRVRKLQYISELERCVTTLQNEVSVLSPRVAFLDQQRTILTVGNSHLKQRIAALAQDKLFKDAHQEALKEEIERLRQVYQQQNLRMSSGAGAASDHGGPPPVRAEKELMS

SEQ ID NO: 41587 - protein, 802 aa, Ruminococcus flavefaciens
MKKSIFKRYAAAVGLMASVLMFTAVPTTSNAADDQKTGKVGGFDWEMWNQNYTGTVSMNPGAGSFTCSWSGIENFLARMGKNYDDQKKNYKAFGDIVLTYDVEYTPRGNSYMCIYGWTRNPLMEYYIVEGWGDWEPPGNDGVDNFGTTTIDGKTYKIRKSMRYNQPSIEGTKTFPQYWSVRTTSGSRNNTTNYMKDQVSVTKHFDAWSKAGLDMSGTLYEVSLNIEGYRSNGSANVKSISFDGGIDIPDPEPIKPDENGYYLKENFESGEGNWSGRGSAKVKSSSGYDGTKGIFVSGREDTWNGASINLDELTFKAGETYSLGTAVMQDFESSVDFKLTLQYTDADGKENYDEVKTVTAAKGQWVDLSNSSYTIPSGATGLVLYVEVPESKTDFYMDGAYAGVKGTKPLISISSQSVDPPVTEPTNPTNPTGPSVTKWGDANCDGGVDLSDAIFIMQFLANPNKYGLTGTETNHMTNQGKVNGDVCEHGSGLTEDDAVSIQKYLIRAISELPESYLEGHDPSKTTTTTTRITTTTTTTTTTTTSKTTTTTTTTSPAMHGGYRDLGTPMNTSATMISDFRTGKAGDFFASDGWTNGKPFDCWWYKRNAVINDGCLQLSIDQKWTNDKNPDWDPRYSGGEFRTNNFYHYGYYECSMQAMKNDGVVSSFFTYTGPSDDNPWDEIDIEILGKNTTQVQFNYYTNGQGKHEKLYDLGFDSSEAYHTYGFDWQPNYIAWYVDGREVYRATQDIPKTPGKIMMNAWPGLTVDDWLKAFNGRTPLTAHYQWVTYNKNGVQHSSQGQNPWG

SEQ ID NO: 41588 - protein, 324 aa, Azoarcus sp. EbN1
MPHAIRFHRTGGPEVLQWEAVDVPPPAQGEARVRQHAVGLNYIDTYHRTGLYPAPLPSGIGLEAAGVVEAVGEGVDDLAPGDRVAYAGGPLGAYADLRNMPADRLVKLPDPVSFEQGAAMMLQGLTAQYLLRRTYRVQPGDTILIHAAAGGVGLIVCQWAKALGATVIGTVGTDEKAALARAHGCDHSIVYTRENFAERVREITGGEGLPVVYDSIGKDTFMESLGCLRPLGMMVLFGAASGPVPPFDLGLLAKMGSLFITRPTLFTYSAKRPDLLAMAADLFEVVVSGKVRIEVNQRFALKDAAQAHRELEARRTTGSSILLP

SEQ ID NO: 41589 - protein, 363 aa, Ginkgo biloba
SDSGKDAGRLSAAWQLYKAQEELIKVAKQFGIKLTMFHGRGGTVGRGGGPTHLAILSQPPDTIHGSLRVTVQGEVIEQSFEEEHLCFRTLQRFTAATLEHGMHPPISPKQEWRELMDEMAVVATEEYRSYVFHNKRFVEYFRLATPETEYGRMNIGSRPSKRKPSGGIESLRAIPWIFAWTQTRFHLPVWLGFGAAFRHVLEKDIRNLHMLQQMYNEWPVFRVTIDLVEMVFAEEDPGIAALYDKLLVSEDLWLFGSQLRSNFVETKDLLLKVAGHRELLEGDPYLKQRLRLRDSYITTLNGCQAYTLKRIRDPNFHGNLRPHLSKETSSTKPAADLVKLNPTSEYAPGLEDTLILTMKGIAA

SEQ ID NO: 41590 - protein, 312 aa, Glycine max
MEKSRVLIVGGTGYIGKRLVKASLAQGHETFVLHRPEIGVDIEKVQLLLSFKEQGARLVSGSFNDHKSLVNAVKLVDVVICAISGVHIRSHQILLQLKLVDAIKEAGNIKRFLPSEFGTDPARMAHALEPGRVTFDDKMVVRKAIQEAHIPFTYISANCFAGYFLGGLCQPGFIIPPMDSVILFGDGNVKAIYVDEDDIAMYTIKTIDDPRTRNKTVYIRPPENILSQREVVQIWEKLIGKELHKSSISAQQFLSSMEGQPYEQQVGMGHYYHVCFEGCLTNFEIGEEGVEACGLYPQIKYTTVQDFMKRYV

SEQ ID NO: 41591 - protein, 541 aa, Synechocystis sp. PCC 6803
MTSIDTLWLLLCAGLVFFMQAGFMCLESGLTRSKNSINVAIKNFADFGISVALFWSFGFSIMFGLSQGGWWGTGYSFVDVGGEPTLAVFFLFQAMFCGTATTIISGAAAERLKFSAYLLVAGLASGLIYPLFGDWAWNGLATVAGIETTGGWLENLGFRDFAGSTVVHSVGAWIGLATILVVGPRQGRFPKTGKTLKIQGSNMPFSVLGTLILWFGWLGFNGGSTFGLTPEVPGIMVNTVLAGVGGMLMAGLISLLQDKMIQVEPLMNGSLAGLVAITASANVVMTPIAMVIGATGSAIAYLVGKKMLHWGVDDAVDAVAVHGGAGVWGTLCVGLFGQLPLVDTGLNRWQQCGVQLLGIGVCTLWAFGLAWVFLTLLNRVFALRISPEDEEIGLNVSEHQATTETYELFQVMDRQAKTHDLSLRVPVNPFTEVGHIAGRYNQVMDAFEARHHRSVEDLAQIYYVTAAIAAAIENNSFKADQLGLEEVTNRADELGALARTIQQMAEMLQQRDQELIAVKQQLVLQQQKQHHGNGESVDLSP

SEQ ID NO: 41592 - protein, 550 aa, Pseudomonas putida
MRTPYCVADYLLDRLTDCGADHLFGVPGDYNLQFLDHVIDSPDICWVGCANELNASYAADGYARCKGFAALLTTFGVGELSAMNGIAGSYAEHVPVLHIVGAPGTAAQQRGELLHHTLGDGEFRHFYHMSEPITVAQAVLTEQNACYEIDRVLTTMLRERRPGYLMLPADVAKKAATPPVNALTHKQANADSACLKAFRDAAENKLAMSKRTALLADFLVLRHGLKHALQKWVKEVPMAHATMLMGKGIFDERQAGFYGTYSGSASTGAVKEAIEGADTVLCVGTRFTDTLTAGFTHQLTPAQTIEVQPHAARVGDVWFTGIPMNQAIETLVELSKQHVHTGLMSSSSGAIPFPQPDGSLTQENFWRTLQTFIRPGDIILADQGTSAFGAIDLRLPADVNFIVQPLWGSIGYTLAAAFGAQTACPNRRVIVLTGDGAAQLTIQELGSMLRDKQHPIILVLNNEGYTVERAIHGAEQRYNDIALWNWTHIPQALSLDPQSECWRVSEAEQLADVLEKVAHHERLSLIEVMLPKADIPPLLGALTKALEARN

SEQ ID NO: 41593 - protein, 364 aa, Cycas revoluta
  misc_feature (252)..(252): Xaa can be any naturally occurring amino acid
  unsure (1)..(364): unsure at all Xaa locations
SDSGKDAGRLSAAWQLFKAQEDLIKVAKQFGVKLTMFHGRGGTVGRGGGPTHLAILSQPPDTIHGSLRVTVQGEVIEQSFGEEHLCFRTLQRFTAATPEHGMHPPVSPKPEWRELMDEMAVVATNEYRSIVFQDKRFVEYFRLATPELEYGRMNIGSRPSKRKPSGGIESLRAIPWIFAWTQTRFHLPVWLGFGAAFKHVLEKDIRNLHILQQMYNEWPFFRVTIDLVEMVFARGDPGIAALYDKLLVSEDXWPVGAQLRSIYVETKNLLLQVAGHRDLLEGDPYLKQRLRLRDSYITTLNVCQAYTLKRIRDPNFHCNLRPHLSKETMSSTKPAAELVKLNPTSEYAPGLEDTLILTMKGIAA

SEQ ID NO: 41594 - protein, 171 aa, Enterococcus faecalis V583
MEEKAIFAGGCFWCMVQPFDTQPGIISVVSGYTGGHVPNPTYEQVLTHTTGHTEAVEITFDPAIISYEQLVDIYWQQTDPTDAFGQFQDRGDNYRPVIFYRSQEQKEIAEKSKERLANSGRFTEPIVTTIEPAAPFYPAEEYHQDFYKKDALRYGLSHQRRSEFIEEKWSD

SEQ ID NO: 41595 - protein, 375 aa, Triticum aestivum
  misc_feature (244)..(244): Xaa can be any naturally occurring amino acid
  unsure (1)..(375): unsure at all Xaa locations
MDRGPRKHHTKPLVQAQLGFCSAATHDLDPHTSLTLPNPTPPGGSGSVKMRPILMKGHERPLTFLKYNRDGDLLFSCAKDHTPTVWYADNGDRLGTYRGHNGAVWSCDVSRHSTRLITGSADQTAKLWDVKTGKELFTFRFDAPARSVDLAIGDHLAVITTDSFMGNMPTAQVKRIAEDLQDQTEESALVISGITGRINRAVWGPGNRTIITAGEDATIRIWDSETGKLLKESDKVAGHQKAIXSLSKSLDWSHFLTGSLDKSAKLWDARTLTLIKTYVTERPVNAVDMSPILDNVVIGGGQDAMNVTMTDRRAGKFEAKFFHKILQEEIGGVKGHFGPINALAFNPDGKSFSSGGEDGYVRLHHFDPEYFNIKM

SEQ ID NO: 41596 - protein, 463 aa, uncultured bacterium 443
MSLACFATDSEEVLTSIESRAQQLTDLSDHIWDLAEVGYQETLSSNALKNALLAEGFSIESGVASIPTAFVASYGSGQPVIAIMGEFDALPGISQAAVPVVQKIDGKKTAHACGHHLFGAGSVGAAIAVKEWLDRTETSGTVQFFGTPAEEGGSGKVYMVRAGLFDDVDTVIHWHPASVNSADSASTLANRSAKFTFTGVSSHAASAPERGRSALDAVESMNFMVNLLREHVPSSTRLHYVITNGGATPNVVPNTAESFYYVRHPNENALREIWDRVVATANAAAMGTGTTMDYEVIHGNYSVLPNDTLARVMHANLSRVGGFAYSDADKVFANEIAKTLPTGAYIDGRAIGIKPFEVGQRSNGSTDVGDVSWTVPTVGMSAATWVPGTGAHTWQAVAAGRTPIGHKGMLVAAKAMALTAVTLFQNKSILVEANAEFKRRRGDDFQYEALLGDREPPLNYRRK

SEQ ID NO: 41597 - protein, 220 aa, Methanosarcina acetivorans C2A
MKIEKKSEGIKFPYSEKVLEHFRNPHNVGKIENADGKGLEGSPACGDMVAVYIKVEPETKVIEDVKFESYGCASNIATGSVITDLAKGKTLDEAKKITWKQASEELGGLPPIKAHCSVLAVEGLRAAIRDYEEKHGLVTEKEPTTEDVVRRRLKHVMNPLTGLDIIRTNLILKISVEAGVVRVVVDLPEDHQFAPAIKEDIIEKLGALWDVEKVDVVFTA

SEQ ID NO: 41598 - protein, 365 aa, Cycas revoluta
SDSGKDAGRLSAAWQLYKAQEELIEVAKQHGVKLTMFHGRGGTVGRGGGPTHLAILSQPADTIQGSLRVTIQGEVIERSFGEAQSCFKTLQRYTAATLEHSMIPPLTPKQEWRALMDEMAVVATERYRSIVFREPRFVEYFRLATPELEYGRMNIGSRPSKRKPSGGIESLCAIPWIFAWTQTRVHLPVWLGFGESVRHVIDKDHKNLLMLQQMYNEWPFFRVTIDLVEMVVAKGNPGIAALYDKLLVSEELLPLGEQLRTAYNDTKSYLLRITGHNEILEGDPFLKQRLKLRTAYITTLNVRQAYTLKRIRDPSYQVPVRPPIAKEIMEGSVSSANQLVKLNPTSEYAPGLEDTLILTMKGIAA

SEQ ID NO: 41599 - protein, 331 aa, Cycas revoluta
SDSGKDAGRITAAWELYKAQEDVVAVCKDYNIKLTLFHGRGGSVGRGGGPTYLAIQSQPPGSVMGTLRVTEHGEMIQAKFGLPQTAVRQLEIYTTAVLLATLHPPRSPRSDQWRAIMEEISEQSCKHYRGVVYQNPDFIPYFHEATPEAELGNLNIGSRPTRRKQSGGVSQLRAIPWIFAWTQNRSVLPAWLGLGAGLGTAFEKGFKEDVQSMYKEWPFFQSTIDLIEMVLAKADLAIAKHYEEVLVSPGRQQLGSKIHKDFCATEQCVLLVTGHQKLSENQGTERLIDNRLPYLNTLNMLQVEILRRLRQDETNEKLRDALLITMKGIAA

SEQ ID NO: 41600 - protein, 217 aa, Zea mays
MGRPPCCDKMGVKKGPWTPEEDLMLVSYVQEHGPGNWRAVPTNTGLMRCSKSCRLRWTNYLRPGIKRGNFTEQEEKLIVHLQALLGNRWAAIASYLPKRTDNDIKNYWNTHLKKKLKNMQGGEGGAGGKRPAVPKGQWERRLQTDIHTARQALRDALSLEPSATPLAKVEPLPTAPGCATYASSADNIARLLEGWLRPGSGKGPEASGSTSTTATTR

SEQ ID NO: 41601 - protein, 153 aa, Physcomitrella patens
MQIFVKTLTGKTITLEVESSDSIQNVKTKIQDKEGIPPDQQRLIFAGKQLEDERTLADYNIQKESTLHLVLRLRGGTMIKVKTLTGKEIEIDIEPYDTIERIKERVEEKEGIPPVQQRLIFAGKQMNDDKTAKDYNIEGGSVLHLVLALRGGC

SEQ ID NO: 41602 - protein, 364 aa, Kalanchoe daigremontiana
SDSGKDAGRLSAAWQLYKAQEDLVKVAKEFGVKLTMFHGRGGTVGRGGGPTHLAILSQPPDTIHGSLRVTVQGEVIEQSFGEEHLCFRTLQRYTAATLEHSMCPPASPEPEWRELLDEMAVAATKEYASIVFHEPRFVEYFRLATPEVEYGRMNIGSRPSKRKPSGGIESLRAIPWIFAWTQTRFHLPVWLGFGAAFKHVIDKDIKNLLMLQEMYTRWPFFRVTIDLVEMVFAKGDPGIAALYDKLLVSEDLWPFGEQLRNNYNETKNLLLQVAGHKDLLEGNPYLRQRLRLRDSYITTLNACQAYTLKRIRDPNYHVTVRPRLSKEIMESNKAAAELVKLNPTSEYAPGLEDTLILTMKGIAA

SEQ ID NO: 41603 - protein, 140 aa, Triticum aestivum
MAFALSAPAAFAVVAARCKVFGGGKSDGRAGCRVGILARKNTGHITMALAVDASRFEGVPMAPPDPILGVSEAFKADTSDLKANLGVGAYRTEELQPAVLNVVKKAEKLMLEKGENKEYLPIEGFAAFNKATADLLLGAD

SEQ ID NO: 41604 - protein, 409 aa, Bradyrhizobium japonicum
MDYSQFFNSALDRLHTERRYRVFADLERMAGRFPHAIWHSPKGKRDVVIWCSNDYLGMGQHPKVVGAMVETATRVGTGAGGTRNIAGTHHPLVQLEAELADLHGKEAALLFTSGYVSNQTGIATIAKLIPNCLILSDELNHNSMIEGIRQSGCERQVFRHNDLADLEALLKAAGANRPKLIACESLYSMDGDVAPLAKICDLAEKYNAMTYVDEVHAVGMYGPRGGGIAERDGVMHRIDILEGTLAKAFGCLGGYIAANGRIIDAVRSYAPGFIFTTALPPAICSAATAAIKHLKTSSWERERHQDRAARVKAILNAAGLPVMSSDTHIVPLFIGDAEKCKQASDLLLEEHGIYIQPINYPTVAKGSERLRITPSPYHDDGLIDQLAEALLQVWDRLGLPLKQKSLAAE

SEQ ID NO: 41605 - protein, 215 aa, Hyacinthus orientalis
HVEFEYRGFVANSLADLEPYLLESAPNPRNGPDEIEAVAVNSIFELHRLLAREGAIDKVLSTVKAIKPKIMTVVEQEANHNGGLFAERFTEALHYYSTMFDSLEGGASADAVSGGQQNQVMSEVYLGRQICNVVACEGAERTERHETLVQWRNRLSPAGFEPVHLGSNAFKQASMLLALFAGGNGYRVEEKDGCLTLGWHTRPLIATSAWRVADA

SEQ ID NO: 41606 - protein, 162 aa, Shewanella oneidensis MR-1
MTSTIYRHNAIDIQGNPTPLTQYQGKVILIVNTASECGFTPQYKGLEALYQEYKARGFVVLGFPCNQFGAQEKANEQGIKSFCELNFGVSFPLFSKIEVNGEHTHPLYQYLKKAAPGMLGTERIKWNFTKFLINRQGEAVARFAPTTKPEDIRDKIESLLNK

SEQ ID NO: 41607 - protein, 382 aa, Chlamydomonas reinhardtii
MAAGSVGVFATDEKIGSLLDQSITRHFLSTVTDQQGKICAEYVWIGGSMHDVRSKSRTLSTIPTKPEDLPHWNYDGSSTGQAPGHDSEVYLIPRSIFKDPFRGGDNILVMCDCYEPPKVNPDGTLAAPKPIPTNTRFACAEVMEKAKKEEPWFGIEQEYTLLNAITKWPLGWPKGGYPAPQGPYYCSAGAGVAIGRDVAEVHYRLCLAAGVNISGVNAEVLPSQWEYQVGPCEGITMGDHMWMSRYIMYRVCEMFNVEVSFDPKPIPGDWNGSGGHTNYSTKATRTAPDGWKVIQEHCAKLEARHAVHIAAYGEGNERRLTGKHETSSMSDFSWGVANRGCSIRVGRMVPVEKSGYYEDRRPASNLDAYVVTRLIVETTILL

SEQ ID NO: 41608 - protein, 454 aa, Forsythia x intermedia
MAIHSHIGVLAFPFGTHAAPLLTLVRRLVLDSSSQGITFSFFNTAKSNCAIFSGQEFDNIKAYDVWDGTHEGEAFTGSNILEAMQLFLAATPGNFEKVMKEAEVKNGMKISCLLSDAFLWFTCDLAEERGIPWVSFWTAASCSLSAHMYTDQIWSLMRSTGTAKTEEKTLSFVPGMTSVRFSDLPEEILSDNLESPLTLMIYKMVQKLSKSTAIVVNSFEEIDPVITNDLKSKFQNFLNIGPSILSSPTLSNGDSGQECLLWLEKQRHASVIYISFGTVITPQPREMAGLAEALETGEFPFLWSLRDNAMKLLPDGFLDRTSKFGMIVSWAPQLKVLENPSVGAFITHCGWNSILESISFGVPMICRPFFGDQNLNSKMVEDVWKIGVRLEGGVFTKNGTIEALHSVMLNETGKAIRENINKLKRKAQNAVKFDGTSTKNFRALLELIKSPRGI

SEQ ID NO: 41609 - protein, 452 aa, Neurospora crassa
MAPLADTASNGGSTLSLDHLITGSDKYHAAATNVAIAAENEYAAHNYHPLPVVFAKAQGVHVWDPEGKHYLDFLSAYSAVNQGHCHPELVKALTEQASRLTLSSRAFHNDVFPVWAAKVRSVFGYDMVLPMNTGAEAVETAIKIARKWAYKVKGVPHDKALVFSAADNFHGRTMTAISLSVDPESRDNYGPYVPQIGAVSPSTGKTIRYNNIADLEEVLEAHGKETAAFIVEPIQGEAGVVVPDEDYLQKVSALCKKHNVLFICDEIQTGIARTGRMLCSDWANIKPDIITLGKAISGGMYPVSAVLADKEIMLVVEPGTHGSTYGGNPLGCAVSLRALELVEEEGLVEKAEKLGQIFREGVEAFKSPIVKLVRGKGLLNAVVIDESAAAGRTAWDLCILLKEKGVLAKPTHGNIIRFAPPLVITEEELRGAIKTFGEALQELPTVTKSEGH

SEQ ID NO: 41610 - protein, 422 aa, Thiobacillus sp.
MVTKQDVEAAYLLLLGRPAEPGAAEYWMENVYHTIDLVTGLMASDEFRINRLPRLVEAGLSLSDFAPAAAPKALADNGPPMQAALHRGIGQIEVVEINRPEALPGTVVVKVGASGICGTDLRAYRQDPNSQDLPHGHEFAGTIVEVGEGVSRDRIGKRVTADLFLNAMCGNCQFCISGHAYHCIDKALPFRSGGFAEYLRVRNAATFDLPDSIDDALGALVEPLAVSTHAIRLVGVQPGMIGVVIGAGTIGLCAIAAALHAGATNVFVVARHAFQGELARAIGATDILPDDIGSAINRIREVAPHGADFVIEAVGGGQATIDQATRFLAPRGRVGIVGETGPGIKVVEAYPALMKELTFLYSNCYGYLDGKHDFEVAIENLALDGERLRKLITHEFLIADAPLAFQTANNKKFSSVKVQLKP

SEQ ID NO: 41611 - protein, 448 aa, Arabidopsis thaliana
  misc_feature (107)..(107): Xaa can be any naturally occurring amino acid
  misc_feature (224)..(224): Xaa can be any naturally occurring amino acid
  misc_feature (382)..(382): Xaa can be any naturally occurring amino acid
  unsure (1)..(448): unsure at all Xaa locations
MSQHMNLLLPSFETDKEEYDERKTTDHGGIGGSVWRFKGNKAAKEAASVSMKGTLARLFDCCSKDVKKTILPLGHGDPSVYPCFQTSVDAEEAVVESLRSGAANSYXPGVGILPARRAVANYLNRDLPHKIHSDDIFMTVGCCQGIETMIHALAGPKANILLPTLIYPLYNSHAIHSLVEIRKYNLLPDLDWEIDLQGVEAMADENTIAVVIMNPHNPCGNVYXYEHLKKVAEVARKLGIMVISDEVYNQTIYGENKFVPMGIFSSITPVVTLGSISKGWLVPGWRIGWIAMNDPKNVFKTTRVVESIKEHLDISPDPSTILQFALPNILEKTKKEFFEKNNSILSQNVDFAFDALKDIPCLTCPKKPESCTYLVLRKLDLXVLEDITNDFDFCMKLAQEENLVFLPGEVLGLKNWVRFSIGVERSMLEDAFMRLKGFFARHTKTQLT

SEQ ID NO: 41612 - protein, 178 aa, Zea mays
MGDWDPRGRAGKTLAATRFSLAPDLPSQPARDPFTAREMADQEAPVAVEAPTPVLGEPMDLMTALQLVMKKSSAHDGLVKGLREAAKAIEKHAAQLCVLAEDCDQPDYVKLVKALCAEHNVHLVTVPAAKTLGEWAGLCKIDSEGKARKVVGCSCVVVKDYGEESEGLNIVQEYVKSH

SEQ ID NO: 41613 - protein, 475 aa, Bartonella henselae str. Houston-1
MLNDANNELKRNLQNRHIQMIALGGVIGTGLFYGSKEAIQLAGPSAILAYLIGGLIIYFIMRMLGEMSVEEPSSGAFSFFAYKYWGRLAGFITGWNYWFLYILVSMTELTVIGFYLDHWILIDHWKSSFIVLLLITLVNLFNVRFYGEFEFACALIKVAAVISMIIFGIFLIVTGVGGNQASIHYLWCHGGFFSYGAIGVVLATSVVMFSFGGTELIGIAAGETSNPQKTIPVAIRQVMWRIIIFYIGSISVIMIISPWNMIEKNSSPFVTIFETLGIPAAGHILNFVVIMAAISVYNSGIYSNGRMLYSLAIQKNAPYIFSKLSTARVPYIAILFSSFCTAIIVVINALVPDNSFMRIMALATAAAVITWAIIIIVHLKFRKAHKNKKEDFMYAFGLYPYANYLCLCFLALLFCIMFVSGFGKNGLMTRLFDMIGIKMSFLETYIPMQMPDMSLAVVIIPLWCLFLFLGYKLKR

SEQ ID NO: 41614 - protein, 367 aa, Ehrlichia canis str. Jake
MLDGILNQELINLKKNNLYRELSTITRSESGCFVAQNDQNLISFSCNDYLGLVGHPLLKEAAINAVNSYGVGAGASRMITGNNVIYQCLEKKLAKIYNTEMALVFSSGYLANVGVIAALTHRHDMIISDKLVHSSIIDGIKLSGAKNYRFEHNDYKDCENILKEFRKLHKHCLIIVEQVYSMNGDIAPIDHLKKLAEKYEAWLITDCAHSFGLMHCTNSDVYVGTLSKAAGVLGGYVCASEVVIKYIQNKARTFIYTTALPPMVVAAANAALDIIGGSVTDIPIKLAKFFCKNLNLAEPESHIVLLIMESVNKVLHAQQVLKQEGFLVIAIRPPTVQTPRLRFVFSVNHNLSDIEKLCYVIKQKKLI

SEQ ID NO: 41615 - protein, 261 aa, Alkaliphilus metalliredigenes QYMF
ICKGYFKLASILVGIIVGYVIAIMIGIVNFTPVAEAAWIAIPRPLHFGIEFYPSAIITMVIMYIVNSVQAVGDLSATTMGGMGREVTDEELSGGIIGNGVSSVVASFFGGLPTATYSQNVGIVAMTKVVSRFVLALAAGLILIGGFVPKFGAIMTTIPQSVLGGATITVFAIITMTGIKLIIQDELSGRNVTIVGLAVALGMGITTVPQSLELFPDWVMMVFGSSPVVIATVVVFTLNIILPKKSLADEKAEREEMEMKEG

SEQ ID NO: 41616 - protein, 427 aa, Ralstonia eutropha JMP134
MFAAADAAVFASADIAVKPIQKSNKLNNVCYDIRGPVLEKAKQMEEEGHKIIKLNIGNLAVFGFDAPEEIQQDMMRNLPNSAGYSDSKGIFAARKAIMHYTQQKNIQGVGLEDIYVGNGASELIVMAVNALLNSGDEVLVPAPDYPLWTAAVSLSGGTPVHYICDESNEWMPDPADIRARITPHTKAIVIINPNNPTGALYSDELLLEIVAIAREHGLIIFADEIYDKVLYDGNVHTSIASLSTDVLTVTFNGLSKNYRSCGYRAGWMVVSGDKRPALDYIEGLNMLSSMRLCANVPGQWAIQTALGGYQSINDLVAEGGRLRRQRDLAYELITAIPGVSCVKPKAALYLFPKLDLSMYPVQDDQEFIYELLQESKVLLVQGSGFNWDKPDHFRIVFLPHEEDLREAINRIARFLEAYRKRHGKVAA

SEQ ID NO: 41617 - protein, 111 aa, Arabidopsis thaliana
  misc_feature (38)..(38): Xaa can be any naturally occurring amino acid
  unsure (1)..(111): unsure at all Xaa locations
GAYIDKKCPFTGTVSIRGRILAGTCHSAKMQRTIIPSXVRRNYLHFVKKYQRYEKRHSNIPAHVSPCFRVKEGDHLIIGQCRPLSKTVRFNVLKVIPAGSSAIGKKAFTGM

SEQ ID NO: 41618 - protein, 205 aa, uncultured bacterium
QTGGSFYEPFNSYNSGLWQKADGYSNGDMFNCTWRANNVSMTSSGEMRLALTSPSYNKFDCGENRSVQTYGYGLYEVRMKPAKNTGIVSSFFTYTGPTEGTPWDEIDIESLGKDTTKVQFNYYTNGAGNHEKLADLGFDAANAYHMYAFDWQPNSIKWYVDGQLKHTATTQVPAAPGKIMMNLWNGTGVDDWLGSYNGVNPLYAH

SEQ ID NO: 41619 - protein, 656 aa, Polaromonas sp. JS666
MCGLAGYFSGQWPADGEQASARLKAMTDAIAHRGPDSDGYWLDAATCMALGHRRLAILELSAAGAQPMHAASGRYVIAYNGEIYNHLDLRADLQKSGQSPAWRGHSDTETLLAGFDAWGIQGAVERTVGMFAFAVWDRQERMLTLGRDRLGEKPLYYGWQGSGSSAVFLFGSELKALRAHPAFGAQINRDALCLYMRHNNVGGSHSIYQGIHKLPPGTLLTVSRQTPEPVIRPYWSGAEVARCGVAQPFGGTSGEAVDALEALLKDAVRQQMMADVPLGAFLSGGVDSSAVVALMQTQSLRPVKTFSIGFHEAAYNEAEHAKAVAQHLGTEHTELYVTPEQAMAVIPRLPTLYDEPFADSSQIPTFLVSQLARQHVTVSLSGDAGDELFGGYNRYQLTASLWRKLSAAPLPLRRAAAWGLTRFSPQSLNSLAALMPASARWAHMGDKLHKGAGVMAGRTVEDLYLGMVSDWHDPAAVVIGGREPATLLRGRRPDLPGLTDVERMMALDMLSYLPDDILTKVDRAAMGVSLETRVPFLDHRVVEFAWRLPLHYKLRQEGGRYTTKWALRQVLYRHVPQALIDRPKMGFGVPIDRWLRGPLRDWAEDLLSETRLKREGYFKPAPIRQKWAEHLGGQRNWAPHLWTALMFQAWLQANHA

SEQ ID NO: 41620 - protein, 474 aa, GIBBERELLA ZEAE PH-1
MGNNTSSSSKPTTPTTSAPGSAHGGHLHGHESPRHHLRKDARNIITGHTHRSAAPPEPSMAQAQGSTVINRPKSLPPTAVSSLSGSPHNNFTAVHKTASSSDAKAIAEKQGTATPESKSHHRDEPTKPLDVPMESSSLRSHQSAHVHDSALIPNSSITDMYLTRPPRLPLPIDEEVHTPGSPILAPENDQEGDMEPIDSLDGITRKSSALSATTVDEEDGEELRVDKTRPVVQTKLEWLSGGDKVYVTGTIFQWNRKQRLHPIEGRPGCFSTSVYVLPGTHHVRFLVDGIMQTSPDLPTTVDFGNNLVNYIEVSPEDAQKVPAPSAAAYAEAQAAAAAQATAQAQGLAPGAPKPPPQLKGKPVPPPESYRSQIPKYLIDFDQAEDSQAYQYAVNAIERLPNPPALPGFLSKPILNAATLMKDDNSVLNMPNHTILNHLATSSIKNNILAVSATTRYRDKYVTTIVYKPTASDES

SEQ ID NO: 41621 - protein, 608 aa, ASPERGILLUS NIDULANS FGSC A4
MPDDVWSGSSTCSLSSYEISVQRMKQQSHKNWPYSWAKNVDPAITEKTPQDEAEVAGVTKIKAVEAVGGKKGKYLMYAGLAMVMIIYELDNSTVGTYRNFATSDFHQLGMLATLNTAASIITAIGKPPIAKLSDVLGRAEAYIITVTFYILSYILCASSKSFSTYAGGYVFYSVGQAGMAILNSTIVSDLSSMRWRGFAYNILYIPFLVTPWVSAFIVDSVVHGIGWRWGIGMFAILMPFCASFIIITLLVLQRRAKNAGLILNERLTMYSFCSRIDLGGILLLSGGFALVLIPITLAATATDRWSTPWVDALIVLGALVLISLVPYEKYVSQHPVVPVRYLRTVSVVISVLLGCIDNIGYGATHTYLFVWSMVSHNFSPRDAQFLTYTNGVAQALSGMGTGLLMYRYRTYKWIGVAGAVIRMIGYGVMVRLRTNESSIAELFVVQLVQGIGSGIIETIIIVAAQISVPHAELAQVTSLVMLGTFLGNGIGSAVAGAIYTGQLRNRLRVHLGTNVGAEQLTRLYNSITGTLPDWGTAERTAVNQAVHYNRGFGFRGPNCDTDFVTAQQKTRVSLLPAVQYTANLPSDGHNLVQEAPSPDSLEIKKPQT

SEQ ID NO: 41622 - protein, 473 aa, GIBBERELLA ZEAE PH-1
MEKLSETTPNGTSPRTFALNHSRPRSSFKGCSRISDYELLGKLGEGTFGEVHRARLRKTGALVALKKIIMHHEKDGFPITALREIKLLKLLSHKNILRLEDMAIEHPTRQTDKRKKPIVYMATPYMDHDLSGLLDNPSVQFKEPQIKCYMLQLLEGLRYLHDSRILHRDMKAANLLINNKGILQIADFGLARHYDGRTPESGVPMGEGKRDYTGLVVTRWYRPPELLLQLRQYTPAIDVWGVGCVFGEMLYGKPILAGESDAAQLDIIWDLMGSPNEENMPRWKSLPGADHLTPRPRTGNLETRFRQYGSGAVSLLKELLRLDWRTRINAVDALQHPWFKMQPLPLEPHEIPTYEESHELDRRKFHDRKAALPPAPKGGTVGVGPDANGATAGFNSNEPYGNGRNGVNGGRRRDDRPPPPRDDRPPPRDDRRRRNSREDRRFDRDRGTMSRSRSPRHDRSRDRDRPDHNGYRR

SEQ ID NO: 41623 - protein, 259 aa, Arabidopsis thaliana
MAPVKRRVFKTNNEMAVELAKYTADLSSKFCKERGVFTVVLSGGDLIAWLWKLLEAPYIDSIEWSKWHIFWVDERVCAWDHADSNYKLAYDGFLSKVPIPAENIYAINNGLGAEGNAELAAERYEECLKQKVNQNIIRTYKSSGFPQFDLQLLGMGPDGHMASLFPGHAQINEKVKWVTSITDSPKPPSKRITLTLPVINCASYNVMAVCDKEQADSVAAALNHTKDLPAGRLTADVEVVWFLDQAAASKLPHGWCSIL

SEQ ID NO: 41624 - protein, 364 aa, Kalanchoe daigremontiana
SDSGKDAGRLSAAWQLYKAQEDLVKVAKEFGVKLTMFHGRGGTVGRGGGPTHLAILSQPPDTIHGSLRVTVQGEVIEQSFGEEHLCFRTLQRYTAATLEHSMCPPASPEPEWRELLDEMAVAATKEYRSIVFHEPRFVEYFRLATPELEYGRMNIGSRPSKRKPSGGIESLRAIPWIFAWTQTRFHLPVWLGFGAAFKHVIDKDIKNLLMLQEMYTRWPFFRVTIDLVEMGFAKGDPGIAALYDKLLVSEDLWPFGEQLRNNYNETKNLLLQVAGHKDLLEGNPYLRQRLRLRDSYITTLNACQAYTLKRIRDPNYHVTVRPRLSKEIMESNKAAAELVKLNPTSEYAPGLEDTLILTMKGIAA

SEQ ID NO: 41625 - protein, 119 aa, Phaseolus vulgaris
NIDNFFTEDEQLAFCPAIVVPGVYYSDDKMLQTRIFSYADSQRHRLGPNYLQLPANAPKCAHHNNHHEGFMNFMHRDEEVNYFPSRYDSVRHAESFPIPPAICSGRREKCGIEKENNIK

SEQ ID NO: 41626 - protein, 364 aa, Kalanchoe daigremontiana
SDSGKDAGRLSAAWQLYKAQEDLVKVAKEFGVKLTMFHGRGGTVGRGGGPAHLAILSQPPDTILGSLRVTVQGEVIEQSFGEEHLCFRTLQRYTAATLEHSMCPPASPEPEWRALLDEMAVTATKEYRSVVFQEPRFVEYFRLATPELEYGRMNIGSRPSKRKPNGGIESLRAIPWIFAWTQTRFHLPVWLGFGAAFKHVIDKDIKNLLTLQEMYKRWPFFRVTIDLVEMVFAKGDPGIAALYDKALVSEDLWPFGEQLRNNYNETKTLLLQVAGHKDLLEGDPYLRQRLRLRDSYITTLNVCQAYTLKRIRDPHYNVTVRPHLSKEITESNKPAAELVKLNPTSEYAPGLEDTLILTMKGIAA

SEQ ID NO: 41627 - protein, 364 aa, Clusia uvitana
SDSGKDAGRLSAAWQLYKAQEDLIKVAKQFGVKLTMFHGRGGTVGRGGGPTHLAILSQPPDTIHGSPRVTVQGEVIEQSFGEEHLCFRTLQRFTAATLEHGMHPPDSPKPEWRALLDEMAVVATEEYRSVVFKEPRFVEYFRLATPELEYGRMNIGSRPSKRKPSGGIESLRAIPWIFAWTQTRFHLPVWLGFGAAFKHIIKKDIRNLHMLQEMYNAWPFFRVTIDLVEMVFAKGDPGITALYDKLLVSEDLWAFGENLRTNCEETKKLLLQIAGHKDLLEGDLYLKQRLRLRDSYITTLNVCQAFTLKRIRDPSYNVKFRPHISKEIMETSKSANELLILNPSSEYAPGLEDTLILTMKGIAA

SEQ ID NO: 41628 - protein, 182 aa, Arabidopsis thaliana
  misc_feature (12)..(12): Xaa can be any naturally occurring amino acid
  misc_feature (32)..(32): Xaa can be any naturally occurring amino acid
  misc_feature (34)..(34): Xaa can be any naturally occurring amino acid
  misc_feature (55)..(55): Xaa can be any naturally occurring amino acid
  misc_feature (66)..(66): Xaa can be any naturally occurring amino acid
  misc_feature (87)..(87): Xaa can be any naturally occurring amino acid
  misc_feature (128)..(128): Xaa can be any naturally occurring amino acid
  misc_feature (166)..(166): Xaa can be any naturally occurring amino acid
  unsure (1)..(182): unsure at all Xaa locations
TMLEQLDVIVAXIVVCDSSRRDKYLTKQLTVXAXAMLMMKDTAVLNERDRMSTCXDSYKDSAGVSXDNAIISAIISLERKADALILXSDVEVLYNASPRMSTLKLIQSFVIVILQDEISDDDKSNFGXRGYACTELKPSVGAINGGAGDIIPSRDAVEKKTDVLSXESVGRAVHRDAHRCAP

SEQ ID NO: 41629 - protein, 319 aa, Zea mays
MASAQAVGQGERGHFVLKSGHTIPAVGLGTWRAGSDTAHSVRTAIAEAGYRHVDTAAQYGVEKEVGRGLKAAMEGGINRKDLFVTSKLWCTELAPDRVRPALEKTLKDLQLDYLDLYLIHWPFRLKDGAHMPPEAGEVLEFDMEGVWREMEGLVKDGLVKDIGVCNYTVAKLNRLMRSANVPPAVCQMEMHPGWKNDRIFEACKKHGIHVTAYSPLGSSEKNLAHDPLVEKVAKKLDKTPGQVLLRWALQRGTSVIPKSTKDGRIKENIQVFGWEIPEEDFRALCGIKDEKRVLTGEELFVNKTHGPYKSATEVWDHED

SEQ ID NO: 41630 - protein, 372 aa, Magnaporthe grisea 70-15
MSITKYKAAAVTSEPGWFDLEAGVQKTINFINEAGQAGAKLVAFPEVWIPGYPYWMWKVNYLQSLPMLKAYRENSLKVDSDEMRRIRRAARNNNIYVSLGFSEIDHATLYLAQVLIGPDGEVLNHRRKIKPTHVEKLVYGDGSGDSFIPVTQTTLGRVGQLNCWENMNPFLKSLSVASGVQVHVAAWPVYPGVEQQVAPDPATNYADTASDLVTPAFAIETGSWVLAPFQRLSVEGLKKTTPAGVEPETDPTPYKGHARIYRPDGSLAVPKPDKDFDGLMFVDIDLNETHLTKVIADFAGHYMRPLLDANILQSIRNQLRSDLIRLLVDTRRKELITEADPQGGIKSYSTRTRLGLGKALDDDVEEDTERTV

SEQ ID NO: 41631 - protein, 272 aa, Ipomoea purpurea
MVNSSARWSPRVRKGAWSEEEDDLLRKCIQKFGEGKWHLVPFRAGLNRCRKSCRLRWLNYLHPDIKRGHFSLEEADLILRLHKLLGNRWSLIAGRIPGRTANDVKNYWHSHLKKKVVSMHMASSNSSRQDNNWDDEKGKAPQIKENILFRPRPRRFFRTSLSSPALSTLTGKAKAVVYDAPPPPPPPPHQLQPQPEATSPAADLLMVFNVQQNSNSIETNLPAQTTAPSSHDGVKWWEDLLYDDSHQGLIDWTTDDDFPIDVTLLKLLDTTI

SEQ ID NO: 41632 - protein, 143 aa, Brassica napus
MVKLCELCGAEAHLHCDADSAYLCRSCDVKFHASNFLFSRHVRRAICPGCSSLTGDIVSGSLSPWPAKITCSCCGTSSSSASSCCSELSSSTTRKTIVNRGPRRREKGVNAVADGIFVNWCDELGLNGDSKNEVVSLASLALA

SEQ ID NO: 41633 - protein, 175 aa, Glycine max
MSELVARTGRHQQRYENGYRLVSGCVPFRYKSSNDCGDSSSEKIVEVLMINSPSGPGLLFPKGGWENDETVEQAAVREAVEEAGVRGDIMDFLGHYEFRSKTHQDEFSPEGLCKAAMFALFVKEELELWPEQSTRNRRWLDVSEALGSLRHAWMRDALECFCKWQEDKLANGTKE

SEQ ID NO: 41634 - protein, 332 aa, Phytophthora infestans
MNVAINGFGRIGRLVLRASAKNPLINIVAINDPFVSTTYMEYMLEYDTVHGKFDGSLSHDETHIFVNGKPIRVFNEMNPENIKWGEEQVQYVVESTGAFTTLEKASTHLKNGVEKVVISAPSSDAPMFVMGVNHELYEKNMHVVSNASCTTNCLAPLAKVVNDKFGIKEGLMTTVHAVTATQKTVDGPSKKDWRGGRGACFNIIPSSTGAAKAVGKVIPSLNGKLTGMSFRVPTADVSVVDLTARLVNPASYDEIKAAIKSASENEMKGILGYTEKAVVSSDFIGDSHSSIFDAEAGIALTDDFVKLVSWYDNEWGYSSRVLDLIEHMVKNE

SEQ ID NO: 41635 - protein, 222 aa, Shewanella oneidensis MR-1
MIDLYTAATPNGFKISIALEEMGLDYRVHKLDFSTNEQKQPEFLAINPNGRIPAIIDRDNDDFVVFESGAILLYLAEKTGQFLPADPKKRSQVIQWLMFQMSGVGPMMGQANVFYRYFPEKIPAAIERYQKEGRRLFEVMDTQLAKHQYLAGDEYTIADIATWPWVRIHEWSGINMVGLSHLQRWLDELALRPACQKGIVTPPPAIMTDEERAKQIQKMVTK

SEQ ID NO: 41636 - protein, 333 aa, Bordetella bronchiseptica RB50
MSTIPITLLTGFLGSGKTSLLRRLIHQPGFARCAVIINEFGEVGLDQALVADQSDDRDIQLLDSGCLCCLASSAIQDTLASLYYRRLRGEIPWFDRVLIETSGLAEPGPIINAVYGDGALARQFRFAGIVTTFDAGFGQVDVQAYAEAKTQLLMADTVVLTKLDLHPEARHLAAWLGELNPTARVYENSLPDDTLARLLLDPVADRPAPVAQGHPSAGAPQASALRHLLAYGIHSVTVDVPDAIGWPAWAAFVHEVQRTFADRLLRLKGVLAFEGQGRMAVHAVHHVFSAPEPAGAVPPALVGKLVFIVRDMEREEVLHAVRHLSGAPPADAA

SEQ ID NO: 41637 - protein, 233 aa, Glycine max
MDSDFWTSRLAAAKRQYTLQHHHPNSHLDRLGIDDFDVEEEVRPDFPCPYCYEDFDIASLSSHLEDEHSCESRVTICPICSVKVARDMLNHITLQHGHLFKLQRRRRLRRVAIPNSQTLSLLGRDLREAHLQVLLGGGGGYRSNSAAVSNAAATDPFLSSFILNFPACEAEEISKSVVTSADDSSSKNATPVHIWKSSFDPSLSTEEREKRMRQAAGRSGFVQDLFLSTLLGE

SEQ ID NO: 41638 - protein, 693 aa, Arabidopsis thaliana
MVDHHHHHHHQHRPNRLSVPQPTIGRTYPSFPYTPTPTPSKTRLSSSSSYRSIHGSKSSLSFLFLILFSLRSLYSLLPFLRSSPSFSLFPFSFLVSLLSFLFSLSFTIISSFSPSKKDPFLLRLQNRSFSSISSLSSSQIKLLLAKSFLLAFVFLLRFQALRYCGAAAMILAELSGTVSARVLFSDTGGIGVRSSKVRGFCVLFAGLLLLSISWDRVDCFPFSSSVESWGFWIYPKENCLRIWPLLLPFLSGFLGCYEKVSVNWNEIKQLDQKRVRLLSLFLTTVLLFPLAIWSFFFSGSGDDSVSFGNLGWPLANTVVFGVLLSENYNDDKFSSSKKKDSEREFLVTFLCTIVLELFYFPELSLWGLLLCGLLLYIAVRELESVYSDYQEIGMESPESFSTMFMKPIRHILSEKKSRKIALFLLINTAYMVVEFVAGFMSNSLGLISDACHMLFDCAALAIGLYASYISRLPANHQYNYGRGRFEVLSGYVNAVFLVLVGALIVLESIERILDPQEISTNSLLVVSVGGLLVNIVGLIFFHEEHHHAHGGSGIFLHVLADTMGSVGVVISTLLIKYKGWLVADPASSIFISILIIASVIPLLRNSAEILLQRVPRAHRQDLKEAMRNILKTKGVCSIQRLHVWSFTNSDVVATLHLLVSADSDKTDTKLQVSRLLEDAGVKDWTLQVESVNS

SEQ ID NO: 41639 - protein, 393 aa, Saccharomyces cerevisiae
KNSLLEKRPEDVVIVAANRSAIGKGFKGAFKDVNTDYLLYNFLNEFIGRFPEPLRADLNLIEEVACGNVLNVGAGATEHRAACLASGIPYSTPFVALNRQCSSGLTAVNDIANKIKVGQIDIGLALGVESMTNNYKNVNPLGMISSEELQKNREAKKCLIPMGITNENVAANFKISRKDQDEFAANSYQKAYKAKNEGLFEDEILPIKLPDGSICQSDEGPRPNVTAESLSSIRPAFIKDRGTTTAGNASQVSDGVAGVLLARRSVANQLNLPVLGRYIDFQTVGVPPEIMGVGPAYAIPKVLEATGLQVQDIDIFEINEAFAAQALYCIHKLGIDLNKVNPRGGAIALGHPLGCTGARQVATILRELKKDQIGVVSMCIGTGMGAAAIFIKE

SEQ ID NO: 41640 - protein, 146 aa, Brassica napus
ISFVAVMSSHDSMGLIFKCLSKGAVDFLVKPIRKNELKILWQHVWRRCQSSSGSGSESGTHQTQKSVKSKNIIKSDNDSGHSGENENGSIGLNASDGSSDGSGAQSSWTKKAVEVDDSPRAVSLWDRVDSTCAQVVHSNPEFPNNH

SEQ ID NO: 41641 - protein, 231 aa, Zea mays
MDKRGGICSGGSGSSGETEVRKGPWTMEEDLILINYIANHGDGVWNTLAKSAGLKRTGKSCRLRWLNYLRPDVRRGNITPEEQLIIMELHAKWGNRWSKIAKHLPGRTDNEIKNFWRTRIQKYIKQTDVAATATSSVGSQSSEINDHAASTSAHNVFCAQDQAMETYSPTTTSYQHTNMDFNYGNFSAAAATVTATTTADYSIPMTVDDQNGENYWGMDDIWSSMHLLNGN

SEQ ID NO: 41642 - protein, 575 aa, Yarrowia lipolytica CLIB122
MPPLQIVLDNAYQRALVLYDERSRQVELIHDEEQYLQLRSSTPQRSQSPFSAGNNREGQLIVGKPKRPSVSPPRRHSETYCVTCGSKLPSGFRQRPTASANDFVDRNYFQLLAGDLQQNHLGSNTNATGRAKNGTFSNPVYNSISENAFLQGYFDKFFELKHELGRGGRGTVWLVEHVLNGVSLGLFACKKVPVGDDTVWLTKALYEVTLLKQLNHPNLIRYNHVWLETSQWSPFGPAVPCAFILQEYCSGGNLEVYVKKRRTLTPFEVVSFLKDILSGVSYLHEHQIIHRDLKPSNFLLKDEGNGPGTPPQILVSDFGEGNVEGQHRSSTGTTGTLEYCAPELLSRDIRGNLGEFSRHSDMFSVGLVLYFLCFGHTPYRSPRGVDSGAVNFESLREEICTFPGYEDGEEQPNFPIPTDLQTLLTSWLSTIPEERISAKDALFLLENMDMSTITVDTTLTTRRLSIKPVVPDSEDEDEELIGQDFSGEFLPEILSLRGAEKQRKAQENRVIKYGIKGCLLATKIATIEKDKDMSPVLRQMLILLIGLELPLSAQMSVALFGLHMVLMLVGYYGFL

SEQ ID NO: 41643 - protein, 294 aa, Glycine max
MAHANPMIFVVGILGNLVSFCCFLAPVPTFYRVCKKKTTEGFQSLPYVAALFTSMLWIFYAYIKTGEILLITINAFGCFIETVYLVIYITYCPKKARFFTFKMIFLFNVGVIFLVVLLTHVLAKERTARIELLGWICVVLSTSVFAAPLSIIKVVIRTKSVEFMPITLSLLLTVSAMMWMAYGILLRDIYVTLPNFVGITFGTIQIVLYLIYRKNKPVKDQKLPEHKDDVANDENVNTAVSGENRGANATGFVDIEIGEKKQVQEQADKKQDQQAVNARDQTEHNNNSNKTREG

SEQ ID NO: 41644 - protein, 501 aa, Hordeum vulgare subsp. vulgare
MMAMATAMAATYGAPIPAPAPSASSPRRAAPDGGRRLRAVAGRPRPLFSPRAVSDSRNSQTCLDPDASTSVLGIILGGGAGTRLYPLTKKRAKPAVPLGANYRLIDIPVSNCLNSNVSKIYVLTQFNSASLNRHLSRAYGNNIGGYKNDGFVEVLAAQQSPENPNWFQGTADAVRQYLWLFEEHNVMEFLILAGDHLYRMDYQKFIQAHRETDADITVAALPMDEERATAFGLMKIDDEGRIVEFSEKPKGEKLKAMMVVTTILGLDSERAKELPYIASMGIYVFSKDAMLRLLRDNFPSANDFGSEVIPGATEIGMRVQAYLYDGYWEDIGTIEAFYNANLGITKKPVPDFSFYDRSAPIYTQSRYLPPSRVLDADVTDSVIGEGCVINHCKINHSVVGLRSCISEGAVIEDSLLMGADYYETENDKKVLSETGGIPIGIGKNTHIKKAIIDKNARIGENVKIINVDDIQEASRESDGYFIKSGIVTVIKDALIPSGTVI

SEQ ID NO: 41645 - protein, 332 aa, Magnetospirillum magnetotacticum MS-1
MASKKKDRGAAEPTPQELIRYYREMLLIRRFEEKAGQLYGMGLINGFCHLYIGQEAVVVGMQAVAGAADSCITSYRDHGHMLVCGMDPKGVMAELTGRAGGYSRGKGGSMHMFSREKRFYGGHGIVGAQVPLGTGLGFAHKYSKDNGVAHVYCGDGAVNQGQVYEAFNMASLWKLPVVFVIENNKYAMGTSTIRHAAGQELYMRGAAYGIPGEPVNGMSVIAVREAAARALEHARSGQGPYILEMNTYRYRGHSMSDPAKYRSKEEVTKMREQHDPIDQLKEKLLADGLIDEAGLKEIDREVKVIVTEAAEFSQSSPEPDPSELWTDVLIEA

SEQ ID NO: 41646 - protein, 335 aa, Nostoc sp. PCC 7120
MTGISKTQKKGKSLPPKLIIGLGKFVWTTLWQIMMSKLAPRNQSGEYIRPSSQFRNSVKTGEDSPYQPATGRYTLYVGLGCPWAHRTLVVRALKELEDTISVSIVVPSPDSGGWVFNTPEEGCQTLAELYALAEPGYSGRSTVPVLWDKETKTIVNNESADIIVMLNSEFNEFAKNSTLNLYPEELKQKIDWWNEKIYANVNNGVYRCGFAQTQEAYDKACDELFTTLDEIEVALANSRYLCGDQVTLADARLFTTLFRFDIVYYGLFKCNRRRIQDYKNLGAYLRNLYQLKGVASTCDLDSIKRDYYGNLFPLNPGGIIPSGPDMAYLLKPSDV

SEQ ID NO: 41647 - protein, 364 aa, Clusia uvitana
SDSGKDAGRLSAAWQLYKAQEDLIKVAKQFGVKLTMFHGFGGTVGRGGGPTHLAILSSSLDTIHGSLRVTVQGEVIEQSFGEEHLCFITLQRFTAATLEHGMHPPDSPKPEWRALLDEMAVVATEEYRSVVFKEPRFVEYFRLATPELEYGRMNIGSRPSKRKPSGGIESLRAIPWIFAWTQTRFHLPVWLGFGAAFKHIIKKDIRNLHMLQEMYNAWPFFRGTIDLVEMVFAKGDPRITALYDKLLVSEDLWAFGENLRTNCEETKKLLLQIAGHKDLLEGDLYLKQRLRLRDSYITTLNVCQAFTLKRIRDPSYNVKFRPHISKEIMETSKSANELLILNPSSEYAPGLEDTLILTMKGIAA

SEQ ID NO: 41648 - protein, 2429 aa, GIBBERELLA ZEAE PH-1
MSTFNHFNIKRQAHNLSRTSTDQSWNPFRHVAWNRRSRTLSEAGLEGQQRTRDHTTGEELTHAVTEPGRSGPAREWSAAETMTDARRSKEDGYDREKMVGGGSPMDGSDDIPTSQRSLVGDENQLRNRKREDVPAATDQNVDLEKRKLDRRQSSKLFRHVEPKEPFTVRNQLERTFLNSYINILLIAAPVGIALNYIHSVNRIAVFVVNFIAIIPLAAILSFATEEIALRTGEVLGGLINATFGNAVELIVAILALVDGKVIIVQTSLVGSILSNLLLVLGFCFFFGGLRREAQYFNETVAQTAASMLALAVASVIVPTVFDQAKNTPATNVARLSRGTAVILLIVYAAYLLFQLKTHSSTFRQEGQKVAAKPWSRGGGGNIRQGIMVPGALIGGGMTGREENERLSEMLMNPHRLPKSEGDEDEEEEPQLHFWVAVATLTTATVLIALCAEFMVDSIDAVTKTGGVSEEFVGLILLPIVGNAAEHATAVTVAIKDKMDLAIGVAVGSSMQVALFLIPLLVIIGWGMGNDDMNLSFDLFQVATMFVAVLLVNYLIADGKSHWLEGWLLICLYSIIATTEKVPHDLRIPGSYNVNSSERQPDPMSRNGTTRNPVPRMGPPHWRQYSKSSLDRSHAEAPVSPASISTHSTIKDEKRTRIERRCTVTVNEGYTRDEVLLNFDVVGADVKPGMLMCISTARDDLRKISAGHGSSSKQNQDASKGTSGTQNGDGAGFKYFFVAKDMPQETKTRNPDVEVYVLKHIADAFGMKKGSQVLLTMVDAKNPATEASHVELSFKDQYLSRSDIWRMTVGELTGRTVYKGQSVLFMGTIKAQVTAIYVDSRKTHSAFFTRDTRPIFRSESARYVLFIQMAKEMWEFDAESSGEIMFNKVVNGFLPALFKRWAMLKAKHLVSIVLFARVEYDTGLTAEFDGLAGDFYTGIQPSGLRRPYKDFYRVVVSEMGSGEWTKILHQLKVEFNFFRRDISLYHHKLNAQAEINGPDSIPKDTPSSRVKAESTYAMYGNVLEAINLASSQFAHDHIDRDLTRTGISIAVISPGSGVFEVDYETLRRTTEALVGNGIGIDLICMPKMPLHSVPLFKYRNPQYSDDHGHAHRSSFSRSFHSRDSTPNHPTPVIGSYQSLGESFSPSKGMSLSRRADPLISMATSDQWCFALPQWLHVSFWTGASDEALSYEGIALSVSNKVMQDDEDEFNIRCRMYALQMRSVLETNEIETTPLQVDTHFPANITEPPSSQKYRNTGINDTVYIPSRRAPEGLFEHTSGFQRFVPDRLARPGEKSLWKQLQEFDDHRAKISHGRSRHHSSRYAKDLDEITRRQLAEDSGLYGTSLPEKRAPILGGASARKLSMNITDGDKPSPTSLKKSAEPTPKPPKQIAKQPKLMRQISLGQRGFGIAAPKAVVAEIKAETVNASGVSSGEGKQPSTPRIRPELRPSSPQTITSHPSSVSIQKYRLDAPDTIIEGVPMTPSIPILKRNNSGLDVAAMQLRTASTTIGSSFNNRQPKRDDDRDLRYSEALRADDAQKLYTNKLRAGVLSDAVQDLPTTLSPTTAITPWLTLVNPSNPESLAIDDTVLYSRWQHVYPQITQMKVQKWKALCCPASVPLTTEYFPSKTQFDTEYHRHPYTVEQDADDDLVETPKSRQEFIQELISLRFTQGFQVVVGPLVARAFGQNLIKIGDIFSRDQPLEDGTSIFLSVGNSIHQLSCVNGTEVEVNIFMRKPTDTSFTSQGFSPIYKPAIRTLLDDTYEAREIDLLTPRTDRNWNMIDSYIAGHHNEMSDSLRFWRARFVLIPVLRKDVPISRTQTGDHAEEVRIEGIKRLAQSWQKYRYIPLSERRYHSVAQQKRRRDPNPLDIVWKTDDPSVVITAEVETLPLTEGVEGANRKGLVSAKERFKKSNLNLSTLADAMQQPVENGGVRLQNRRWHLRLYSACFIGSDMVTWLLDNFEDLDTREDAEALGNALMAHDELKAANPKDKGIFVHVDKRHQFRDGNYYYQIASEFAKPHVGWFNTRRTPVPPTPSVESSNRDSPRTLMSARSGEESGSPASTSTTPTISLHHGGKRPRVVLSKVMKYDVDHRKRSYRPERIDLHYDRLHNPDGCYHIRIDWMNVTTKLVEDAVESWAREASQYGLRLVELPIKEACTITETNPFRKPYHIKLAARPPDQKPETYIDPNSLGPTTSPNKHFYQTAILKKFDFVLDTEAASNFPSNVDVSYSWGKPDYKYTQYIHRSGTLLAEITDEGDLLILANRLYSNRPAGMRSIDPPPLVERGGRMASYGPYSTFGMAESATLSSPLLKPTHYFHSPALKPADQQHNKPTPATSPDPDALNTEIDEFCKNKTALEEFYREALEKGQRVQGTPATAPALEAVPEASIPTLGLPPGVLGGNDGAPTKRLNSPMSFLRRSSVQYDGGSSLTGR

SEQ ID NO: 41649 - protein, 193 aa, Synechocystis sp. PCC 6803
MFNNILKQVGDYAKESLQAAKYIGQGLAVTFDHMSRRPITVQYPYEKLIPSERFRGRIHFEFDKCIACEVCVRVCPINLPVVDWEFNKAVKKKELKHYSIDFGVCIFCGNCVEYCPTNCLSMTEEYELAAYDRHDLNYDNVALGRLPYKVTEDPMVTPLRELGYLPKGVIEPHNLPKGSQRAGQHPEDLVKAE

SEQ ID NO: 41650 - protein, 202 aa, Glycine max
  misc_feature (129)..(129): Xaa can be any naturally occurring amino acid
  misc_feature (170)..(170): Xaa can be any naturally occurring amino acid
  unsure (1)..(202): unsure at all Xaa locations
MTDITDDIAEEISFQGFEDDCKLLGNLLNDILQREAGSTFVDKLEKIRVLSQSACNMRQAGMEDLAEMLEKQLASELSKMTLEEALPLARAFSHHLTLMGIAETHHRVRKGGNMVLAAKSCDDIFNNLXYKTVFKQEVEIVLTAHPTQINHRTLQYKHLKIAHLLDYNDXPDLSPEDRDMWIEDLVGEKTSIWQTDELRRSK

SEQ ID NO: 41651 - protein, 221 aa, Solibacter usitatus Ellin6076
MPAFLFDLDGTLVDSVYQHVLAWRDALEIAGLPLSVWRIHRRIGMSGGLFVNALARETGHRLSEGEVARMLELHSEAYRNYAGQVRPLPGAAALLAYLAQQKVPHAIATSGYRDSAAPALAALGVDPNLPIVTRDQVAHAKPDPDLFLAAADRLGVAIEDSVVVGDSIWDLLAARRARALSIGLLSGGYGEEELERAGAYRIYQDPADLLAHLDEVGVRGR

SEQ ID NO: 41652 - protein, 364 aa, Clusia uvitana
SDSGKDAGRLSAAWQLYKAQEDLIKVAKQFGVKLTMFHGRGGTVGRGGGPTHLAILSQPPDTIHGSLRVTVQGEVIEQSFGEEHLCFRTLQRFTAATLEHGMHPPDSPKPEWRALLDEMAVVATEEYRSVVFKEPRFVEYFRLATPELEYGRMNIGSRPSKRKPSGGIESLRAIPWIFAWTQTRFHSPVWLGFGAAFKHIIKKDIRNLHMLQEMYNAWPFFRVTIDLVEMVFAKGDPGITALYDKLLVSEDLWAFGENLRTNCEETKKLLLQIAGHKDLLEGDLYLKQRLRLRDSYITTLNVCQAFTLKRIRDPSYNVKFRPHISKEIMETSKSANELLILNPSSEYAPGLEDTLILTMKGIAA

SEQ ID NO: 41653 - protein, 591 aa, Enterococcus faecalis V583
MKKRLRIEYFLVAAVMLLLFVGSIAATNFFFQKEMVAQQETYLRRKNTLLTDQLPPSVFEKGQLTNQQQLLVTHALDDAEERVTLLQKNGTVFFDSSQNEPLESHKKRPEIAAVLSGATYGSALRKSKTLNKELLYVATPVLKSGEIVGIIRISEQTALFSKNIQSFRRYIIFTFGILFLLITLFIFLLLRQKNQPLVTVLPILKRMLKHPDENRSIIQQSSEWNELYETINLLSQQVSQTYKAYTSADEQFHELLDELMIGVFIIDTQGRLRLLNPKMQEMLGLSAKNMQSNYLEVIQDADLIHLIHQVVAEKNSLHQEITVTQGPTPLRLDLSLRYLDDQSANDYQVLGIAYDLTRVRQLEKMQKDFVSNVSHELKTPVTSLLGFTETLIDGAKEDPEVLNQFLHIMQKDAQRLQQLIQEILELSRGSATIPYAEQEITLEKFITEILGSYQQQLAAKQLKTVVHGLPESQFFTKYELFYPIVKNLIENAIQYSQENGQITISYAIENQQLRLSVQDTGIGISQKDQERIFERFYRVDKARSRHSGGTGLGLAIVQNYTELLGGKIAIDSHLGLGTTFTITLLLTKKEA

SEQ ID NO: 41654 - protein, 491 aa, Lycopersicon esculentum
MAAASGQEREVQKSYWIEHTAELTVEAMMLDSKAADLDKEERPEVLSLLPPYEGKTVLELGAGIGRFTGELAQKAGQLIALDFIEGAIKKNENINGHYKNVKFMCADVTSPNLIFSPESVDLIFSNWLLMYLSDEEVKALVERMVIWLKVGGHIFFRESCFHQSGDHKRKNNPTHYRDPSFYTKVFRECHVNAGDGKSFELSLAGCKCIGAYVKNKKNQNQICWTWQKVTSKDDMEFQRFLDTVQYKCSGILRYERVFGQGFVSTGGLETTKEFVAMLDLQRGQKVLDVGCGIGGGNFYMAEKYDVHVVGIDLSINMISFALERAIGLKCAVEFEVADCTKKTYPDCTFDVIYSRDTILHIQDKPALFRSFYKWLRPGGKVLISDYCKRAGPASKEFEGYIKQRGYDLHDVEAYGQMLRDAGFHEVVAEDRTEQFIKVLQKELDTVEKERESFIHEFSEQDYNEIVGGWKSKLIRSSSGEQRWGLFIAKKK

SEQ ID NO: 41655 - protein, 363 aa, Mesembryanthemum crystallinum
SDSGKDAGRLSAAWQLYKAQEELVKVAKKYGVKLTMFHGRGGTVGRGGGPTHLAILSQPPETINGSFRVTVQGEVIEQSFGEERLCFRTLQRFTAATLEHGMLPPISPKPEWRAILDEIAVVATEEYRSVVFKEPRFVEYFRLATPELEYGRMNIGSRPSKRKPRGGIESLRAIPWIFAWTQTRFHLPVWLGFGAAFKHILQKDIRNLQVLKEMYNEWPFFRVTLDLLEMVFAKGDPGIAALYDKLLVSDELKSFGEQLRANYEETEQLLLQVAGHKDLLEGDPYLKQRLRLRESYITTLSVCQAYTLKRIRDPNFQVHMRAPLSKEILDSNKPAELVKLNPTSEYAPGLEDTLILTMKGIAA

SEQ ID NO: 41656 - protein, 176 aa, Triticum aestivum
RRGCPQAPPIVSFLRGGTERGESPAGGAAPLVLSGFPGVAGIRHGGHCLDLRRPGRNRSVLTHRCPFFSIRFANTVPSSSSSRTAQSRVKLSRSMALSRRMAASALLLLVLLVATEMGATTVKLAEARDCLSQSHKFKGACLSSSNCAAVCRTENFPDGECHTHNFARKCFCKRAC

SEQ ID NO: 41657 - protein, 633 aa, Nostoc sp. PCC 7120
MTIQEQLHQWHELAQQLRIDSIRATTGATSGHPTSSMSPADLMAVLLTNYLHYDFDNPHHPNNDRFILSKGHAAPLLYAMYKAAGVITDEELMSLRQMGSRLEGHPTPVLPWVDVATGSLGQGLPIGVGLGLAGKYLDQLPYNVWVLLGDSETAEGSVWEAFDHAAHYTLDNLIAIIDVNRLGQRGQTELGWNTQAYANRAKAFGWQAIEIDGHDLTEIDQAFSAAVSINDRPTVIIARTKKGKGVASLEDLGGWHGKALKPDAAKQAIAELGGERQITIQVAKPEPEQPALANPQPFQLPTYEQGAEVATRRAYGDALKALGAAQPDVVALDAEVSNSTYTEDFAEAYPERYFEMYIAEQQMVAAAVGLQVRQYKPFASTFAAFLSRAYDFVRMAAVSRANIKLVGSHAGVSIGQDGPSQMALEDLAAFRAVWNSTVLYPCDANQTAKLVEQMSDLQGIVYLRTTRENTPVIYGTEEDFPIGGSKVIRSSDQDQATIIGAGITLHEAIKAGDHLKNEGIIVRIIDAYSVKPIDVKTLHQAANDTEGNLVVVEDHWHEGGLGAAVLDAFAGVGNLSSYDGPPLQLIKLAVHNMPGSGTPEELLHAAKIDADAIVEAVKLQVRHPIGARISIHP

SEQ ID NO: 41658 - protein, 366 aa, Mesembryanthemum crystallinum
SDSGKDAGRLSAAWALYKAQEELVQVAKEYGVKLTMFHGRGGTVGRGGGPTHLAILSQPPETVNGSLRVTVQGEVIEQSFGEEHLCFRTLQRFTAATLEHGMHPPISPKPEWRALLDEIAVVATEKYRSIVFKEPRFVEYFRLATPELEYGRMNIGSRPSKRKPSGGIESLRAIPWIFAWTQTRFHLPVWLGFGAAFGYAIQKDVKNLSVLQKMYNEWPFFRVTIDLVEMVFAKGDPGIAALYDKLLVSEELWPFGERLRADFEETKGLILKIAGHKDLLEGDPYSRQRLRLRDSYITTLNALQAYTLKRIRDPNYNVQLRPHISKEYMDSTSNKPAAELVKLNPSSEYAPGLEDTLILTMKGIAA

SEQ ID NO: 41659 - protein, 342 aa, Malus x domestica
MENSTQESHLRAENSVTYESPYPLYAMAFASPQTRTRHQHHRIAVGSFIEEYSNRVDILSFDPDTLSIKPNPTLSFDHPYPPTKLMFHPNPNALHKTNDVLASSGDYLRLWEVGDSTVEPIQVLNNSKTSEFCAPLTSFDWNDIEPRRIGTSSIDTTCTIWDIEKGVVETQLIAHDKEVYDIAWGEARVFASVSADGSVRIFDLRDKEHSTIIYESPQPDTPLLRLAWNKQDLRYMATILMDSNKVVILDIRSPTMPVAELERHRGSVNAIAWAPQSCRHICSAGDDTQALIWDLPTVAGPNGIDPMSMYSAGAEINQLQWSAAQPDWISIAFSNKMQLLKV

SEQ ID NO: 41660 - protein, 604 aa, Hordeum bulbosum
MAALVTSQLATSGTVLGITDRFRRPGFQGLRPRNPADAALGMRTIGASAAPKQSRKVHRGSRRCLSVVVRATGSSGMNLVFVGAEMAPWSKTGGLGDVLGGLPPAMAANGHRVMVVSPRYDQYKDAWDTSVVSEIKVADGYERVRFFHCYKRGVDRVFIDHPWFLEKVRGKTKEKIYGPDAGTDYEDNQQRFSLLCQAALEAPRILNLNNNPYFSGPYGEDVVFVCNDWHTGLLACYLKSNYQSNGIYRTAKVAFCIHNISYQGRFSFDDFAQLNLPDRFKSSFDFIDGYDKPVEGRKINWMKAGILQADKVLTVSPYYAEELISGEARGCELDNIMRLTGITGIVNGMDVSEWDPTKDKFLTVNYDITTALEAKALNKEALQAEVGLPVDRKVPLVAFIGRLEEQKGPDLMIAAIPEIVKEEDVQIILLGTGKKKFEKLLKSMEEKFPGKVRAVVRFNAPLAHQMMAGADLLAVTSRFEPCGLIQLQGMRYGTPCVCASTGGLVDTIVEGKTGFHMGRLSVDCNVVEPADVKKVATTLKRAVKVVRTPAYQEMVKNCMIQDLSWKGPAKNWEDVLLELGVEGSEPGIVGEEIAPLAMENVAAP

SEQ ID NO: 41661 - protein, 216 aa, Brassica napus
  misc_feature (160)..(160): Xaa can be any naturally occurring amino acid
  misc_feature (166)..(166): Xaa can be any naturally occurring amino acid
  misc_feature (173)..(173): Xaa can be any naturally occurring amino acid
  misc_feature (175)..(175): Xaa can be any naturally occurring amino acid
  misc_feature (178)..(179): Xaa can be any naturally occurring amino acid
  misc_feature (187)..(187): Xaa can be any naturally occurring amino acid
  misc_feature (196)..(196): Xaa can be any naturally occurring amino acid
  unsure (1)..(216): unsure at all Xaa locations
MDSSSWINHPSVISSRRCQSRSDLYIGGGYEDLEGEDESKSEFICPFCADVFDIVGLCCHIDEEHPVEAKNGVCPVCTKRVGLDIVGHITTQHANFFKVQRRRRLRKGGYGSPYLALKKELREANLQSFFGGFTRFTSSTNLDYDPLLSSFMFSSPSTKXVTPVVXGTSATKXSXKEXXKREIQEAXLSGEDQEKXKKSEFVRGLLLSTMLGVGDS

SEQ ID NO: 41662 - protein, 347 aa, Triticum aestivum
  misc_feature (303)..(303): Xaa can be any naturally occurring amino acid
  unsure (1)..(347): unsure at all Xaa locations
MEAMDVKYRPALYPNGSVKKLRQAAAPPPPPVEAVPTYKECLKNHAAAIGAHAVDGCGEWMPVVELNTADPASYKCAACGCHRNFHRLVMVEGSPPPPPPPPPALLPAPPVPMPMPATVLHGLRQRAHGHETPEDRLPGVDGDDSDSDSDGSEYDDERSVSPPQHPPPAHLPAPVAQQPPPYISSAPHPHMLLSLNSSAPGAPQGQSRLPAQLSPATAPPPHGMMPARKRFRTKFTAEQKQRMQELSERLGWRLQKRDEGVVDEWCRDIGVSKGVFKVWMHNNKHNYLGGHSARRSASAAASXPRPPPPPLPPAGHSVSPRPAPHQERHSTPPPATAPRPPRARAST

SEQ ID NO: 41663 - protein, 364 aa, Mesembryanthemum crystallinum
SDSGKDAGRLSAAWQMYKVQEELLKVSKKFGVKLTMFHGRGGTVGRGGGPTHLAILAQPAETIGGSLRVTIQGEVIEQSFGEQHLCFRTLQRYTAATLEHGMNPPKSPKPEWRALLGQMAVVATEEYRSIVFKEPRFVEYFRLATPETEYGRMNIGSRPSKRKPSGGIESLRAIPWIFAWTQTRFHLPVWLGVGGALKHVLEKDIRNHNMLRDMYNNFPFFRVTIDLLEMVFAKGDPEIAALYDKLLVSEELQSFGERLRANYEDTKRRLLEVAGHKDLLEGDPYLKQRLRLRDPYITTLNVCQAYTLKRIRDPDFKVTERPHLSKEIMDAHKAAAELVKLNPTSEYAPGLEDTLILTMKGIAA

SEQ ID NO: 41664 - protein, 603 aa, Hordeum bogdanii
MAALVTSQLATSGTVLGITDRFRRPGFQGLRPRNPADAALSMRTIGASAAPKQSRKAHRGSRRCLSMVMRATGSGMNLVFVGAEMAPWSKTGGLGDVLGGLPPAMAANGHRVMVVSPRYDQYNDAWDTSVVSEIKVADECETVRFFHCYKRGVDRVFIDHPWFLEKVRGKTKEKIYGPDAGTDYEDNQQRFSLLCQAALEAPRILDLNNNPYFSGPYGEDVVFVCNDWHTGPLACYLKSNYQSNGIYRTAKVAFCIHNISYQGRFSFDDFAQLNLPDRFKSSFDFIDGYDKPVEGRKINWMKAGILQADKVLTVSPYYAEELISGEARGCELDNIMRLTGITGIVNGMDISEWDPTKDNFLAVNYDITTALEGKALNKEALQAEVGLPVDRKVPLVAFIGRLEEQKGPDVMIAAIPEIVKEEDVQIILLGTGKKKFERLLKSVEEKFPGKVRAVVRFNAPLAHQMMAGADLLAVTSRFEPCGLIQLQGMRYGTPCACASTGGLVDTIVEGKTGFHMGRLSVDCNVVEPADVKKVVTTLKRAVKVVGTPEYQEMVKNCMIQDLSWKGPAKNWEDVLLELGVEGSEPGIVGDEIAPLAMENVAAP

SEQ ID NO: 41665 - protein, 95 aa, Arabidopsis suecica
LPPQQQQSTVINGIDQKSVLLELALTAMDELVKLAQSEEPLWVKSLDGERDELNQDEYMRTFSSTKPTGLATEASRTSGMVIINSLALVETLMDS

SEQ ID NO: 41666 - protein, 354 aa, Streptomyces coelicolor A3(2)
MTGARPAPEEHDDTPVRGPVEGAAGPAAGHWWPPRGPVVCVGETMAAMAPAPPDSLDDTESLRLSVAGAESNVAVYLADLGLPVSWLSALGDDAFGRRVRAAVARAGVDVSGVRTDPARPTGLLLKEPGAAGTRVHYYRRGSAASALGPDVLDDERFGGAALLHLTGVTPALSPSCRALVERALRTPPARRTHAVSFDVNHRPALWPPDTAAAVLRDLADRADIAFVGLDEAQDLWGGGLTATDVRRLLSGPRVLVVKDGGRSATAFTGQGACTVPALATEVVEPVGAGDAFAAGFLAGLWRGTDLTRALRLGHITAASALKVVGDHGPLPDEDTVGAMLSLTEQDWCRAPVVS

SEQ ID NO: 41667 - protein, 148 aa, Flaveria bidentis
MEQTFIMIKPDGVQSGLVGEIIGRFEKKGFSLKGLKLLTVDRAFAEKHYADLSSKPFFNGLVEYIVSGPVVAMVWEGKNVVTTGREIIGATNPAESAPGTIRGDFAIDIGRNVIHGSDAVESARKVIGLWFPEGVANWSSSLHPWIYE

SEQ ID NO: 41668 - protein, 238 aa, Brassica napus
RPTRPEILNTLCRDKSNLVFIVSAKSRETLSDWFSPCEKLGIAAEHGYFLRLRKDVEWENCVAAADCSWKQIAEPVMELYTETTDGSTIEDKETALVWSYEDADPDFGSCQAKELLDHLESVLANEPGTVKRGQNYVEVKPQGVSKGLIARRMLSMMQEKGTPPEFVLCIGDDRSDEDMFEVICSSTEGPSIAPRAEVFACTVGQKPSKAKYYLDDTTEIVRLMHGLASVSEQTMSAV

SEQ ID NO: 41669 - protein, 127 aa, Brassica napus
  misc_feature (118)..(118): Xaa can be any naturally occurring amino acid
  unsure (1)..(127): unsure at all Xaa locations
MGRPPCCGKMEVKKGPWTPEEDIILVSYIQQHGPGNWRSVPLNTGLLRCSKSCRLRWTNYLRPGIKRGNFTQPEEKTIIRLQALLGNRWAAIASYLPQRTDNDIKNYWNIHLKKKLEXKVQNGITNE

SEQ ID NO: 41670 - protein, 294 aa, Serratia marcescens
IVFRAAQERSDIEIVAINDLLDAEYMAYMLKYDSTHGRFNGTVEVKDGHLVVNGKTIRVTAEKDPANLKWNEVGVDVVAEATGIFLTDETARKHITAGAKKVVLTGPSKDATPMFVRGANFDKYAGQDIVSNASCTTNCLAPLAKVINDNFGIVEGLMTTVHATTATQKTVDGPSHKDWRGGRGASQNIIPSSTGAAKAVGKVIPELKGKLTGMAFRVPTPNVSVVDLTVRLEKPATYEEIKKAMKDAAEGSMKGVLGYVEDDVVSTDFNGEVLTSVFDAKAGIALNDNFVKLV

SEQ ID NO: 41671 - protein, 148 aa, Flaveria bidentis
MEHTFIMIKPDGVQRGLVGEIIGRFEKKGFSLKGLKLLTVDQAFAEKHYADLSAKPFFNGLVEYIISGPVVAMVWEGKNVVTTGRKIIGATNPAESAPGTIRGDFAIDIGRNVIHGSDAVESAKKEIALWFPEGVANWSSSLHPWIYE

SEQ ID NO: 41672 - protein, 294 aa, Serratia odorifera
IVFRAAQERSDIEIVAINDLLDAEYMAYMLKYDSTHGRFNGSVEVKDGHLVVNGQTIRVTAEKDPANLKWNEVGVDVVAEATGIFLTDETARKHIAAGAKKVVLTGPSKDDTPMFVMGVNLKSYAGQEIVSNASCTTNCLAPLAKVINDKFGIVEALMTTVHATTATQKTVDGPFHKDWRGGRGASQNIIPSSTGAAKAVGKVIPELNGKLTGMAFRVPTPNVSVVDLTARLEKPASYKEVCAAIKEAAEGELKGVLGYTEDDVVSTDFNGEKLTSVFDAKAGIALNDNFVKLV

SEQ ID NO: 41673 - protein, 144 aa, Lycopersicon esculentum
FIMIKPDGVQRGLVGEIISRFEKKGFSLKGLKLITVDRAFAEKHYADLSAKPFFNGLVEYIVSGPVVAMVWEGKGVVATGRKIIGATNPLESAAGTIRGDFAIDIGRNVIHGSDAVESARKEIALWFPEGIAEWQSSLHSCIYE

SEQ ID NO: 41674 - protein, 326 aa, Triticum aestivum
  misc_feature (230)..(230): Xaa can be any naturally occurring amino acid
  misc_feature (245)..(245): Xaa can be any naturally occurring amino acid
  misc_feature (249)..(249): Xaa can be any naturally occurring amino acid
  misc_feature (258)..(260): Xaa can be any naturally occurring amino acid
  misc_feature (262)..(262): Xaa can be any naturally occurring amino acid
  misc_feature (271)..(271): Xaa can be any naturally occurring amino acid
  misc_feature (302)..(303): Xaa can be any naturally occurring amino acid
  misc_feature (306)..(307): Xaa can be any naturally occurring amino acid
  misc_feature (310)..(311): Xaa can be any naturally occurring amino acid
  misc_feature (314)..(315): Xaa can be any naturally occurring amino acid
  misc_feature (317)..(317): Xaa can be any naturally occurring amino acid
  unsure (1)..(326): unsure at all Xaa locations
MDPYKYRPSSSFNAPMWSTNSGAPVWNNDNSLTVGSRGPILLEDYHLVEKIADFDRERIPERVVHARGASAKGFFEVTHDVSHLTCADFLRAPGVQTPVIVRFSTVIHERGSPETLRDPRGFAIKFYTREGNWDLVGNNFPVFFIRDGMKFPDMVHALKPNPKTHIQENWRILDFFSHHPESLHMFTFLFDDVGVPADYRHMDGSGVNTYTLVNRAGKAHYVKFHWKPTXGVKSLLEEEAVTVGXTNHXHATKDLTDXXXGXNYPEWTFYXQTIDPDHEDRFDFDPLDVTKTWPEDLVPALXXWGXXVLXXNIXXFXRNAFGGVLQ

SEQ ID NO: 41675 - protein, 446 aa, Pleurotus sajor-caju
MREIVHLQTGQCGNQIGAKFWEVVSDEHGIEPDGLYKGNNDLQLERISVYYNEVGANKYVPRAVLVDLEPGTMDSVRSGPLGSLFRPDNFVFGQSGAGNNWAKGHYTEGAELVDAVLDVVRKEAEGTDCLQGFQITHSLGGGTGAGMGTLLISKIREEYPDRMMCTYSVVPSPKVSDTVVEPYNATLSVHQLVENSDETFCIDNEALYDICFRTLKLTTPTYGDLNHLISIVMSGITTCLRFPGQLNSDLRKLAVNMVPFPRLHFFMPGFAPLTARGSQQYRAVTVPELTQQMFDAKNMMAASDPRHGRYLTVAAVFRGKVSMKEVEEQMQNVQNKNSAYFVEWIPNNVLTAQCDIPPRGCKMAVTFLGNSTAIQELFKRVNDQFAAMFKRKAFLHWYTQEGMDEMEFTEAESNMQDLVAEYQQYQDATADEEEGEYEEEPAEEEQ

SEQ ID NO: 41676 - protein, 333 aa, Zygosaccharomyces rouxii
MVNVSVNGFGRIGRLVTRIAISRKDINLVAINDPFISTDYAAYMFKYDSTHGRFDGEVSHDKDHIILNGKKVAVFNEKDPAALPWGKLGVDVAIDSTGIFKEMDSANKHIEAGAKKVVITAPSGSAPMYVMGVNEETYTPDQKIVSNASCTTNCLAPLAKVIHNEFGIKEGLMTTVHSMTATQKTVDGPSHKDWRGGRTASGNIIPSSTGAAKAVGKVLPSLQGKLTGMAFRVPTVDVSVVDLTVNLAKETSYDEIKAALKKASEGSMKGILGYTEDDVVSSDFLGDAHSSIVDAAAGIQLTPTFVKLVSWYDNEFGYSTRVVDLVEHVAKSA

SEQ ID NO: 41677 - protein, 183 aa, Panax ginseng
MASSVISSATVAAVSRAVPAQASMVAPFTGLKSTAAFPVTRKVNDITSLPSNGGRVQCMKVWPPLGLKKFETLSYLPQLTQEQLSKEVDYLLRSGWVPCLEFELEHGFVYREHHHSPGYYDGRYWTMWKLPMFGCTDSSQVLKEVEECKKEYPNAYIRIIGFDNVRQVQCISFIAFKPPSAST

SEQ ID NO: 41678 - protein, 131 aa, Glycine max
ANNLKRLAEEFGPEWAMQHIIPQVLEMISNPHYLYRMTILHAISLLAPVMGSEITRSELLPIVITASKDRVPNIKFNVAKVLESIFPIVDQSVVEKTIRPSLVELSEDPDVDVRFFSNQALHAMDHVMMSS

SEQ ID NO: 41679 - protein, 1454 aa, Arabidopsis thaliana
MAPSRKRGGGRAAAASSARREWKVGDLVLAKVKGFPAWPAVVDEPEKWGHSADSKKVTVHFFGTQQIAFCNHGDVESFTEEKKQSLLTRRHAKGSDFVRAVKEITESYEKLKQQDQASGPKYAEETTAGSSGNTSQLPQACENLIGSRLDTQIESSSSHGRDELTLLSEDASAAEQMLALRHNTLAHNGACDSAAAKDLCEIATYSSRRRNERVRALKYAPQSIILPVEHSKISSRLELDRVQRSMLQCSDGGPSVNSINGKAIRRRKRIRTSGQSESDDVVSSDLNLHGSDEDNASEIATVESNNNSRNEGNGVDSGSKVEYSDAVGEGCDGGHELNKGLDFHISTMVKRKKRKPTRKRETSDIIDPPAKVEAEGLGPNACDSCQRSQNSHERLNERPCEENGDEHLPLVKRARVRMSRAFYADEKVNASSQVEERSSKDTLLSAALQTSPSVNHENGIGSGHDTSAAEEFNSFELSAKLSGVMVDVVPSHMEKPSDRMSPSVACVQTVGDRQTAVNFHENEFTMTLDDEVTRAQSNQLSSLVETEARVPEVVQGCSEESQTGNCLISETDPIDIQCSHQSEKHETPLNPDIVDSSANKSPGLCSSLDMTTTVVPAQSPHQHKIQEYDSSDHSLVIVGDSLNGKCEKIDYCMTQVVQSQALEPPPPLFCSVVNYQEVENLQETENTLWKENQGSPGKELDSDKQAHMIQNPVLSATESEMIVDDAEPQYETVYSHCADAVENRELEKSCEVDEQKEQMQATNSISVSENFSREKLNSSPARGTPNCNSVCRISTAESENAMQNNSYYSTNVQYGENKSLNVDTVKEESKVETGTTQVKKVVSSDVQCTVESFETALDSLVRTKETIGRATRLAMDLAKFGVSAKAMEILAHTLESESNLQRRVDLFFLVDSIAQCSKGLNGDAGGVYLSSIQAMLPRLLTAAVPAGATTQENRKQCLKVLRLWLERRILPESIVRHHIRELDSLSNVPACLYSRRSARTERALDDPVRDMEGILVDEYGSNSTLQLHGFCIPPILRDEDEGSDSDGGDFESVTPEHESRSLEEHVTPSITERHTRILEDVDGELEMEDVAPPWEGGSSASAITDQADNRESANCLLVPGTSHQNVTSSSPPARPSQNAQLAMSNSYSNGFDYRRNPSMQGDYHAGPPRMNPPMHYGSPEPSYSSRTIGDIIRPLLMVHDIMTDTKDLINRAHTVGITVTQEGCRTIGGVILRVHITIDTLITISSIRKVLGRGGRGIKGEWETRDEEGQSFFCAIEIDREMGASSSSSVSEKSIHQFTVKDSSGKEVDLSVYQGKVLLVVNVASKCGFTESNYTQLTELYRKYKDQGFVVLAFPCNQFLSQEPGTSEEAHQFACTRFKAEYPVFQKVRVNGQNAAPVYKFLKSKKPSFLGSRIKWNFTKFLVGKDGQVIDRYGTTVSPLSIQKDIEKALAQEL

SEQ ID NO: 41680 - protein, 542 aa, Streptococcus mutans UA159
MTLDKRKVVYQIYPKSYKDTSGNGVGDLQGIIEKLPYLEELGIDVIWLNPFYPSPQRDNGYDVSDYTAVNPLFGSMADFEELVRKGKEHGIEIMLDMVLNHCSIEHEWFQKALAGDKYYQDFFILRDRPTDWVSKFGGNAWAPFGETGKYYLHLYDVTQADLNWRNPHVREELFKVVNFWRNRGVKGFRFDVINVIGKDEVLKDNPHFDGKPEYTDRPINHDYLKMLNKASFGQDENGMTVGEMSFTDIPNCIQYSNPDNHELDMVFNFHHLKVDYENGQKWTRKTFDFEELKHLFHTWGEGMSQGNGWSALFWNNHDQPRALNRFVDIKQFRNEGATMLAASIHLSRGTPYIYMGEEIGMIDPDYGSMADYVDVESLNAYQELIDKGKSSEEAFHIIRAKSRDNARTPMQWDTSENAGFSTGRPWLKVGKSYPQINVANEKQGKIFPFYQKLIRLRKEMPLIAQGSYQAALTDSDKIYAFEREYEGQKLLVLNNFFAETVELDLPSLYQAGTVLISNYDDVILDKRISLKPYQTVAILAEV

SEQ ID NO: 41681 - protein, 524 aa, Oryza sativa
MAVDAMFGSVAVALLAVVVAAAALRRWRRRRRRGGGRPLPGPVALPVVGHLHLFRRPLHRTLARLAARHGAAVMGLRFGSRRVAVVSSAPAAEECLGPHDLAFANRPRLPSGEILAYEWSTMGTASYGPYWRHIRRIAVTELLSAHRVQHFADVNVREVRALARRLYRRAAAAAAAGARTRVELKSRLFELLMNTMMSMICERTFYGADDDEVSEEARWFRSVVKETMELSGASTVWDFLPAPARWLDAGRMTRRMRELSDSRTRFLQRLIDDQRKDMDADSDDHAPAKRRTMIGVLLSLQRKDPDSCPDQLIRSLCIGSLQAGTDTSAATVEWAMSLLLNNPGAMARARGEIDACVGQPAARLLEAADLPKLHYLRCVVMETLRLYPPVPLLAPHESSADCVVAGFHVPQGTMLLVNTFAIHRDPQVWDEPEAFIPDRFADGKNEGKMVIPFGMGRRRCPGENLGMQMVGLALGTLIQCFDWERVGEELVDMRECSGLTMPKELPLEALYQPRASMVDLLTKI

SEQ ID NO: 41682 - protein, 208 aa, Helicosporidium sp. ex Simulium jonesii
MQCASLFRYKTPVIQANSVSCNAPPSLVHMPRPRPASSRVRLAPLSANAKPLETRTVGNSTNIRWHKASVAREDKERLLGQRGCVLWFTGLSASGKSTVATETERQLHERGHLTLLLDGDNVRHGLNCNLGFSAEDRTENIRRVGEVAKLVAESGVMALTSFISPYREDRDAVRERVGSGSFLEVFLAVPIELCEERDPKGLYKKARC

SEQ ID NO: 41683 - protein, 447 aa, Trichodesmium erythraeum IMS101
MAYDYDLFVIGAGSGGLASSKRAASYGAKVAIAENDLVGGTCVIRGCVPKKLMVYGSRFSHFYKDAVGYGWSEVEPSFDWHKLIDAVNTEVLRLNKLHISFLEKAGVEIIEEYAKFIDPHTIEVGDRKVTADKILIAVGGKPEKIDIPGIEYSITSREIFHLKEQPKRMAVWGGGYIGVEFAGILNGVGTEVTQIIRRDSILRGFDTDISSNIQEGMVKHGINFRENTNVEKIEKVPEGLKVHLSGENAEPLIVDTFLCATGRKPNLAGLNLENAGVETLRGAVAVSNNCRTTQANIYAIGDCIDKVNLTPIAIAQGRAFADTEFGNIPRSISLENIPTAVFSEPEGGTVGLTEAAAREKFGDSIKCYRSKFRPMFHSFTGADEKVMVKLVVETNTDRILGVHMVGKDAGEIIQGMAIAVNMGATKADFDRTIGIHPSTAEELVTLN

SEQ ID NO: 41684 - protein, 196 aa, Lactococcus lactis subsp. cremoris
PVIETGVGNCTIFVDESADLDMATRIVINAKTQRPSVCNAAESLVVHAKIADEFLPKLQNEINKVHEVEFRADERSLKALSAGIPATDEDFGMEFLDYILSVKTVDNLDEAIEHINTYSSRHSESIVTHDYFNAQKFQDEIDAAAVYVNASTRFTDGFVFGLGAEIGISTQKLHARGPMGLEALTSTKYLIDGCGQ

SEQ ID NO: 41685 - protein, 564 aa, Plasmid R100
MSTLKITGMTCDSCAVHVKDALEKVPGVQSADVSYAKGSAKLAIEVGTSPDALTAAVAGLGYRATLADAPSVSTPGGLLDKMRDLLGRNDKTGSSGALHIAVIGSGGAAMAAALKAVEQGARVTLIERGTIGGTCVNVGCVPSKIMIRAAHIAHLRRESPFDGGIAATTPTIQRTALLAQQQARVDELRHAKYEGILEGNPAITVLHGSARFKDNRNLIVQLNDGGERVVAFDRCLIATGASPAVPPIPGLKDTPYWTSTEALVSETIPKRLAVIGSSVVALELAQAFARLGAKVTILARSTLFFREDPAIGEAVTAAFRMEGIEVREHTQASQVAYINGEGDGEFVLTTAHGELRADKLLVATGRAPNTRKLALDATGVTLTPQGAIVIDPGMRTSVEHIYAAGDCTDQPQFVYVAAAAGTRAAINMTGGDAALNLTAMPAVVFTDPQVATVGYSEAEAHHDGIKTDSRTLTLDNVPRALANFDTRGFIKLVVEEGSGRLIGVQAVAPEAGELIQTAALAIRNRMTVQELADQLFPYLTMVEGLKLAAQTFNKDVKQLSCCAG

SEQ ID NO: 41686 - protein, 667 aa, Magnetospirillum magnetotacticum MS-1
MELGRVPVKPLFSARLIAAVVVFGVGMALAMAVATTLGLLAGRQEAIGGAEAVTRNLARSLTESVERSVNSMDVTLASVADLALEQGMGSARLDLRAAVAQRLTFTPYLRQILVVRADGALLFDSANQSDGRSFDIGGLLVEHERLPRPLVIGLPVDGRFIGIGIRGGGHKTIPLSRAIRDASGKILGLVIGAVNPDYFVSSFQGIEGESGAHVHLWRFDGLLLAGAGGIDDQHQDRGWDNPLFSRHLKDSEMGTFMGPWGDGVTWITSYRTNLAWPLVVSVGISLDRALEGWTRSVEIIAWPVAAMTLIVLGLTAAMAAMLHKRGRDEARLRLSDMVLSNVSNGVTIADVSGPDMPLIYVNPAFEHITGYAAQNALGRNARFLHEFDPAQEGLDDIRAALAEGRPVTVVVRNQRADGTLFWNQLSLSPLRGTNGALTHWVGVQRDITQQEEARASLAKAYDDVAHYSEDLERFSFVLAHHLQEPARQMRLQAQVLLQRIEDLPEATGAEQPAHLIIDAARRLVDILRDVQAYLAIERQPVVGGIASSETALAAAINRFVDTSKTGPVQVERGLMPRVGIPQKYLDDLFEILIENAVRFRHAERPLCLNVGAQNHPEGWVSRWRITVSASILVSRTGSGPGTLLRRLWVRMAGMARSEWERLGTRKR

SEQ ID NO: 41687 - protein, 149 aa, Solanum commersonii
MADQLTDDQISEFKEAFSLFDKDGDGCITTKELGTVMRSLGQNPTESELQDMINEVDADGNGTIDFPEFLNLVARKMKDTDSEEELKEAFRVFDKDQNGFISAAELRHVMTNLGEKLTDEEVDEMIREADVDGDGQINYEEFVKVMMAK

SEQ ID NO: 41688 - protein, 280 aa, Triticum aestivum
  misc_feature (228)..(228): Xaa can be any naturally occurring amino acid
  misc_feature (255)..(255): Xaa can be any naturally occurring amino acid
  misc_feature (268)..(268): Xaa can be any naturally occurring amino acid
  unsure (1)..(280): unsure at all Xaa locations
MRTVALGIVAMACLVAVARGGNFFQDSEMTWGDGRGKVVDGGRGLDLTLDKTSGSGFQSKTEYLFGKIDMQIKLVPGNSAGTVTTFYGAAHDEIDFEFLGNVTGEPYTLHTNVFAKGQGQREQQFRLWFDPTKAFHTYSIIWNPQHVIFAVDGTAIRDFKNHEARGVSFPKSQPMRLYASLWNADDWATQGGRVKTDWSQGAFVASFRNFNADACVMSGGAQRCPAGXMEGSGAGANGGSGSWWNQELSGMGYGXMRWVQGVHNLNYXTDPRRVGRPSPR

SEQ ID NO: 41689 - protein, 149 aa, Solanum commersonii
MAEQLTEEQIAEFKEAFSLFDKDGDGCITTKELGTVMRSLGQNPTEAELQDMISEVDADQNGTIDFPEFLNLMARKMKDTDSEEELKEAFKVFDKDQNGFISAAELRHVMTNLGEKLTDEEVDEMIREADIDGDGQVNYEEFVRMMLAK

SEQ ID NO: 41690 - protein, 318 aa, Haloferax lucentense
MTAELVTFGETMIRLSPPAGERIETARSLEFRTAGAESNVAVAASRLGCSAAWLSKLPDSPLGRRVTTELRTHGVEPYVRWDDDARQGAYYIEQGRAPRPTNVIYDRADAAVTTARPDELAVDIVEDAAAFYTSGITPALSETLRETTGELLQTATEAGTTTAFDLNYRSKLWSPSDARDACESLFPKVDVLVAAERDIRTVLELDGDAPTLASELAGDFDFETVVVTRGEDGALARHGGTVYEQPVFETDTVDAIGTGDAFVGAFLSRLIADEPVETALAYGAATAALKRTVHGDLAVVTPDEVERVLRGGDAGIDR

SEQ ID NO: 41691 - protein, 483 aa, Colwellia psychrerythraea 34H
MPRRTKIVATLGPATDDREILKNVLAAGVNVVRLNFSHGIPQDHIDRADNVRAIAKELGVYVGILGDLQGPKIRVSTFKNGPIKLAIGDKFELDATLEKGEGCQEKVGIDYKKLVQDVNTGDILLLDDGRVQLKVLSTSDNSVFTEVTVGGPLSNNKGINRQGGGLTAPALTAKDKEDIKLAAKINVDFLAVSFPRDAADMREARLLAQEAGCDARLVSKIERAEAVNDDKILDGIILASDVVMVARGDLGVEIGDAALVGKQKHIITRSRQLNRVVITATQMMETMIEQPMPTRAEVMDVANAVLDGTDAVMLSAETAAGKYPVETVTAMANVCVGAEQHRSVNISNHRMELTFSEVSETIALSAMYAANHLEGVKAIISLTESGQTSKLMSRITSGLPIFSLSRHPKTLNKTAIYRGVYPIEFDSTHVNNDNLSDEMLKVVSGKIELAVGDKLILTHGDMMETVGASNTLKILTISKRHLK

SEQ ID NO: 41692 - protein, 436 aa, Colwellia psychrerythraea 34H
MANKSEKLFNKALKVLPGGVSRNTIFRKPYPFYADKGEGCYVTDVEGVTRIDFANNMASLIHGHAYPAIVDAVTEQLAKGSCFTMATEAEVNYAQLLCDRVPSFDKIRFVNSGTEAVMAMLKASRAYTGKAKIAKVEGAYHGAYDYAEVSQTATPNNWGELDKPNSIPVAVGTPPKALEDVVVIPFNDPERAIKILDQHKDDIACILVDLLPHRVGLIPASNAFINALHQWTRDNKSLLVFDEVITFRTNYSGAQQNYDVAPDLTAMGKVIGGGFPAGALAGCDKVMKVLDPTEPKVLLPHSGTFSANPITMTAGLAAMKDFDQAAVTKLNQLASYAREAITQAMSDVGIKACVTGAGSMFRIHLKAQPPKNYRDGYVDKKESQLITKLLDHLFDNGIMMINTCTATLSTAMTKKEIDHLVCALKDGFELIKPEMA

SEQ ID NO: 41693 - protein, 395 aa, Corynebacterium glutamicum ATCC 13032
MMEIGVQVASWMDRHHDEVIKWRRHLHSHPELSHMEYRTTEYLASVLKDHGMEPHLFPGTGLMVDIGPEGDSRLAFRADIDALPLLESTGLEFSSTATGVAHACGHDVHTVIALALACALNTIELPIGIRVIFQPAEEVMTGGATDVIAHGGLDGVDAIYAIHVEPKLKVGRVGVRAGAITSASDVIEIRVKGEGGHSARPHLSADVVYALSKLVVDLPGLLSRRVDPRTGTVLVFGTINAGYAPNAIPDSGIVSGTLRTADISTWRDMRPLISELVEQVLAPTGVTHELIYNPGVPPVLNDDVATALLASAARDMDTQSVVQAPQSSGGEDFSWYLEHVPGSMARLGCWPGHGPKQDLHQSDLVVDERAIGVGVRLFGSLVQQYSSRSEAFLNS

SEQ ID NO: 41694 - protein, 364 aa, Mesembryanthemum crystallinum
SDSGKDAGRLSAAWQLYKVQEELLKVSKKFGVKLTMFHGRGGTVGRGGGPTHLAILAQPAETIGGSLRVTIQGEVIEQSFGEQHLCFRTLQRYTAATLEHGMNPPKSPKPEWRALLDQMAVVATEEYRSIVFKEPRFVEYFRLATPETEYGRMNIGSRPSKRKPSGGIESLRAIPWIFAWTQTRFHLPVWLGVGGALKHVLEKDIRNHNMLRDMYNNFPFFRVTIDLLEMVFAKGDPEIAALYDKLLVSEELQSFGERLRANYEDTKRRLLEVAGHKDLLEGDPYLKQRLRLRDPYITTLNVCQAYTLKRIRDPDFKVTERPHLSKEIMDAHKAAAELVKLNPTSEYAPGLGDTLILTMKGIAA

SEQ ID NO: 41695 - protein, 366 aa, Mesembryanthemum crystallinum
SDSGKDAGRLSAAWQLYKAQEELIEVAKQHGVKLTMFRGRGGTVGRGGGPTHLAILSQPADTIQGSLRVTIQGEVIERSFGEAQLCFKTLQRYTAATLEQGMIPPLTPKQEWRALMDEMAVVATERYRSIVFREPRFVEYFRLATPELEYGRMNIGSRPSKRKPSGGIESLRAIPWIFAWTQTRFHLPVWLGFGGAFKHVIKKDIRNHSVLREMYNDWPFFRVTIDLLEMVFAKGDPGIAALYDKLLVSDDLQSFGERLRANYEDTKRRLLEVAGHKDLLEGDPFLKQRLKLRTAYITTLNVCQQAYTLKRIRDPSYRVPVRPPIAKEIMEGSVSSANQLVKLNPTSEYAPGLEDTLILTMKGIAA

SEQ ID NO: 41696 - protein, 350 aa, Novosphingobium aromaticivorans DSM 12444
MPDLSKASLSKVPVTIITGFLGAGKTTLISHLIHNAGGRRLAVVVNEFGSLGVDGEILQSCAIPDCPAENIVELANGCICCTVADDFIPTVEKLLALDPRPDHILIETSGLALPKPLLKAFDWPAIRSRITVDGVLALADAEAVAAGRFAPDVAALDAQRAADPSIDHETPLSEVFEDQLACADMILLTKVDLAGPQGVAAARAIIAAELSRPVPVIELTEGVVDPRVILGLDAAAEDDIAARPSHHDGEDDHEHDDFDSTVIEWGEIADPAALVARIETLARDHHILRVKGYAAVAGKPMRLLVQAVGARVRHQYDRPWRPDEPRRTTLVAIAEHDHVDADAIRAVLLA

SEQ ID NO: 41697 - protein, 364 aa, Mesembryanthemum crystallinum
SDSGKDAGRLSAAWQLYKAQEDLIKVAKQFGVKLTMFHGRGGTVGRGGGPTHLAILSQPPDTIHGSLRVTVQGEVIEQSFGEEHLCFRTLQRFTAATLEHGMHPPDSPKPEWRALLDEMAVVATEEYRSVVFKEPRFVEYFRLATPELEYGRMNIGSRPSKRKPSGGIESLRAIPWIFAWTQTRFHLPVWLGFGAAFKHIIKKDIRNLHMLQEMYNAWPFFRVTIDLVEMVFAKGDPGITALYDKLLVSEDLWAFGENLRTNCEETKKLLLQIAGHKDLLEGDLYLKQRLRLRDSYITTLNVCQAFTLKRIRDPSYNVKFRPHISKEIMETSKSANELLILNPSSEYAPGLEDTLILTMKGIAA

SEQ ID NO: 41698 - protein, 458 aa, uncultured bacterium 443
MDETLYTPPKPNSLPAVIALIRSLWKGDGNLLELLPAEAYHFDIGHLGRSRRGTVLFNKPSAVKEIMRDQQGVFPKSDLMVGALDPLIGESMFVTDGPKWRRQRAMIDPAFSLMRLNVAYGAMCAATDDHVAMISRLADTQSPFSLDLAMSHLTADVICRTVFSTPLASDIAEEVFDDFTLFEKSVAQVDILGMILKPAWSETKQVPEVLEACQRIRHHIGGLIDTHLDSHDGEFNDIASAVIEAKDKDTGLPFTREELIDQLGVFFLAGHETTASALTWVFYILAERPEWMVRLREELDPVMVDGALSFDDTKKLPLTRAFFKEVLRLYPPITFVPRVALENVEIEGKRLPRGALVMIAPWTLHRHSKYWENPHAFIPERFLPENEKSLTAGAYIPFGQGPHLCVGAGFAQVESLLIMSELITKFDFEMMPNQQVVPAARLTTRPAEQVMMRVRHRN

SEQ ID NO: 41699 - protein, 621 aa, Photobacterium profundum SS9
MKTPFLYHGQDSAWLTPTDNTLNVTMVSDVDTLISAIFIRCEPDNEELLIDMERGRTQGRLQYWHGKLPFNSDKDTTFYTFKVMQNSRQWWLHGCGVSPRVPGKEKHFKFNNQHQPPAWVKEQIFYQVFPDRFSNANPSISVQSNEYCLRGTEKPTIAKAWGESASNHDSSGPSEFFGGDLQGIHNKIDYLQELGVTALYLNPIFTAPSNHKYDTTDYLNIDPHLGTNEQFANMVADLHQRNMKIMLDAVYNHTSVDHPWFDMYQRNTADQAVGAYDHPNSTYRQYYQFTDNSNEYVGWNGISTLPKLNFSNPEVQDYIYAGDDAVIKHWLKPPYNIDAWRFDVIHMLGEGKGARNNAHFVKSFRNAAKSVNPECYVLGEHFFEASNWLQGDQEDGAMNYYGFAHPLRAFFSQKDIAYHACQINAVELVEWLNEARTKLPWLNQLSQLNQLDSHDTMRFLTMVDNNTETMHLALMMLFAYVGTPCVYYGTEVELQGGQDPDNRRCFPWERTEQEQKPQTFSYLQQLIAVRKSSTALQSGSVQWLLAENQYFAFARTTETEHVICLINNSESAKTLHLPVWQLGIESGSLRDLLTDDEWHISEGSVSVTLAGKEGILLTVSE

SEQ ID NO: 41700 - protein, 95 aa, Arabidopsis suecica
LPPPQQQPTGIDGIDQKSVLLELALTAMDELVKLAHSEEPLWVKSLDGERDELNQDEYMRTFSSTKPTGLATEASRTSGMVIINSLALVETLMDS

SEQ ID NO: 41701 - protein, 498 aa, Burkholderia fungorum LB400
MNLTLTQRLSLVFSVLLLACCGASAFLQIRSSDLHEKEVIQGLSRNLADHIADRTTLMDANGLRPDAVRQLFGQLMMVNPSVEVYLLDNQGRIEGDDAPAGHVRRAQVDLTPLRRFIAGEPLPILGDDPRSPDGKKVFSAAPLQLGGQAPSGYIYVVLLGEEHDALAAHVAASSVLRTTLWSMALVALLGLLAGLTAFGLITRPLRRLTDAMRRFDAEGEPDIQPSVPRSPAAGTRDEIAVLEATFAQMANRIGEQWRALTRQDQQRRELIANISHDLRTPLTSLHGYLETLSLKSDTLGDTERKRYLAIALAQSVKVGRLAQALFELARLEHGNVQPALEQFSLVDLVQDVFQKFELPAEARHIRLRAVIAPRLPNVCADLAMIERVLTNLLDNAIRHTPAEGSIEIDLAHKDGKVSVMLSDTGPGIPREQREGLFERPFGSGGSHRGGGLGLLIVQRMLQLHHSQIRLLDKAETGTTFCFELPTAVVRASAAGIPM

SEQ ID NO: 41702 - protein, 180 aa, Bacillus subtilis
MFNLHDSEKLFIPFITAGDPLPEISVELAKSLQNAGASALEIGVPYTDPLADGPVIQRASKRALENGMNIVKAIELGGKMKKNGVHIPIILFTYYNPVLELEKECFFALLRENDIDGLLVPDLPLEESALLQKTCKKENIAYISLVAPTSENRLKIITEQAGGFVYCVSSLGVTGVRSEF

SEQ ID NO: 41703 - protein, 97 aa, Hyacinthus orientalis
SSSCCNFFLVIQREGKMSSCGACSSGCKCGSSCGCNGCGCCKRNPVLAEGSITTTQTMILGVAPVKGQFEGFESGMGAENGGCKCGSNCTCDPCTCK

SEQ ID NO: 41704 - protein, 403 aa, Photobacterium profundum SS9
MSAAFYEQINQQIEDVKAGGLYKSERIITSAQKAAVSILNKEGVDTGEEVLNFCANNYLGLANHPELIEAAKAGMDAHGFGMASVRFICGTQDSHKELEQKLSTFLGTEDTILYTSCFDANAGLFETLLGPEDAIISDALNHASIIDGVRLCKAKRFRYANNNMEELEQQLIAAKEAGIRHTLIVTDGVFSMDGVVANLPAICDLADKYGALVMIDDSHAVGFMGDNGRGTHEHHNVIDRVDIITGTLGKAMGGASGGYTAGKKEVIDWLRQRSRPYLFSNSVAPAIVSASIRVIDLLAESGDLRTRLWENSAHFRARMTEAGFTMSGADHAIIPIMLGDAKVAAEFAERALEKGIYVVGFSFPVVPQGQARIRTQMSAAHSPEQLDRAIDVFIEVGKDMGII

SEQ ID NO: 41705 - protein, 169 aa, Triticum aestivum
  misc_feature (43)..(43): Xaa can be any naturally occurring amino acid
  unsure (1)..(169): unsure at all Xaa locations
MAPTVMASSATSVAPFQGLKSTAGLPVSRRSNGASLGSVSNGXGRIRCMQVWPIEGIKKFETLSYLPPLSTEALLKQVDYLIRSKWVPCLEFSKVGFIFREHNASPGYYDGRYWTMWKLPMFGCTDATQVINEVEEVKKEYPDAYVRIIGFDNMRQVQCVSFIAFKPPG

SEQ ID NO: 41706 - protein, 327 aa, Photobacterium profundum SS9
MNEVDKPEMGHNDLLIRIKKTAICGTDVHIYNWDEWSQKTIPVPMVVGHEYVGEVVGIGQEVRGFTIGDRVSGEGHITCGHCRNCRGGRTHLCRNTTGVGVNRDGAFAEFLVIPAFNAFKIPAGISDDLASIFDPFGNAVHTALSFDLVGEDVLITGAGPIGIMAAAVAKHVGARHVVITDVNEYRLDLARKMGVTRAVNVANEKLEDVMSELGMTEGFDVGLEMSGVPSAFNGMLASMNHGGKVALLGIPPSDMAVDWTQVIFKGLVIKGIYGREMFETWYKMASLIQSGLDLTPIITHHYKIDDFQKGFDMMRSGMSGKVILDWE

SEQ ID NO: 41707 - protein, 294 aa, Oryza sativa
GILTNERFEPLLSSSPPPPPPLLSATAARGPKTTPEWTEAPGWPYTSRTGEEVFRDFRGRRAGMIKALTTDVEKFYQLCDPEKENLCLYGYPNETWEVTLPAEEVPPEIPEPALGINFARDGMNEKDWLALVAVHSDSWLLAVAFYFAARFGFDKEARRRLFNMINNLPTIFEVVTGAAKKQTKEKAPNSTNKPNKPSSKMQPRPESHSKAPKPPAPPKDDDESGDEYADEEEEERDNTLCGSCGTNDGKDEFWICCDSCERWYHGKCVKITPARAEHIKHYKCPDCGNKRARA

SEQ ID NO: 41708 - protein, 149 aa, Arabidopsis thaliana
KHILYRKKKRFREGCGNSGTKAQKNHPAQKVNAKMLWNGGEIFPPNTPNIKEVFFSKMIFERFFPQNFGRKRVSGGAPGACSTAKAGEGDPSGSPKRGPPGKAAMGVPLWAHKGKKGALPNPPLRAIDNNPIMMGQGGVIQSKLRREKG

SEQ ID NO: 41709 - protein, 225 aa, Glycine max
  misc_feature (148)..(148): Xaa can be any naturally occurring amino acid
  misc_feature (200)..(200): Xaa can be any naturally occurring amino acid
  unsure (1)..(225): unsure at all Xaa locations
MAAILARKSLLALRARQLAVSGQGLHSSQYYGLRLSAHSFSTKREDEEREQLAKDISKDWSSVFERSINTLFLTEMVRGLMLTLKYFLETKVTINYPFEKGPLSPRFRGEHALRRYPTGEERCIACKLCEAHMTICPAQAITIEAEEXEDGSRRTTRYDIDMTKCIYCGFCQEACPVDAIVEGPNFEFATETHEELLYDXEKLLENGDRWETEIAENLISESLYR

SEQ ID NO: 41710 - protein, 1963 aa, Shewanella oneidensis MR-1
MSSQMHTHPTLQDSAAVPNDQRQTLKAMPKIAIVGLAVQYPDADTPEQFWQNLLDKKDSRSQIDAAKLNANPADYQGIQGQADRFYCDKGGYIRNFRFDPQGYQLLPATFAGLDESFLWALDCSKKALLNAGVDLTAPLLERTGIVMGTLSFPTARSNELFLPIYHQAVEKALKTKLNQPQFALAPFANASIAGSQLAANGVIAHTASKLLSDALGLGGAQLSLDAACASSVYALKLACDYLTTGKADMMLAGAVSGADPFFINMGFSIFHAYPDHGISAPFDSNSKGLFAGEGAGVLVLKRLEDAERDGDNIYAVVSGIGLSNDGKGQFVLSPNSKGQVQAFERAYAAANTHPSNIEVIECHATGTPLGDKVELTSMERFFEDKLDGTKAPLIGSAKSNLGHLLTAAGMPGIMKMIFAMRSGHLPPSINLTAPISSPKGLFSVNNLPTQRQAWPDKAGNDRRHAGVSVFGFGGCNAHLLLESYQPTAHSAEKQANKPVYQQQALTVIGMASHFGPLASINALDKALIAQTDAFIPLPPKRWKGLDKHPDILQQFGLNRAPKGAYIEQFDFDFLRFKVPPNEDDRLISQQLLLIKVADEAIRDAKLTAGSKVAVLVAMETELELHQFRGRVNLHTQLADSLKKQGVHLSNDEYLALEAIAMDSVLDAAKLNQYTSFIGNIMASRIASLWDFNGPAFTISAAEQSVARCIDVAQNLLSKEALDGVVIAAVDLSGSVEQVILKNAQVAVDLDANSANPQWKVGEGAGAIVLTNQQASNSQQAGYGQIRGQAFGTNHQLPKLLDSLITETAIANPSMPTAIHMIEQCIAPEEQLPAEHLLAQLNLLGTSCNRVANTLGHNFAAAGMASLLSALLSLKNRSANSDKNAEKQALVSTQSQGVSSLLLLSQTATQAAQLELRLAQDLTLSEQKHLIKPVTLGGRDIYQHIVDTPLPALAAIQGKMRQLQPLASQATQTKPAVGAALDITAENATPLAAESGMSSNAPLQFETTASAQDSAALLQNQQLAREAHLAFLQSREQGLKLADALLKAQLSQTTQMGAVAAHVATSANVAETKAQQAVSIPELMPNHAPNHARVPPYTPPIPAAKPCIWNYQDLVEYAEGDIAKVFGADYAIIDSYARRVRLPTSDYLLVSRVTKLNAQMNRYQPSSMTTEYDIPVDAPFLVDGQIPWAVAVESGQCDLMLISYLGIDFENKGERVYRLLDCTLTFLGDLPRGGDTLRYDISINHFARNGDTLLFFFSYECFVGDKLILKMDGGCAGFFTDKELADGKGVIRTEVEIKVREQAQIALANEYTRNGNKPRFTPLLNCAQTAFSYGQIHRLLSADIGGCFGGEHAAHQAKFGLQPSLCFASEKFLMIEQVSKLEVHGGAWGLGLIEGHKQLAPDHWYFPCHFKGDQVMAGSLMAEGCGQLLQFFMLHIGMHANTQAGGVTNGRFQPLENASQKVRCRGQVLPQSGTLTYRMEVTEIGMSPRPYAKANIDILLNGKVVVDFQNLGVMIKEEADCTRYSQSHSSQGNHTQAANIESLAEQAPLMAQIPDVAAPVNKGVVPLKHVSAPIAPAGSKYANRVPDTLPFTPYHLFEFATGDIENCFGPDFSIYRGLIPPRTPCGDLQLTTRVVAIEGKRGELKKPSTCIAEYEVPSNAWYYRKTSHPSVMPYSVLMEISLQPNGFISGYMGTTLGFPGQELFFRNLDGSGKLLREVDLRGKTIVNDSRLLSTVIAGSNIIQNFSFELSCDGEPFYRGNAVFGYFKADALKNQLGIDNGKITQAWHLERGIKADCQINLLDKNGRSFVAPLGKPHYRLAGGQLNFIDKAEIVKTGGKKGLGYLYAERTIDPSDWFFQFHFHQDPVMPGSLGVEAIIELLQTYAIDQDLGAGFNNPKFGQILSEIKWKYRGQINPLNKQMSLDVHITSIEDKDGKRIIKGDANLSKDGLRIYEVTDIAICIEEA

SEQ ID NO: 41711 - protein, 192 aa, Brassica napus
  misc_feature (158)..(158): Xaa can be any naturally occurring amino acid
  misc_feature (164)..(164): Xaa can be any naturally occurring amino acid
  misc_feature (184)..(184): Xaa can be any naturally occurring amino acid
  unsure (1)..(192): unsure at all Xaa locations
MAEETKNVHEQEVPKVVMEESSAATGEVTDRGMFDFLKKKKEETKPEETINSEFEQKVQVSEPVPEVKHEEAEKKPSLLEKLHRSDSSSSSSSEEEGEDGEKRKKKKKDKKKIATEGEVQTEEAKKGFMDKLKEKLPGHGKKPEDDSAVAAAPVVAPXVEEAHXAEKKGILEKIKEKASGYHSXTVEEGEER

SEQ ID NO: 41712 - protein, 622 aa, Oryza sativa
MRAVLEEWIKQRESWKPFWVRGINMVGYSINGLHPVLFSSQADGDDDGIRAGVAGPDAGPHRRLSCLCHIAVAPFPAPALEMWQQLGRLINGEHNALLLAIPLDGIGSFPPHPPPDPQEQEAAAPPPPPAEPAVPPRHRGHLHLFKKPLHRALSGLAATHGPVLLLHFGSRAVLHVTDPAVAEECLTDHDVTFANRPRLPSSCHLSNGYTTLGSSSYGPNWRNLRRIATVEVFSAHRLLRSADVRGGEVPHMARWLYLAAPAAGPSEPARADVKARAFELVLNVVARMVAGKQYYGGEGDAEAETEEAARFREMVREYFAMHGASNLQDFVLLLGLVDIGGAKRRAVKLSRERNTWAQRLIDEHRATATAAAATEARTMVGDLLKMQASEPEAYSDKVITALCLSILQTGTDTSSSTIEWGMALLLNHPAAMAKARAEIDRFVGTGRVVEEADLPNLPYLQCIIRENLRLYPVGPLLAPHESSADCSVSVAGGGRYAVPAGTMLLVNVHAMHRDARFWGPDPESFSPERFEGGRSEGKWMLPFGMGRRRCPGEGLAVKVVGLALATLVQCFEWRRVGDEEVDMTEGSGLTMPKAVPLEALYWPRPEMVPALRGIFFIYNFFY

SEQ ID NO: 41713 - protein, 1758 aa, Neurospora crassa
MDTLQSLQWRPPKPNYLPHDIDVDEPIVDVYKPPIPMDKASDRENQEYYAHMKRMAHEYNITRPKGYTVSYHFNPDMEPHHFGLTHPMKPFRLTLTKSLVTAYGMNFAMDNYNTRIATYEELNSFHTSDYLDYLHMAPPEEMPRDIDNPDKEVKFNLGGSDCPLFHGLYDYCSMSAGSSLDAARKICNKQSDIAIAWGGGLHHAKKSEASGFCYINDIVIAILQLLRCYPRVLYIDIDVHHGDGVEEAFHSTDRVLTCSFHKFAPEVFFPGTGGLDDNGPKSEHNPGAHHAINVPLNDGITDEQYGHLFQSVIGKINEKFRPSVIALQCGADSLAGDRLGRFNLQVQGHGACAKFCKTFGIPMIMFGGGGYTPRNVARAWAYETSVAIDVDEKINKIIPDHTPWRKHFVQEELFPSLEQILGEPRANRNSQKRLQEIIQHVHEQLRFVNAAPSVQQQVIPPDLGGIRDDVEDRLKEESEERDEGLRRDREEAPNDVPDDAPTYQEATTASPNPNNAPASAASSTPPQRPPPAVTQGLTAPSSTAASSTAPPHWPVPWWQKVDAQDFEQNPDRAIFAAVEDVSEMRNGGLITRRQFVDECTRLNRIRTVLKTGRISEASGPMTAEESQTAQKLLEWWNNFAVSAKAKQHAKELQDLRKGGTARPTPDTAPPPRFWNIINPLDFEKDPDRALTLILGELRNQREQGQLTKEDVARSHADVKRIRMVLKTGRISEYIGPMTEEESMEVQKALDDWKELAAYAESVQQNLQEAQKRTQEAGKAAQSAAPESPRGRAESTVDLEKTLEAVEEEDEGVNEWLGKQQHFRQYMRQRAALVNLDNNVAVQEWEKENDKGAVEQRTEDQRFTEWLERLGGSLPAMVIEGNVHVIEVDPKKAEDSLQGQVDMKNYIMVVKKEYEAATAYLRMMGVDVTAQEVKNEDEEEDGEKSKKKRRSKRKPKKKKKKKTTTGKDAQEYLDDEQTRNLEDGQDDKKDEQDDDNEKDERDDADEKDEDGQANVDEKDKDEMDSEENSDEYNTAAEEQSPQPKKSKINNAKRKRRKQRKQKAEQAAKEKAEREAWEKKKQEAKERKERKKREEEAQKAARKKEAREKETREKEAREKAAREKEEKAMREKAAREIAARKKEAREKETREKEAREKAAREKEAREKTAREKEAREKEVREKEARKKEAREKQVREKDAREKAAKEREEKVAREKEAQKARERQEQEKEAQKAREQQEQEARERKKLDEVIVVEEKVNEDDIKQEDEVKEEADNNPMSSQALMPSQQQMPGPGPGPMMLGHQIPPPPGLEPKPQQGQIPWGGHMWRQRQIPWASQMQQQTQVPWQWQMSQVEQVLRQWQMSQETQVPRQMQMPLQGQMPYQNPMPLQNPMAHQNSIPEQNSIPEQNPIPDQNPWPMQPQTPMPPQNLMPHQNPMPHQNSMPHPNPIPDQNSIPEQNPILDQNPWPMQPQTPMPPQNLMPHQNPMPHQNSMPHPNPIPDQNSIPEQNSILDQNPWPMQPQTPMPPQNLMPHQNPMPHQNSMPHPNPIPDQNSIPEQNPILDQNPGPMQPQTPMPPQNLMPHQNPMPHQNSMPHPNPIPDQNSIPEQNPILDQNPWPMQPQTPMPHHNSMPQGQMLPQEQMPAEPHVFPPPPVQDIVPNSVELTAEQLEIHARLLVRTGCFWMVRNGFFWIHSALSDDDNTANLSDHSKKLVIGRFRVLVSHLMNDLTVPPPPPQQQQQQQQQQQQQQQQQKQQQQQQPERK

SEQ ID NO: 41714 - protein, 206 aa, Brassica rapa
MSNEYDYLFKLLLIGDSSVGKSCLLLRFADDAYIDSYISTIGVDFKIRTIEQDGKTIKLQIWDTAGQERFRTITSSYYRGAHGIIIVYDCTEMESFNNVKQWLSEIDRYANDSVCKLLIGNKNDMVESKVVSTETGKALADELGIPFLETSAKDSTNVEQAFLTIAGEIKKKMGSHTNANKTSGSGTVQMKGQPIQQNNGGGCCGQ

SEQ ID NO: 41715 - protein, 280 aa, Zea mays
MEDERNTQQHQGGEQAQDQENEVKDRGLLDSLLGRNKHDDQEKKNQQAEEELATGMEKVTVAEPDHKEEGHEAAEKKDSLLAKLHRTSSSSSSSSDDEEEEVIDENGEIVKRKKKKGLKEKVKEKLAAHKAHDEGDHHQTPAPPVVVDTHAHHQEGEHFPAPAPPPHVETHHPVVVHKIEDDDTKIQTPPQAPEEEKKGLLDKIKEKLPGGHKKPEDAAAAAAAPAVHAPPPAPHAEVDVSSPDGKKGLLGKIMDKIPGYHKSSGEEDRKDAAGEHKTSS

SEQ ID NO: 41716 - protein, 663 aa, Neurospora crassa
MPRDDLSIDFVRKMPPAAELDPALILDEWIHNTQNLPEEIRFMQDEIAEKDRQYDKLVKEIEKNDERIQKFIKANGSFQPNPKEEEYRATIIKNFDLAEQLSKEKLELTRKLQHTFDKHVRALDKQIKSLYDRGEPGFTDPDELPSLVRDSAANITSTPTLLRPVNGNHPISSALNGLANGTGSNAARSNQIRNIQASHHHSASAPATPAATIILNQRARESSAGPGGAVRKGAVRSNSGLSLQTSGIGRHASLGPGTPKSSTTSGGVQRAGSAGPRGIGKGSTSSTSRKSVPSGSSAASRKKGSSVPTAGSGSGSAGGVSASGVSGSGAGGGSSHKSNLSRVLKRAGTGTSGSGAKNSPNTTSRANSTGDSDLSDADSNLSGSESDHRRIGTGRNTPIGGGSHSRSASHHHTNSSFSHKGGADDLNHPHHPSHGHRPSSSLASNGGGGGGTGGGSGGPFQSRNPGGSGGGPLSNPSHPQSISSHNRSRSSTHHQLQEMHRSPSLSSNNRRRNNPGLTDEDDEDVDDDDMDLNVDQEDGMDLDDEEAGDDRKYCLCQNVSFGDMVACDNDECPYEWFHWSCVGLKSEPNGTWYCPVCAKNMERDNTSNSNNNINMNNNNSNNSSSSQGRSDNKKSGSGGSGGGGNSSSQGGGGNNSSQGGGGQ

SEQ ID NO: 41717 - protein, 729 aa, Zea mays
MAAAAILPELGTQVLIPVAAAVGIAFSVLQWVLVSKVRLAPERRADGGGAVKSGPSDYLIEEEEGLNDHNVVVKCAEIQNAISEGATSFLFTEYKYVGLFMGIFAILIFLFLGSVEGFSTKSQPCHYSKDKTCKPALANAIFSTIAFVLGAVTSLVSGFLGMKIATYANARTTLEARKGVGKAFITAFRSGAVMGFLLAASGLLVLYIAINLFGIYYGDDWEGLFEAITGYGLGGSSMALFGRVGGGIYTKAADVGADLVGKVERNIPEDDPRNPAVIADNVGDNVGDIAGMGSDLFGSYAESSCAALVVASISSFGINHEFTPMVYPLLVSSVGIIACLITTLFATDFFEIKAVDEIEPALKKQLIISTIVMTIGIALISWLGLPYTFTIFNFGVQKTVQSWQLFLCVAVGLWAGLVIGFITEYYTSNAYSIFLSFSLAAMYGADVAALGMLSTIATCLAIDAYGPISDNAGGIAEMAGMSHRIRERTDALDAAGNTTAAIGKGFAIGSAALVSLALFGAFVSRAAISTVDVLTPKVFIGLIVGAMLPYWFSAMTMKSVGNAALKMVEEVRRQFNNIPGLMEGTTKPDYATCVKISTDASIKEMIPPGALVMLTPLIVGILFGVETLSGVLAGALVSGVQIAISASNTGGAWDNAKKYIEAGVSEHARTLGPKGSDPHKAAVIGDTIGDPLKDTSGPSLNILIKLMAVESLVFAPFFAAHGGILFKWL

SEQ ID NO: 41718 - protein, 314 aa, Dermocarpa sp.
NGFGRIGRLVFRAGLNNPNIEFVGINDLVPPGNIAYLLKYDSTHGRFAGTVESQSDGIVVNGKFIPCVSIRNPEELPWSKYGVEYVVESTGLFTTHETASKHLTAVQKRVVISAPTKDPERVKTLLVGVNHQTFDPSKDTIVSNASCTTNCLAPIAKVINDNFGLAEGLMTTVHAMTATQPTVDGPSKKDFRGGRGAAQNIIPASTGAAKAVTLVLPELKGKLTGMAFRVPTPDVSAVDLTFRTEKATSYQEICAAMKQAAEGEMKGILGYTEEPVVSTDFTSDPHSSIFDAGAGIELNSNFFKVVAWYDNEWG

SEQ ID NO: 41719 - protein, 313 aa, Fischerella sp. UTEX 1829
NGFGRIGRLVFRAGITNPNIEFVGINDLVPPDNLAYLLKYDSTHGIYKGKVEAKDNGIIVDGHFVPCVSMRNPAELPWGKLGADYVVESTGLFTNYEGAANHLQAGAKRVVISAPTKDPDRVKTLLMGVNHQLFDPAKDTVVSNASCTTNCLAPIAKVINDNFGLTEGLMTTVHAMTATQPTVDGPSKKDWRGGRGAAQNISLSTGAAKAVALVLPELKGKLTGMAFRVPTPDVSVVDLTFKTAKATSYQEICAAMKAAATGELKGILGYTDEEVVSTDFQGDTHSSIFESGAGIELNSNFFKVVAWYDNEWG

SEQ ID NO: 41720 - protein, 169 aa, Helicosporidium sp. ex Simulium jonesii
ARGGAQELFGIQPDLTTMGKIIGGGLPVGAYGGRSDIMSLVAPAGPMYQAGTLSGNPLAMAAGLKTLQQLTPAVYVHLDMISRRLVDGLAKVAKSTGHDLYTSSVPGMFGFFFCRGPVHNFEEAKRADTVKFAKFFNGMLDQGIYLAPSQFEAGFTSFSHSIEDIDRTS

SEQ ID NO: 41721 - protein, 269 aa, Arabidopsis thaliana
MELWTEARALKASLRGESTISLKHHQVIVSEDLSRTSSLPEDFSVECFLDFSEGQKEEEEEVVSVSSSQEQEEQEHDCVFSSQPCIFDQLPSLPDEDVEELEWVSRVVDDCSSPEVSLLLTQTHKTKPSFSRIPVKPRTKRSRNSLTGSRVWPLVSTNHQHAATEQLRKKKQETVLVFQRRCSHCGTNNTPQWRTGPVGPKTLCNACGVRFKSGRLCPEYRPADSPTFSNEIHSNLHRKVLELRKSKELGEETGEASTKSDPVKFGSKW

SEQ ID NO: 41722 - protein, 426 aa, Enterococcus faecalis V583
MSEKEFRNEDAVLDIKDRPQAFHWVGLSLQHLFTMFGATVLVPILVGIDPGIALVSSGLGTMVYLITTKGKIPAYLGSSFAFIAAMQMLMKSDGYPAIAQGAMTTGLVYLIVSLIIKKIGSDWLDKILPPIVVGPVVMVIGLGLAANAANNAMYNNNVYDFKYIAVALITLGLTIFYNMFFKGFLGLIPILLGIVSGYLVALAFGIIDLTPIKEAAWFALPNFEVPFVQYEPKLYLNAITTMAPIAFVTMTEHIGHLMVLNKLTKRNFFQDPGLSKTLMGDGLAQIVAGFVGGPPVTSYGENIGVLAITRVHSVFVIGGAAVFAVALGFVGKLSALILSIPGPVISGISFVLFGVIAASGLKILIDNKINFDKKKNLLIASVILVIGIGGLVFKVGTFELSSMALATVLGIVLNLILPENARSEEQ

SEQ ID NO: 41723 - protein, 219 aa, Burkholderia fungorum LB400
MGVAAAQHLAHSAEAATKIPAPMQDEKAAATHSETAVFAGGCFWGVQGVFEHVRGVKEVASGYSGGAASTAQYETVSEGDTGHAESVRITYDPTQITYGRLLQIFFSVAHNPTELNYQGPDHGTQYRSAIFPVNAMQRGIAQSYIAQLDNAHVFSAPVVTRVENFKGFYPAENYHQNFLALHPDYPYIAINDLPKVADLKRMFPDLYRNDPVLLATSAQ

SEQ ID NO: 41724 - protein, 444 aa, ASPERGILLUS NIDULANS FGSC A4
MGSIGANNAVADPTPLFSSRVQKWEPGAIRSLLPLEALPGMISLVAGKPSPETFPIAEIAISLKDTPAGTGRIVVDGDELNQALQYGLPRGNAQLIQVCSVPYGSKVFRGASTASMRTEAGRAALAHGSQELIHRVIQVFTDPGDPVLLETWVSLPLGVAGFLRADGQELIPVYSDAQGLNPASLEQALSEWPGDSPRPKVLYTTPTGSNPTGQSCTESRKAEILRLAKRFNFIILEDDAYYYLNYGDDKQRARSYLALERDVNGESGRVVRFDSLSKIVSPGMRLGILTAQAAVVDKVVRITENINLQPSSTTQLLALSLLRHWGQAGFLKHCAEAAEVYRRRRDVFVSAAERHLQGRATWVVPTAGMFVWLELKLPPEMDSFELLKSQGMKNGVLAIPGVAFMPGNEQTCYIRVSFSLVPERDMDEACRRIAGLVDRCACHS

SEQ ID NO: 41725 - protein, 859 aa, Arabidopsis thaliana
MASSEVSMKGNRGGDNFSSSGFSDPKETRNVSVAGEGQKSNSTRSAAAERALDPEAALYRELWHACAGPLVTVPRQDDRVFYFPQGHIEQVEASTNQAAEQQMPLYDLPSKLLCRVINVDLKAEADTDEVYAQITLLPEANQDENAIEKEAPLPPPPRFQVHSFCKTLTASDTSTHGGFSVLRRHADECLPPLDMSRQPPTQELVAKDLHANEWRFRHIFRGQPRRHLLQSGWSVFVSSKRLVAGDAFIFLRGENGELRVGVRRAMRQQGNVPSSVISSHSMHLGVLATAWHAISTGTMFTVYYKPRTSPSEFIVPFDQYMESVKNNYSIGMRFKMRFEGEEAPEQRFTGTIVGIEESDPTRWPKSKWRSLKVRWDETSSIPRPDRVSPWKVEPALAPPALSPVPMPRPKRPRSNIAPSSPDSSMLTREGTTKANMDPLPASGLSRVLQGQEYSTLRTKHTESVECDAPENSVVWQSSADDDKVDVVSGSRRYGSENWMSSARHEPTYTDLLSGFGTNIDPSHGQRIPFYDHSSSPSMPAKRILSDSEGKFDYLANQWQMIHSGLSLKLHESPKVPAATDASLQGRCNVKYSEYPALNGLSTENAGGNWPIRPRALNYYEEVVNAQAQAQAREQVTKQPFTIQEETAKSREGNCRLFGIPLTNNMNGTDSTMSQRNNLNDAAGLTQIASPKVQDLSDQSKGSKSTNDHREQGRPFQTNNPHPKDAQTKTNSSRSCTKVHKQGIALGRSVDLSKFQNYEELVAELDRLFEFNGELMAPKKDWLIVYTDEENDMMLVGDDPWQEFCCMVRKIFIYTKEEVRKMNPGTLSCRSEEEAVVGEGSDAKDAKSASNPSLSSAGNS

SEQ ID NO: 41726 - protein, 209 aa, Hyacinthus orientalis
YLSGRVDMRQIEKTIQYLIGSGMDPRTENNPYLGFIYTSFQERATFISHGNTARHAKEKGDLKLAQICGIIASDEKRHETAYTKIVEKLFEIDPDGTVLCFADMMRKKIAMPAHLMYDGRDDNLFEHFSTVAQRLGVYTARDYADILEFLVDRWKVGDLTGLSGEGKKAQDYVCTLVARIKRLEERAQGRAKQGPKIPFSWIHDREVQL

SEQ ID NO: 41727 - protein, 385 aa, Debaryomyces hansenii CBS767
MKAIVYHGNKDIRYTDSHPSPNITHETEVKIKVDFCGICGSDLHEYLDGPIFFQGEKSEISNISKVQCMGHEISGEVVEIGSEVKALKVGEKVVVEASGTCLDRYRFPDAPNVKKPNCCACHDDHRNACDHIGFVGLGFMDGGFSDYCIVGQEHVVPYPEDLIPADVAAITEPLSVAWHAVRTSNFQPGQLALVLGSGPIGLAAIIALKGHKAGKIVVSEPALSRRVLAQDFGAEVIDPKDYSYEECIKALKLMTVDGFGFHHSYDCSGIAATFNASVHSLRTFGTATNIAIWPHKPIDFYPMDVTFKEKVITGSMCTTRLDFEQVIDAYKKGLIDPNEVKRFITSRIHLEDGIEKGFMELINNKDKHIKILMTPNEQFKRTSLT

SEQ ID NO: 41728 - protein, 383 aa, Debaryomyces hansenii CBS767
MKAIVYHGNKNLEFTESYPEPDINHGTEVKIKIDYCGICGTDLKEYLDGPIFFEGETSEISNHRKVQCMGHEISGEITEIGSEVSKLKVGEKVVVEPNGTCLDRYRFPETPNFDKPKCCACHDGYSNVCDYIGLIGLGFTDGGFSDYCVVGQDHVVPYPDDLIPSDVAALTQPIAVAWHAVRTSKLKPGQLALVLGSGPIGLAIIIALKGHLAGKIVVSEPALDRRLLAEKLGVETINPKEYTAEENVEALRAMTDDGFGFHHSYDCSGLPVTFNASVHSLRTFGTATNVAVWQHKPIDFYPMDVTYKEKTVTGSMCTTILDFEQVIEAYKKGLIDPREVETFITSKVHLEDGIEKGFRELLYNKDDHIKILLSPKERYKNTA

SEQ ID NO: 41729 - protein, 269 aa, Triticum aestivum
MQILNEQLAAPSTGLMVKESASPGSGSGSAGGAAEKMGRGRIEIKRIENTTNRQVTFCKRRNGLLKKAYELSVLCDAEVALIVFSGRGRLYEYSNNSVKATIERYKKATSDTSSAGTVAEINAQHYQQESAKLKQQITTLQNSNRTLIGDTMATMSHRDLKQLEGRLDKGLGKIRARKNELLCAEIEYMQRREMELQNNNFFLREKVAETERGQQQTLNMMGAASTSNEYEQNMIHCDPRTFLQFNFMQQQPQYYSQQEDRKSFNSVGR

SEQ ID NO: 41730 - protein, 311 aa, Oryza sativa (japonica cultivar-group)
MGRPPCCDKEGIKKGPWTPEEDIILVSYIQEHGPGNWRSVPINTGLMRCSKSCRLRWTNYLRPGIKRGNFTAHEEGIIVHLQSLLGNRWAAIASYLPQRTDNDIKNYWNTHLKKKLAAAANSTSSSNRHPIFADATFPSAAGGSYTVSSNSDVTQMAAIARRSPFADCPSSSYASSMDNISKLLDGFMKTNSPSPPPPPLQHYDSGYYDDVKPAVDVGGNPLLSSFDCMSGADLDCCFDVHQQHQQQQPASFMEYGGYGGGYGDESKQQLMNQAAPPLSSIEKWLFDEAAAEQVADLMDLSDGCCSVPMMF

SEQ ID NO: 41731 - protein, 970 aa, Hydrilla verticillata
MASTARNPNHLERMASVDAQLRMLAPSKVSEDDNLVEYDALLLDRFLEILQDLHGEDLRETVQSCYELSAEYESTLDPQKLEELGNMLTSLDPGDSIVVASSFSHMLNLGNLAEEVQIAFRRRIKLKKGDFADENSAATESDIEETLKKLVVQLKKSPQEVFDALKNQTVDLVLTAHPTQSIRRSLLQKHSRIRNCLAQLYAKDVTPDDKQELDEALQREIQAAFRTDEIRRTPPTPQDEMRAGMSYFHETIWKGVPKFLRRVDTALRNIGINERVPYNAPLIQFSSWMGGDRDGNPRVTPEVTRDVCLLARMMAANLYYSQIEDLMFELSMWRCSDELRVRATALHRSSRSVAKHYIEFWKQIPPNEPYRVILGEVRDKLYKTRERARQLLSNGFSDIPEESTFTNIEEFLEPLELCYRSLCSCGDQPIADGSLLDFLRQVSTFGLSIVKLDIRQESDRHTDVLDAITNHLGIGSYRDWSEEKRQEWLLSELRGKRPLFGPDLPKTDEIADVLDTMHVIAELPFDNFGAYIISMATAPSDVLAVELLQRECHVKKPLRVVPLFEKLADLETAPAAVARLFSIDWYLNRINGKQEVMIGYSDSGKDAGRLSAAWQLYKAQEELIKVAKQYGVKLTMFHGRGGTVGRGGGPTHLAILSQPPDTINGSIRVTVQGEVIEQSFGEERLCFRTLQRFTAATLEHGMHPPLSPKPEWRALMDEMAVVATDEYRSIVFKDPRFVEYFRSATPELEYGRMNIGSRPSKRRPSGGIESLRAIPWIFAWTQTKFHLPVWLGFGSAFKHVIDKDPKNLQMLQEMYNEWPFFRVTIDLVEMVFAKGDPGIAAMYDKLLVSKDLLPFGERLREKYTETKNLLLKVAGHKDLLEGDPYLRQRLQLRDSYITTLNACQAYTLKRIRDPGYNVQLRPHLSKEMVDSSKSAAELVKLNPGSEYAPGLEDTLILTMKGIAAGMQNTG

SEQ ID NO: 41732 - protein, 483 aa, Glycine max
MDYERIQKPQGGGGFSPGKLRSMLLGVEKKRKEEEELDSTFTTRSQNSDMDESGGSSSDHCKDVDVVSVLPEYSTSAIVRTSSVEAVGGDRFVKANAGVNSRSRILEDPSSDYDSGHDNMSMSSSMFEFQKAERAPQRVPVGPFSKPAPSKWDDAQKWIASPTSNRPKTAQTQGQGGHAGPRKAGSLGYGSRQSSMKVVVEVPDQKEIALDEPDTKKIDTNQTKMDSGGQKFVSWEADPYAIASFCARSVSMRDMGTEMTPIASQEPSRTGTPVRATTPMRSPNSSRPSTPPRASPASTLTDLHSDNLNLNMNELSEKELQMKTRREIMVLGTQLGKMNIAAWASKEEEDKDASTSLKTKAELPKSVVEARAAAWEEAEKAKYMARFRREEMKIQAWENHQKAKTEAKMRKIEVEVERIQGKAQDKLTNKLAAARHKAEEKRAAAEANRNHQAAKTEEQAEYIRRTGHVPSSYLSFSCCNWCS

SEQ ID NO: 41733 - protein, 314 aa, Lyngbya aestuarii PCC 7419
NGFGRIGRLVMRSAIKNPEIEFVAINDLVPAENLAYLFKYDSTHGKLESQVEAKDDHIIVDGHSIRCTSVRNPDQLPWKEMGVDYVVESTGLFTTYDGASNHLSAGAKRVIISAPTKDPDKVKTLLMGVNHEEFNPQDHLIVSNASCTTNCLAPVAKVIQDNFGLAEGLMTTVHSMTATQPTVDGPSKKDFRGGRGAAQDIIPASTGAAKAVTLVLPELKGKLTGMAFRVPTPDVSVVDLTFKTEKSTSYKEICAAMKAASEGPMKGVLGYTEDPVVSTDFITDSHSSIFDADAGMELNSNFFKVVSWYDNEWG

SEQ ID NO: 41734 - protein, 85 aa, Helicosporidium sp. ex Simulium jonesii
GQTVVYSKYAGTEIRFQDADHIILKEDDVIGVLEGEDVSALQPLQDRLLVRVAEAADQTAGGVYLTEASKDQPTLGVVVAAVRQR

SEQ ID NO: 41735 - protein, 330 aa, Bradyrhizobium japonicum USDA 110
MRAVLVRQPGGPDALELVELPVPVPGAGQVQIRAEAFGVGQPDALIRRGVYKWMPPLPANPGNDVAGRISALGPGVEGLAVGQKVLLSARDLSQRGGCYADYVVAPADAVHALPDHVDLQAAVCLSNYQVAYALLHECRHPRAPTSVLVIGAAGGVGTALVQLAKLAQMTVIGTVSTEAKAEFAKANGADHIIFYRREDVVARTRELTNGEGVGLVLDHVCGPEFTAYLGALGKWGTLLSYNAFAGLPEENLMVAMRNHLDICPAVRCFSFHIYDHDRDGRRALMRSVIEALSRNAIKPAVSAVLKLDQVRQAHALLEQGAALGKIIMTP

SEQ ID NO: 41736 - protein, 678 aa, Bordetella bronchiseptica RB50
MSNPTAPKLALADAIRVLAMDAVQKANSGHPGAPMGMAEIAQALWLGNLRHNPADPAWANRDRFVLSNGHGSMLIYALLHLTGYDLPLEELKNFRQLHSRTPGHPEVGITPGVETTTGPLGQGLANAVGMALAEALLAAEFNRAGHTVVDHHTYVFLGDGCLMEGISHEACSLAGTLKLSKLVALYDDNGISIDGHVEHWFADDTATRFEGYGWNVIRGVDGHDVAAVDAAIKQARAQSEKPTLIVCRTVIGKGSPNMAGTHNVHGAPLGNDEIAATRAALGWSAGPFEVPQDIYAAWDSRPAGALAQAAWEDKFQAYAAQYPAEAAEFTRRMKGELPEGFAARFEAFLQATVAKGETVATRKASQFAIAELAGLLPEMLGGSADLTGSNFTDWKGVAPLRAGHHGVHFGRHINYGVREFGMAAIMNGIALHGGYLPFGGTFLTFSDYSRNAIRMAALMKQRVVHVFTHDSIGLGEDGPTHQSIEHAASLRLIPNLSVWRPCDTVETAAAWGAAVTRPASIGMDVHDGGPTALLLSRQNLPFVARDEATQKAIVRGGYVLRDAHDARAAIIATGSEVAIALAAQELLAADGIAVRVVSMPSTDVFDRQDAEWKREVLPAGMPRVAVEAGVTAFWHKYVGLEGAVVGIDRYGESAPAGALFKFFGLTAEKVAEAVKQVL

SEQ ID NO: 41737 - protein, 589 aa, Saccharomyces cerevisiae
MTISSAHPETEPKWWKEATIYQIYPASFKDSNNDGWGDMKGIASKLEYIKELGADAIWISPFYDSPQDDMGYDIANYEKVWPTYGTNEDCFALIEKTHKLGMKFITDLVINHCSSEHEWFKESRSSKTNPKRDWFFWRPPKGYDAEGKPIPPNNWRSYFGGSAWTFDEKTQEFYLRLFCSTQPDLNWENEDCRKAIYESAVGYWLDHGVDGFRIDVGSLYSKVAGLPDAPVIDENSKWQPSDPFTMNGPRIHEFHQEMNKFIRNRVKDGREIMTVGEMQHATDETKRLYTSASRHELSELFNFSHTDVGTSPKFRQNLIPYELKDWKVALAELFRYVNGTDCWSTIYLENHDQPRSITRFGDDSPKNRVISGKLLSVLLVSLSGTLYVYQGQELGEINFKNWPIEKYEDVEVRNNYDAIKEEHGENSKEMKRFLEAIALISRDHARTPMQWSREEPNAGFSGPNAKPWFYLNESFREGINAEDESKDPNSVLNFWKEALRFRKAHKDITVYGYDFEFIDLDNKKLFSFTKKYDNKTLFAALNFSSDSIDFTIPNNSSSFKLEFGNYPRSEVDASSRTLKPWEGRIYISE

SEQ ID NO: 41738 - protein, 265 aa, Mycobacterium tuberculosis
MANTGSLVLLRHGESDWNALNLFTGWVDVGLTDKGQAEAVRSGELIAEHDLLPDVLYTSLLRRAITTAHLALDSADRLWIPVRRSWRLNERHYGALQGLDKAETKARYGEEQFMAWRRSYDTPPPPIERGSQFSQDADPRYADIGGGPLTECLADVVARFLPYFTDVIVGDLRVGKTVLIVAHGNSLRALVKHLDQMSDDEIVGLNIPTGIPLRYDLDSAMRPLVRGGTYLDPEAAAAGAAAVAGQGRGGVPRGAAALEHHHHHH

SEQ ID NO: 41739 - protein, 260 aa, Arabidopsis thaliana
MAEEYKNTVPEQETPKVATEESSAPEIKERGMFDFLKKKEEVKPQETTTLASEFEHKTQISEPESFVAKHEEEEHKPTLLEQLHQKHEEEEENKPSLLDKLHRSNSSSSSSSDEEGEDDEKKKKEKKKKIVEGDHVKTVEEENQGVMDRIKEKFPLGEKPGGDDVPVVTTMPAPHSVEDHKPEEEEKKGFMDKIKEKLPGHSKKPEDSQVVNTTPLVETATPIADIPEEKKGFMDKIKEKLPGYHAKTTGEEEKKEKVSG

SEQ ID NO: 41740 - protein, 422 aa, Ehrlichia canis str. Jake
MTTRRIVITGLGLVTSLGSDVKTVWDLLSNGVSGISKINRFDTSDLDCKIAGQVIMKSESEEYVFNAADYIPEKDLKKMDNFIHFGIAAATQAVNDSNLLDCKDLDYDRVGVIVGSGIGGLPFIEKTVICLQERGPRRISPFFIPASLINLVSGHISIKYGFTGLTDAVVTACSTGAQAIGNAARVIQSGEADVIIAGGAEGAVCRIGIAGFSAMKALSTKFNDTPELASRPWDKQRDGFVMGEGAGIVILEDYEHAKKRGAKIYGELLGYGMTSDAYHISAPHPEGKGGMKAMELALSSAQLNPESINYINAHGTSTPLGDSTEIQAIKSIFKESIYKVPISSTKSSIGHLLGAAGSVEAIFSILAMNTSITPPTLNLYESSEDPQLNLVPLNAQEHKINYCLSNSFGFGGVNISLVFGKL

SEQ ID NO: 41741 - protein, 917 aa, Pseudomonas chlororaphis
MLKKLGIKGRVLLLTLLPTSLMALVLGGYFTWMQQSDLQTQLLQRGEMIAEQLAPLVAPALAHQNTALLERIATQSLEQQDVRAVSFLAPDRTPLAHAGPSMLNQAPTGNGSQMLQRTGSDATRYLLPVVGRHRNLAGDLIPDESDRLLGWVELELSHNSMLLRGYRSLFASLLLITAGLICTGLLALRMGRTINNPLSQIKQAVTQLKDGNLETRLPLLGSQELDELASGINRMAGTLQNAQEELQHSIDQATEDVRQNLETIEIQNIELDLARKEALEASRIKSEFLANMSHEIRTPLNGILGFTHLLQKSELTPRQLDYLGTIEKSADSLLGIINEILDFSKIEAGKLVLDSIPFNLRDLLQDTLTILAPAAHAKQLELVSLVYRDTPLSLVGDPLRLKQILTNLVSNAIKFTREGTIVARAMLEEEHEDSVQLRISIQDTGIGLSNQDVRALFQAFSQADNSLSRQPGGTGLGLVISKRLIEQMGGEIGVDSTPGEGSEFWISLRLPKTRDDAEDLPAPPLLGRRVAVLENHELARQALQHQLEDCGLEVTPFNTLEALTNGVTGVHQTEQAIDLAVLGITTNDMPPERLNQHIWDLEHLGCKVLVLCPTTEQTLFHLSVPNPHSQLQAKPACTRKLRRALADLVNPKAVRSEPSEPIASRPPRVLCVDDNPANLLLVQTLLEDMGAKVLAVDSGYAAVKAVQNESFDLVMMDVQMPGMDGRQSTEAIRQWESERNCTPLPVIALTAHAMANEKRALLQSGMDDYLTKPISERQLAQVVLKWTGLALRNQGPERTGEPSGNGHELQVLDHDEGLRLAAGKADLAADMLAMLLASLEADREAIRAARAANDHNALIERVHRLHGATRYCGVPQLRAACQRSETLLKQEDIKAFAALDELERAINRLATEARINA

SEQ ID NO: 41742 - protein, 597 aa, Penicillium minioluteum
MGSISEISQSTAAPKQSRMAAWWKESTVYQIYPASFKDSDGDGVGDLKGIISKLDYIQTLGVDIVWLNPIFSSPQVDMGYDISDYYDIHPPYGTMEDVNVLADGLQKRGMKLLMDLVVNHTSDQHPWFQDAISSVSNPRRDWYIWKKPIIDKDGKPQPPNNWRSYFGGSAWEYDDRSGEYYLHLFAKEQPDLNWENVEVRKAVHRIIRFWLDKGVHGFRMDVINFISKDQSFPDGAIVSDSKWQNGSAHYACGPRLHEYLQEIGAILKEYNAFSVGEMPEVNDCDEIIKAVGFERGELNMIFHFEIVNLDHGENDKITPKNWNMQELKSVVSKWQKFMLENDGWNALYLENHDQPRIVSRFGSDQPEYRELSAKMLAAFLGFQSGTLFIYQGQELGMPNVPRHWGIDQYRDIETLNHWKEVVSEGLADPIVSLGEYRLKSRDNARTPMQWDGSANAGFSTSTPWISVHDDYTTLNAAAQLADKHSVYHFWSTILGLRKAFPDVLVYGSSTSFPVSIRICSATCECQIAAEWRLLSSTFARGLSHGPPLQFSKIKSGGIVLSNYPGRRSLKCISEEPLNLEPLETFLWLEDMEESSRL

SEQ ID NO: 41743 - protein, 432 aa, ASPERGILLUS NIDULANS FGSC A4
MGSIGANNAVADPTPLFSSRVQKWEPGAIRSLLPLEALPGMISLVAGKPSPETFPIAEIAISLKDTPAGTGRIVVDGDELNQALQYGLPRGNAQLIQWFESLQRSVHGLDENGGWSCCIGNGSQELIHRVIQVFTDPGDPVLLETGVAGFLRADGQELIPVYSDAQGLNPASLEQALSEWPGDSPRPKVLYTTPTGSNPTGQSCTESRKAEILRLAKRFNFIILEDDAYYYLNYGDDKQRARSYLALERDVNGESGRVVRFDSLSKIVSPGMRLGILTAQAAVVDKVVRITENINLQPSSTTQLLALSLLRHWGQAGFLKHCAEAAEVYRRRRDVFVSAAERHLQGRATWVVPTAGMFVWLELKLPPEMDSFELLKSQGMKNGVLAIPGVAFMPGNEQTCYIRVSFSLVPERDMDEACRRIAGLVDRCACHS

SEQ ID NO: 41744 - protein, 287 aa, Streptococcus agalactiae NEM316
MTSNKKVAIAFILNISFSVLEFIFGSLFFSGAILADAVHDFGDAIAIGISATLEKKSKKDEDTIFSLGYKRFSLLGALITSLILISGSILVMIENIPKLWHPTPVNYHGMFILAVIAIIINGLASFILHSGQSKHEEILSLHFLEDILGWLAIIVISLILNWKPLYILDPLLSVAISTFILSKALPKLLSTLKLFLDGVPDSIDYAALHDELKGLSQVRSINQLNIWSMDGIDNRAIIHCCLNQLISEKDCKRAIRTICQHYKINDVTVEIDYSLREHQNHCKPLKN

SEQ ID NO: 41745 - protein, 364 aa, Euphorbia tirucalli
SDSGKDAGRLSAAWQLYKTQEELVKVAKQYGVKLTMFHGRGGTVGRGGGPTHLAILSQPPDTIHGSLRVTVQGEVIEQSFGEEHLCFRTLQRFTAATLEHGMHPPVSPKPEWRTLMDEMAIMATKEYRSIVFQETCFIEYFRRATPELEYGRMNIGSRPSKRKPSGGIESLRAIPWIFAWTQTRFHLPVWLGFGAAFKHVIEKDVKNLHMLQDMYNQWPFFRVTIDLVEMVFAKGDPGIAALYDKLLVPEELRPFGEQLRHNYEETKQLLLQIAGHKDLLEGDPYLKQRLRLRDAYITTLNVCQACTLKQIRDPDYHVTVRPHLSKEYIESSKPAAELVKLNPTSEYAPGLEDTLILTMKGIAA

SEQ ID NO: 41746 - protein, 212 aa, Zea mays
EACYNYGFLPADRGKHQPPPAPHATLPHAAADFLCISEDAGELWEYFPCPFCYIEVEVPFICNHLQEEHCFDTRNAVCPICANNLGKDMAAHFRLQHTHLLKRRKPYRPSSCPAAATSPATYQVNSYYEEAEPQQHYSRPYKDPAPDPLLSQFICSVDAIPGDDNAQKDDQRLKLNNKGATASDDDASSKLGLEERLQRIDFLTEILMSTIL

SEQ ID NO: 41747 - protein, 457 aa, Schizosaccharomyces pombe
MATQDADIIIIGAGITGCALGAALGRQGRKVLVLERDMSEPDRIVGELLQPGGIEALEKIGIADAVEGIDGQWTSGYQIFYGDSNVSVPYPSKPNGGAYQGIGFHYGRFVMNLRKALTSTPNVTVTEATVNELLRDETGEVITGVVTSSKKSESPVEYKAPLTIVCDGCFSKFRKAFIDHPIQVTDHFLGLILTNPDYIAPGRGHVILSKVAPMVLYPISSTEARILINYPGKNLPPMETLKKYVLESCVPNMPEKLRPSLKAAVYNDRLRSMPNQFLPPTVNRTKGMILVGDSNNMRHPLTGGGMTVCFHDAYLLSRFISPSAVPDLLDYERILNQMNKFHWKRKGYSFVINVLSIALYKLFTPKNRYMKALESGCIDYFKRGGNCVEGPIRLLGGLDHSPSHLIGHFYAVCLYGIYQYVLSGPALLMPVRIIESLLIFLQASLVIIPYILSEMSS

SEQ ID NO: 41748 - protein, 452 aa, Thermobifida fusca YX
MSANLDEKLSPIYEEILRRNPGEVEFHQAVREVLECLGPVVAKNPDISHAKIIERLCEPERQLIFRVPWMDDSGEIHVNRGFRVEFSSSLGPYKGGLRFHPSVNLSIIKFLGFEQIFKNSLTGLPIGGAKGGSDFDPKGRSDAEIMRFCQSFMTELYRHLGEHTDVPAGDIGVGQREIGYLFGQYKRITNRYESGVFTGKGLSWGGSQVRREATGYGCVLFTAEMLRARGDSLEGKRVSVSGSGNVAIYAIEKAQQLGAHVVTCSDSNGYVVDEKGIDLELLKQVKEVERGRVSDYAKRRGSHVRYIDSSSSSVWEVPCDIALPCATQNELTGRDAITLVRNGVGAVAEGANMPTTPEGIRVFAEAGVAFAPGKAANAGGVATSALEMQQNASRDSWSFEYTEKRLAEIMRHIHDTCYETAERYGRPGDYVAGANIAAFEIVAEAMLAQGLI

SEQ ID NO: 41749 - protein, 364 aa, Euphorbia tirucalli
SDSGKDAGRLSAAWQLYKTQEELVKVAKQYGVKLTMFHGRGGTVGRGGGPTHLAILSQPPDTIHGSLRVTVQGEVIEQSFGEEHLCFRTLQRFTAATLEHGMHPPVSPKPEWRTLMDEMAIIATKEYRSIVFQETCFIEYFRRATPELEYGRMNIGSRPSKRKPSGGIESLRAIPWIFAWTQTRFHLPVWLGFGAAFKHVIEKDVKNLHMLQDMYNQWPFFRVTIDLVEMVFAKGDPGIAALYDKLLVPEELRPFGEQLRHNYEETKQLLLQIAGHKDLLEGDPYLKQRLRLRDAYITTLNVCQACTLKQIRDPDYHVTVRPHLSKEYIESSKPAAELVKLNPTSEYAPGLEDTLILTMKGIAA

SEQ ID NO: 41750 - protein, 287 aa, Glycine max
MASTFSRSLALVSFYIVVCAAGNLNQDFQLTWGDGRAKILNNENLLTLSLDKASGSGFQSKNEYLYGKIDMQLKLVPGNSAGTVTAYYLSSKGSTWDEIDFEFLGNLSGDPYILHTNVFSQGKGNREQQFYLWFDPTADFHTYSILWNPQRIVFSVDGTPIREFKNLESIGVPFPKSQPMRIYSSLWNADDWATRGGLIKTDWSKAPFTASYRNFNANACVWNSGKSSCKSNSSPSSASPTNAWLSQELDSTAQQRLRWVQKNYLIYNYCTDNKRFPQGLPLECKHS

SEQ ID NO: 41751 - protein, 364 aa, Euphorbia tirucalli
SDSGKDAGRLSAAWQLYKTQEELVKVAKQYGVKLTMFHGRGGTVGRGGGPTHLAILSQPPDTIHGSLRVTVQGEVIEQSFGEEHLCFRTLQRFTAATLEHGMHPPVSPKPEWRTLMDEMAIIATKEYRSIVFQETCFIEYFRRATPELEYGRMNIGSRPSKRKPSGGIESLRAIPWIFAWTQTRFHLPVWLGFGAAFKHIIEKDVKNLHMLQDMYNQWPFFRVTIDLVEMVFAKGDPGIAALYDKLLVPEELRPFGEQLRHNYEETKHLLLQIAGHKDLLEGDPYLKQRLRLRDAYITTLNVCQAYTLKQIRDPDYHVTVRPHLSKEYIESSKPAAELVKLNPTSEYAPGLEDTLILTMKGIAA

SEQ ID NO: 41752 - protein, 365 aa, Euphorbia tirucalli
SDSGKDAGRLSAAWQLYKAQEELIEVAKKHGVKLTMFHGRGGTVGRGGGPTHLAILSQPADTIQGSLRVTIQGEVIERSFGEAQLCFKTLQRYTAATLEHGMIPPLTPKPEWRALMDEMAVVATERYRSIVFREPRFVEYFRLATPELEYGRMNIGSRPSKRKPSGGIESLRAIPWIFAWTQTRFHLPVWLGFGEAFKHVIDKDNKNLLMLQQMYNEWPFFRVTIDLVEMVFAKGNPGIAALYDKLLVSEELLPLGEELRTAYNDTKSYLLKITGHNEILEGDPFLKQRLKLRTAYITTLNVCQAYTLKRIRDPSYQVPVRPPIAKEISESSVSSANQLVKLNPTSEYAPGLEDTLILTMKGIAA

SEQ ID NO: 41753 - protein, 1132 aa, Bdellovibrio bacteriovorus HD100
MNHKNRLFLFTSVLVLGTLLIAGTVGYKMGSSSLEQSTRERLVQIRDFKSDEIQKEFAYLKNALVLTSEYTPILQFLRRYPQEHQQMQSWLRSHGKATAWRNEMEEHRPPQVSDYPRILEQFTALPLFLQYQFQQSARSQNRPLPQLASVNGFSDLNYFRSYESLHSKLFDVLERSHLNDVLLIEPNGTVAYSAAKSLALGDNLISGPLSNSRLAQAYRWSLNAPKGATKYFDFTPVSHFWHTPAAFLTMPLFDQTNFVGTLVFQLSLERIDQILSHNSKWKELGLGMTGEVVAFGTDGFVRNNPRLYLESPVQFLQKVRQQEDARAALESIERSSSASLSLILPPTQIRRYMERGVAFDSGEDYMGTRSLQSAGRVNVVDNTDWIIISKMDLNEALAPLSFKLPWFFIGGFLLWSLALGGAWLVYRRMFFPSQVLSDGMDKLKSHNFSETLQAPEEEEYKDLYKKFDEIREDFRKTKAARDFLENVVYSLNEVFFIVEVEDVEDSLRKNFRVRGFNPTAQSLTGAPGPALKNSDLSLWLETDYSVIENSLRERDANKSTHTAEASLKKITGDRVPLEVSWARVNTENKDKVLLAMMGTDMRWKKEIEKELKLKEELLKESQSLSKTGSFRWDIRTGKCLWSEEEFHLLGLTPDNVVPSYDLFRSLILSEDLPVFDKALAEAHKNIAPFHVDLRMKKQDSNDLIWVRCQGRTEYDDYGNALFMYVTTQDITELRRVEQSLITTKNEALKASQAKSEFLAQMSHEIRTPMNAIMGMAELLKETRLDVDQKYYVTIFCKAGEVLMSLINDILDLSKIEAGEVSIENIPFDMKKLMADVEDMMKPRALEKGLNCICEIAPGVSPHLMGDPTKLRQVLINLIGNSIKFTNKGQVRLVIGKNPSKKDTLLISITDTGIGIPEDRQHMIFQKFSQADNSVTRKYGGTGLGLAISKSLVELMGGQIWFKSRPGTGTTFFFTIPYREQIYNPVNYMPVPMRTPELDFVSPKPRDPNHKVKILIADDTEDNRTLFTHYLKNEPFEIIEAENGLQAIDQIKSGEFDIVFMDVQMPEMDGYAATDRIREWEKESHKPPVPIIALTAHALAEDRQKSLRAGCNDHIAKPFKKDTLLGVINKYSL

SEQ ID NO: 41754 - protein, 287 aa, Glycine max
MAIQDQNGFFRSQGGPPEEGGVSLSSGHSVTHIQLNDQFSCGNDYALKVRKPYTITKQRERWTDEEHKKFLEALKLYGRAWRRIEEHVGTKTAVQIRSHAQKFFSKVLHDPTGNNTNTVESIEIPPPRPKRKPMHPYPRKLVETPNKEISIPEQPMKSNSLKSSDFDQENQSPKSVLSGVGSDSLGSSDSDTPNGSLSPMSSISGFHTSSFTRAKPKTTTSEEEAGMDTDSTHDEKPLMKFKLPPNGCVSIKEDNTAEESSGRTFKLFGMTLFVTDTCKPSPTIEEC

SEQ ID NO: 41755 - protein, 365 aa, Microcoelia exilis
SDSGKDAGRLSAAWQLYKAQEDLVKVAKEFGVKLTMFHGRGGTVGRGGGPTHLAILSQPPDTIHGSLRVTVQGEVIEQSFGEEHLCFRTLQRYTAATLEHSMCPPASPEPEWRELLDEMAVAATKEYRSIVFHEPRFVEYFRLATPELEYGRMNIGSRPSKRKPSGGIESLRAIPWIFAWTQTRFHLPVWLGFGAAFKHVIDKDIKNLLMLQEMYTRWPFFRVTIDLVEMVFAKGDPGIAALYDKLLVSEDLWPFGEQLRNNYNETKNLLLQVAGHKDLLEGNPYLRQRLRLRDSYITTLNACQAYTLKRIRDPSYQVPVRPPIAKEIMEGSVSSANQLVKLNPTSEYAPGLEDTLILTMKGIAA

SEQ ID NO: 41756 - protein, 576 aa, Ustilago maydis 521
MEGTSPFFLGLDASTQALKASLLDVDLNVLSELEIRFDRDLPQYKTTGGISAPAADDDQGTVVAPVMLYVESIDMLAERMRSASWPLSRIRAISAAGQQHASVYFSRAAPRIFTTLSAEKTLTEQVEQAFSRKVVPNWQDSSTVDACKAFEKAVGGAEKLAQMTGSKAHTRFTGPQIYKFRTQQPQAYKDTERIGLVSSFITTLLCVGQGEDESSVIKGIDEADACGMNLLDMRPASSITATKGRIEPGWNQTLLALASGESEGSDASLGGAVELERKLGSIYRDAGTPVAKIGSWWTKKYGFSPDCHVFPGTGDNPATFLAFSLAEREAIISLGTSDTVMVATHQFVPDPDFHAFFHPARLPSSGDAFFNMLVYKSGSLAREWIRDQYCNSDWAAFNADVEKFKLQQDGEQRAGFYWLRPEIIPPGASGIYRYIKPSTCGEWQKVDDFSDKGMNASGILETQMLNYRYRSSSIVAGPTTSSGSAVDTSVLPLQAIYAVGGASSNPTITQTMADVFGCDIVKPVQPAQDGKEWTPANYNFCSVGAAYKAAWGWSRLQLKAGEKPGEACRVSARGNG

SEQ ID NO: 41757 - protein, 540 aa, Arabidopsis thaliana
MRRFLINQAKGLVDHSRRQHHHKSPSFLSPQPRPLASSPPALSRFFSSTSEMSASDSTSSLPVTLDSINPKVLKCEYAVRGEIVNIAQKLQEDLKTNKDAYPFDEIIYCNIGNPQSLGQLPIKFFREVLALCDHASLLDESETHGLFSTDSIDRAWRILDHIPGRATGAYSHSQGIKGLRDVIAAGIEARDGFPADPNDIFLTDGASPAVHMMMQLLLSSEKDGILSPIPQYPLYSASIALHGGSLVPYYLDEATGWGLEISDLKKQLEEARSKGISVRALVVINPGNPTGQVLAEENQRDIVNFCKQEGLVLLADEVYQENVYVPDKKFHSFKKVARSLGYGEKDISLVSFQSVSKGYYGECGKRGGYMEVTGFTSDVREQIYKMASVNLCSNISGQILASLVMSPPKPGDDSYDSYMAERDGILSSMAKRAKTLEDALNSLEGVTCNRAEGAMYLFPRINLPQKAIEAAEAEKTAPDAFYCKRLLNATGVVVVPGSGFGQVPGTWHFRCTILPQEDKIPAIVNRLTEFHKSFMDEFRN

SEQ ID NO: 41758 - protein, 602 aa, Candidatus Blochmannia floridanus
MSYYNHLQIKEFFSVVIGAGGAGMRVALHISKMGFSCALISKVFPTRSHTVSAQGGITVALGNSHEDHWEWHMYDTVKGSDYLGDQNAIEYMCKTGPKAVLELEHMGLPFSRCKNGRIYQRPFGGQTLFYGKKQAARTAASADRTGHALLHTLYQQNLKNKTTIFSEWYALDLVKNQDGRILGCIAFSIETGELVYFKARATVLATGGGGRIYQSTTNAYINTGDGIGMALRAGIPVQDMEMWQFHPTGIAGIGILVSEGCRGEGGYLLNVHGERFMKRYAPNVKDLAGRDVVSRAILIEIKEGRGYFDDVYGPHVKLKLDHLGKELLELRLPGILELARTFAYVDPVTELIPVFPTCHYMMGGIPTTIYGQVITVDNNNKNAEGSDKIVPGLFAVGETACVSVHGANRLGGNSLLDLIVFGYSTGSYIQKYLEEEEWPVRNATNSDIELALARYTKWNNNQPSLHKENIVKIRQDLQWCMQNNFSVFREEKKMLEGLEEIKEIHNRLNNVVLQDTTSIFNTQRIECLELDNLLETAYATAVSAIFRTESRGAHSRYDFPFRDDKHWLYHTLFLPQHNILIRRNVNMKPRFRSYFPPQTRTY

SEQ ID NO: 41759 - protein, 533 aa, Schizosaccharomyces pombe 972h-
MKASFFVFAISALQALQASVASAYSEVPGKRSVVLNLQHSQYDHVARKLERTKVLNKRDSSGYPVLDLEYTDAGGYFANLTLGSNERVYSLTLDTGSPYTWVTAKNITALSASEIWSDTDGVDAGRSTSDIRTNACTNYTCFDYSSTTARRTNSSTIGFLASYGDNTTVLGYNMVDNAYFAGLTLPGFEFGLATREYDSSQISVTPGIIGLSVAMTITGISSDDKVVAFTPPTIVDQLVSANVIDTPAFGIYLNEDVGELIFGGYDKAKINGSVHWVNISSSDDSTFYSVNLESITVTNSTSSNNVQSSKRSSKDIEVNTTVTLDTGTVYIYLPEDTVESIADQYQGIVSEYGYVVIYCDSFSDSDYISFNFGSDADFHVSVNDLVIYRQESTSGDICYLALFEGDTSSYLLGQYFLQYVYSIYDWDAQKIGLAALNSNATSTANHQILNINSALRSVTSGQSVSATPTVSMSIAATSFGSSLVLTASASPSSTSVDGSSSSDSSEASGAASVGVSISAIVLCASTLISLLFA

SEQ ID NO: 41760 - protein, 681 aa, Oryza sativa
MLLSSASRALAAAKPRSPEPFAAAAAVLLRRQLAAGMAAAPASSASAAGNREAFRVAVTNTLERRLFYVPSFKIYGGVAGLYDYGPPGCAVKANVLAFWRQMCRSTRYLHFVLEEGMLEVDCPCVTPEVVLKASGHVDKFTDLMVKDEKTGTCYRADHLLKDFCKDKLEKDNTLSPEKTAEFNHVLAVLDDLSAEQLGAKIKEYGIVAPDTKNPLSDPYPFNLMFQTSIGPSGLSPGYMRPETAQGIFVNFKDLYYYNGNKLPFAAAQIGQAFRNEISPRQGLLRVREFTLAEIEHFVDPEDKSHPKFRDVSDLEFLMFPREQQLTGKSAMKLNMGQAVSEGTVNNETLGYFIGRVYLFLTQLGIDKDRLRFRQHLPNEMAHYAADCWDAEIECSFGWIECVGIADRSAYDLRAHSDKSGVALEAHEKFAEPREVEKLVITPSKKELGLAFKGNQRMVLEALEAMSETEALNMKSALESKGEVEFKVCTLGKDVTIKKSMVSINMEKKKEHQRKFTPSVIEPSFGIGRIIYCLFEHCFYQRPGKAEDEQLNVFGFPPLVAPIKCTVFPLVKIEKFEVVAKKISKALTAAGISHIIDMTGNTIGKRYARTDEIGVPLAITVDNTTSVTVRDRDSKDQIRVEVDEVASVVKEVTDGQSTWADIMWRYPAHTASAAEEEEASET

SEQ ID NO: 41761 - protein, 606 aa, Saccharomyces cerevisiae
MLETDHSRNDNLDDKSTVCYSEKTDSNVEKSTTSGLRRIDAVNKVLSDYSSFTAFGVTFSSLKTALLVALFLQGYCTGLGGQISQSIQTYAANSFGKHSQVGSINTVKSIVASVVAVPYARISDRFGRIECWIFALVLYTIGEIISAATPTFSGLFAGIVIQQFGYSGFRLLATALTGDLSGLRDRTFAMNIFLIPVIINTWVSGNIVSSVAGNVAPYKWRWGYGIFCIIVPISTLILVLPYVYAQYISWRSGKLPPLKLKEKGQTLRQTLWKFADDINLIGVILFTAFLVLVLLPLTIAGGATSKWREGHIIAMIVVGGCLGFIFLIWELKFAKNPFIPRVYLGDPTIYVALLMEFVWRLGLQIELEYLVTVLMVAFGESTLSAQRIAQLYNFLQSCTNIVVGIMLHFYPHPKVFVVAGSLLGVIGMGLLYKYRVVYDGISGLIGAEIVVGIAGGMIRFPMWTLVHASTTHNEMATVTGLLMSVYQIGDAVGASIAGAIWTQRLAKELIQRLGSSLGMAIYKSPLNYLKKYPIGSEVRVQMIESYSKIQRLLIIVSISFAAFNAVLCFFLRGFTVNKKQSLSAEEREKEKLKIKQQSWLRRVIGY

SEQ ID NO: 41762 - protein, 509 aa, Vicia faba
MLQRSRTLPSKIYQGVIEERKDGRHYIELEPLPKMETETKPITIQSKCLDDDGRVKRTGTFWTASAHIITAVIGSGVLSLSWAIAQLGWAVGPVVMVLFAVVNLYTSTLLTQCYRSDDSVAGPRNYTYTDAVKSILGGKKFKICGVIQYVNLFGVAIGYTIAASVSMMAIKRSNCYHESHGNDPCHMSSNVYMIAFGIAEVILSQIPDFDQVWWLSIVAAIMSFTYSAVGLGLGVAKVAENGTFHGRLMGISIGTVTPAGTVTGTQKVWRSLQALGAMAFAYSFSIILIEIQDTIKSPPAEHKTMKKATMLSIMVTTVFYILCGSMGYAAFGDHVPGNLLTGFGFYNPYWLLDIANFAIVVHLVGAYQVFSQPFFAFVEKWSAHKWPKNKFVTEEYDIPIPCIGVYKLNLFRLIWRTIFVLLTTLIAMLLPFFNDVVGLLGAFGFWPLTVYFPIDMYISQKKIGRWTNRWLGLQMLSGCCLIISTLAAVGSIAGVVLDLKTYKPFKTSY

SEQ ID NO: 41763 - protein, 271 aa, Fragaria x ananassa
ERKEIRAAYEQLYQEDLLKPLESELSGDFEKAVYRWTLDPADRDAVLANVAIKKSTDVYNVIIEISCIHSPEELLAVRRAYQLRYKHSVEEDLAAHTTGDIRKLLVALVTAYRYDGHEINAKLANSEADILHDAIKDKAFNHEEIIRILSTRSKTQLMATFNKYRDDQGISISKNLLEEGANDFQKALHTAIRCLNDPKKYFEKVLRNAIKRVGTDEDALTRVIVTRAERDLRDIKEVYYKKNSVPLEQAVAKDTSGDYKAFLLTLLGKED

SEQ ID NO: 41764 - protein, 213 aa, Magnetospirillum magnetotacticum MS-1
VPSAVSLAAFAAARAMSTRNDEPERASRPFDVDRDGFVMGEGSTLLVLEREDHARARGAVVHGVVSGAALTSDAYDIVGGDPENQARTITMALRSAGLSPEDVGLVHAHATATPVGDVNEADALRAALGMPPPVTSTKGATGHLLGASGALGVLVALLALRDGRVPPTLNVDTLDPAIDLDVVREAATTSARHALVDAFGFGGHSSSVVVSRD

SEQ ID NO: 41765 - protein, 283 aa, Zea mays
  misc_feature (168)..(168): Xaa can be any naturally occurring amino acid
  unsure (1)..(283): unsure at all Xaa locations
VSQWILCSLYFLVEIRLLKARRGGRTNGLGAIGAVEKHNVHPLELPLIKHVEGPDTDRLSDVLRNDKFDWIIVTSPEAAAVFLQGWKTAGSPKVRVAVVGEGTARVFHEVSESDDQSLELAFSPSKALGKVLASELPRSNGNSCKVLYPASAKAGHEIGFMILDYLQXEDVLSERGFDVTRLNTYTTVPVEDVDPLTLNLAISAPVVAVASPSALRAWLNLISKSDNWNNSVACIGETTASAAKKLGLKSIYYPTTPGLEGWVESILEALRVHRTASKEAPKR

SEQ ID NO: 41766 - protein, 163 aa, Klebsiella pneumoniae
DKVNLSIGLYYNDDGIIPQLQAVAEAEARLNAEPHGASLYLPMEGLSGYRQAIAPLLFGAEHTQLKQNRIASIQTVGGSGALKVGADFLKRYFPESHVWVSDPTWENHIAIFEGAGFEVSTYPWFDKATNGVRFEDLLATLQTLPARDIVLLHPCCHNPTGAD

SEQ ID NO: 41767 - protein, 367 aa, Methanosarcina acetivorans C2A
MKCMIIGGFLGSGKTTTIRKLVEYLGAQGQRTAIIVNEIGEVGIDGETISGEGVETREITSGCICCTLRISMEYTLRNLMASYHPDTIIVEPTGIAFPRQIKSNIESMGLPEISFTPIVNLVDPSSLSPNVEDLQNFVRNQKEDAEILGINKVDLIGQEKLLETCLLLRKLNPRARIVHFSARQGGEGLDKFFRLAGVSSQDKTACEMRNSVKAKNSIEARNSVEMSGVSAYSTEFEITSQEISLETAVSVSGQILDSIRKRVTQLNPEFTGHIKLSFAHKENFVKGSVTSAHEKPEIEILKKEKNSRSRLKIISAVASVPREELIRTVDTTASGKLEDRQLSYIKAEKSNHGYSQTPISSLKQENF

SEQ ID NO: 41768 - protein, 409 aa, Arabidopsis thaliana
MTKISDLPRDLAEEVLSRVPVTYLRAIRFTCKKWNTLTKRRSFTKKLIGQEKAEAKVKEFHAIMTLNSRLHLMSVNLDGIHKDENVESSIKQKGKLISLTVADPDRIVISQVYHCDGLLLCITNEINSRLVVWNPYSGQTRWIEPRTSYREWDIYALGYESKNNAKRSYKILRYLDAYEDMGDMSVEPRTRVCEFEIYSLDTNSWKVIEVTTDWDLCFLHRGVTLKGNTYWFAREKIPPPPRERVIEDIPLGEAEINVEIPSFLLCFDFTIEKFGSRLPLPFRPCVDDTITLSSVREEKLAVLYQRWDITWTGIWISNKIEPNAVSWSKLFFPMGRIRPLEAASGTFFVDEENKLVVLFDKGESILNPTRNTAYIVGEDGYIKPVDLGESVHKYCFPLACSYVPSSVQI

SEQ ID NO: 41769 - protein, 364 aa, Glycine max
MDTFSHVPPGFRFHPTDEELVGYYLRKKVASKRIDLDVIKDVDLYKIEPWDLQELCKIGTDEQSDWYFFSHKDKKYPTGTRTNRATKAGFWKATGRDKAIYSKHCLIGMRKTLVFYKGRAPNGQKSDWIMHEYRLETNENGTSQEEGWVVCRVFKKRMTTTQKVGEYDQSPCWYDEQVSFMQDLESPRRNISQTYASYHHHQQQHHHHPCKPELMELQYNNIPHDAFLQLPQLESPKVTQSSCSVVPYGYESNNNNNGSTLQFSSLTQEEQLQYCNNQQSHHSLYGSNDHAVDQVTDWRVLDKFVASQLSHNNQDVSKETSYSNAPIFHVAEQISVAANGSKKEQVSQEYASTSTSSYQIDLWK

SEQ ID NO: 41770 - protein, 162 aa, Glycine max
MDADSSGEEVVIKTRKPYTITKQRERWTEEEHNRFLEALKLYGRAWQRIEEHIGTKTAVQIRSHAQKFFTKLEKEAFVKGVPIGQALDIDIPPPRPKRKPSNPYPRKTNVGAPTLHSEAKHGKSLISIASSHGKQALDLEKEPLPEKHNVDLRPTTVKKKKK

SEQ ID NO: 41771 - protein, 145 aa, Cytophaga hutchinsonii
MTIVKRNGHFPFIFDDFFNRQYNRGMADYSNTNTTIPAVNIKESAENFVIEVAAPGMNKKDFNVQVDGNVLTIRSEKTTEKEDANNEKYTTREFSYQSFVRTFNLPKDIADTDKIEAKYEDGVLHVLIPKKEKEKVKESRLVEVV

SEQ ID NO: 41772 - protein, 365 aa, Microcoelia exilis
SDSGKDAGRLSAAWQLYKAQEDLVKVAKEFGVKLTMFHGRGGTVGRGGGPTHLAILSQPPDTIHGSLRVTVQGEVIEQSFGEEHLCFRTLQRYTAATLEHSMCPPASPEPEWRELLDEMAVAATKEYRSIVFHEPRFVEYFRLATPELEYGRMNIGSRPSKRKPSGGIESLRAIPWIFAWTQTRFHLPVWLGFGAAFKHVIDKDIKNLLMLQEMYTRWPFFRVTIYLVEMVFAQGDPGIAALYDKLLVSEDLWPFGEQLRNNYNETKNLLLQVAGHKDLLEGNPYLRQRLRLRDSYITTLNACQAYTLKRIRDPSYQVPVRPPIAKEIMEGSVSSANQLVKLNPTSEYAPGLEDTLILTMKGIAA

SEQ ID NO: 41773 - protein, 266 aa, Rosa hybrid cultivar
FIAFIVQCGMTHLLNGWTYGPHPFQLMLALTVFKILTALVSCATAITLITLIPLLLKVKVREFMLKKKTWDLGREVGIIMRQKEAGMHVRMLTQEIRKSLDRHTILSTTLFELSETLGLQYCAVWMPNEIKTEMILTHELKGRNYSNMYNFSIPIGDPDVALIKGSDGVNILGPDSILVSGSSGDFGEPGPVAAIRMPMLRVSNFKGGTPEFIQTCYAILVLVLAGGQPRSWSSQELEIIKVVADQVAVALSHAAILEESQLMREK

SEQ ID NO: 41774 - protein, 365 aa, Microcoelia exilis
SDSGKDAGRLSAAWQLYKAQEDLVKVAKEFGVKLTMFHGRGGTVGRGGGPTHLAILSQPPDTIHGSLRVTVQGEVIEQSFGEEHLCFRTLQRYTAATLEHSMCPPASPEPEWRELLNEMAVAATKEYRSIVFHEPRFVEYFRLATPELEYGRMNIGSRPSKRKPSGGIESLRAIPWIFAWTQTRLHLPVWLGFGAAFKHVIDKDIKNLLMLQEMYTRWPFFRVTIDLVEMVFAKGDPGIAALYDKLLVSEDLWPFVEQLRNNYNETKNLLLQVAGHKDLLEGNPYLRQRLRLRDSYITTLNACQAYTLKRIRDPSYQVPVRPPIAKEIMEGSVSSANQLVKLNPTSEYAPGLEDTLILTMKGIAA

SEQ ID NO: 41775 - protein, 290 aa, Leptotes bicolor
IEQSFGEEHLCFRTLQRYTAATLEHSMCPPASPEPEWRELLDEMAVAATKEYRSIVFHEPRFVEYFRSATPELEYGRMNIGSRPSKRKPSGGIESPGPIPWIFAWTQTRFHLPVWLGFGAAFKHVIDKDIKNLLMLQEMYTRWPFFRVTIDLVEMVFAKGDPGIAALYDKLLVSEDLWPFGEQLRDNYNETKNLLLQVAGHKDLLEGNPYLRQRLRLRDSYITTLNACQAYTLKRIRDPSYQVPVRPPIAKEIMEGSVSSANQLVKLNPTSEYAPGLEDTLILTMKGIAA

SEQ ID NO: 41776 - protein, 594 aa, Arabidopsis thaliana
SKPSSSVKPNPYAPKDAVLQNDDSTPAHPGKSPVRSSPAVKASPFFPFYTPSPARHRRNKSRDGGGGESKSVTSTPLRQLARAFHPPSPARHIRDVLRRRKEKKEAALPAARQQKEEEEREEVGLDKRFGFSKELQSRIELGEEIGRGHFGYTCSAKFKKGELKDQEVAVKVIPKSKMTSAISIEDVRREVKILRALSGHQNLVQFYDAFEDNANVYIVMELCGGGELLDRILARGGKYSEDDAKAVLIQILNVVAFCHLQGVVHRDLKPENFLYTSKEENSMLKVIDFGLSDFVRPDERLNDIVGSAYYVAPEVLHRSYTTEADVWSIGVIAYILLCGSRPFWARTESGIFRAVLKADPSFDEPPWPSLSFEAKDFVKRLLYKDPRKRMTASQALMHPWIAGYKKIDIPFDILIFKQIKAYLRSSSLRKAALMALSKTLTTDELLYLKAQFAHLAPNKNGLITLDSIRLALATNATEAMKESRIPDFLALLNGLQYKGMDFEEFCAASISVHQHESLDCWEQSIRHAYELFEMNGNRVIVIEELASELGVGSSIPVHTILNDWIRHTDGKLSFLGFVKLLHGVSTRQSLAKTR

SEQ ID NO: 41777 - protein, 241 aa, Leptotes bicolor
SDSGKDAGRLSAAWQLYKTQEELVKVAKEYGVKLTMFHGRGGTVGRGGGPTHLAILSQPPDTIMGSLRVTVQGEVIEQSFGEELLCFKTLQRYTAATLEHGMKLPFSPKPEWRALMDEMAVVATNEYRSIVFQEPRFVEYFRSATPELEYGRMNIGSRPSKRRPSGGIESLRAIPWIFAWTQTRFHLPVWLGFGAAFKHVIQKDLKNLNMLREMYNEWPFFRVTIDLIEMVFTKGSPGIAA

SEQ ID NO: 41778 - protein, 101 aa, Hyacinthus orientalis
YSTSSSSSCNLFLLIQREGKMSSCGACSSGCKCGSSCGCNGCGCCKRNPVLAEGSITTTQTMILGVAPVKGQVEGFESGMGAENGGCKCGSNCTCDPCTCK

SEQ ID NO: 41779 - protein, 475 aa, Arabidopsis thaliana
MAATTRRLLYYVSKRFSTAGVRRSYGGLPQSNSKSPPSSSQRLMELESEFSAHNYHPVPVVFSRANGSTIWDPEGKRYIDFLAAYSAVNQGHCHPKIMKALQEQVEKLTLSSRAFYNDKFPVFAERLTNMFGYDMVLPMNTGAEGVETALKLARKWGHEKKNIPKDEAIIVSCCGCFHGRTLAIVSMSCDNDATRGFGPLLPGNLKVDFGDADSLEKIFKEKGDRIAGFLFEPIQGEAGVIIPPDGYLKAVRELCTKYNVLMIADEVQSGLARSGKMLACDWEEIRPDMVILGKALGGGVIPVSAVLADKDVMLHIKPGQHGSTFGGNPLASAVAMASLDVIVEEKLVERSASLGEELRIQLNEIKKQFPKYIKEVRGRGLFNAIEFNSESLSPVSAYDICLSLKERGVLAKPTHNTIVRLTPPLSISSDELRDGSEALHDVLELDLPNLLKINSGKTPVSHITECDRCGRNLYA

SEQ ID NO: 41780 - protein, 364 aa, Leptotes bicolor
SDSGKDAGRLSAAWQLYKAQEDLIKAAKEFGVKLTMFHGRGGTVGRGGGPTHLAILSQPPDTIHGSLRVTVQGEVIEQSFGEEHLCFRTLQRFTAATLEHGMRPPISPKPEWRALLDEMAVVATEEYRSIVFQEPRFVEYFRLATPEMEYGRMNIGSRPSKRKPSGGIESLRAIPWIFAWTQTRVHLPVWLGFGTAFKYAIEKDIKNLHMLQEMYNAWPFFRVTIDLVEMVFAKGDPGIAALYDKLLVSDDLWSFGERLRASYEETKNLLLQVAGHRDLLEGDPYLKQRLCLRDSYITTLNVCQAYTLKRIRDPNFHVNLRPHISKEIMDSNKTAAELVKLNPTSEYAPGLEDTLILTMKGIAA

SEQ ID NO: 41781 - protein, 224 aa, Bacillus licheniformis ATCC 14580
MNVLLVDDENRMLDLLELYLEHYSCTKAATGKEALDLIKMRNFDLVILDIMMPEMDGWTVCKEIRRLTSIPVIMLTAKNGQDDIVRGLNCGADDYLTKPFSEKVLLAKIEAVLRRTRRFHEIRFRGLIWNKQHHTLHVNHREISITPSEFDLLGTLLDHMDQVLSRDQLIENIWGFNSDIEPRTIDSHMRNLRHRLKKAGFPVEDHLRTVYGVGYKWTSKGTGA

SEQ ID NO: 41782 - protein, 273 aa, Zymomonas mobilis subsp. mobilis ZM4
MVPVKNVVLNDGHSMPAIGQGVYQLNPAQAESMVALGYDLGYRAVDTAAWYENEEGVGEGLRSRHARSFITTKLMPQDMGRVNCFVALDKSIRNLGVTSLNLYLIHWPGQDRKRYEETWQTLIQIRAIGKASSIGVSNFTIDHLDHIIADSGVVPAVNQIELHPYFQQKELRAYHAERGIVTTSWSPLGRGAALNDPVIREIALKHGKTPAQVVLNWHLSLGLTVIPKASSKARLQENLEADSFALDEEDMQRIESLDKPDGRQGIDPAVFDF

SEQ ID NO: 41783 - protein, 304 aa, Glycine max
  misc_feature (223)..(223): Xaa can be any naturally occurring amino acid
  misc_feature (272)..(272): Xaa can be any naturally occurring amino acid
  unsure (1)..(304): unsure at all Xaa locations
MDYICFFVTFTAIALLGFVSVVFFEAYKRRNNHQHIEVPAIFEDPSSLKQVPCPHIVDPATKYISLIIPAFNEEHRLPGALEETMNYLHQRTLKDSSFTYEVVIIDDGSADETKRVAFEFVRKYTVDKVRVILLGRNHGKGEAIRKGMMHSRGELLLMLDADGATKVTDLEKLENQIQAVAKREYHHGDSSDSDPRFRISDVPAAVFGSRAHLEEKALATRKXWYRNFLMKGFHLVVLLAAGPGIRDTQCGFKMFTRAAARKLFSNVRLKRXKVNLLSIPNMLWELVLMSVGYRTGMWRISNST

SEQ ID NO: 41784 - protein, 522 aa, Arabidopsis thaliana
MATEPTRSWFQIRQQKPDKSSPTKKGQEGNVKNLGRPPMNDAPSNATKQKVAAAKQYIENHYKIQKKSLQERKERRSILEQNLADADVTVEDKMDILKNFEKKEMEYMRLQRQKMGVDDFELLSIIGRGAFGEVRICKEKSTGSVYAMKKLKKSEMLRRGQVEHVKAERNVLAEVDSPFIVKLCYSFQDDEHLYLIMEYLPGGDMMTLLMRKDTLREDETRFYVAQTILAIESIHKHNYVHRDIKPDNLLITRNGHIKLSDFGLSKSLESKNFPDFKAELVDRSTKPAAEHDRLSKPPSAPRRTQQEQLLHWQQNRRTLAFSTVGTPDYIAPEVLLKKGYGMECDWWSLGAIMFEMLVGFPPFYSEEPLATCRKIVNWKTCLKFPDEAKLSIEVKDLIRRLLCNVEQRLGTKGVHEIKAHPWFRGVEWERLYESNAPYIPQVKHELDTQNFEKFDEVPSTCQTSSKSSPWRKMISSKDANFLGYTFKNLEIVDEHHIPGMAELKRKSKTANKPSLKTLFGKK

SEQ ID NO: 41785 - protein, 251 aa, Paenibacillus polymyxa
MEAGGKKTSHSYLEDTEVKRLIALSQSGDNDARETLINSNIRLVWSVVQRFMNRGYEPDDLFQIGCIGLLKSVDKFDLSYEVKFSTYAVPMIIGEIQRFLRDDGTLKVSRSLKETANKVRKMKDELSKPLNRLPTVKEVADELGVTPEDVVFAQEANKPPTSIHETVFENDGDPITLMDQIADESQERWFDKLALNEAIDGLSERERLIVYLRYYRDQTQSEVASRLGISQVQVSRLEKKILQQIRDQIAQ

SEQ ID NO: 41786 - protein, 305 aa, Triticum aestivum
  misc_feature (267)..(267): Xaa can be any naturally occurring amino acid
  misc_feature (303)..(304): Xaa can be any naturally occurring amino acid
  unsure (1)..(305): unsure at all Xaa locations
MQIFVKTLTGKTITLEVESSDTIDNVKAKIQDKEGIPPDQQRLIFAGKQLEDGRTLADYNIQKESTLHLVLRLRGGMQIFVKTLTGKTITLEVESSDTIDNVKAKIQDKEGIPPDQQRLIFAGKQLEDGRTLADYNIQKESTLHLVLRLRGGMQIFVKTLTGKTITLEVESSDTIDNVKAKIQDKEGIPPDQQRLIFAGKQLEDGRTLADYNIQKESTLHLVLRLRGGMQIFVKTLTGKTITLEVESSDTIDNGKAKIQDKEGIPPXDSSGLIFAGKQLEDGRTLADYNIQKGATLHLGLPPXXG

SEQ ID NO: 41787 - protein, 956 aa, Ralstonia eutropha JMP134
MVVPANGALNASPARRSATDKDVPLREDIRFLGRLLGECLREQEGDATFEVVETIRQTAVRFRRENDRAAGTELDRLLKRLSRDQTNQVVRAFSYFSHLANIAEDQHHNRRRRIHALAGSPPQDGSLQHALEKIDAAGVTGKQLRKFLDEALIVPVLTAHPTEVQRKSILDAEREIARLLAERDLPMTARERDRNTAQLRAKVTTLWQTRMLRDSRLTVADEIDNALSYYRTTFLHGIPQLMSELEEDIAAIFPASRKTKGAAAEAAPLAPFMQMGSWIGGDRDGNPNVTAETLDHAATQQSRMILGWYLDEVHALGAELSMSTLMVDASPELLALAEASPDHSAHRADEPYRRALIGIYARLAATSKMLTGQGAPRHPVADAEPYSSAEAFAADVQIVIDSLRAHHGRALTSTRIDALVRAIAVFGFHLASVDMRQVSDVHEAVVAELFAAAGVEKDYAALPESRKLELLLAELRQPRLLTLPYHEYSEQTRNELAILATARELRARYGQRVARNYIISHTETLSDLVEVMLLQKEAGMLKGTLGSKTDPARMELMVIPLFETIEDLQNAAGIMQSLLDLPGFDSVIEHHGVEQEVMLGYSDSNKDGGFLTSNWELYKAELALVQLFEQRKVKLRLFHGRGGTVGRGGGPTYQAILSQPPGTVNGQIRLTEQGEIINSKFANAEIGRRNLETVIAATLEASLLPQQNAPKELSTFEGIMQQLSDRAFGAYRNLVYETPGFKDYFFATTPITEIADLNLGSRPASRKLMDKKNRRIEDLRAIPWGFSWGQCRLLLPGWYGFGSAVKSLLDTAPDEKARKAAVATLRKMVKTWPFFSTLLSNMDMVLAKTDLAVASRYAQLCDDAALRKNVFARISKEWHLTCEMLALVTGHQERLADNPLLARSIKNRFAYLDPLNHLQVELLKRYRSGKDGDDIRVRRGIHLTINGVAAGLRNTG

SEQ ID NO: 41788 - protein, 229 aa, Triticum aestivum
  misc_feature (214)..(214): Xaa can be any naturally occurring amino acid
  unsure (1)..(229): unsure at all Xaa locations
MAALLARQAALALRARQTARLGPSATAMQGHLRTYMDAGAPKRFKEDEEKEQLAKELAKDWSAVFERSINTLFLTEMVRGLMLTLKYFFERKVTINYPFEKGPLSPRFRGEHALRRYDTGEERCIACKLCEAICPAQAITIEAEEREDGSRRTTRYDIDMTKCIYCGFCQEACPVDAIVEGPNFEFSTETHEELLYDKEKLLENGDRWETEIAXNPESEAPFRLICSCH

SEQ ID NO: 41789 - protein, 313 aa, Helicosporidium sp. ex Simulium jonesii
MPTGRDSERLRLTLSNLDMPERLASGRVPLQCSSVLMEHYHTSDDKMQTVLEHNKRWSNEKKESDPSFFHKLSNIQAPEWLWIGCSDSRVPANQLMGLGPGEVFVQRNVGNIVTHHDMNAMSCIEYAVSVLKVKHIIVCGHHNCGAVKAALELPHTTPSLVNLWIQDIRDTRDRNIEQLRKLQGQAQVNRLAEFNIMRQVFSVCTCPVVQAAWAADQPLSVHGVIYALEDGRLREVTQPITGLPDLERYADHKRGVMKHLSGALLTRIQFERQLKRLQTESSTQEEGVEEPELGPLIGASSKPLPGPPGEASP

SEQ ID NO: 41790 - protein, 358 aa, Synechocystis sp. PCC 6803
MVSTTLPTQLETIRPGIKAPVKETLLTPRFYTTDFDKVANLVLTLQDEEIEAALEELRADYNRYHFVRNDDFKRSFDHIDGATRLAFIDFLERSCTSEFSGFLLFKELSRRLKNRSPKLAEAFHLLARDEARHAGFINKAMADFGLSLDLRYLTQKRTYTFFPPEWVIYTVYLSEKIGYWRYILMFRHLEKNPDHNIYPLFNYFECWCQDENRHGDFFKALLRSQTALWKTWQSRLWSRFFLLTVFVTHTLTVFERTDFYQSVGLDAKQYNVDVVTNTNATAARAFPEVLDTDNPKFFPRLEACASANEKLTAIANSEAPKLAKFCQKAPWIAVIIWQMICIFLQKPVDAEARRGMVC

SEQ ID NO: 41791 - protein, 121 aa, Helicosporidium sp. ex Simulium jonesii
FTPQYAELEQLQQEFGAQGFDVLGFPCNQFMNQEPGDSCSIRDAARAKHGATFPMFAKIKVNGSEADPLYKWLKEQKGGILTSAIKWNFAKFLVDRQGKVVGRYAPTTSPKDIANDIKKFL

SEQ ID NO: 41792 - protein, 674 aa, Synechocystis sp. PCC 6803
MVSIIKSVRRSLLLKFVLSYFCLSSVVVASIFLVANYRAVKGIESQTFNRLNISNNLKEYQLEQWMEGQKDTLFLLSDINSIQANTELLKNTSVSDPQYKIIQKRLIEELREIDLFLPHIEAINILNTGGIVVASNNLDEIGVYKGIGNQTTYFANINSNFKTVPNFYFSKVYNRPSMTFATNIKHDITRERLGYLSIDINLNAVDDLIRKRTGLGDTGETFLVGEINNQVSFIASDENKKLTANGSKPNFNSLGINSVMAGNSGQGSYVNYAGTPVLGVYQWIEKYNLALITEISEVEALELARRFTRMLVLVGLVSTALLLIAVYLLSIKITKPILLITKAAIDISSGDREARAPVLGEDELGILAKSFNLMTNELRESNSSLEKKNQELELAQKQLAVANSCLEEKVQQRTEELENTVKALELASSEAEAANATKSIFLANMSHELRTPLNAIIGYSEMLIEEAEDLDSEELVPDLDKILRSGKSLLALINDLLDISKIEAGKMELYLETFNLKELIAGILDTISPLLKNNNNKLEVEISLESEEVYGDLIKLRQGILNLLSNASKFTKDGIISFIVEEFKVDEKDWLSFQVKDTGIGLTEEQMSKLFQPFTQADSSTTRKYGGTGLGLAITRKFCQMMGGDIYLTSEIGVGSSFTIKLPKYAQLNSAKND

SEQ ID NO: 41793 - protein, 357 aa, Synechocystis sp. PCC 6803
MSALSSHSQVLSMLRTTPINFNHWYVVAQAGELGQGPLGIVLWEKAIAIYRDQDGQVRAVEDRCPHRQVKLSEGKVLGNNLECAYHGWQFDAQGHCAKIPYFSEDQKLPPCRLRTYPVQEKDGFIWLYPGDLDHLASHGPEPLAIPEWHHLNHIGSFAAFDCPGHFSYLIENLMDMYHGHLHDNYQAWASASLREIETNGDQVVVDYNAQSYYKIDKIWSISQLFFPTLRRLHPENLRVSYIYPHWSSTLGADFKIYCLFCPISANKTKAYLVHFTSLEAFPKLHKLPVAFRSFLKNWLSGTARPLLEGLIDQDIRMISQEQAAFEQNPDRQNVEVNPALAKVQQLIRQQALASENA

SEQ ID NO: 41794 - protein, 445 aa, Porphyromonas gingivalis
MKTQEIMTMLEAKHPGESEFLQAVKEVLLSVEEVYNQHPEFEKNGIIERIVEPDRVFTFRVPWVDDQGKVQVNIGYRVQFNNAIGPYKGGIRFHPSVNLSILKFLGFEQMFKNALTTLPMGGGKGGADFSPKGKSEAEIMRFCQSFMTELWRNIGPDTDIPAGDIGVGGREVGYMFGMYKKLAREHTGTLTGKGFEFGGSRLRPESTGFGAVYFVQNMCKQNGVDYKGKTLAISGFGNVAWGVAQKATELGIKVVTIYGPDGYVYDPDGINTPEKFRCMLDLRDSGNDVVSDYVKRFPNAQFFPGKKPWEQKVDFAMPCATQNEMNLEDAKTLHKNGVTLVAETSNMGCTAEASEYYVANKMLFAPGKAVNAGGVSCSGLEMTQNAMHLVWTNEEVDKWLHQIMQDIHEQCVTYGKDGNYIDYVKGANIAGFMKVAKAMVAQGVC

SEQ ID NO: 41795 - protein, 749 aa, Streptococcus pneumoniae R6
MSTTIIGFPRLGEFRELKFTTEKYFRKEISEEELLAAAKDLRAKHWNIVKEKGITEIPSNDFSHYDNFLDAAFLFNVVPASVQNLDLSDLERYFALGRGYQGEKGDVRALPMKKWFNTNYHYIVPKFEKDTQVKLAGHKIFDEFQEAKELGLNTRPVLVGPFTFLQLSDFEEGVKADDFVDSFVAAYQEVFAKLADLGATRIQLDEAALVKDLTAEEKALFLNLYNKLLADKKGLEVLFQTYFGDVRDVYADLVNLPVDAIGLDFVEGKKTLELVKGGFPADKTLYVGIVNGKNIWRNNYEKSLTVLEQIPAENIVLTSSCSLLHVPFTTANEEFEPALLNHFAFAVEKLDEIRDLDAIRNGQGSEALAANKELFATERVGENAELRARIAGLTDADYTRLPAFAEREAIQEEAFKLPALPTTTIGSFPQTKEVRAKRLAYRKGELSQKEYDAFLAETIDEWIKWQEDIDFDVLVHGEFERNDMVEYFGQNLSGYLFSKNGWVQSYGMRGVKPPIIWGDVTRLNPITVKWSSYAQSRTNKPVKGMLTGPVTILNWSFPREDISIKDSTLQIALAIKDEVLDLEAAGVKIIQIDEAALREKLPLRRSDWYEDYLDWAIPAFRLVHSTVAPDTQIHTHMCYSEFTDIIPAIDNMDADVISFEASRSNLEILDELKAKNFQTEVGPGVYDIHSPRVPNEGEIDNTIEAILAKVPSKKVWINPDCGLKTRGIPETKESLIRLVEAAKAAREKL

SEQ ID NO: 41796 - protein, 712 aa, Neurospora crassa
MAPRAEGSSTLKRARGSTDDNDSFKKPRRSERLSSQRTGDSPEPKQKTPLKTTKQLPSPVTHDSDEFPQDSKEPTATPPAGRPSQLSQISPRPENQHSQSQASQLNDTQAFSQLPDLDKALSDEVEDEVKEGVWGYLFPLDPRYGGRCVVLRRRAACPLPDTVSQAVGSKRGKRGQKALIKEEHDLDKTKVKGLPSGGYLIGRHPECDIQIEDPIVSNRHCIIFTENKGNDTIAVLEDLSSNGTFVNEAIVGRNRRRELQELDEIAVLGTARFIFRYPKSRHTSAFRQQYTMLQKLGKGHFAEVYLCVEKSTGTQYAVKVFSKTPGVEERSKDEGLQQEIAVLMGVSHPNVLCLKDTFNEPNAVHLVLELAPGGELFNYIVKKTKLSENECRKLFTQLFQGVKYLHDRNIVHRDIKPENILLVDDDLHVKLADFGLAKIIGEESFTTTLCGTPSYVAPEILTDTRHRKYTKAVDVWSLGVVLYICLCGFPPFSDELTSPDFPYSLSDQIRQGKFDYPSPYWDPVDDLALDLIDSMLVVDPEKRFTIDDCLSHPWMTQKTPGVNDSTNGLVNGIAGLDVTRRGVLRERTLLSSINTVEIADKIPLGENKPELKIYKKNPTETVGGPSEHELAGAQAGPSRQKEARPDDNRDPNEFMKMGGKGDEVLFADDPKSNYPTAKKDAKDIVESTTKTNGKGKLASGFGIVIMDARFHG

SEQ ID NO: 41797 - protein, 289 aa, Zea mays
MAKQDIEASGPEAGEFSAKDYTDPPPAPLVDADELTKWSLYRAVIAEFIATLLFLYITVATVIGYKHQTDAAASGPDAACGGVGILGIAWAFGGMIFILVYCTAGISGGHINPAVTFGLFLARKVSLVRALLYIIAQCLGAICGVGLVKGFQSAYYVRYGGGANELSDGYSKGTGLAAEIIGTFVLVYTVFSATDPKRSARDSHVPVLAPLPIGFAVFMVHLATIPITGTGINPARSLGAAVIYNKDKAWDDQWIFWVGPLIGAAIAAAYHQYVLRASATKLGSYRSNA

SEQ ID NO: 41798 - protein, 362 aa, Leptotes bicolor
SDSGKDAGRLSAAWQLYKTQEELVKVAKEYGVKLTMFHGRGGTVGRGGGPTHLAILSQPPDTIMGSLRVTVQGEVIEQSFGEELLCFKTLQRYTAATLEHGMKLPFSPKPEWRALMDEMAVVATNEYRSIVFQEPRFVEYFRSATPELEYGRMNIGSRPSKRKPSGGIESLRAIPWIFAWTQTRFHLPVWLGFGAAFKHVIQKDLKNLNMLREMYNEWPFFRVTIGLIEMVFTKGSPGIATLYDKLLVSPELLPFGEQLRAKYEETKRLLLKVAGHKELLEGDPYLKQRLRLRYPYITTLNVCQAYTLKRIRDPSYHPTAKPHLPTEIMNYEAAELVKLNPTSEYAPGLEDTLILTMKGIAA

SEQ ID NO: 41799 - protein, 362 aa, Leptotes bicolor
SDSGKDAGRLSAAWQLYKTQEELVKVAKEYGVKLTMFHGRGGTVGRGGGPTHLAILSQPPDTIMGSLRVTVQGEVIEQSFGEELLCFKTLQRYTAATLEHGMKLPFSPKPEWRALMDEMAVVATNEYRSIVFQEPRFVEYFRSATPELEYGRMNIGSRPSKRKPSGGIESLRAIPWIFAWTQTRFHLPVWLGFGAAFKHVIQKDLKNLNMLREMYNEWPFFRVTIDLIEMVFTKGSPGIATLYDKLLVSPELLPFGEQLRAKYEEAKRLLLKVAGHKELLEGDPYLKQRLRLRYPYITTLNVCQAYTLKRIRDPSYHPTAKPHLPTEIMNYEAAELVKLNPTSEYAPGLEDTLILTMKGIAA

SEQ ID NO: 41800 - protein, 264 aa, Arabidopsis thaliana
MIVYFPSELTVWQKLEEENREFFKAYYLRLMVKHQIMEYNELLEQQINHMRQMHPTAGASVRNRNGSHVPPMNQQQLLYERKEPDQSSPNLSSPYLNGGSAINTNIPSYVDFSSHSRRVDPSPNSLSLQATNMPLMQGMIKSETAYQNCAPYMYGGEAQSTVGDVTIASFSNDSSNQSLNDPLVDPDAPTFGSLGQIPQNFSLSDLTADFSQSSDILESYEGSPFLLADAENFLDSSERVEHQGDHERLRTISSGFSYENFRSN

SEQ ID NO: 41801 - protein, 241 aa, Kalanchoe fedtschenkoi
ERYRSIVFREPRFVEYFRLATPELEYGRMNIGSRPSKRKPSGGIESLRAIPWIFAWTQTRFHLPVWLGFGEAFKHVIDKDNKNLLMLQQMYNEWPFFRVTIDLVEMVFAKGNPGIAALYDKLLVSEELLPLGEQLRTAYNDTKSYLLKITGHNEILGGDPFLKQRLKLRTAYITTLNVCQAYTLKRIRDPSYQVPVRPPIAKEILEGSVTSANQLVKLNPTSEYAPGLEDTLILTMKGIAA

SEQ ID NO: 41802 - protein, 832 aa, Thermobifida fusca YX
MKAVVMAGGEGTRLRPMTANQPKPLLPVVNRPIMEHVLRLLKRHGFEDTVVTVQFLATLIRNYFGDGEELGMSLRYVAEEVPLGTAGSVKNAEEHLRGEPFIVISGDALTDIDLTDMVRFHRENGALVTIGLKRVANPLEFGIIIVDDNGRIQRFLEKPTWGQVFSDTVNTGIYIMEPEVLDHVAPGENVDWSGDVFPKLLKAGAPLYGYIADGYWEDVGTHESYLRAQADVLSGKVDVEIDGFEVSPGIWVAEGAEVDPEAVLKGPLYIGDYAKVEPGAELREFTVLGSNVVVRSEAFLHRAVVHDNVYVGTRANLRGCVVGKNTDIMAGVRIEEGTVVGEECVLESEAYLANNIKVYPFKTIEAGAVVNTNVIWESKGQRSLFGPRGVSGLINVEITPELAVRLASAYATTLKKGAVVTTARDASRAARTLKRAVISALTAAAINVQDLEATPLPLARFHTSQPGLSGGIALRTTPGDPQSVDIVFLDSSGADLSPAAQRKLERVFSRQEYRRAFPGEIAELSFPSRSVEAYTRELLQSIDLSGVAEANLKVVVDCAGGTGSLILPALLSQIDADVLTVNNRLDEASPTDTPAKRTRDLQRLGELVASARADFGVRFDPVGERIQLVDGSGTLVDDERALLVVLDLVAAERQGGRVALPVTTTRVAEQVANRHGVDVQWTPTSLDALTKAALADDIIFAADGRGGFILPEFSRTCDGIAAFVRLIGLVARTKMSLSQIDQRIPQAHLLRRSVPTPWAVKGSVMREVVEAAQGREIDTTDGVRVIEPDGSWALVLPDTAEAVTHLWAEGPDDETAQRLLEEWSAVVERAEG

SEQ ID NO: 41803 - protein, 365 aa, Kalanchoe fedtschenkoi
SDSGKDAGRLSAAWQLYKAQEELIEVAKKHGVKLTMFHGRGGTVGRGGGPTHLAILSQPADTIQGSLRVTIQGEVIERSFGEAQLCFKTLQRYTAATLEHGMIPPLTPKPEWRALMDDMAVVATERYRSIVFREPRFVEYFRLATPELEYGRMNIGSRPSKRKPSGGIESLRAIPWIFAWTQTRFHLPVWLGFGEAFKHVIDKDNKNLLMLQQMYNEWPFFRVTIDLVEMVFAKGNPGIAALYDKLLVSEELLPLGEQLRTAYNDTKSYLLKITGHNEILGGDPFLKQRLKLRTAYITTLNVCQAYTLKRIRDPSYQVPVRPPIAKEILEGSVTSANQLVKLNPTSEYAPGLEDTLILTMKGIAA

SEQ ID NO: 41804 - protein, 263 aa, Bacillus sphaericus
MKPLEQSSEKLLSQEEMRDLIARAQQGDHEARKRMVEGNTRLVWSIVQRFTTRGVELEDLFQIGCIGLMKSVDKFDLSYDVKFSTYAVPMIIGEIQRFLRDDGMVKVSRSIRELNFKIRHATDEFIKRNEHRPTIQELAQVLGVTTEEIVTASDALRDPASLHEQLYESEGDSITLMDQMKDEKSEQPFDYIPLKEVLTRLEPREQSIIYLRYFSDCTQTEIANRLGISQVQVSRLEKKILAQLKSWMATSATVEQEVIKKDI

SEQ ID NO: 41805 - protein, 365 aa, Kalanchoe fedtschenkoi
SDSGKDAGRLSAAWQLYKAQEELIEVAKKHGVKLTMFHGRGGTVGRGGGPTHLAILSQPADTIQGSLRVTIQGEVIERSFGEAQLCFKTLQRYTAATLEHGMIPPLTPKPEWRALMDDMAVVATERYRSIVFREPRFVEYFRLATPELEYGRMNIGSRPSKRKPSGGIESLRAIPWIFAWTQTRFHLPVWLGFGEAFKHVIDQDNKNLLMLQQMYNEWPFFRVTIDLVEMVFAKGNPGIAALYDKLLVSEELLPLGEQLRTAYNDTKSYLLKITGHNEILGGDPFLKQRLKLRNAYITTLNVCQAYTLKRIRDPSYQKPVRPPIAKEILEGSVTSANQLVKLNPTSEYAPGLEDTLILTMKGIAA

SEQ ID NO: 41806 - protein, 149 aa, Methanococcoides burtonii DSM 6242
MERTYVMVKPDGVQRCLVGEIVSRIEKKGLKIAALRMNVMTEAAAKEHYKEHSERPFFGSLVSFVTSGPSVSMVIEGNNAIKIMRAINGATNPVDALPGTIRGDLAVDMGRNVVHASDAPESAEREIGLHFEESEISGYPRADDEWLYE

SEQ ID NO: 41807 - protein, 630 aa, Mesorhizobium sp. BNC1
MQFDVAALGRIAVDLYGEQKGTSLEDTATFRRYVGGSSGNLAIGCARLGLKTAMISSTGEDPMGRYIRAELAKAGVDNTCVTANPQRRTALAFLGMQRADAIALDFYRDRAADMAVGFGDREAEKVRQSRLLALTGTHMSEPGTADALRKAVETAREAAGKVVLDIDFRKALWEQSPGGIEGVVSSINDLLDKINIVVGNEEEFLRLGGSNDIVEALKKVRGNTSALLVLKLGAEGSIAFAGEIPPRSEWRPVPGFKVYVLNVVGAGDAFLAGFLSLWLQGEPVNACLRRGNLNGALVVSRHACSDAMPFLAEIETIEDESAVDLIAKGSELERLHAVLKRPRVERGLTALAFDHRVPFAQLIAETGRSKADAIAFKKLIARAAKEVAGERGLANPGVLIDQHYGTDVMEALTEDGWWVGRPVEETGSRPLRFEAEDSLEETISAWNPKHVAKVLVWYHPGDDIALKNEQQASLKRLQACCRGRGQEWMLEVILPLDLERSDALLIAAVGELYAAGLKPDWLKLSGFETADAWDQLESMVKSFDPYCRGVILLGLSQPIEDLRIPIELAAQQPFCQGFAVGRSIFMDPARKWFAGISTDEETVNEIKGNYAKVVDMWSSTKQSTSIAEVA

SEQ ID NO: 41808 - protein, 250 aa, Geobacillus stearothermophilus
MDVDVKQGQSPIKDQEMKELIRRSQEGDQEARDEIIEKNMRLVWSVVQRFLNRGYEADDLFQIGCIGLLKSVDKFDLSYDVKFSTYAVPMIIGEIQRFLRDDGTVKVSRSLKEMGNKIRKAKDELSKTRGRSPTITEIADHLGISPEDVVLAQEAVRLPTSIHETVYENDGDPITLLDQIADADEASWFDKIALKKAIEELDERERLIVYLRYYRDRTQSEVASRLGISQVQVSRLEKKILQHIKDKMDG

SEQ ID NO: 41809 - protein, 182 aa, Bdellovibrio bacteriovorus HD100
MSTLNHIEFNTADGKKATLADYSGKVLLVVNVASECGLTPQYEGLEKIHQKYESQGLRVLAFPANEFGAQEPGSNEQIQEFCRTQFGVKFPVFAKMVVKGEGQHPLYQQLTTLQPAAQQVPGGKLKSVLEEHGLLSGGPSDIMWNFEKFLIGKSGNVVARFAPDMTPEDPTIVKAIEAELAR

SEQ ID NO: 41810 - protein, 742 aa, Staphylococcus aureus subsp. aureus Mu50
MTTIKTSNLGFPRLGRKREWKKAIESYWAKKISKEELDQTLTDLHKENLLLQKYYHLDSIPVGDFSLYDHILDTSLLFNIIPERFQGRTIDDDLLFDIARGNKDHVASALIKWFNTNYHYIVPEWDNVEPKVSRNVLLDRFKYAQSLNVNAHPVIVGPITFVKLSKGGHQTFEEKVKTLLPLYKEVFESLIDAGAEYIQVDEPILVTDDSESYENITREAYDYFEKAGVAKKLVIQTYFERAHLKFLSSLPVGGLGLDFVHDNGYNLKQIEAGDFDKSKTLYAGIIDGRNVWASDIEAKKVLIDKLLAHTNELVIQPSSSLLHVPVSLDDETLDTSVGEGLSFATEKLDELDALRRLLNQNDSVKYDKLKARYERFQNQSFKNLDYDFESVRTSRQSPFAQRIEQQQKRLNLPDLPTTTIGSFPQSREVRKYRADWKNKRITDEAYETFLKNEIARWIKIQEDIGLDVLVHGEFERNDMVEFFGEKLQGFLVTKFGWVQSYGSRAVKPPIIYGDVKWTAPLTVDETVYAQSLTDKPVKGMLTGPVTILNWSFERVDLPRKVVQDQIALAINEEVLALEAAGIKVIQVDEPALREGLPLRSEYHEQYLKDAVLSFKLATSSVRDETQIHTHMCYSQFGQIIHAIHDLDADVISIETSRSHGDLIKDFEDINYDLGIGLGVYDIHSPRIPTKEEITTAINRSLQQIDRSLFWVNPDCGLKTRKEEEVKDALTVLVNAVKAKRQE

SEQ ID NO: 41811 - protein, 448 aa, Zea mays
MTEPAPAAAAGEKKAVADTAAAVVAKGKEKEEAAPTLAAGARGRFVAYPARVTEHTDVVADAARFRAALEGLHAHMNTRLKVPIIGGKDLDLHQLYKEVTSRGGIDKLKAENRWREVTASFIFPATATNASFMLKKYYMSLLYHFEQLYFFRVQGWYQQEIDSRTNSSIEVKTEAQAYHKRKRGINASLSDPASSSDNVDVDVIVDGKFEHGYIITVIMGSKSTKAILYNCTEEPALPTSELAVASNNNDLKGGRRRRRRKKKLSTTDPRHPKPNRSGYNFFFQDQHRMLKPQCPGQDRLISKMIGERWNNLSPEDKAVYQERGVQDKERYRTQLAAYRKLTGQPISNAVPIEQRLPLTDVTIDEVDSKVSEGDMLLSNQAYSSSDESDHSGEKTVEDELNTETSPEVSMETTGSLRHPDPCADEDHFELRRRENPKADEKYNAPPDS

SEQ ID NO: 41812 - protein, 293 aa, Oryza sativa (japonica cultivar-group)
MAMASTLPLLLVHRSTPPTPRPTAPPLLHSRRLALPPRPASLPATTAVVHPRKGVRLSKLHAASCCDSASAAGVAAGGGGGGGGAKGEMDWRLLLAWYLLALDKHPITTKAVTSAVLTLTGDLICQLAIDKVPKLDLKRTFVFTFLGLVLVGPTLHVWYLYLSKLVMINGASGAIARLLLDQFIFSPIFIGVFMSLLVTLEGKPSLVVPKLKQEWLSSVIANWQLWIPFQFLNFYFVPQKFQLDFPKATQTTFLYLLQFKMMLIGAKGAVCSFVTHEEQPVVSLEAKEMDKVK

SEQ ID NO: 41813 - protein, 447 aa, Thermoplasma volcanium GSS1
MMRYVIASSRCPFSHDVVMGRELVKENVGGVATALKRAISKHGGTWICWGDGKADNRYVNEDVGTYKIKRIILTPQEKRGYYDMYSNRTLWPLFHYFRERVQYTDNGYETYRKVNEKFAEEILNNTSQEDIVWVHDYQLSLVPGILRQKGLKNRIIFTWHIPWVSREMFETLTESDEIKESVGSADFITFHTDLYRKNFESLFENRKHGKSIAVPLGIDYRYFEKAKSSQIKSYALKDKIMLFSIDRLDYTKGLTNRVLSIERLIRNHPETSGKFVYVMIVTPSRTSVSDYVSMKRELEMNIGRVNGEFGTISWMPILYMYRKISDHSLVSYYKSADIALITPLIDGLNLVSKEFIASTEKGILVLSKFAGASNCLRGALIVNPNSPDEVADAIYKAMNMERKEADERLLKMKAIVKARDTDWWIKRIYRLAIAKEHDRRVTNNRIE

SEQ ID NO: 41814 - protein, 545 aa, Triticum aestivum
  misc_feature (55)..(55): Xaa can be any naturally occurring amino acid
  misc_feature (294)..(294): Xaa can be any naturally occurring amino acid
  unsure (1)..(545): unsure at all Xaa locations
VTLQNKFVQKSRLVPVRNSRDIVDPRVRPRVRDLIAHHPPPSTRDRPGRRRRPWXPYKHRPTSGANSGYWTTNSGAPVWNNNNALTVGQRGPILLEDYHLIEKLAQFDRERIPERVVHARGASAKGFFEVTHDVSQLTCADFLRAPGVQTPVIVRFSTVVHERGSPETLRDPRGFAVKFYTREGNFDLVGNNMPVFFIRDGMKFPDMVHAFKPSPKTNMQENWRIVDFFSHHPESLHMFTFLFDDVGIPLNYRHMDGFGVNTYTLISRDGKAHLVKFHWKPTCGVKCLLDDETXTVGGTCHTHATKDLTDAIAAGNYPEWKLFIQTIDADHEDKFDFDPLDVTKTWPEDIIPLQPVGRMVLNKNIDNFFAENEQLAFCPAVTVPGIHYSDDKLLQTRIFSYADTQRHRLGPNYLMLPVNAPKCAHHNNHHDGLMNFMHRDEEVNYFPSRFDPTRHAEQYPIPPRVLSGCREKCIIEKENNFKQAGERYRSFDPARQDRFLQRWVDALTDARVTHEIQGIWVSYWSQCDASLGQKLALRLKIKPSM

SEQ ID NO: 41815 - protein, 163 aa, Klebsiella pneumoniae
DKVNLSIGLYYNDDGIIPQLQAVAEAEARLNAEPHGASLYLPMEGLSGYRQAIAPLLFGAEHTALKQNRIASIQTVGGSGALKVGADFLKRYFPESHVWVSDPTWENHIAIFEGAGFEVSAYPWFDKATNGVRFEDLLATLQTLPARDIVLLHPCCHNPTGAD

SEQ ID NO: 41816 - protein, 776 aa, Mesorhizobium loti MAFF303099
MATLGVPRIGRRRELKFALESYWSGKSPAADLLATAKALRAASWREQHDRGVSKIPSNDFSLYDHVLDTVAMVGAVPARYTWTDGEVPLDTYFAMARGNQDQAADCGHAGDEHAANGHGLAAMEMTKWFDTNYHYIVPELTDDQSFALSSAKPVDHFLEAKALGIHTRPVLLGPVTFLKLAKSPEEGFNPIALLPRLLPVYEELLRRLKLAGADWVQIDEPALVVDLVPNERDALQFAYCRLSKAAPELKIMVAIYFGSLGDNLETAISLPVAGLHVDLVRAPEQLETVGRLAQKDLVLSLGLIDGRNVWRANLPAILDRIKPIVAGWPLDRVEIAPSCSMLHVPIDLDMETALDADVKSWLAFAAQKTDELVVLARALAEGRDAVAAELEASAEAAAARATSAKVHDPLVEGRVASIKVAMTRRKSAFDVRSKLQGDTFGLPSFPTTTIGSFPQTAEVRKARAAHAKGELSYVDYEAFLKKEIEAAVRWQEEIGLDVLVHGEFERNDMVQYFAEQLRGFAFTQHGWVQSYGSRFVRPPIIIGDVSRQNPMTLHWWRYAQSLTPKPVKGMLTGPVTILNWSFVRDDLPRSAVCRQVALAIRDEVSDLEKAGAKMIQIDEAALREGLPLREADWQAYLDWAVECFRLASTAVGDATQIHTHMCYSEFGDIVDAIAAMDADVISIETSRSQLELLDTLRTFKYPNEIGPGVYDIHSPRVPEVGEISNLIMLARKRLSDGQLWVNPDCGLKTRRWEEVRPALVNMVAAARAIRQKAQTA

SEQ ID NO: 41817 - protein, 319 aa, Streptococcus agalactiae NEM316
MSKVRYGVVSTAKVAPRFIEGVRLAGNGEVVAVSSRTLESAQAFANKYHLPKAYDKLEDMLADESIDVIYVATINQDHYKVAKAALLAGKHVLVEKPFTLTYDQANELFALAESCNLFLMEAQKSVFIPMTQVIKKLLASGEIGEVISISSTTAYPNIDHVTWFRELELGGGTVHFMAPYALSYLQYLFDATITHASGTATFPKGQSDSQSKLLLQLSNGVLVDIFLTTRLNLPHEMIIYGTEGRLIIPHFWKTTHAKLVRNDTSARTIQVDMVSDFEKEAYHVSQMILEGQRVSHIMTPQLTLSGVKIIEDLYRSWGK

SEQ ID NO: 41818 - protein, 480 aa, Ehrlichia canis str. Jake
MLSIFSSIISLLNILSILVRYNVLPYTYFFADRSIRRKSQGERVTMALQRLGPIFIKFGQSMSSRADIIGEEIANHLLCLCDKLPAFPYADVVRIIEEDFKCNISEMFCEFEQKPIAAASIAQVHKAKDIDGNVRAVKVLRPKIEKIFERDIKLMFWLARLAQYFSRFRRFQLLQLVQTFREICRMEIDLRFEAANAEELRSNIQDDDGCYVPEVDWTKTTRRVLTLEWVDAVPIYSVYKSENCETLVRNLIFCFCNQVYRDRFFHADMHPGNLMVDTKGRIVIIDFGIVGRLDKATCMYVTEILVGFLKKDYQYVADIHYRAGYVDAKYSSFITACRAIGEPIVGKNAENISISMLLTQLFKITSDFDMKLQPQLFLLQKTTVLVEGVCRQLCPEINMWKVAELWMEKYSIEKNKYIQKLKRSYICQTINDIPSFMKKVDKSLDVISNYQELNKANIGINRDIIWALIVGGLIIKLIIG

SEQ ID NO: 41819 - protein, 604 aa, Triticum aestivum
  misc_feature (568)..(568): Xaa can be any naturally occurring amino acid
  misc_feature (577)..(577): Xaa can be any naturally occurring amino acid
  misc_feature (586)..(586): Xaa can be any naturally occurring amino acid
  unsure (1)..(604): unsure at all Xaa locations
MDTHIGSVDGPSPAAVNGAVGCPASAPGCPIMSSHPVVSPGEASLGRHLARRLVQVGVSDVFAVPGDFNLTLLDHLVDEPGLRLVGCCNELNAGYAADGYARARGVGACAVTFTVGGLSVLNAIAGAYSENLPVICIAGGPNSNDYGTNRILHHTIGIPDFSQELRCFQTVTCHQAVVTNLDDAHEQIDTAIATALRESKPVYLSISCNLPGLPHPTFTRDPVPFFLAPRMSNKMGLEAAVEATVEFLNKAVKPVLVAGPKLRVAKAGKAFVDLVDASGYAYAIMPSAKGFVPETHPHFLGTYWGAVSTAFCAEIVESADAYLFAGPIFNDYSSVGYSFLLKKDKAIIVQPERVIVGNGPAFGCVMMKEYLSALAKRVQKNTTAYENYKRIFVPEGHPLKGEANEPLRVNVLFKHIQDMLTGDSAVLAETGDSWFNCQKLKLPEGCGYEFQMQYGSIGWSVGALLGYAQGASDKRVIACIGDGSFQVTAQDVSTMLRCEQNSIIFLINNGGYTIEVEIHDGPYNVIKNWNYTALVEAIHNGEGKCWTAKVKCEEELTAAIEGLGEERXSLCFIQVIXAHKDDTNKXLLQWGPRSLLPIQATNPK

SEQ ID NO: 41820 - protein, 163 aa, Klebsiella pneumoniae
DKVNLSIGLYYNDDGIIPQLQAVAEAEARLNAEPHGASLYLPMEGLSGYRQAIAPLLFGAEHTALKQNRIASIQTVGGSGALKVGADFLKRYFPESHVWVSDPTWENHIAIFEGVGFEVSTYPWFDKATNGVRFEDLLATLQTLPARDIVLLHPCCHNPTGAD

SEQ ID NO: 41821 - protein, 294 aa, Saccharomyces cerevisiae
TTPLVHVASVEKGRSYEDFQKVYNAIALKLREDDEYDNYIGYGPVLVRLAWHTSGTWDKHDNTGGSYGGTYRFKKEFNDPSNAGLQNGFKFLEPIHKEFPWISSGDLFSLGGVTAVQEMQGPKIPWRCGRVDTPEDTTPDNGRLPDADKDADYVRTFFQRLNMNDREVVALMGAHTLGKTHLKNSGYEGPWTANNNVFDNSFYLNLLNEDWKLEKNDANNEQWDSKSGYLQLPTDYSLIQDPKYLSIVKEYANDQDKFFKDFSKAFEKLLENGITFPKDAPSPFIFKTLEEQGL

SEQ ID NO: 41822 - protein, 244 aa, Thermosynechococcus elongatus BP-1
MPLKAVLFDFNGVILDDEAIHAALIEEILLQENLRPQRGEYDLFCLGRSDRACLDNLLSRRGRAVTPAYLDKLVAQKAAAYRARLASIEPFPFFAGAIALLQKLHAARLKIAIVTGAVRSDVDLALERGHLHSMVDCIISAESVERSKPYPDPYLRAVEALQALGSDLTAADCLAIEDTLVGIQSAREAGVKVLGVAHTYPFHMLQRRCHWALDRLDQFDLEAIAPVFDRSVAVTPPRGVSPRQ

SEQ ID NO: 41823 - protein, 335 aa, Pseudomonas syringae pv. aptata
MALGNEAPEFDIDDEVLLMEAGIVLKEASNEKQPAAVSGRTKVKHSTSLKQHKYIDYTRALDATQLYLNEIGFSPLLSPEEEVHFARLSQSGDPAGRKRMIESNLRLVVKIARRYVNRGLSLLDLIEEGNLGLIRAVEKFDPERGFRFSTYATWWIRQTIERAIMNQTRTIRLPIHVVKELNVYLRAARELTQKLDHEPSPEEIANLLEKPVGEVKRMLGLNERVSSVDVSLGPDSDKTLLDTLTDDRPTDPCELLQDDDLSQSIDQWLSELTEKQREVVIRRFGLRGHESSTLEDVGLEIGLTRERVRQIQVEGLKRLREILEKNGLSSESLFQ

SEQ ID NO: 41824 - protein, 692 aa, Hordeum vulgare subsp. vulgare
MLLQPYHMIAPLLLLLVAAGSCHAAIDGGGSDDGRMFVYNGFTGANLSVDGPSLIMPNGLLLVANATGRTGGSLNGHAFRPFPLPFHTASNATGSVRSFSTSFVFGIIRQYEGLGSDGMAFFVSASKEALSTAQPGPSLGLLNDINNRNRNSSARIFAVELHTSRNVQLHDINDNHVGVDVDSSLVPLDSASAGYYDDDEDGGRFQNLSLISRKAMQVWVDYDGRATEITVTIAPLGLAKPKKPLLRTITDLSGVLQSTAYMGFSASTGYRTRHFVLGWNFALDGPAPVLDLSMLPALPTALSNSRSMSITMKIVLALASVALVSVGIGVYIFVRRRLKYSEVHEDWEVPFGPNRFSYKDLFHATEGFSDKNLLGRGGFGSVYKGVLRKSDKEVAVKRLSHDSRQGKKEFIAEVVSIGHLRHQNIARLLGYCRRKGEFLLVYEYMENGSLDKYLHTRNGPTLCWSQRYSIIKGVASSLLYLHEEWEHVVIHRDIKPSNVLLDSKMNGWLGDFGLAKIYGRETAAPATHVAGTIGYLAPELARTGRPTPFTDVYAFGMFLLEVTCGRKPIFTDKQNNRLLLVEWVLEHHRDGSILDTVDPRLQGEFNMEEVTIVLKLGLICTYPLPNMRPIMRKVMQYLVHNQSPPDLSPAYISYMSLMQNQGFNSDNMNTTCPEATTSVATASSATILRDGR

SEQ ID NO: 41825 - protein, 135 aa, Methanococcoides burtonii DSM 6242
MVLKNIVRAVKNIYKPPITRRYPEVPTELSDRFRGLQKLDKSKCIGCGICANTCPNSAIKIVRARVNKDSDKTRWFPAIDISHCMFCGLCIDQCPQDALSSTKVYTTGVIRLTHEELLYTPDMLAREIPVGENGE

SEQ ID NO: 41826 - protein, 335 aa, Xylella fastidiosa 9a5c
MSTGKHPMKSLVRVAVTGAAGQIGYSLLFRIAAGEMFGKDRPVILQMLELPDEKAQAALKGVMMELEDCAFPLLAGMVGTDNPDIAFKDADVALLVGSRPRGPGMERKDLLMENAKIFTAQGAALNKVARRDVKVLVVGNPANTNAYIAMKSAPDLNPKHFTAMLRLDHNRALSQLSTKLSKPVANIEKLIVWGNHSPTMYPDYRFATADGTPIIEAINDQAWNANSFIPTVSKRGAAIIEVRGLSSAASAANAAIDHMRDWLLGSNGKWITMGVPSDGSYGIPEGMIFGFPVTTTNGEYSIVKDLPIDTFSKTYIDKTLAELEEERASIAHLLR

SEQ ID NO: 41827 - protein, 976 aa, Pisum sativum
MEHLKKSPSSSSSSSMRPSFPRDPRGSLEVFNPTSNSSSPVRSPSNLKNWTEIEEPRNELSEQHNEFSDEVTNTSWMAIKEGETGAAVQRAAEWGLMLTTDAETGKPQGVAVRNSGGDEPSVKLETKRNSNNTVRTSGESSDGDDPRGFPRVSEDLKDALSAFQQTFVVSDATKPDYPILYASAGFFKMTGYTSKEVIGRNCRFLQGADTDPDDVARIREALEGGKSFCGRLLNYKKDGTPFWNLLTISPIKDDDGNVLKLIGMLVEVNKHTEGSKEKKLRPNGLPESLIRYDARQKEKATSSVSELLEAMKRPRALSESGQRPFIRKSGGGGGSEEDEEAVENKSRRKSDSVASFRPKPQGKIRHSMERISELPENKQKNSRRGSFMGFMRKSDSIDESIDNEVIVDVSSGSEDDERDDSFEFDDKEKLREKRKGLDLATTLERIEKNFVITDPRLPDNPIIFASDSFLELTEYSREEILGKNCRFLQGPETDPATVRKIREAIDNQTEVTVQLINYTKSGKKFWNLFHLQPMRDHKGEVQYFIGVQLDGSQHVEPLHNCIAEDTAKEGELLVKETAENVGEAVKELPDANQKPDDLWMNHSKVVRPKPHRKDDDAWRAIQKVLENGEQVGLKHFRPIKPLGSGDTGSVHLVELEGTGQYFAMKAMDKGVMLNRNKVHRACTEREILDMLDHPFLPALYASFQTKTHVCLITDYYSGGELFLLLDQQPTKVLKEDSVRFYAAEVVIALEYLHCLGIIYRDLKPENVLIQSNGHVSLTDFDLSCLTSCKPQLILPAIEEKKKRKKKKNKGQQKNQQVPMFMAEPMRASNSFVGTEEYIAPEIITGSGHTSAVDWWALGILLYEMLYGYTPFRGKTRQKTFANILHKDLKFPKSKPVSPHGKQLIYWLLHRDPKNRLGSLEGANEIKNHPFFKNINWALVRCTKPPELDGPILLDNDEKKEAKEIDPGLDDLQKNIF

SEQ ID NO: 41828 - protein, 613 aa, Bacillus licheniformis ATCC 14580
MCGITGWVDFKKPLVREQSIMEKMTDTLSKRGPDDTNIWGKRHVLFGHKRLAVVDLEGGRQPMTRTHQGYDYTICYNGELYNTEDLRKELRRRGHQFKSHSDTEVLLHSYMEWKEECIDRLNGIFAFAVWDEKRDLLFAARDRLGVKPFFYTEQGSSFLFGSEIKAILAHPEVKAKVDRSGLAEIFGLGPSRSPGSGVFKGVKEIRPGHAMIFSKDGLTVWRYWNVKSEKHTDSFDETVENVRSLFQDAVTRQLVSDVPVCTFLSGGVDSSAITATAAKHFEREGKAPLHTFSIDYEDNEQYFTSSSFQPNADGPWIKKMSDAFGTVHHNCVISQEELAAYLEEAVLVRDLPGMADVDSSLLWFCREIKKDFVVSLSGECADEIFGGYPWFHSAEDVKGFPWMRSMEERIGLLQDGWQKKLNLSEYVKAKYEETVKETPLLEGETGAEKRRRELFYLNMLWFMTTLLDRKDRMSMGASLEVRVPFADHRLVEYVWNIPWDVKMHGSREKGIFRKALEGILPDEVLYRKKSPYPKTHHPAYTKAVIRWLESLLEQKDSALYAFLEKKKLERLIETEGASFQVPWYGQLMKGPQLIAHLAQIHTWFESYRIDIEE

SEQ ID NO: 41829 - protein, 425 aa, Bacillus licheniformis ATCC 14580
MTWVAIGTLLVFFMHAGFAMVESGFTRAKNTLNILMKNFLTISIGSILYFFAGYAFMFGDSAGGFIGTSGFALAGDQDVGFFVFQAVFAATCATIISGAVAERMKLGSYMILTLFMTGLIYPVVGHWTWGEGWLYDLGFVDFAGSSIVHLTGAAGAVAAVMFLGPRIGKYTNGKVNAIPGHSIPLGALGVFILWFGWFGFNGGSTLAADPAAVPHVITTTLLAASGGVVSSALFTYFRYGRIDPSLTLNGALGGLVGITAGADGVSFTGSILIGFIAGVILVVGVQFIDQVLKLDDPVGALAVHGICGVWGTLAVGLFNTSSGLFYGGGAAQLGIQAVGILSIAAWTLAATYAVAAAMKALAPIRVSKEEEISGLDYAEHGSSAYEYKESYIDQDDVDVSSAFGTDLVSRLNNLKPGPSSKTEQV

SEQ ID NO: 41830 - protein, 447 aa, Ulva pertusa
MFGALSKAVGSVCSRQGQAAVTGLGSVTGHQVRRAGHAENTNTFIREALAVLDLPPAMEKIVITPQREMTVELIINRDDGKPESFMGYRVQHDNARGPFKGGLRFHKDADLDDVRSLASLMSFKTALLDVPFGGAKGGITVDTKALSEHEIEKLTRKFVQEIKDIIGPFRDIPAPDVGTDGRVMAWIFDEYSKFEGYSPGVVTGKPTWLHGSHGRESATGRGTVFGIKNMLQAFGEGPPADKTFAIQGFGNVGAWAGRLLAEQGGIVKAVSDASGCVYDDGPSGIDVPKLLRHLHRGDDLSKYPHGQQLLRDEIFDVKCDVFVPAALGGVITDPVARKISCKYIVEAANGPTTPSADLILRDRGIPVLPDIYTNAGGVTVSFLEWVQNLQNFKWTTEQVNDQLKTRMDEAFQSMWDSSQEHGVPLRTGAFTVSLRRVVRATVNRGFN

SEQ ID NO: 41831 - protein, 313 aa, Triticum aestivum
NSFPPSSSNFIVFKHSQLVVFPEAFVGGYPRGSTFGFGISISITNPKDKGKGEFQKYYAAAIDVPGPEVTLLAAMAGKYKVFLVMGVIEREGYTLYCSVLFFDPLGRYLGKHRKLMPTALERIIWGFGDGSTIPVYDTPLGKIGALICWENKMPLLRTALYGKGIEIYCAPTADSRPVWQASMTHIAMEGGCFVLSANQFCRRQDYPPPSEYAFAGLGEEPSPETVVCPGGSVIISPSGEVLAGPNYDGEALITADLDMGKIVRAKFGFDVVGHYARPEVLSLVVDDQPHRPVSFTSAAEKTPAAKSDGTAKP

SEQ ID NO: 41832 - protein, 421 aa, Ulva pertusa
MFGALSKAVGSVCSRQGQAAVTGLGSVTGHQVRRAGHAENTNTFIREALAVLDLPPAMEKIVITPQREMTVELIINRDDGKPESFMGYRVQHDNARGPFKGGLRFHKDADLDDVRSLASLMSFKTALLDVPFGGAKGGITVDTKALSEHEIEKLTRKFVQIFDEYSKFEGYSPGVVTGKPTWLHGSHGRESATGRGTVFGIKNMLQAFGEGPPADKTFAIQGFGNVGAWAGRLLAEQGGIVKAVSDASGCVYDDGPSGIDVPKLLRHLHRGDDLSKYPHGQQLLRDEIFDVKCDVFVPAALGGVITDPVARKISCKYIVEAANGPTTPSADLILRDRGIPVLPDIYTNAGGVTVSFLEWVQNLQNFKWTTEQVNDQLKTRMDEAFQSMWDSSQEHGVPLRTGAFTVSLRRVVRATVNRGFN

SEQ ID NO: 41833 - protein, 507 aa, Frankia sp. EAN1pec
MTVQKPRPTTTDAGIPVASDEHSLSVGPDGPLLLQDHYLIEQMANFNRERIPERQPHAKGGGAFGTFQVTQDMSAFTRAAVFQPGTETDVIIRFSTVAGERGSPDTWRDPRGFAVKFYTSEGNLDIVGNNTPVFFIRDPLKFQHFIRSQKRRADNNLRDHDMQWDFWTLSPESAHQVTWLMGDRGIPRTWRHMNGYSSHTYMWINAAGERFWVKYHFKTDQGIEFFTQDEGDQMASVDTDYHQRDLFEHIAAGDFPSWTLKMQIMPFEEAKTYRFNPFDLTKVWPHGDYPLHEVGRLTLNRNITDFHTEMEQAAFEPNNIVAGTGLSPDKMLLARGFSYADAHRARLGVNYKQIPVNSAKVPVHSYSKDGAMRVQNVTDPVYAPNSYSGPVAQPELTDDGGHWYSDGEMVRAAYTSRPEDDDWGQAGTMVRDVLDDAARQRLVDNVVGHLLDGVSEPVLVRAFEYWRNVDKDLGTRIEADVRAKQDETDPKAAQQANPARSSAQAKA

SEQ ID NO: 41834 - protein, 163 aa, Klebsiella pneumoniae
DKVNLSIGLYYNDDGIIPQLQAVAEAEARLNAEPHGASLYLPMEGLSGYRQAIAPLLFGAEHTALKQNRIASIQTVGGSGALKVGADFLKRYFPESYVWVSDPTWENHIAIFEGAGFEVSTYPWFDKATNGVRFEDLLATLQTLPARDIVLLHPCCHNPTGAD

SEQ ID NO: 41835 - protein, 342 aa, Photobacterium profundum SS9
MLTRHLGGAMSRSSTAKKTDTLNLDQDIDIEAIADAAAASTKAESEESSNDVDVSKYGTTQKALDATQLYLGEIGFSPLLTAEEEVLYARRALRGDEIARKRMIESNLRLVVKISRRYSNRGLALLDLVEEGNLGLIRAVEKFDPERGFRFSTYATWWIRQTIERAIMNQTRTIRLPIHVVKELNVYLRTARELAQKLDHEPTAEDIALKLEKPVDDVNRMLRLNERVSSVDNPIGGDSEKALLDIIPDEKGGSPESSTQDDDIKNSIVHWLQELNPKQREVLARRFGLLGYEASTLEDVGREIGLTRERVRQIQVEGLRRLRDMLTHQGLNIESLFNQGAQ

SEQ ID NO: 41836 - protein, 92 aa, Brassica napus
STHASAAIKGYGPVHTGGRWFDDMVNVPFSSEPFVAGMVAFFLDNTLHKKDSSIRKDRGKHWWDKFRSFKGDTRSEEFYSLPFNLNKYFPSV

SEQ ID NO: 41837 - protein, 163 aa, Klebsiella pneumoniae
DKVNLSIGLYYNDDGIIPQLQAVAEAEARLNAEPHGASLYLPMEGLSGYRQAIAPLLFGAEHTALKQNRIASIQTVGGSGALKVGADFLKRYFPESHVWVSDPTWENHIAIFEGAGFEVSTYPWFDKTTNGVRFEDLLATLQTLPARDIVLLHPCCHNPTGAD

SEQ ID NO: 41838 - protein, 250 aa, Sphingomonas paucimobilis
MANRLAGKVALITGGASGLGAAQAKRFAEEGAKVVIGDLNEEMAKGVVAEIRAAGGDALFIRLDVTDAASWNNAIAAAVEAFGGLTTLSNTAGIIHPGGFEEESIEGWNKMVAVNQTAIFLGIKAAIPELVKSGNGSIINISSLIGMFPTAGNASYCATKAAVRIMSKAAALEFVDRGVRVNTIVPGGMNTPITANVPPDVLKQQTSQIPMGKLGDPIDIANGALFLASDEAKYITGVDLPIDGGWSVGV

SEQ ID NO: 41839 - protein, 327 aa, Clostridium acetobutylicum ATCC 824
MNVLVCGGAGYIGSHMAAYLLENGHNVVIVDNLTTGHKESILNNKLYVGDLRDEDFLNKVFDENKIDAVIDFAANSLVGESVANPLKYFDNNIQSVVKLLEAMKNHDVKYIVFSSTAATYGEPDNIPILEGDKTFPTNPYGESKLAVEKILKWCDNAYGIKYTALRYFNACGAHISGNIGEDHNPETHLIPLILQVALGKRDKIMIYGDDYDTEDGTCVRDYVHVSDLASAHLLALERLKNGGKSAIYNLGNGKGFSVKQVVEATRKVTGINIKAEIGERRAGDPGTLIASSDRAILELGWKPKFNSLETIIETAWKWHKNHPNGYK

SEQ ID NO: 41840 - protein, 268 aa, Legionella pneumophila str. Paris
MNRVALVQMVSSAKIADNLQLTEQYLIQAREQEASLVVLPENFAFMGMNEREKLHIAEYYGQGPIQQRISELARDLRVWIIAGTIPLKSMGSKVRASCIVYDDKGLNVARYDKIHLFDVIVSEQEKHQESLTIEAGKDIALVDTPVGKIGLTICYDLRFPELYQYLTQRGAQLLSVPSAFTAVTGAAHWEVLLRARAIENLCYVLAPNQGGTHENGRHTYGHSMVVEPWGKVLAQKEEGQGVILADIDLERLSQLRRQFPCVEHHVLM

SEQ ID NO: 41841 - protein, 425 aa, Symbiobacterium thermophilum IAM 14863
MDVRSMARQARAAQRQLELTSPEERNAALEAIARALEARAGQIVAANRADLAAAEEAGLPGPMIARLRLDEGKLAGVIRGVRAVAELPDPLAVEPQAWIRPNGLRIQRVRVPLGVVGIIYESRPGVTVDAAVLCLKAGNAVLLKGGKEAARSNAALGEAMAAGLQEVGLPVELAQVLPSTREAAQELMAARSLVDVLIPRGGAGLIRATVEQSQVPVIETGTGVCHVYVHRAADLAMAREIVLNAKCSNPAVCNAAETLLVDREVAAPFLAEAGPALLAAGVRLRACPEALAILQETARPDLAGAGPAAVEPATEEDWAAEYLDLCLAVKVVSGLDEALAHIARYGTGHSEAIVTGDAGAADRFLRSVDAAAVYHNASTRFTDGGEFGFGAEIGISTQKLHARGPMGLAELTTYKYVVLGNGQVR

SEQ ID NO: 41842 - protein, 266 aa, Glycine max
CEILELDPSAASQHSKSSSKQGSRCVKPPIIYGDVSRPKPMTVFWSSLAQSFTKRPMKGMLTGPVTILNWSFVRNDQPRSETTYQIALSIKDEVEDLEKAGITVIQIDEAALREGLPLRKSEQAHYLDWAVHAFRITNVGVQDTTQIHTHMCYSNFNDIIHSIIDMDADVITIENSRSDEKLLSVFREGVKYGAGIGPGVYDIHSPRIPPTEEIADRINKMLAVLEKNILWVNPDCGLKTRKYTEVKPALTNMVAAAKLIRNELAK

SEQ ID NO: 41843 - protein, 262 aa, Symbiobacterium thermophilum IAM 14863
MRERLRHCKRVIIKVGTSTLTHPGGHLHLGRMEALVRQIADLHFEGRQVILVTSGAVGAGLGRLGLAERPAEVAAKQALAAVGQGLLMQRYEGLFSEYGLVVGQVLLTREDLEDPDRRASSAQVMERLLAWGVIPIVNENDTVTSEEIRVGDNDTLSARVAALVRADLLILLSDVDGLYPADPHLHPGLSPIPWVSPDDDLDRFAGGPGSANGTGGMVTKVAAARICAEHGIPMVLACGERPDVLRQILAGEEIGTLFSREG

SEQ ID NO: 41844 - protein, 555 aa, Legionella pneumophila str. Paris
MQKESNSNSLFNLLLKNEKNSADHVYLRQPKSGVWHEYTWSAVMLQARKVAGFLHHLGLKKGDHISIISKNCAEWFIADFGIHIAGMVNVPLFANQNEESAHYVLDHGDVKLVFVGKLDDHQRVRQFIPKSYPTIGFDYHKDLQVDYEWSDVLKSDPMINLVEPEPDALYTIIYSSGTSGAPKGAMYTNRSIANYLTVFPKDLLRIRELEHYKLISYLPLAHVYERSAIQLGSVAINASVSFVESLEKFAENLREVSPTFFTAVPRIWGVFKQKIEQKLPPAKLNFLLKIPLISSLIKRKIIHSLGLSECTNCFSGASHLPISIIDFFEKLGIYIQEGYGQSENLAYATLSMLNERKRGYVGTPRLEVEIKIGEENELLMKCPCLMSGYYKNEQATKNAFTEEGWLRTGDVVDVDNEDRVKILGRLSENFKNQTGEFIAPSPIEKLFSVNSMLEQLCLVGRELPNNVLLVTLNEGVRLGMPKEEITHSLQETLKQVNSKLVKYEKVSHILVLKDVWTTENDKLTPTLKVKRRVVEKDYAELIQKALQQSQSIVWE

SEQ ID NO: 41845 - protein, 152 aa, Propionibacterium acnes KPA171202
MTRTFDPIREMDRLLSDVTRTPATVAVPMDLYREGDDYTVAVDLPGVDPASIDIDVDDRTLTIRAERAAKVAKEAQWLSRERAMGTFARQLTLGHGLATDRITAEYTDGVLTLTIPVAETAKPRKVEVRHGSTTIDAMTDQAQVGSGEHQEQ

SEQ ID NO: 41846 - protein, 584 aa, Mesorhizobium sp. BNC1
MLFFISSAQLSSNLRHSPICAAEHKRLACVHRVMGNPGPARKELMKGTSPDVEVHSSQEPWWRRGVIYQIYPRSFQDSNGDGIGDIRGIIDRLDYLVWLGIDAVWISPIFFSPMADFGYDIADYRKIDPLFGTLTDFDQLIEAAHRRGIRILLDYVPNHSSDRHQWFLEARSSRDNPRRDFYIWRDAAPDGGPPNNWQSEFGGSAWELDAATGQYYYHAFLKEQPDLNWRNPEVRREMYDVLRFWLDRGVDGFRVDVMWHLIKDAEFRDNPQNPDWTEDMPPHKSVLSIYSCDQEEVHDVVSEMRAVLDEYGGDRLLIGEIYLPIARLVAYYGRDLRGAHLPFNFRLIEAQWDARHIERQIVEYEAALPEGGWPNWVLSNHDKPRIASRVGRDQARVAAMMLLTLRGTPTIYYGDEIGMNDAPIPPERVQDPFELRVPGRGFGRDPQRTPMQWDNTVNAGFSTGSPWLPLAPDKDSFNVEAERSDPHSMLSLYRRLIAFRRENDALNLGRYASVEADSCVLAYLRETENDRYLIALNLGPEPAVLETPGQCRIVISTEGKAEGEIVEEKLHLQGNEGVLAEMMS

SEQ ID NO: 41847 - protein, 540 aa, Mesorhizobium sp. BNC1
MKDYWWKDAIVYAVDVERFCDSDGDGVGDFKGLTSKLDYIAELGVTCIWLLPFYPSTGEDNGYSITDYLRVDSRFGLFQDFLEFIHRAGEHGIRVVVDLVVHHTSNQHPWFQAARHNEKSRYRDFYIWTHNPPPTPPGKGTIFPGEEGTVWTYDEVARAYYHHRFYHFEPGLNHANPDVRDEIGRIIDYWLSFGVAGFRVDAASHILENPLAKSGEDENAPDMLREMFHRATGSKSDIVMLGEVDESPNELERFFDGTRLNMMFNFLLNNYLILGLAKEKAEPIQRGLAMLPVPPENGQWANFLRNFDEADLERLTPEELESVLKIFAPKEEMRIYGRGLRRRLAPMLDGDVRRLKMAMSLLYSMPGAPVLVYGDEIGMGEDLTQEGRNSVRSPMQWDGSRNAGFSSARKERMVQPIIDKGRFAFERINAETQRNDPASLLSFVKQLAILRRERTEIGSGFCAFLECGSDHVLAHHYKSEAAPLVMVHNLAGEAVKIDVKLPAGVTSLGTLFGGEMPSIEDGHLRMSLEPYGVRWLGLPR

SEQ ID NO: 41848 - protein, 153 aa, Brassica napus
MDSSSSGTSSSTNQTSSGSEENLMEQRKRKRMLSNRESARRSRKKKQKLLDDLTAQVNQLRKENSEIVTSVSITTQHYLTVEAENSVLRAQLDELSHRLESLNDIIGFLDNTNGICSNTLSGPESDDFLVSQFNMNMFYMNQPLMASSDALLY

SEQ ID NO: 41849 - protein, 964 aa, Oryza sativa (indica cultivar-group)
MAGKVEKMASIDAQLRMLAPAHRSEDDKLVEYDALLLDRFLDILQDLHGDDLREMVQECYEIAAEYEGKHDSQKLDELGNMLTSLDPGDSIVMAKAFSHMLNLANLAEEVQIAYRRRIKLKKGDFADENSALTESDIEETFKRLVVDLKKSPAEVFDALKSQTVDLVLTAHPTQSVRRSLLQKHSRIRNCLVQLYSKDITPDDKQELDEALQREIQAAFRTDEIRRTQPTPQDEMRAGMSYFHETIWKGVPKFLRRLDTALKNIGIDERVPYNAPLIQFSSWMGGDRDGNPRVTPEATRGVCLLARMMASNLYCSQIEDLMFELSMWRCNDELRARADELHLSSKKDAKHYIEFWKKVPPSEPYRVVLGDVRDKLYNTRERARQLLSSGYSDIPEETTLTSVEQFLEPLELCYRSLCDCGDRVIADGTLLDFLRQVSTFGLCLVRLDIRQESDRHTDVLDAITTYLGIGSYREWSEERRQDWLLSELNGKRPLFGPDLPKTDEIADVLDTFRVIAELPADNFGAYIISMATAPSDVLAVELLQRECHVKTPLRVVPLFEKLADLESAPAAVARLFSIDWYRERINGKQEVMIGYSDSGKDAGRLSAAWQLYKSQEELINVAKEFGVKLTMFHGRGGTVGRGGGPTHLAILSQPPDTIHGSPRVTVQGEVIEQSFGEEHLCFRTLQRFTAATLEHGMHPPIAPKPEWRALLDEMAVVAAKGYRSIVFQEPRFVEYFRLATPEMEYGRMNIGSRPSKRKPSGGIESLRAIPWIFAWTQTRFHLPVWLGFGSAFKHILEKDIRNLHMLQEMYNEWPFFRVTIDLVEMVFAKGDPGIAALYDKLLVSEELWPLGEKLRANCEETKQLLLQVAGHKDLLEGDLYLKQRLRLRNAYITTLNVCQAYTMKRIRDPDYHVTLRPHMSKEIMDWSKPAAELVKLNPTSEYAPGLEDTLILTMKGIAAGMQNTG

SEQ ID NO: 41850 - protein, 505 aa, Methanosarcina barkeri str. fusaro
MATLRGHEKVFSIAVTPNGKYAVSGSHDGTLKVWDLEKWREIRSLRAHSKSITAFAITSDGKLVVLGSLDGNLEVWNLETGEEKAAFKEHSEPITEIVITPDGKRAVSGSSDNTLKVWDLEKMEELTTLISHSNSVSKIAITPSGKYAISGSSDNTLKVWDLKKLDEETISTGHSKSVNKIVITPDGKLAVSSSYDGTLKVWDLKTKEEKVTLKGHSGPVTDFVITPDGKRIISGSSDKTLRVWDLKKGNMTLKGHKREVTSVAITSDGKYAISGSFDRTIKVWDLENGKIKVTLEGHKNYISTISIIPNKNCIVSSSHDETLKVWDLDRGIDTITLIGHSGSVSSVAITPDGKSIVSASGDGTHKIWSLENREEIATLEGHKSAPSTIVITPDGKYAVSASYDRTIKILDLKKQIVKTSLRGHTDSATLVAVTSNSRYVVSASRDNTLRVWDLESSSEVSCFTGDVPFTAFDILKDENIIVVGDSLGKVYFFHLHIPCKNNFYF

SEQ ID NO: 41851 - protein, 305 aa, Zea mays
MSSGTGKVVCVTGASGYIASWLVKFLLQRGYTVRATVRDTADPKKTLHLQALDGAKDRLHLFKASLLEEGSFDAAVAGCDCVFHTASPFYHNVKDPKAELLDPAVNGTLNVLRSCKKASIKRVIVTSSMAAVAYNGKPRTPDVVVDETWFSSAEVCEKNKQWYVLSKTLAEEAAWKYANDNGLEIITINPTMVIGPLLQPTLNTSTEAILKFINGSSSTYANFCFGWINVKDVALAHILAYEVPSANGRYCMVERVIHHSDLVKIIHEMYPGFPVPDKCADDAAFAPIYQGSKDKIRKLGMELTP

SEQ ID NO: 41852 - protein, 247 aa, Saccharomyces cerevisiae
MVHLGPKKPQARKGSMADVPKELMQQIENFEKIFTVPTETLQAVTKHFISELEKGLSKKGGNIPMIPGWVMDFPTGKESGDFLAIDLGGTNLRVVLVKLGGDRTFDTTQSKYRLPDAMRTTQNPDELWEFIADSLKAFIDEQFPQGISEPIPLGFTFSFPASQNKINEGILQRWTKGFDIPNIENHDVVPMLQKQITKRNIPIEVVALINDTTGTLVASYYTDPETKMGVIFGTGVNGAYYDVCSDI

SEQ ID NO: 41853 - protein, 155 aa, Triticum aestivum
  misc_feature (45)..(45): Xaa can be any naturally occurring amino acid
  misc_feature (56)..(56): Xaa can be any naturally occurring amino acid
  misc_feature (95)..(95): Xaa can be any naturally occurring amino acid
  misc_feature (109)..(109): Xaa can be any naturally occurring amino acid
  misc_feature (119)..(119): Xaa can be any naturally occurring amino acid
  unsure (1)..(155): unsure at all Xaa locations
MSSPSRRSSSPESNIDGGSGSGSAGDERKRKRMLSNRESARRSRXRAKQQRMEELXIAEARPPSRAENARVEAQIGAYTTELTKVDGENAVAPRXRHGELAGRLQALGXVLEIFQVAGXAPVDIPEIPDPLLRPWQSPFAPQLAAAGGMPDAFQF

SEQ ID NO: 41854 - protein, 451 aa, Solanum tuberosum
MAVSDSQNSQTCLDPDASRSVLGIILGGGAGTRLYPLTKKRAKPAVPLGANYRLIDIPVSNCLNSNISKIYVLTQFNSASLNRHLSRAYASNMGGYKNEGFVEVLAAQQSPENPDWFQGTADAVRQYLWLFEEHTVLEYLILAGDHLYRMDYEKFIQAHRETDADITVAALPMDEKRATAFGLMKIDEEGRIIEFAEKPQGEQLQAMKVDTTILGLDDKRAKEMPFIASMGIYVISKDVMLNLLRDKFPGANDFGSEVIPGATSLGMRVQAYLYDGYWEDIGTIEAFYNANLGITKKPVPDFSFYDRSAPIYTQPRYLPPSKMLDADVTDSVIGEGCVIKNCKIHHSVVGLRSCISEGAIIEDSLLMGADYYETDADRKLLAAKGSVPIGIGKNCHIKRAIIDKNARIGDNVKIINKDNVQEAARETDGYFIKSGIVTVIKDALIPSGIII

SEQ ID NO: 41855 - protein, 318 aa, Oryza sativa
MVSGAAHSASTSGGGGGSEGSPTGRAAPGMQGGGSAATPAASASASTPASETTVARRLDGLDIQGDDAPSSQPATSKKKKRGPGTRATGPDKGGRGLRQFSMKVCEKVESKGRTTYNEVADELVAEFADPNNNFASPDPDNPNTPQFDEKNIRRRVYDALNVLMAMDIISKDKKEIQWKGLPRTSMSDVEELKTEIIGLKGRIDKKNAYLQELEDQFVGLQNLAQRNEQLYGSGNAPSGGVALPFILVQHWGSLAKNQMIRKPGLEMEVSAQPHLSIINHPKLRGQTELDYQHRPLFPVYLKGVSSMNIRGYYDLLMV

SEQ ID NO: 41856 - protein, 545 aa, Photobacterium profundum SS9
MTTNYIFVTGGVVSSLGKGIAAASLAAILEARGLKVTMMKLDPYINVDPGTMSPTQHGEVFVTEDGAETDLDLGHYERFIRTKMTKRNNFTAGRVYEEVLRKERRGDYLGATIQVIPHITNEIKERVIAGSEGHDIAIVEVGGTVGDIESLPFMEAIRQLAVQKGRERTMFMHLTLVPYLAAAGEVKTKPTQHSVKELRSIGIQPDILICRSDRVIPANERAKIALFCNVQEKAVISMKDVDSIYKIPQLIKAQGLDDFVCKRFGITAPEANLAEWEQVIYEEANPTDEVTIGMVGKYIELPDAYKSVNEALKHAGLKNRLSVKIKYIDSQDVEAKGFEMLEGLDAILVPGGFGSRGIEGKIRTAQYARENKIPYLGICLGMQVALIEFARNVAGLADAHSTEFNAETKNPVVGLITEWVDSEGKVEERTENSNLGGTMRLGSQLCHLKNGSKARELYGNASIHERHRHRYEVNNNLLPQLEKAGLKISGLSADKKLVEIIEMPNHPWFVAAQFHPEFTSTPRDGHPLFEGFVKAAGQQLRGELK

SEQ ID NO: 41857 - protein, 163 aa, Klebsiella pneumoniae
DKVNLSIGLYYNDDGIIPQLQAVAEAEARLNAEPHGASLYLPMEGLSGYRQAIAPLLFGAEHTALKQNRIASIQTVGGSGALKVGADFLKRYFPESHVWVSDPTWENHIAIFEGAGFEVSTYPWFDKATNGVRFEDLLATLQTLPARDIVLLHPCCHNPTGAD

SEQ ID NO: 41858 - protein, 54 aa, Arabidopsis thaliana
MSTATFVEIILAIILPPLGVFLKFGCKVEFWICLILTLFGYLPGILYALYIITK

SEQ ID NO: 41859 - protein, 354 aa, Neisseria meningitidis Z2491
MKAARFYDKGDIRIEDIPEPTVAPGTVGINVAWCGICGTDLHEFMEGPIFIPPCGHPHPISGESAPVTMGHEFSGVVYAVGEGVDDIKVGQHVVVEPYIIHDDVPTGEGSNYHLSKDMNFIGLGGCGGGLSEKIAVKRRWVHPISDKIPLDQAALIEPLSVGHHAYVRSGAKAGDVALVGGAGPIGLLLAAVLKAKGIKVIITELSKARKDKARESGVADYILDPSEVDVVEEVKKLTNGEGVDVAFECTSVNKVLDTLVEACKPAANLVIVSIWSHPATVNVHSVVMKELDVRGTIAYCNDHAETIKLVEEGKINLEPFITQRIKLDELVSEGFERLIHNNESAVKIIVSPNL

SEQ ID NO: 41860 - protein, 385 aa, Neisseria meningitidis Z2491
MPSVPTVYRSLPVHKPMSLTRLILKFYALLRLFLGKNARTAWISHPACAGHEPGANHPDSPDRILCIEQALRRAGIWQHLQTIEAEEISDTRLALVHSSKYLNRLESCQPQKGKIFRLNDDTAISTGSLSAARFAAGSAVQAVDMVMNRKAWHAFCAARPPGHHAGSGKAGGFCLLNNVAAGVMHAIAEYRLKRIAVIDFDVHYGDGTAEIFKDDPRILFFNLFETDLFPFPENNDMPDGGNMVHLPLPPGTGSRTFREAVRRQWLPRLAAFKPELVLLSAGFDAHRLDESGRLNLHEADFAWLTHKIIQTASGCPGKIVSVLEGGYTLEPLAQSAAEHIRVLAGLGKSDAATAYQKTLDPTKKRFAKPKTGQVRQPTQSDRYDI

SEQ ID NO: 41861 - protein, 163 aa, Klebsiella pneumoniae
DKVNLSIGLYYNDDGIIPQLQAVAEAEARLNAEPHGASLYLPMEGLSGYRQAIAPLLFGAEHTALKQNRIASIQTVGGSGALKVGADFLKRYFSESHVWVSDPTWENHIAIFEGAGFEVSTYPWFDKTTNGVRFEDLLATLQTLPARDIVLLHPCCHNPTGAD

SEQ ID NO: 41862 - protein, 439 aa, Symbiobacterium thermophilum IAM 14863
MSQLKATLVRKIEEHRPRTQRLLKEFGHVVIDEVTIEKAIGGARDVRCLVTDISYLDPMEGIRFRGKTIEETFAALPKAPGGEYPTVEAFWFFLLTGEVPTQEQVDEVIAEWKERRNVPQYVYDVIRALPKDSHPMTMLSAGILAMQRESKFARYYHSGEYNKQRAWEYMYEDASDLVARIPMIAAYIYRYKYKDDVHIPPDPNLDMGANFAHMMGVPKPYDDVSRMYFILHSDHESGNVSAHTGHLVASALSDAYLAYSAALNGLAGPLHGLANQEVLRWIMDFQAKLGEGVEPTRENVTQALWDTLNAGQVIPGYGHAVLRKTDPRYTAQREFCLKHMPDDPLFKLVSMIYEVAPGVLMQHGKAKNPWPNVDAQSGVIQWHYGVREWDFYTVLFGVGRALGVMANIVWDRALGYPIERPKSVTTEMLEQWAAAGGRK

SEQ ID NO: 41863 - protein, 448 aa, Lycopersicon chilense
WSPELSSDLYRIDGWGAPYFTVNSSGDISVRPHGTDTLPHQEIDLLKVVKKASDPINSGGLGLQLPLVVRFPDVLKNRLESLQSAFDYAVQSEGYEAHYQGVYPVKCNQDRFVVEDIVKFGSGFRFGLEAGSKPELLLAMSSLCKGSSEGLLVCNGFKDAEYISLALVARKLQLNTVIVLEQEEELDLVIDISRKMAVQPVIGLRAKLRTKHSGHFGSTSGEKGKFGLTTTQILRVVRKLKESGMLDCLQLLHFHIGSQIPSTELLADGVGEAAQVYSELVRLGAGMKFIDIGGGLGIDYDGTKSSDSDVSVGYGLQDYASTVVQAVRFVCDRKNVKHPVICSESGRAIVSHHSVLIFEAVSSTTTRSQELSSMSLHSFVEKLNDDARADYRNLSAAAIRGEYDTCMLYADQLKQRCVDQFKDGNLDIEQLAAVDAVCDFVSKAIGAS

SEQ ID NO: 41864 - protein, 346 aa, Thermus thermophilus HB27
MEFYQFHPTGLYPLGILLTEGARGEGGILRNALGERFMERYAPTIKDLAPRDLVSRAMYLEVREGRGCGPKKDHVLLDLTHLPPEVIEKKLPDITEFSRIYLGVDPLKEPVPVMPTAHYAMGGIPTTLWGQVIKDEKNTVVPGLYAAGEAACVSLHGANRLGTNSLGDLVVFGRRAGIHAARFARDADYHELTEEHLGESRERIERIKNSTGKEKVAALRAELQQSMMDNASVFRTGELLKKQVEILKELMDRYKRISIDDKGDAYNTELVEALELGYLLEVSEALVHSALNRTESRGAHAREDYPERDDENWLKHTLAYKVEDGKVCFRYKPVVLGRFEPKPRTY

SEQ ID NO: 41865 - protein, 478 aa, Xylella fastidiosa Ann-1
MSEHYDVVVIGAGPAGYHAAIRAAQLGLKVACVDAALGKDGKPALGGTCLRVGCIPSKALLDSSRQYWNMGHLFNEHGISFKDAKMDVATMIARKDKIVKQFTGGIAMLFKANKITPYYGFAQLQPGNVVKVKQHEGKNIELKGTNVILASGSDSVELPFATFDGETIVDNIGALDFTKVPKRLAVIGAGVIGLELGSVWKRLGAEVTILEAMPNFLAAVDADVSKTAAKEFKQQGLDIKLNAKVSRTEISSKNNKKEVIVTYTDASGKQTLTVDKLLVAVGRKAATKGLLADGTGVQLNERGQIMVDEHCHTGVDGVWAIGDCVRGPMLAHKGFEEGIAVAELIAGLPGHVNFETIPWVIYTEPEIAWVGKTEQELKADSIPYKAGSFPFAAVGRAVAMAEPSGFVKVLAHAETDRVLGLHLIGVNVSELVHEGVLAMEFSGSADDLARICHAHPTLSEAIHDAAMAVSKRAIHKAN

SEQ ID NO: 41866 - protein, 294 aa, Saccharomyces cerevisiae
TTPLVHVASVEKGRSYEDFQKVYNAIALKLREDDEYDNYIGYGPVLVRLAWHTSGTWDKHDNTGGSYGGTYRFKKEFNDPSNAGLQNGFKFLEPIHKEFPWISSGDLFSLGGVTAVQEMQGPKIPWRCGRVDTPEDTTPDNGRLPDADKDADYVRTFFQRLNMNDREVVALSGAHTLGKTHLKNSGYEGPWTANNNVFDNSFYLNLLNEDWKLEKNDANNEQWDSKSGYLQLPTDYSLIQDPKYLSIVKEYANDQDKFFKDFSKAFEKLLENGITFPKDAPSPFIFKTLEEQGL

SEQ ID NO: 41867 - protein, 744 aa, Mesorhizobium sp. BNC1
MGLANIKQIWKWLWDEIAQPGRGFSSRGGTILVAFGFADLLIAGAAFLTKAAPLIPFLLVFAGAAAVAAAIALPSEKKPEEHPHEQTPAEQHIEELADRVSQMQEAEQRFYGLLETLGDLVINRDGEGRILYANRIFGELMECEPQDLFGKTLHQLGVDITPPSAGIFPEEERLSSTDVAIHTRNGLRWFSWTEISRREGESSSVSHWAIARDITARKRAETALVNARERAEQASIAKSRFLATVSHEIRTPMNGIIGMATLLSDTRLSSEQRTYVAAISTSASALLALIEDLLDYSKIEAGRLELEPQRMAARELIESVIELMAVRAFTKKIGLGCHIAPTVPDTILADPGRLRQILLNLLGNAIKFTDEGGVLMTVTTTIHDGAPKLAFRVDDTGPGIEKDSLSRIFQEFEQADTSSTRKHGGAGLGLAITRRLIDAMEGTVTVDSAPGEGATFTVYIPLVGAEGSAAETSLALKGFDVAILTPHAVEGEALAMTVRAHGGKARVFEGEKSALSLLRRRKSGFDAVIIDASLENDNGDLLRRLCRNGLRVHQALTLIAPTDRGRLNKFRTNGYNAFIARPARDRTLLRLLLNPQTAENVAPIGEATARTKATNDGRGLKVLLAEDNEINAMLARATLSKAGHSVAVVSNGRAAVDVLTHPARDFDIVLMDLHMPIMDGLDAIIQIRRYEEDTGLAPIPILVLSADGQEKTRQNALAQGATGFITKPLEPGRLLSALEVHTPA

SEQ ID NO: 41868 - protein, 448 aa, Solanum habrochaites
WSPELSSDLYRIDGWGAPYFTVNSSGDISVRPNGTDTLPHQEIDLLKVVKKASDPINSGGLGLQLPLVVRFPDVLKNRLESLQSAFDYAVQSEGYEAHYQGVYPVKCNQDRFVVEDIVKFGSGFRFGLEAGSKPELLLAMSSLCKGSSEGLLVCNGFKDAEYISLALVARKLQLNTVIVLEQEEELDLVIDISRKMAVQPVIGLRAKLRTKHSGHFGSTSGEKGKFGLTTTQILRVVRKLKESGMLDCLQLLHFHIGSQIPSTELLADGVGEAAQVYSELVRLGAGMNFIDIGGGLGIDYDGTKSSDSDVSVGYGLQDYASTVVQAVRFVCDRKNVKHPVICSESGRAIVSHHSVLIFEAVSSTSTRSQELSSMSLHSFVEKLNDDARADYRNLSAAAIRGEYDTCMLYADQLKQRCVDQFKDGNLDIEQLAAVDAVCDFVSKAIGAS

SEQ ID NO: 41869 - protein, 495 aa, Nocardioides sp. JS614
MFVSSNARKMLPAEVLTHPAVKALIERGTPTGSITPEEVRQASEDAAVEPRHLKALLGHLSSLGIAVEIPVTSRAVAATSARKTATAKTAAAKKAPAKAAAAPAKSAPAKKAAPAKAAPRKAAAEGAAGTESAEQTVTVGPDGKKVLPDLPDEQFEKDVAADPSIAEDEKQASFVVSAADDTDEPEQQVMVAGATADPVKDYLKQIGKVPLLNAEMEVELAKRIEAGLFSEEKLGKGGKLSAKVSEELEWIAEDGRRAKNHLLEANLRLVVSLAKRYTGRGMLFLDLIQEGNLGLIRAVEKFDYTKGYKFSTYATWWIRQAITRAMADQARTIRIPVHMVEVINKLARVQRQMLQDLGREPTPEELAKELDMTPEKVIEVQKYGREPISLHTPLGEDGDSEFGDLIEDSEAIVPADAVSFTLLQEQLHAVLDTLSEREAGVVSMRFGLTDGQPKTLDEIGKVYGVTRERIRQIESKTMSKLRHPSRSQVLRDYLD

SEQ ID NO: 41870 - protein, 235 aa, Methanosarcina barkeri str. fusaro
MMVFFDIDGTLLDHKSAEFTGVKLFHQNYRNFFGMDFNEFYSIWCKLSEKHFEKYLAKECSFEEQRIERIKELYLERNINLASEEALEVFDYYLRNYELSWKPFNDVIPCLKKLSKLKMGIISNGDLGQQKLKLDKMKISHYFVDIIAAGEFNVSKPHTEIFEIACKRNGEEPEKCFYVGDTIETDIIPCEKIGMKGIWINRNNKTLQNKNIKIIVSLKELANVLYESMPQSLDY

SEQ ID NO: 41871 - protein, 275 aa, Kineococcus radiotolerans SRS30216
MTQATPQVTLHDGVGIPQLGFGVWQVPPEQTAEVVLRALQAGYRHIDTAAGYGNEAGVGDALRASQIPREDVFITTKLANSEHGRDKTLAAFDASMAKLGLDYLDLYLIHWPLQADDYVETWKAFEEIKASGRVRTIGVSNFQKTHLRKLLDETGTVPTVNQVEVHPYLVQEDLRSFHAEHGIATEAWSPLAQRAGLVEDPVVTGIAEQLGRTPAQVVIRWHLQQGNVVIPKSVTPERIVSNIDVFGFELPPEQVDALTGLDRAERTGPDPDVLG

SEQ ID NO: 41872 - protein, 201 aa, Bacteroides thetaiotaomicron VPI-5482
MEEKNHIYPIFDRMMTREDKEELLGQHSVMIWFTGLSGSGKSTIAIALERELHKRGLLCRILDGDNIRSGINNNLGFSETDRVENIRRIAEVSKLFLDSGIITIAAFISPNNDIREMAANIIGKDDFLEVFVSTPLEECEKRDVKGLYAKARKGEIQNFTGISAPFEVPEHPALALDTSKLSLEESVNRLLEMVLPKIEKK

SEQ ID NO: 41873 - protein, 332 aa, Saccharomyces cerevisiae
MVRVAINGFGRIGRLVMRIALSRPNVEVVALNDPFITNDYAAYMFKYDSTHGRYAGEVSHDDKHIIVDGKKIATYQERDPANLPWGSSNVDIAIDSTGVFKELDTAQKHIDAGAKKVVITAPSSTAPMFVMGVNEVKYTSDLKIVSNASCTTNCLAPLAKVINDAFGIEEGLMTTVHSLTATQKTVDGPSHKDWRGGRTASGNIIPSSTGAAKAVGKVLPELQGKLTGMAFRVPTVDVSVVDLTVKLDKETTYDEIKKVVKAAAEGKLKGVLGYTEDAVVSSDFLGDSHSSIFDASAGIQLSPKFVKLVSWYDNEYGYSTRVVDLVEHIAKA

SEQ ID NO: 41874 - protein, 422 aa, Staphylococcus aureus subsp. aureus Mu50
MKNLILSVQHLLAMYAGAILVPIIVGTSLKFTPEQIAYLVTVDIFMCGVATFLQANKVTGTGLPIVLGCTFTAVAPMILIGQTKGIDVLYGSLFLSGILVIIIAPFFSHLVKFFPPVVTGSVVTIIGINLMPVAMNYLAGGQGAKDYGDVKNILLGLMTLIIILVLQRFTTGFIKSIAILIGLVLGTIGAGLLGMVDINQVNHAGWLGIPVPFRFSGFSFDVTSTLVFFILAIVSLIESTGVYHALSEITGKKLERKDFRKGYTAEGLAIVLGSIFNSFPYTAYSQNVGLVSLSGAKKNNVIYGMVVLLLICGCIPKLGALANIIPLPVLGGAMIAMFGMVMAYGVSILGHIDFKNQNNLLIIAVSVGLGTGISAVPQAFKGLGEQFAWLTQNGIVLGAISAIILNFFFNGIKYKQTEENVK

SEQ ID NO: 41875 - protein, 669 aa, Arabidopsis thaliana
MMNPSHGRGLGSAGGSSSGRNQGGGGETVVEMFPSGLRVLVVDDDPTCLMILERMLRTCLYEVTKCNRAEMALSLLRKNKHGFDIVISDVHMPDMDGFKLLEHVGLEMDLPVIMMSADDSKSVVLKGVTHGAVDYLIKPVRMEALKNIWQHVVRKRRSEWSVPEHSGSIEETGERQQQQHRGGGGGAAVSGGEDAVDDNSSSVNEGNNWRSSSRKRKDEEGEEQGDDKDEDASNLKKPRVVWSVELHQQFVAAVNQLGVEKAVPKKILELMNVPGLTRENVASHLQKYRIYLRRLGGVSQHQGNLNNSFMTGQDASFGPLSTLNGFDLQALAVTGQLPAQSLAQLQAAGLGRPAMVSKSGLPVSSIVDERSIFSFDNTKTRFGEGLGHHGQQPQQQPQMNLLHGVPTGLQQQLPMGNRMSIQQQIAAVRAGNSVQNNGMLMPLAGQQSLPRGPPPMLTSSQSSIRQPMLSNRISERSGFSGRNNIPESSRVLPTSYTNLTTQHSSSSMPYNNFQPELPVNSFPLASAPGISVPVRKATSYQEEVNSSEAGFTTPSYDMFTTRQNDWDLRNIGIAFDSHQDSESAAFSASEAYSSSSMSRHNTTVAATEHGRNHQQPPSGMVQHHQVYADGNGGSVRVKSERVATDTATMAFHEQYSNQEDLMSALLKQV

SEQ ID NO: 41876 - protein, 332 aa, Saccharomyces cerevisiae
  misc_feature (12)..(12): Xaa can be any naturally occurring amino acid
  misc_feature (48)..(48): Xaa can be any naturally occurring amino acid
  misc_feature (95)..(95): Xaa can be any naturally occurring amino acid
  misc_feature (233)..(233): Xaa can be any naturally occurring amino acid
  misc_feature (242)..(242): Xaa can be any naturally occurring amino acid
  misc_feature (287)..(287): Xaa can be any naturally occurring amino acid
  unsure (1)..(332): unsure at all Xaa locations
MVRVAINGFGRXGRLVMRIALQRKNVEVVALNDPFISNDYSAYMFKYXSTHGRYAGEVSHDDKHIIVDGHKIATFQERDPANLPWASLNIDIAIXSTGVFKELDTAQKHIDAGAKKVVITAPSSTAPMFVMGVNEEKYTSDLKIVSNASCTTNCLAPLAKVINDAFGIEEGLMTTVHSMTATQKTVDGPSHKDWRGGRTASGNIIPSSTGAAKAVGKVLPELQGKLTGMAFRXPTVDVSVVXLTVKLNKETTYDEIKKVVKAAAEGKLKGVLGYTEDAVVSSDFLGXSNSSIFDAAAGIQLSPKFVKLVSWYDNEYGYSTRVVDLVEHVAKA

SEQ ID NO: 41877 - protein, 398 aa, Pseudomonas aeruginosa PAO1
MSLFSAVEMAPRDPILGLNEAFNADTRPGKINLGVGVYYNEEGRIPLLRAVQAAEKARIEAHAPRGYLPIEGIAAYDQGVQKLLFGNESELLAAGRVVTTQAVGGTGALKLGADFLKRLLPDATVAISDPSWENHRALFEAAGFPVQNYRYYDAASNGVNRAGLLEDLNALPARSIVVLHACCHNPTGVDLELDDWKQVLDVLKAKGHVPFLDIAYQGFGNGIEEDAAAVRLFAQSGLSFFVSSSFSKSFSLYGERVGALSIVTESRDESARVLSQVKRVIRTNYSNPPTHGASVVSSVLNSPELRALWEQELGEMRDRIRDMRLAMVEQLAAHGAKRDFSFVGRQRGMFSYSGLTADQVERLKTEFGIYAVSTGRICVAALNKSNLETITKAIVQVL

SEQ ID NO: 41878 - protein, 332 aa, Saccharomyces cerevisiae
  misc_feature (32)..(32): Xaa can be any naturally occurring amino acid
  misc_feature (324)..(324): Xaa can be any naturally occurring amino acid
  unsure (1)..(332): unsure at all Xaa locations
MIRIAINGFGRIGRLVLRLALQRKDIEVVAVXDPFISNDYAAYMVKYDSTHGRYKGTVSHDDKHIIIDGVKIATYQERDPANLPWGSLKIDVAVDSTGVFKELDTAQKHIDAGAKKVVITAPSSSAPMFVVGVNHTKYTPDKKIVSNASCTTNCLAPLAKVINDAFGIEEGLMTTVHSMTATQKTVDGPSHKDWRGGRTASGNIIPSSTGAAKAVGKVLPELQGKLTGMAFRVPTVDVSVVDLTVKLAKEATYDQIKKAVKAAAEGPMKGVLGYTEDAVVSSDFLGDTHASIFDASAGIQLSPKFVKLISWYDNEYGYSARVVXLIEYVAKA

SEQ ID NO: 41879 - protein, 314 aa, Nicotiana tabacum
MASLTVPAEVPSVAEDCEQLRSAFKGWGTNEKLIISILAHRNAAQRKLIQQTYAETFGEDLLKELDRELTNDFEKLVVVWTLDPSERDAYLAKEATKRWTKSNFVLVEIACTRSPKELVLAREAYHARFKKSLEEDVAYHTTGEHPQLLVPLVSSYRYGGDEVDLRLAKAEAKILHEKISDKAYSDDEVIRILATRSKAQINATLNHYKDEYEEDILKQLEEGDEFVGLLRATIKGLVYPEHYFVEVLRDAINRRGTDEDHLTRVIATRAEVDMKIIADEYQKRDSIPLGRAIAKDTRGDYESMLLALLGQEED

SEQ ID NO: 41880 - protein, 314 aa, Nicotiana tabacum
MASLTVPAEVPSVAEDCEQLRSAFKGWGTNEKLIISILAHRNAAQRKLIQQTYAETFGEDLLKELDRELTNDFEKLVVVWTLDPSERDAYLAKEATKRWTKSNFVLVEIACTRSPKELVLAREAYHARYKKSLEEDVAYHTTGEHRKLLVALVSSYRYGGDEVDLRLAKAEAKILHEKISDKAYSDNEVIRILATRSKAQINATLNHYKDEYEEDILKQLEEGDEFVGLLRATIKGLVYTEHYFVEVLRDAINRRGTEEDHLTRVIATRAEVDMKTIADEYQKRDSIHLGRAIAKDTRGDYESMLLALLGQEED

SEQ ID NO: 41881 - protein, 164 aa, Cucurbita pepo
DRGEMMSMVYNWPADQVDVIVVTDGSRILGLGDLGVHGIGIAIGKLDLYVAAAGINPQRVLPVMIDVGTNNEKLLKDPLYLGLQQNRLDGDEYLAIIDEFMEAVFTRWPHVIVQFEDFQSKWAFKLLQRYRNTYRMFNDDVQGTAGVAIAGLLGAVRAQGRPMI

SEQ ID NO: 41882 - protein, 95 aa, Pisum sativum
MEGLHETGPPPFLTKTFDVVEDPSTDGIVSWSRARNSFVVWDLSKFSTAILPRYFKHSNFSSFVRQLNTYGFRKVDPDRWEFANEGFLAGQRILL

SEQ ID NO: 41883 - protein, 434 aa, Neisseria meningitidis Z2491
MKKHIWAASLLPASLSAEPLNWWKPYSAVNSGDTAWVMTAAALVLLMTLPGLALFYGGMVRKKNLLSTMMHSFSIATLVGILWVAVGYSLAFTPGNAFIGGLGRVFLSGMQIDAAAQMLTVSPNAPTVPEPVFMFFQMTFAIISTAIITGAFAERMKYSAMMLFSGIWFLLVYVPGAHWVWGGGFMSKGGVLDYAGGTVVHINAGIAGLVAALVLGRRIGYGREAMPPHNMAMTLIGAAMLWFGWFGFNAGSALAADAAAGMAMAVTQVSAVFGAAGWLACEKIAGHKPSALGLASGAVSGLVGITPAAGFTGPSGAAAIGILTAAACFVSVTVVKHKLRYDDSLDAFGIHGFGGLVGGILTGIFFDNRIFGGDAAVWQQLWIQVKDGFVMAAYSGLMSWAILKVVGKICGGLRVGKDVEREGLDLNIHGERVE

SEQ ID NO: 41884 - protein, 331 aa, Rubrivivax gelatinosus PM1
MPAATVKAIQVPHAGGADAMQLVDLPIGEPGPGEVRIRHHACGLNFIDVYQRSGLYALPMPLTLGMEGAGVIEAVGAGVTHLRAGDRAAYASAPPGAYCEARVMPAKCVVQLPDGIDFETGAAMMLKGLTVQYLLKKTLPQGGLQPGDSVLFHAAAGGVGLIACQWARALGLRLIGTAGSDEKCALAVQHGAEHAINYRREDFVARVKELTGGRGVKVVYDSVGLDTFEKSLDVLQPFGLLANFGNASGKAPPVDLGVLAAKGSLYVTRPTLFTHIATRESTQAMADDLFAVVGSGEVRIPVERRYALADAAQAHRDLEARLTTGCSVLLP

SEQ ID NO: 41885 - protein, 484 aa, Arabidopsis thaliana
MRNPWADGPEYITQCPIQPGGSYTYRFTMEDQEGTLWWHAHSRWLRATVYGALIIRPPLSSPHYPFPVIPKREITLLLGEWWDRNPMDVLNLAQFTGAAPNISDAFTINGQPGDLYRCSSQETLRFLVGSGEIVLLRVINSALNQELFFGVANHKLTVVAADASYTKPFSTNVIMLGPGQTTDVLLTADQPPAHYYMAAHAYNSANAAFDNTTTTAILKYKDASCVTLQAKSQARAIPAQLPGFNDTATAAAFTAQMKSPSKVKVPLEIDENLFFTVGLGLFNCPTPNTQRCQGPNGTRFTASINNVSFVFPKQNSIMQAYYQGTPTGVFTTDFPPTPPVTFDYTGNVSRGLWQPTRGTKAYKLKFNSQVQIILQDTSIVTTENHPMHLHGYEFYVVGTGVGNFNPNTDTSSFNLIDPPRRNTIGTPPGGWVAIRFVANNPGAWLMHCHIDSHIFWGLAMVFLVENGEGHLQSVQSPPLDLPQC

SEQ ID NO: 41886 - protein, 448 aa, Solanum habrochaites
WSPELSSDLYRIDGWGAPYFTVNSSGDISVRPHGTDTLPHQEIDLLKVVKKASDPINSGGLGLQLPLVVRFPDVLKNRLESLQSAFDYAVQSEGYEAHYQGVYPVKCNQDRFVVEDIVKFGSGFRFGLEAGSKPELLLAMSSLCKGSSEGLLVCNGFKDAEYISLALVARKLQLNTVIVLEQEEELDLVIDISRKMAVQPVIGLRAKLRTKHSGHFGSTSGEKGKFGLTTTQILRVVRKLKESGMLDCLQLLHFHIGSQIPSTELLADGVGEAAQVYSELVRLGAGMKFIDIGGGLGIDYDGTKSSDSDVSVGYGLQDYASTVVQAVRFVCDRKNVKHPVICSESGRAIVSHHSVLIFEAVSSTSTRSQELSSMSLHSFVEKLNDDARADYRNLSAAAIRGEYDTCMLYADQLKQRCVEQFKDGNLDIEQLAAVDAVCDFVSKAIGAS

SEQ ID NO: 41887 - protein, 578 aa, Arabidopsis thaliana
MCGILAVLGCIDNSQAKRSRIIELSRRLRHRGPDWSGLHCYEDCYLAHERLAIIDPTSGDQPLYNEDKTVAVTVNGEIYNHKILREKLKSHQFRTGSDCEVIAHLYEEHGEEFIDMLDGMFAFVLLDTRDKSFIAARDAIGITPLYIGWGLDGSVWFASEMKALSDDCEQFMSFPPGHIYSSKQGGLRRWYNPPWYNEQVPSTPYDPLVLRNAFEKAVIKRLMTDVPFGVLLSGGLDSSLVAAVALRHLEKSEAARQWGSQLHTFCIGLQGSPDLKAGREVADYLGTRHHEFQFTVQDGIDAIEEVIYHIETYDVTTIRASTPMFLMSRKIKSLGVKMVLSGEGSDEILGGYLYFHKAPNKKEFHEETCRKIKALHQFDCLRANKSTSAWGVEARVPFLDKEFLNVAMSIDPEWKLIKPDLGRIEKWVLRNAFDDEERPYLPKHILYRQKEQFSDGVGYSWIDGLKDHANKHVSDTMLSNASFVFPDNTPLTKEAYYYRTIFEKFFPKSAARATVPGGPSIACSTAKAVEWDATWSKNLDPSGRAALGVHVAAYEEDKAAAAAKAGSDLVDPLPKNGT

SEQ ID NO: 41888 - protein, 448 aa, Solanum habrochaites
WSPELSSDLYRIDGWGDPYFTVNSSGDISVRPHGTDTLPHQEIDLLKVVKKASDPINSGGLGLQLPLVVRFPDVLKNRLESLQSAFDYAVQSEGYEAHYQGVYPVKCNQDRFVVEDIVKFGSGFRFGLEAGSKPELLLAMSSLCKGSSEGLLVCNGFKDAEYISLALVARKLQLNTVIVLEQEEELDLVIDISRKMAVQPVIGLRAKLRTKHSGHFGSTSGEKGKFGLTTTQILRVVRKLKESGMLDCLQLLHFHIGSQIPSTELLADGVGEAAQVYSELVRLGAGMKFIDIGGGLGIDYDGTKSSDSDVSVGYGLQDYASTVVQAVRFVCDRKNVKHPVICSESGRAIVSHHSVLIFEAVSSTSTRSQELSSMSLHSFVEKLNDDARADYRNLSAAAIRGEYDTCMLYADQLKQRCVDQFKDGNLDIEQLAAVDAVCDFVSKAIGAS

SEQ ID NO: 41889 - protein, 412 aa, Arabidopsis thaliana
MPLEEILSRLPLKSTRAVRSTCKKWDSLFKNRSFISKAAAAREGESQMVVLMDHNLHLVSFFFGSDTSVEIKGKRICLNDDSDSEQVKISQVFHCEGLLLCILKDDNFSLVVWNPYWGQTRWIKPRCSFEIPQGCDMYRYAIGYDNKRRNHKILRFIDYEFHYPRDNVVLWYEIYDFESDLWTTLDVTTPHWLINCGNRGVTLKGNTYWCAKKRNSDLFLNADHIICFDFTSERFGPLLLLPFSDLDGVVTLACVREEKLAALVCHEDVVEVWITIKIEANEVLWSKFLTVNVDLGDEIPSSLTYGSFFIDEEKKVAMIFDKTLDRGDTVHIMGEAGYGGQVDLGEPVNKRRCPLVCSYVPSLVQIKKPAGFQRKQQSKLEKRQYVRNISKLRALKTQSSWTLSMSLECHQQ

SEQ ID NO: 41890 - protein, 662 aa, Bdellovibrio bacteriovorus HD100
MLQARRSERGPLTTQSIGPFSSVPRGEREMTWSPEKSAELYGINNWGNGYFRINSAGNVAVTPMGATGPTVDLHELTQDLLDRGIRVPIMIRFPEIIKSRVELLNGCFQKAFADHGYKGQYRGVYPIKVNQQRHLVQELVKYGKDYSMGLEAGSKPELLVVLALMNTPDALIICNGFKDWEYIETAILSQKLGRNTIIVVDRKEELKMIVDVAKKFNARPKIGFRAKLNTQGAGKWVDSSGARSKFGLTSTEIVEGVEFLKNEGMLDCLELLHYHIGSQVPQIQSIKSSLKEGARFYTELYKMGAGLKYIDVGGGLGVDYDGSGHSDSSVNYSEQEYANDIVSVLQTLCDEKGIPHPNIVTESGRFLVAHHSVLVFNVMGVNDLHRHEPPRPATKTDHSIMQDMQYIFEKVNKDNINECFNDLEQAKQETLQLFTYGVLSLEQRAWCESMYFAIATKMIKLARATPDCEDIVAALGKELCDTYFSNFSVFQSVPDSWAVGQLFPVIPIHRLGEEPKREATLADLTCDSDGVIEKFIDTASGEPKETIRLHQFTEGQQYYLGVFLTGAYQEILGDLHNLFGDTDAVHISLNGVGYTIDHYVPGDTVTEVLSYVQYGRSEMVDSVRQATEESIQKGSITKQEAKLLIKHYEEGLSGYTYLEEAE

SEQ ID NO: 41891 - protein, 448 aa, Solanum habrochaites
WSPELSSDLYRIDGWGAPYFTVNSSGDISVRPHGTDTLPHQEIDLLKVVKKASDPINSGGLGLQLPLVVRFPDVLKNRLESLQSAFDYAVQSEGYEAHYQGVYPVKCNQDRFVVEDIVKFGSGFRFGLEAGSKPELLLAMSSLCKGSSEGLLVCNGFKDAEYISLALVARKLQLNTVIVLEQEEELDLVIDISRKMAVQPVIGLRAKLRTKHSGHFGSTSGEKGKFGLTTTQILRVVRKLKESGMLDCLQLLHFHIGSQIPSTELLADGVGEAAQVYSELVRLGAGMNFIDIGGGLGIDYDGTKSSDSDVSVGYGLQDYASTVVQAVRFVCDRKNVKHPVICSESGRAIVSHHSVLIFEAVSSTSTRSQELSSMSLHSFVEKLNDDARADYRNLSAAAIRGEYDTCMLYADQLKQRCVDQFKDGNLDIEQLAAVDAVCDFVSKAIGAS

SEQ ID NO: 41892 - protein, 167 aa, Bradyrhizobium sp. BTAi1
MNIRDLIPWNWGKRQVPVRREQSQPLQSLQNDINRAFDSFWRGFDLPWPSTSSAWSISMPSVDVSESDKEIEVTAELPGIDEKDIDISLAEGVLTIRGEKKSEVEKKEKDYYLQERTFGSIERVVPLPDTIDLDSANATFKNGVLTVKLAKKPEAAAATKRITVRRA

SEQ ID NO: 41893 - protein, 462 aa, Bradyrhizobium sp. BTAi1
MRMHVRTVLLTLCFAAVIGSAPAVAQQAALVPSQPTLAPLVEKVAPAVVNISVLSRSPVQDNPLLRDPFFRRFFELPDPDKIPPQMSAGSGVIVDVGKGYVITNHHVVDKATEIVVTLRDRRQFKAKLIGSDSATDIALVQIEADRLTQLPLADSDKVRVGDYALAIGNPFGLGQTVTMGIVSALGRSGINAEGYEDFIQTDASINPGNSGGALVSLSGELIGINTAIIAPSGGNVGIGFAVSSNMARSVMDQLIRYGEVQRGRLGFVVQDITPDIAKAIGVPATAEGAVVVQVEPGSAADKAGVKAGDVVTALGGRPVRGASDLRNRIGLTRVGEDVELKVLRNGAERRLRARVERSSASPQTAALQTDKGTTIPRLRGAVVRDIGPGMPMYGKVQGVVVAEVEDGSPAAARGLRAGDVIVAVNRKPVRNVAEFQAALQEAGRVAALDVLRGDMSLFILIT

SEQ ID NO: 41894 - protein, 429 aa, Streptomyces coelicolor A3(2)
MSSTNRTVVVTGIGATTPLGGDAASTWEGLVAGRSGVRPLEQEWAADQAVRIAAPAAVDPSEVIPRPQARRLDRSAQFALIAAQEAWKDAGYAGKAGESPAEDGAAHVDPDRLGAVIASGIGGVTTLLDQYDVLKEKGVRRVSPHTVPMLMPNGPSANVGLAVGARAGVHTPVSACASGAEAIGYAIEMIRTGRADVVVAGGTEAAIHPLPIAAFGNMMAMSKNNDDPQGASRPFDTARDGFVLGEGAGVLVLESAEHAAARGARVYAEAVGQGISADSHDIVQPEPEGRGISAALQNLLDGNDLDPAEIVHVNAHATSTPAGDIAELKALRKVLGDDVDHMAVSGTKSMTGHLLGGAGGVESVATVLALYHRVAPPTINVENLDPEAEANADIVRGEARKLPVEGRIAALNDSFGFGGHNVVLAFRSV

SEQ ID NO: 41895 - protein, 279 aa, Triticum aestivum
MATPTVEKPDGVEIREVWAENLEAEFAVIREIVDDYPYVAMDTEFPGVVCRPLGTFKSNADFNYATLKANVDMLKLIQLGLTFSDERGGLPALGPDARPCVWQFNFRGFDPRTDVAAADSIDLLRRSGIDFARHAAEGADSRRFAGPRTRGGVVLNAEIHWVTFHSGYDFGYLLKLLTGSNLPDTSSGFFDLIRIYFPVIYDIKHLMRFCNSLHGGLNKLAELLDVERVGICHQAGSDSLLTALSFNKLKESYFGGLTEKYAGVLYGLGTEGGETTSVH

SEQ ID NO: 41896 - protein, 312 aa, Zea mays
  misc_feature (147)..(147): Xaa can be any naturally occurring amino acid
  misc_feature (200)..(200): Xaa can be any naturally occurring amino acid
  unsure (1)..(312): unsure at all Xaa locations
MAAAAGGGAVRALSQKEQDIQMMLAADVHLGTKNCDFQMERYAFKRRTDGIYIINLGKTWEKLQLAARVIVAIENPQDIIVQSARPYGQRAVLKFAQYTGAHAIAGRHTPGTFTNQLQTSFSEPRLLILTDPRTDHQPIKESALGNXIPTIAFCDTDSPMRYVDIGIPANNKGRNSIGCLFWLLARMVLQMRGTILPGHXKWEVMVDLFFYRDPEEAKEQEEEAAVAPEFAAITDYQGADQWGGDQWTSDVTAPPVAPTGADWGAAPAPVPAGDGWDQAGAPAPVVDGTVPPVVAPTGWDQAAPPPTAQGWE

SEQ ID NO: 41897 - protein, 426 aa, Escherichia coli CFT073
MSKSENLYSAARELIPGGVNSPVRAFTGVGGTPLFIEKADGAYLYDVDGKAYIDYVGSWGPMVLGHNHPAIRNAVIEAAERGLSFGAPTEMEVKMAQLVTELVPTMDMVRMVNSGTEATMSAIRLARGFTGRDKIIKFEGCYHGHADCLLVKAGSGALTLGQPNSPGVPADFAKHTLTCTYNDLASVRAAFEQYPQEIACIIVEPVAGNMNCVPPLPEFLPGLRALCDEFGALLIIDEVMTGFRVALAGAQDYYGVEPDLTCLGKIIGGGMPVGAFGGRRDVMDALAPTGPVYQAGTLSGNPIAMAAGFACLNEVAQPGVHETLDELTTRLAEGLREAAEEAGIPLVVNHVGGMFGIFFTDAESVTCYQDVMACDVERFKRFFHMMLDEGVYLAPSAFEAGFMSVAHSMEDINNTIDAARRVFAKL

SEQ ID NO: 41898 - protein, 439 aa, Saccharomyces cerevisiae
MVTKHQIEEDHLDGATTDPEVKRVKLENNVEEIQPEQAETNKQEGTDKENKGKFEKETERIGGSEVVTDVEKGIVKFEFDGVEYTFKERPSVVEENEGKIEFRVVNNDNTKENMMVLTGLKNIFQKQLPKMPKEYIARLVYDRSHLSMAVIRKPLTVVGGITYRPFDKREFAEIVFCAISSTEQVRGYGAHLMNHLKDYVRNTSNIKYFLTYADNYAIGYFKKQGFTKEITLDKSIWMGYIKDYEGGTLMQCSMLPRIRYLDAGKILLLQEAALRRKIRTISKSHIVRPGLEQFKDLNNIKPIDPMTIPGLKEAGWTPEMDALAQRPKRGPHDAAIQNILTELQNHAAAWPFLQPVNKEEVPDYYDFIKEPMDLSTMEIKLESNKYQKMEDFIYDARLVFNNCRMYNGENTSYYKYANRLEKFFNNKVKEIPEYSHLID

SEQ ID NO: 41899 - protein, 176 aa, Cucurbita pepo
RVGLSGKGIPVGKLSLYTALGGVRPSACLPITIDVGTNNEKLLNDEFYIGLKQRRATGEEYYELLHEFMTAVKQNYGEKVLIQFEDFANHNAFELLAKYRTTHLVFNDDIQGTASVVLAGAVSALKLIGGTLADHTFLFLGAGEAGTGIAELIALEISKQTNAQLRRPARRFGWWT

SEQ ID NO: 41900 - protein, 368 aa, Lunularia cruciata
SDSGKDAGRLAAAWSMFKCQEDLVKVAKQFGIKLTIFHGRGGTVGRGGGPTHLAILSQPPDTIHGSLRVTVQGEVIEQSFGEEHLCFRTLQRFTAATLEHGMHPPISPKPEWRELMDEISRVSTEEYRSIVFKHPQFVHYFRNATPETEYGRMNIGSRPAKRKPSGGIESLRAIPWIFAWTQTRFHLPVWLGFGGAFKAAFQKSNQNVVLLRQMYNEWPFFRVTIDLIEMVFAKGDPRIAALYDELLVSDELKPLGEKLRVMYAETRELLLKVAGHEDVLQGNPTLKQRLRLREPYITPLNVQQAFTLKKIRDQSFHVRDPETPKGENSGKQSSELVGLNTTTEYPPGLEDTLILTMKGIAAGMQNTG

SEQ ID NO: 41901 - protein, 163 aa, Cucurbita pepo
HWKPTCGVKSMMEEEAIRIGGTNHSHATQDLYESIAAGNFPEWRLYIQTIDYEDQNKYDFEPLDTTITWPEDVVPLQPVGRLVLNKNIDNFFAENEMLAFSMSLVPGIHYSDDKMLQARSFAYADTQRHRLGPNYLQLPVNAPKCPHHNNHHEGFMNFMHRDE

SEQ ID NO: 41902 - protein, 372 aa, Frankia sp. EAN1pec
MDMGHLSRSRRLRRWLALPETPRPSIRHRSEFSAWIVAAGLAAGVLFGTAACGTATDDASMSRAETTNSQPAGLPAVVRDAESSVVTIFVGNGLGSGVVYRADGVIVTNEHVVRSAADRRVEVAFADGRRAPGRVQAADRISDIAVVKVDRSGLPTLTFRSELPQVGELAVAIGSPLGFENSATAGIVSGLNRTLPASGQPGRLGQPLVDLIQTDAAISPGNSGGALLDGQGRVLGINEAYVPPSEGAVSLGFAIPSATVVDAADQLLRTGEVQHAFLGVQVTSLTPEVARQLDIQVDSGVLVLFVADQGPADRAGVRLGDVIRTFNGEPVRSPTDFLAQLRSVDPGRQVTLGIRRNGDDLEVKATVADRPA

SEQ ID NO: 41903 - protein, 773 aa, Oryza sativa
MVSAADAVIPACAAVGIAFAVWQWLLVSRVKVSPYSAAAAAARNGGAGRAVFRPEGEVDDDDGGCGDDEEADGDGGVAAMARCAEIQSAIRVGANSFLFTQYKYLAAFTAVFAVVIFLFLGSVHRFSTESQPCQYTRGKACKPALANAVFSTIAFLLGAATSVASGFLGMRIATAANARTTVEARRGIGPAFAAAFRSGAVMGFLLASLGLLVLYVAIKVFGLYYGDDWEGLYESITGYGLGGSSMALFGRVGGGIYTKAADVGADLVGKVERNIPEDDPRNPAVIADNVGDNVGDIAGMGSDLFGSYAESTCAALFVGSISSFGADHNFAAVSYPLLISSAGLIVCLITTLFATDLYRVKTVDGVAPALKLQLLISTVLMTVGVLVVTFTALPHEFTMFDFGEVKRVKNWHLFFCVTIGLWAGLAIGFTTEYFTSNAYSPVRDVADSCRTGAATNVIFGLALGYKSVIVPVFAIAVSIYVSFTLASIYGIAVAALGMLSTVATGLAIDAYGPISDNAGGIAEMAGMSHRIRQRTDALDAAGNTTAAIGKGFAIGSAALVSLALFGAFVSRAGMAVINVLSPKVFVGLVVGAMLPYWFSAMTMKSVGSAALKMVEEVRRQFAAIPGLMEGRATPDYASCVRISTDASLREMMPPGALVLLAPLVAGTFFGVQTLAGLLAGALVSGVQVAISASNSGGAWDNAKKYIEAGASDHAKALGPKGSDAHKAAVIGDTIGDPLKDTSGPSLNILIKLMAVESLVFAPFFAAHGGLIFK

SEQ ID NO: 41904 - protein, 474 aa, Escherichia coli CFT073
MKKTTLALSALALSLGLALSPLSATAAETSSATTAQQMPSLAPMLEKVMPSVVSINVEGSTTVNTPRMPRNFQQFFGDDSPFCQEGSPFQSSPFCQGGLGGNGGGQQQKFMALGSGVIIDADKGYVVTNNHVVDNATVIKVQLSDGRKFDAKMVGKDPRSDIALIQIQNPKNLTAIKMADSDALRVGDYTVAIGNPFGLGETVTSGIVSALGRSGLNAENYENFIQTDAAINRGNSGGALVNLNGELIGINTAILAPDGGNIGIGFAIPSNMVKNLTSQMVEYGQVKRGELGIMGTELNSDLAKAMKVDAQRGAFVSQVLPNSSAAKAGIKAGDVITSLNGKPISSFAALRAQVGTMPVGSKLTLGLLRDGKQVNVNLELQQSSQNQVDSSTIFNGIEGAEMSNKGKDQGVVVNNVKTGTPAAQIGLKKGDVIIGANQQAVKNIAELRKVLDSKPSVLALNIQRGDSTIYLLMQ

SEQ ID NO: 41905 - protein, 395 aa, Oryza sativa
  misc_feature (124)..(124): Xaa can be any naturally occurring amino acid
  unsure (1)..(395): unsure at all Xaa locations
MVKKKPAGDAEADERRRLRSLAFSNGLLQRGEPAAPRSALAPSTAVSRLQGRDIVRRGGQRKSRFLFSFPGLLAPAAAASGGRVGELADLGTKNPLLYLDFPQGRMKLLGTHVYPKNKYLTLQXDVFESLIVFSEAWWIGTKEEENPQELKLDFPKEFQNDEAVADSDFKGGAGASCDEAVSINKPPKETTTGSLSPKIESDIDSSEDSDLKDEDNTQSTSQAPSVRQSARTAGKALKYTEISSGDDSSDNDDEIDVPEDMDEKMKSPAVKNESQSEDIKPADWSAQPISAKKEPLVQATLSSMFKKAEEKKGPAAKKQRASPEEKHPTGKKSAGRSQKRRKTQVEDDKIEVLSSSSQVVPSSQLILTAYDRITTWTMIAMRTGLSDVQLKLKGM

SEQ ID NO: 41906 - protein, 509 aa, Glycine max
MAKLHFAFSFSLLFLLSNASAAPSTTLPAKIVSGFLSNAVPAFTKWVWSLKAPTKTAIGAKSMMKFESGYTVETVFDGSKLGIEPYAVEVLANGELLILDSANSNIYRISSSLSLNTRPKLVAGSAEGYSGHVDGRLREARMNHPKGIAVDNRGNIYIADIMNMAIRKISDSGVTTIAGGKWSRGGGHIDGPSEEAKFSNDFDVVYIGSSCSLLVIDRGNQAIREIQLHFDDCAYQYENGLTLGIAMLVGAGFFGYMLALLQHRLGTTVASQDLEGAAMSGISPSPYQKPLKSVRPPLIPSEDESDKQEESFIRSIGKLLTNAGASVVEIMGALFPGFRKKPQSYEFQSQPLFQQPQKQVNAWPVQESFVIPDEDEPPSIDPRSPTPRKTYAFMSQDAEKMPQLWQSHAFYSGWGGDLQQQQQLKLQQQQQQQQQQQLKHHRHLYHSSVPHTYYEQSHEEINEIVFGAVQEQEGKKETVVIKPVDYGQSLYDHHYIRPRNSSMGHINKY

SEQ ID NO: 41907 - protein, 1817 aa, Nostoc sp. PCC 7120
MNRQHKHHRCNSVNLLSKQNLLPFLLGIVILLVVVMLWLRLQAEEEIKIQQLIKQQAIATQTELVTQLNTRILALKRIGKHWEMHGNIPQAQWELEAKAYLEDYGGYQAIKLVDPSWQVLRAVSVANNKAAENLEMIPKFPQWTGATSHETTVTRTVNLNQGDRVFFACVPLWMGDKFGGAVLGVFQVKQLFESVLHIAPGYKIRVFDGQELIYDQDRQSSTLPLWQQAVNIDFYGMTWQLQIYPTPELLKDLFSPLPTVVLVAGIFNAGAVTLLIYFAQATKLSNHKIGRINQELADRIEKQTQVEIALRASETRLRELVETVRVIPWEFDLKTQHFTYVGPQVETLLAYPVAQWYEENFWDNHLHTLDRDWAVRFCQEAANKGQNHELEYRMLAADGRVVWLRDVVNVVQVDGTPVMLRGFMFDITDLKRVEETLRLRERALAASSNGIVISDAKLPHYPVIYVNSAFEQITGYKATEVVGRNCRFLLGNDTQQSAIEELRSALKAGKNCKVILRNYRKDGSLFWNQLSVSPIYNDNGQLSHFIGIQTDISDRQQAEASLRRQALTFENIYDGVIITNLQGQILDWNPAAERMFGYSKNHICGQSISTLHKVDEDAALNSAIIAEITKQGRWSGEINFVRQDGSQGICETTIVALQDDQGQSMATISVNRDITERKHAELLLRRSEERFQAFMNHSPTPAWITDIDGTIVYVSETYRRTFQLPTQELIGKNIVDIYPPELTQTFRETIQIVARTRQVMETVESAPCSDGTGRDFLVYKFPISSKPDECLIGCIAIDITERKQAEAALRKSEERWQLVIEGNQDAIWDWNIITNETFRSARWAELIKEQNYQPIADHADCVSRIHPDDYERVMAVKQDCLSRKIPNYVVEYRLRCNDDSYRWVLVHATGQWDEQGNPVRMVGSIKDITERIEAQEALQRQLHRTLLLEKITQKIRQSLDSKEIFETAATQIGQALAVDRCLIHSYISHHDPHIPLVAEYNNVLDYCSMQKWEFTTTGNQHILKMMSQDKAIASANVYTDPLLQTAVPSCCEIGVKSMLAVRTSYQGEPSGAICLHQCGYFRQWTNEEIELLEAVAAQLGIALAQAQLLEQETRQREELTIKNFALEQAKRAAEAANRAKSEFLAMMSHEIRTPMNAVIGMTGLLLDTELTSQQRDFVETVLTSGDALLSIINDILDFSKIESGKLELEEQPFEVRTCVEQVIDLLAAKAAQKDIELAYLIHPQVPMQIAGDLTRLRQILTNLLNNAIKFTPEGEVVVSVRSQPSPNQKNKNCCEIIFTIKDTGIGIAPETMDLLFQPFVQADASMTRKYGGTGLGLVISKRLGEMMGGYLWVESRGCVGGNPPPGWQTKNSISSASVATGSTFYFSMTVPVVAHADLETPITSPVQLSGKRLLIVDDNPTNRQILRLQAEPWQMETYTAPSGAEALALIDQGMAFDIAILDVQMPEMDGLTLARQIRQRPSYQHLPLVILTSWGQPDTDLSDIEFAACLNKPIKQSQLYDVLASTLGNQPIRASVVPDRSTEINSCLAQQIPLRILLAEDIVVNQKVALLILKKMGYRADVVANGLEVLEALQRQFYDVVLMDVNMPEMDGLKASQIICQTWSPSSRPYIIAMTANAMRGDREACLAAGMDHYISKPLQLEELAKALGKCHPSGSAIEKALEKTSSQNQTFTDISDLKFATIDTKILQALRDMLGGDKVAFAELINCYLTESPKLIQNIDVAINTKDTQGIWKTAHKFKSSSGSVGAVFLAQLCKLLETKGRNNNLEGCVELGSQLRQEYELVQTALHREVNKETS

SEQ ID NO: 41908 - protein, 756 aa, Saccharomyces cerevisiae; identical to SEQ ID NO: 784

SEQ ID NO: 41909 - protein, 317 aa, Haemophilus somnus 2336
MTTQLDALRNMTVVVADTGDIDAIKKYQPQDATTNPSLILSASSLPQYAPLIDEAIAYAKAKSADKTQQLIDAEDKLAVNIGLEILKIVPGRISTEVDARLSYDTQATVEKARKLIALYNEAGISNDRILIKIASTWQGIRAAEILEKEGINCNLTLLFSKAQARACAEAGVYLISPFVGRILDWYKANSDKKEYAPAEDPGVISVTKIYNYYKQYGYNTVVMGASFRNVGEITELAGCDRLTIAPALLKELQENSTALVRKLAFKGEVKAKPQPLTESQFYWQHNSDPMAVEKLADGIRKFAIDQEKLEKMLLEKF

SEQ ID NO: 41910 - protein, 494 aa, Triticum aestivum
MEGCDCIEPCWPTDELLIKYQYISDFFIALAYFSIPLELIYFVKKSSFFPYRWVLIQFGAFIVLCGATHLINLWTFTMHTKTVAIVMTVAKVSTAVVSCATALMLVHIIPDLLSVKTRELFLKKKADELDREMGLIRTQEETGRHVRMLTHEIRSTLDRHTILMTTLVELGRTLGLEECALWMPSRSGSSLQLTHTLRHPIPGGSSVQINLPVVNQVFSSNRAIIVPHTSPLARIRPVQGRYVPPEVAAVRVPLLHLSNFQINDWPELSAKSYAIMVLMLPSDSARKWHVHELELVEVVADQVAVALSHAAILEESMRARDLLMDQNVALDLARREAEMAIRARNDFLAVMNHEMRTPMNAIIALSSLLLETELTPEQRLMVETVLKSSNLLATLINDVLDLSKLEDGSFELDISTFNLHAVFKEVMSFVKPIAAIKKLSVSAMLSPDLPLSVIGDEKRLMQTILNVCGNAVKFTKEGHISLLASVVKPDALRE

SEQ ID NO: 41911 - protein, 78 aa, Zea mays
MGGLSTKLFVVLFLLVCYTGTQGGPVTMVSARKCESQSFRFKGPCSRDANCANVCLTEGFTGGVCKGLRHRCFCTRDC

SEQ ID NO: 41912 - protein, 477 aa, Propionibacterium acnes KPA171202
MRRAKIVNTLGPAVTSHDAMKELMEAGMNIARLNMSHGDYSEHQERLDLVRSVSKELGLNVAALADLQGPKIRTGLFEKAEGESNGKIDLKIGDKFTITTDDIVGNQERVSTTFKGLPQDCKPGDVILIDDGKTVLQVDSVSGNDVNCHCTVAGPVGDHKGINLPGVAVSIPALTKKDEENLRWALKAGIDLVALSFVRHGSDIDRVHEIMDEEGRTVPVIAKLEKPQAIENLDEIIDVFDAVMVARGDMAVECPLEEVPLIQKQIIEKARLQAKPVIVATQMLESMIHAPRPTRAEAADVANAILDGADGVMTSAETSVGDFPGETVRTMAKIVESTEARGLDKIAKIDWDPHTTSGIMSKAAAEIAERAEAKFIVAFTKSGDTARRIARLRPSTPLIVFTSDETTTKTLAWVWGAHAVVTPVFKNAEELYRWVNAYLRDKGFVPVGDRVVVLSGSPMDIPGKTNNLRILRIKEDD

SEQ ID NO: 41913 - protein, 162 aa, Streptomyces lividans
YATWWIRQAMSRALADQARTIRVPVHVVELINRVVRVQRRMLQERGCEPTPQEVAAHLDLAPERVGEVLRLAQEPVSLHAPVGEEDDVALGDLIEDGDAASPVESAAFLLLRQHLEAVLSTLGERERKVVQLRYGLADGRPRTLEEIGRLFGVTRERIRQIE

SEQ ID NO: 41914 - protein, 223 aa, Bdellovibrio bacteriovorus HD100
MRRWGMRESVLSHKDNYMLSLLSEESDLKKRSRQFADELNLGRISINAAEAKLIQTLVRTHGCRKFVEIGTLTGLSAQYIFEALPEGGELWTLEKDPKHGEYSAQIFAQLDQSQKKIHLVMGDAREELEKIAAQGPFDGVFIDGNKAAYFDYLTWAEKNVRKGGLILADNIFLSGSVWGEPAQKFSDKQIRIMQDFNKRLADPSLFESAIIPTFEGLYIALKK

SEQ ID NO: 41915 - protein, 282 aa, Glycine max
MSVHAKLKHHPMNLASPSSHFEDDPPCKTKTKTQRRLLRIIITDHDATDSDSSDEEQQQQQQKTRRVNREITQINMQLPLSHNSSFSPSSSYYSSASTSSEQNLKCKRPNKKPPPSSAEARRRNKFRGVRQRPWGRWAAEIRDPTRRKRLWLGTFDTAEEAATEYDRAAVKLKGPNAVTNFPLAPEATAQSPPLAADNLSSDGGASYSDLVASPTSVLAYECDSTPFDGFRYLDVDAFGFHIDAPLSLPEVNVNVALTCHHGKKQEEAFDEFDLDEFMTWPY

SEQ ID NO: 41916 - protein, 236 aa, Oryza sativa (japonica cultivar-group)
MANCPSQNATPAARRAPIAMSKRSRSMWDMQEFVGSVDTARVLMLLAQQSQHGLLGGGGFAAGAQPVVVRGGAHDRVFECKTCNRQFPTFQALGGHRASHKRPRQQQQHALGGGAGADDAGLCLGRQPTPPRPQPAKPRVHECPVCGLEFPIGQALGGHMRRHRAEAEAAATTTTTTTKNGDVGKAAAVKACDGGGVCLDLNLTPSENRAKCRNVVGLGAGGQGVHKALAMLDCFL

SEQ ID NO: 41917 - protein, 623 aa, Triticum aestivum
  misc_feature (148)..(148): Xaa can be any naturally occurring amino acid
  misc_feature (176)..(176): Xaa can be any naturally occurring amino acid
  unsure (1)..(623): unsure at all Xaa locations
MWRSRVSRGLREAKAAAAAASRRFSTTSSYTVVDHTYDAVVVGAGGAGLRAAIGLSEHGFNTACITKLFPTRSHTVAAQGGINAALGNMSEDDWRWHMYDTVKGSDWLGDQDAIQYMCREAPKAVIELENYGLPFSRTEDGKIYQRAXFGGQSLDFGKGGQAYRCACAADRTGHAXMLHTLYGQAMKHNTQFFVEYFALDLIMDKEGTCQGVIALNMEDGTLHRFRSTNTILATGGYGRAYFSATSAHTCTGDGNAMVARAGLPLQDLEFVQFHPTGIYGAGCLITEGSRGEGGILRNSEGERFMERYAPTAKDLASRDVVSRSMTMEIREGRGVGPMKDHLYLHLNHLPPEVLKERLPGISETAAIFAGVDVTKEPIPVLPTVHYNMGGIPTNYHGQVVDIKGDNPDTIIPGLMAAGEAACASVHGANRLGANSLLDIVVFGRACANRVAEISKPGETQKPLEKDAGEKTIAWLDKLRNANGSLPTSKIRLNMQRIMQNNAAVFRTQETLTEGCELISEAQKSFHDVKLSDRSLIWNSDLIETIELENLLINACITMHSAEARQESRGAHAREDFKTRDDDKWMKHSLGYWEDEKVRLEYRPVHMNTLDDEVETFPPKARVY

SEQ ID NO: 41918 - protein, 468 aa, Bacteroides thetaiotaomicron VPI-5482
MKSTINFGYLIFLSVVAALGGFLFGYDTAVISGTIAQVTQLFQLDTLQQGWYVGCALIGSIVGVLFAGILSDKLGRKMTMIISATLFSTSALGCAISADFTQLVVYRIIGGVGIGVVSIVSPLYISEVAVAQYRGRLVSLYQLAVTVGFLGAYLINYQLLAYAESGNQLSMDWLNKIFVTEVWRGMLGMETLPAVLFFIIIFFIPESPRWLIVRGKEEKAVNILERIYNSVSEAASQLKETKSVLTSETKSEWAMLMKPGIFKAVIIGVCIAILGQFMGVNAVLYYGPSIFENAGLSGGDSLFYQVLVGLVNTLTTVLALVIIDRVGRKQLVYYGVSGMVVSLLLIGVYFLFGDSWGVSSLFLLVFFLFYVFCCAVSICAVVFVLLSEMYPTKVRGLAMSIAGFALWIGTYLIGQLTPWMLQNLTPAGTFFLFAVMCVPYMLIVWKLVPETTGKSLEEIERYWTRSEQ

SEQ ID NO: 41919 - protein, 404 aa, Zea mays
VLSGKTSQKRLSNWHKLTSGRKKTITETGYQNQLFLLDFAHMTFIDTKTGLQRPIAWIDENGNRYFPESFVQDQKIFMKKDFGNGYHDYISVESNGTREMNDQLGTSESSAESSNFGSSTEDVSSPKRARAENNSIIKKYCDMGEAIGENEPCTLLPTACNLLPRQANLGEVSRAQRTIEAVEKLLLQGMGSVIESKDIIGIYRTPLLDDHGQVRYHNHEKHVQVTRCHRGNANVRYAWLPCSKSTVHEMMLNSSLQVHKPPIKCAAYGEGTFLTPANRSDACVKFSAVDENGIVHMMLCRVIMGNVEIVHPGSKQHQPSSDYFDSGVDDLKNPQHYIVWDMNLNRHIYPEFVVTVKLPSKTKDYFVSQEDCQNSSDLSLVLNSSSPDCISEEMNLEAPPALGG

SEQ ID NO: 41920 - protein, 311 aa, Haloarcula marismortui ATCC 43049
MTLHEHTDEETAEHNLPSKSSGSTRRLALVAVVNFFGFVIELAGGLLFGSVALISDALHMLFDMLAYAMAFGASYTAERFEGGEAWSYGLHRLEPVAAFLNGVLLLPMVGYIVWESYQRFLEPVAINPELTLIIATGGLLVNIGSVYVLQGGEMSLNERGAFYHLLGDAGGSVAVIVSTAAVAVFDLPIADPVAAVLIGLLVLASAGNVLRESTSILLERSPVSSEELRDELTTLDGVDQIEDLHVWQVCSQLTVATVRLTDTSTTLEEQRRIQSRVHDYLTNRGIDHATVELVGRTDPDTDPVGTTNHSH

SEQ ID NO: 41921 - protein, 140 aa, Rickettsia conorii str. Malish 7
MTIQYTFSMIKPDAIKRNKIGQVNTYLENAGLKIVAQKMKFLTKYEAACFYDEHRARPFFNSLVEYITSGAVVLQVLKGEDAITLNRTVMGATNPAEAEAGTIRKDLGESIEANSIHGSDSENSAKREIEFFFNKSEIIE

SEQ ID NO: 41922 - protein, 365 aa, Kalanchoe kewensis
SDSGKDAGRLSAAWQLYKAQEELIEVAKQHGVKLTMFHGRGGTVGRGGGPTHLAILSQPADTIQGSLRVTIQGEVIERSFGEAQLCFKTLQRYTAATLEHSMIPPLTPKQEWRALMDEMAVVATERYRSIVFKEPRFVEYFRLATPELEYGRMNIGSRPSKRKPSGGIESLRAIPWIFAWTQTRFHLPVWLGFGEAFRHVIDKDNKNLLMLQQMYNEWAFFRVTIDLVEMVFAKGNPGIAALYDKLLVSEELLPLGEQLRTAYNDTKSYLLKITGHNEILEGDPFLKQRLKLRTAYITTLNVCQAYTLKRIRDPSYQVPVRPPIAKETMEGSISSANQLVKLNPTSEYAPGLEDTLILTMKGIAA

SEQ ID NO: 41923 - protein, 599 aa, Zea mays
MDEHKLGYKGSDVLQELEILTINAKTAQEVILSKILEKNRATEYLNKFMNGSIDISAFKCQVPVVTYDVVQPYIARIAAGERSSILCGEQIVELLRSSGTSQGEPRLMPSISEDIYRRMYLYSLIMPIMSNQVSRYIRGLGEGKAMYLLFVKAETLTNAGIPVRSVLTSYYKSPQFLQRKHDLYNSYTSPDEVILCPDSQQSMYCQLLCGLVERQNVVRLGAVFASAFLRSISFLEKHWHDLVTDIRTGRINPSITNAACRVATESFLAQPNPELADEVEAICSSESWKGVLGRLWPNVKYIEAVLTGTMAQYVPMLEFYSDGRIPLVCTMYASSESYFGVNLRPLCSPKDVSYTILPNMAYFEFVPLDDGLRLAEDGEAVEKEKLVGLVDVKVGCYYELVVTTFAGLYRYRVGDVLQVTGFYNRAPQFKFICRRNVILSVDADKTNEEDLHGSVSRAKKILEDRGHILLEYTSFTDTSTVPGHYVLFWEVKATPTSGSGGARLDAQVLESCCVAVEESLDCVYRRCRAHDRSVGPLEIRLVEAGAFDALMDLLVSQGGSINQYKTPRCIEPGGAALELLDSKATASFFSPRDPEATGV

SEQ ID NO: 41924 - protein, 365 aa, Kalanchoe kewensis
SDSGKDAGRLSAAWQLYKAQEELIEVAKQHGVKLTMFHGRGGTVGRGGGPTHLAILSQPADTIQGSLRVTIQGEVIERSFGEAQLCFKTLQRYTAATLEHSMIPPLTPKQEWRALMDEMAVVATERYRSIVFREPRFVEYFRLATPELEYGRMNIGSRPSKRKPSGGIESLRAIPWIFAWTQTRFHLPVWLGFGEAFRHVIDKDNKNLLMLQQMYNEWPFFRVTIDLVEMVFAKGNPGIAALYDKLLVSEELLPLGEQLRTAYNDTKSYLLKITGHNEILEGDPFLKQRLKLRTAYITTLNVCQAYTLKRIRDPSYQVPVRPPIAKETMEGSISSANQLVKLNPTSEYAPGLEDTLILTMKGIAA

SEQ ID NO: 41925 - protein, 404 aa, Bacillus subtilis
  misc_feature (1)..(1): Xaa can be any naturally occurring amino acid
  misc_feature (25)..(25): Xaa can be any naturally occurring amino acid
  misc_feature (37)..(37): Xaa can be any naturally occurring amino acid
  misc_feature (119)..(119): Xaa can be any naturally occurring amino acid
  misc_feature (136)..(136): Xaa can be any naturally occurring amino acid
  misc_feature (181)..(181): Xaa can be any naturally occurring amino acid
  misc_feature (200)..(200): Xaa can be any naturally occurring amino acid
  misc_feature (273)..(273): Xaa can be any naturally occurring amino acid
  misc_feature (292)..(292): Xaa can be any naturally occurring amino acid
  misc_feature (365)..(365): Xaa can be any naturally occurring amino acid
  unsure (1)..(404): unsure at all Xaa locations
XHHHHHHSSGVDLGTENLYFQSNAXADKAFHTRLINXRRDLHEHPELSFQEVETTKKIRRWLEEEQIEILDVPQLKTGVIAEIKGREDGPVIAIRADIDALPIQEQTNLPFASKVDGTXHACGHDFHTASIIGTAXLLNQRRAELKGTVRFIFQPAEEIAAGARKVLEAGVLNGVSAIFGXHNKPDLPVGTIGVKEGPLXASVDRFEIVIKGKGGHASIPNNSIDPIAAAGQIISGLQSVVSRNISSLQNAVVSITRVQAGTSWNVIPDQAEXEGTVRTFQKEARQAVPEHXRRVAEGIAAGYGAQAEFKWFPYLPSVQNDGTFLNAASEAAARLGYQTVHAEQSPGGEDFALYQEKIPGFFVWXGTNGTEEWHHPAFTLDEEALTVASQYFAELAVIVLETIK

SEQ ID NO: 41926 - protein, 365 aa, Kalanchoe tomentosa
SDSGKDAGRLSAAWQLYKAQEELIEVAKRHGVKLTMFHGRGGTVGRGGGPTHLAILSQPADTIQGSLRVTIQGEVIERSFGEAQLCFKTLQRYTAATLEHGMIPPLTPKQEWRALMDEMAVVATERYRSIVFREPRFVEYFRLATPELEYGRMNIGSRPSKRKPSGGIESLRAIPWIFAWTQTRFHLPVWLGFGEAFKHVIDKDNKNLLMLQQMYNEWPFFRVTIDLVEMVFAKGNPGIAALYDKLLVTEDLLPLGEQLRAAYNDTKTYLLKITGHNEILEGDPFLKQRLRLRNAYITTLNVCQAYTLKRIRDPSYQVPVRPPIAKEILDGAVFSTNQVVKLNPTSEYAPGLEDTLILTMKGIAA

SEQ ID NO: 41927 - protein, 365 aa, Kalanchoe tomentosa
SDSGKDAGRLSAAWQLYKAQEELIEVAKRHGVKLTMFHGRGGTVGRGGGPTHLAILSQPADTIQGSLRVTIQGEVIERSFGEAQLCFKTLQRYTAATLEHGMIPPLTPKQEWRALMNEMAVVATERYRSIVFREPRFVEYFRLATPELEYGRMNIGSRPSKRKPSGGIESLRAIPWIFAWTQTRFHLPVWLGFGEAFKHVIDKDNKNLLMLQQMYNEWPFFRVTIDLVEMVFAKGNPGIAALYDKLLVTEDLLPLGEQLRAAYNDTKTYLLKITGHNEILEGDPFLKQRLRLRNAYITTLNVCQAYTLKRIRDPSYQVPVRPPIAKEILDGAVFSTNQVVKLNPTSEYAPGLEDTLILTMKGIAA

SEQ ID NO: 41928 - protein, 577 aa, Bacillus halodurans C-125
MIARFFSYYKPYKGLFFLDFFCAVFVGILELAFPLAVNQVIDRLLPEGNWQIIFWACVGLLFVYLLNTVMQYVVTYWGHKLGINIESDMRKKLFEHMQKLSFGYYDNNKTGHSISRLTKDLEEIGEVAHHGPEDVFVAVMTLVGAFAIMLSIHWQLAVALFCVVPFIIIFAVYFNKKMTTTFRRMFQDVGDINARVEDSIGGIRVVQAFANERYEQAQFAKNNQRYRKTKLASYKIMAQNVMANYVLMRSITLLTLLVGTWFVISGSLTYGEFVAFILLSNILIQPVQKINAVIESYPKGIAGFKRYTEILDTEPDIEDAPGAKEWNIQGNIQYEGVRFGYDGMEDVLKNIDLTIRAGETVAFVGPSGAGKTTLCSLLPRFYEVKDGRIVVDGLDIREMKLESLRNQIGIVQQDVFLFSGTVKENIAYGNLQATDEEIMEAARKAKLDDFILSQPDGLETVIGERGVKLSGGQKQRLSIARMFLKNPPILILDEATSALDTETELAIQQSLSELSKGRTTLVIAHRLATIKNADRIIVVTKEGIAEQGSHEQLLQTGGIYARLHRAQFGEFLVRTQV

SEQ ID NO: 41929 - protein, 551 aa, Shigella flexneri 2a str. 301
MTNLPHWWQNGVIYQIYPKSFQDTTGSGTGDLRGVIQRLDYLHKLGVDAIWLTPFYVSPQVDNGYDVANYTAIDPTYGTLDDFDELVTQAKSRGIRIILDMVFNHTSTQHAWFREALNKESPYRQFYIWRDGEPETPPNNWRSKFGGSAWRWHAESEQYYLHLFAPEQADLNWENPAVRAELKKVCEFWADRGVDGLRLDVVNLISKDPRFPEDLDGDGRRFYTDGPRAHEFLHEMNRDVFTPRGLMTVGEMSSTSLEHCQRYAALTGSELSMTFNFHHLKVDYPGGEKWTLAKPDFVALKTLFRHWQQGMHNVAWNALFWCNHDQPRIVSRFGDEGEYRVPAAKMLAMVLHGMQGTPYIYQGEEIGMTNPHFTRITDYRDVESLNMFAELRNDGRDADELLAILASKSRDNSRTPMQWSNGDNAGFTAGEPWIGLGDNYQQINVEAALADDSSVFYTYQKLIALRKQEAILTWGNYQDLLPNSPVLWCYRREWKGQTLLVIANLSREIQPWQPGQMRGNWQLVMHNYEEASPQPCAMNLRPFEAVWWLQK

SEQ ID NO: 41930 - protein, 167 aa, Oryza sativa
CGGSGVAWLCFLSSFFRTPFGARIRFFGHLKASFSTPSASKFALCSSRGSLLRRLGVVVPRFENFAKFGLLCAADVLPHLIVSGDQRHWGEFITPGLLFLYIAGWIGWVGRSYLIAISGEKKPAMREIIIDVELAVKLLPRGFIWPVAAYRELITGNLVVDDADIGY

SEQ ID NO: 41931 - protein, 161 aa, Micromonospora echinospora
YATWWIRQAITRAMADQARTIRIPVHMVEVINKLGRIQRELLQDLGREPTPEELAKEMDITPEKVLEIQQYAREPISLDQTIGDEGDSQLGDFIEDSEAVVAVDAVSFSLLQDQLQQVLQGSPSVRRVWSMRFGLTDGQPRTLDEIGQVYGVTRERIRQIE

SEQ ID NO: 41932 - protein, 212 aa, Shigella flexneri 2a str. 301 [sequence omitted]

SEQ ID NO: 41933 - protein, 162 aa, Micromonospora olivasterospora
YATWWIRQAITRAMADQARTIRIPVHMVEVINKLGRIQREFFQDLGREPTPEELAKEMDITPEKVLEIQQYAREPISLDQTIGDEGDSSLGDFIEDSEAVVAVDAVSFSLLQDQLQQVLQTLSEREAGVVRLRFGLTDGQPRTLDEIGQVYGVTRERIRQIE

SEQ ID NO: 41934 - protein, 365 aa, Zea mays
  misc_feature (77)..(77): Xaa can be any naturally occurring amino acid
  unsure (1)..(365): unsure at all Xaa locations
MGSTAGDVAAVVDEEACMYAMQLASSSILPMTLKNAIELGLLEVLQKEAGGGKAALAPEEVVARMPAAPGDPAAAAXAMVDRMLRLLASYDVVRCQMEDRDGRYERRYSAAPVCKWLTPNEDGVSMAALALMNQDKVLMESWYYLKDAVLDGGIPFNKAYGMTAFEYHGTDSRFNRVFNEGMKNHSVIITKKLLDFYTGFEGVSTLVDVGGGVGATLHAITSRHPHISGVNFDLPHVISEAPPFPGVRHVGGDMFASVPAGDAILMKWILHDWSDAHCATLLKNCYDALPENGKVIVVECVLPVNTEATPKAQGVFHVDMIMLAHNPGGKERYEREFRELAKGAGFSGFKATYIYANAWAIEFIK

SEQ ID NO: 41935 - protein, 162 aa, Streptomyces glauceuces
YATWWIRQAMSRALADQADTIRVPVHVVELINRVVRVQRRLLQERGVEPTAEDIGVDLDLTPERVTDILRLGQEPVSLHAPVGEEDDVSFGDLIEDGDAASPVESAVFLLLREHLEAVLSTLGERERKVVQLRYGLEDGRPRTLEEIGRIFGVTRERIRQIE

SEQ ID NO: 41936 - protein, 294 aa, Zea mays
MLLNPACEAAAPMDSIRHHLLDEPAAAATASAAPRPVYCRSTSFGSLVADQWSESLPFRPDDADDMVVFGALRDAFSQGWLPDGSFAAVKPEPLAFPDSPYERGSYPCLGGFLLAEGPETPTEAATTPGSEEEAAAAVSRGKHYRGVRQRPWGKFAAEIRDPAKNGARVWLGTYDSAEDAAVAYDRAAYRMRGSRALLNFPLRIGSEIAAAAAAVAATAPAAGDKRASPEPTASSDSSPSASSATPKRRKRGEAAAATMAMALVPPPPAAQAPVQLTLPARPWFAAGPVQQLVS

SEQ ID NO: 41937 - protein, 375 aa, Shewanella oneidensis MR-1
MSDAKKLTGAGLRGQSAGETALSTVGVSGSGLTYRGYDVKDLAENATFEEVAYLILYGELPTTAQLAAYKTKLKGMRGLPQALKEVLERIPADAHPMDVMRTGCSMLGNLEAEHSFSEQSQIADRLLAAFPSIICYWYRFSHDGVRIDTETDDDQIGAHFLHLLHGKAPSALHTKVMDVSLILYAEHEFNASTFTARVCASTLSDMHSCVTGAIGSLRGPLHGGANEAAMELIQDMKDEADARDVLMGKLERKEKIMGFGHAIYRDSDPRNAIIKEWSEKLAADYGDDRLYRVSVACEALMWEQKKLFCNADFFHASAYHFMGIPTKLFTPIFVCSRVTGWTAHVMEQRSNNRIIRPSADYVGVSPRKVIPIANR

SEQ ID NO: 41938 - protein, 150 aa, Triticum aestivum
  misc_feature (123)..(123): Xaa can be any naturally occurring amino acid
  unsure (1)..(150): unsure at all Xaa locations
MSSPSRRSSSPESNIAGGSGSGSAGDERKRKRMLSNRESARRSRARKQQRMEELITEASRLQAENARVEAQIGAYTTELTKVDGENAVLRARHGELAGRLQAFGGVLEIFQVAGATVDIPEIXDPLLRPWQSPFAPQLAAAGGMPDAFQF

SEQ ID NO: 41939 - protein, 152 aa, Pseudonocardia autotrophica
YATWWIRQAITRAMADQARTIRIPVHMVEVINKLGRIQRELLQDLGREPTPEELAKEMDITPEKVLETQQYAREPISLDQTIGDEGDSQLGDFIEDSEAASPSDAVSFTLLQDQLQSTLGTLSEREAGVVRLRFGLTDGRPRTLDEIGQVYG

SEQ ID NO: 41940 - protein, 119 aa, Triticum aestivum
LSLSLSLSLSLSLSLLYSTYLSRPPCSHHLPWLSLRRFEREGEREGTRKMADEGTANCIDIILAIILPPLGVFFKFACGIEFWICLLLTFFGYLPGIIYAVWVITKLGLQEGLLTSASR

SEQ ID NO: 41941 - protein, 161 aa, Streptomyces bluensis
YATWWIRQAITRAMADQARTIRIPVHMVEVINKLARVSRQMLQDLGREPTPEELAKELDMTPEKVIEVQKYGREPISLHTPLGEDGDTQFGDLIEDSEAVVPADAVSFTLLQEQLHSVLDTLSEREAGVVSMRFGLTDGQPKTLDEIGKVYGVTRERIRQI

SEQ ID NO: 41942 - protein, 222 aa, Coxiella burnetii RSA 493
MSINTTLLTPELYQYLLQVSLREPPLLAELREETTRSFSTYAMQTAPEQAQLLALLVKLMQAKKVIDIGTFTGYSAIAMGLALPKDGTLITCDVDEKSTALAKEYWEKAGLSDKIGLRLSPAKDTLAELIHAGQAWQYDLIYIDADKANTDLYYEESLKLLREGGLIAVDNVLRRGQVADEENQSENNQLIRLFNQKVYKDERVDMILIPIGDGLTLARKKS

SEQ ID NO: 41943 - protein, 543 aa, Burkholderia vietnamiensis G4
MVRQTLARAVLHGALIGAVFAWSCAPSPLVAGTVAPPRTPPGMKVRTAAPPYSMPVDFPAIVDRYGPAVVTVSTAAAEPQSGGPSFMELDPDDPLAAFFRRAAPPPLAAPRAQTLAQPSDALPRAIAGSGSGFIVSADGLILTSAHVVADATDVTVRLADRRMLKGTVLAVDPQSDVAVLHVDAPKLPVVRLGDSSRVRAGEPVMTIGAPDGAGNTVTAGIVSATSHLLPDGGAFPFFQTDIAVNPDNSGGPVFNRAGDVIGIAMQVYTDADRYASTTFAIPIALAVKVRAQVQAQMRSNAQAQRAASGDGAGNGSANGSANALGVNVQDVGVGLAAAFGLPRAAGALVNTVDPGSPAALAGVKPGDVIVKFGDRPIGRAAELNDLAAALPAGGKATLRAIRNRVPKTLVVTGAATGADDAIDDAASAGVPGATGPVAAAGATALTVAAARPADGGDRLGLTMHPLSDAERRSTGLAVGMMVDAVHGPAARAGIRPGDVVLELNDTLLETPEDVPALEAHGGNAIAVLIQRDNARRFVSVRAR

SEQ ID NO: 41944 - protein, 547 aa, Vibrio vulnificus
MAAKDVKFGNDARVKMLEGVNILADAVKVTLGPKGRNVVLDKSFGAPTITKDGVSVAREIELEDKFQNMGAQMVKQVASQANDVAGDGTTTATVLAQAIVNEGLKAVAAGMNPMDLKRGIDKAVAAAVEELKAMSKDCSTSTEIEQVGTISANSDSSVGKIIAEAMEKVGRDGVITVEEGQALHDELDVVEGMQFDRGYLSPYFINNQESGSVELESPFFLLVDKKISNIRELLPALEAVAKASRPLLIIAEDVEDEALATLVVNNMRGIVIVAAVIAPGFGDRRKAMLQDIAILTGGTVISEEVGLELEKATLEDLGQAKRVSITKENTTIIDGVGEEAMIQGRVAQIRQQIEDATSDYDKEKLQERVAKLAGGVAVIKVGAATEVKMKEKKDRVEDALHATRAAVEEGIVAGGGVALIRAASKIVDLQGDNEEQNVGIRVALRAMEAPLRQITKNAGDEESVVANNVRAGEASYGYNAATGVYGDMLEMGILDPTKVTRSALQFAASVAGLMITTEAMVTDLPQKDSGMPDMGGMGGMGGMGGMM

SEQ ID NO: 41945 - protein, 159 aa, Oryza sativa (japonica cultivar-group); identical to SEQ ID NO: 985

SEQ ID NO: 41946 - protein, 916 aa, Kineococcus radiotolerans SRS30216
MRAGRALAGAARAPARPHPAGPAAAGRGRVPDGPVRGGGGPRPGAAGGLRPHRVADRPAVHPGELAHRGPGAAGGGRARRRRRARQRRAGGAALARDGPAGARHLPRDDAGRAVRRARRGRGVRGGRDVRALGAGAAAAGDAAGRARAGGPAGPRPSRARPGLTARTGTGRGGSGGLGTAGAGRDEPARAGDRQRVLGGGDEHRLPPGEVLRAGGGDQPHRPLQRQHRPRDRPLPAGLLPGHDGQLRQGEVVDVAGGEYPLVLGEDAGGEQRRRQDPEVEDVEQLGDVDVLGGQAPAQDVVGAGHELHPRARQVGVDVAGGQVQRLPRGEAHLVQQRRHQDARVPRVVPGQLHDAARGGVLGGGARLGHRLDQRAHRPRLGRQQQPGRPPQGLALVGPGEDVQQRGEEVPGARRQRRQLQAGEQVPRGGGGAEPGHRRERLQGEEELGLVLGVLVEAVRGVAGGPGGLLLGVAARGGLPVGVGLQRQRRRGREDLQQEPQPGPAPRVRPPVAQELLRGRGDPLVQTHPLGVGGGPRVRPDPQLGLGPAVRLDAQQLGDGAGRTPRVGLNGVGQSQHTGEATAGAAAGAVRLATVAPMSVLVTGGAGYIGSHVVRLLQQRGERVVVVDDLSNGRAQRVGDAPVVQVDLGTDAAAGALASAFAEHDVDAVIHFAARKQVGESVAKPARYWAQNVGGTANLLQAMEDAGVGKLVFSSSAATYGAPATALVREDGPAEPINPYGQTKLVGEWMSRAAGVAWGLRAANLRYFNVAGAGWSDLGDAAVMNLIPIVFRALDEGRAPVVFGDDYPTPDGSCIRDYVHVLDLARAHLAALDHLAADERPFDTFNVGSGSGSSVFEVLRVVREVTGVDVQPDVRERRAGDPPQLVADVSRINDTLGWSTTKDLTDIVASAWEAWRA

SEQ ID NO: 41947 - protein, 409 aa, Legionella pneumophila subsp. pneumophila str. Philadelphia 1
MKKRVVITGMEITSSIGSGIDKFWLAASQGQCGIKRIQSYDPSPYSTQIAGEITDLSLDHLPEFNKSKRYPRAAQYALFCAHHAIEKAGLEQAELNAAGTFIGTSIGGQPELEAGYRLFFTDSWKKIPPLSVIRGMPNSIANHIAIAFGIGGPNSTISNACVSSGEAIGMAYQQIAHGNLTTALCGGTESLVWESVMAAWCKLRVMSTNNENPSQASRPFDLNRDGMVMADGAGILILEELQQAKARGAQILGEIIGYGASCDAFHVTAPNSQGQARAIVAALNDAKLSINDVHYINAHGTGTQLNDSTETETIKMVFGKRAYDIPITAQKAMTGHAIGAAGAMEIIATTLSLQKNTLLPTINLHTPDPACDLDYVPNAAREKTIDIALSNHFAFGGANAALVLRKYIS

SEQ ID NO: 41948 - protein, 380 aa, Zea mays
SESESEAASGRQGEMGKGAQGSDAAAAGGEVEENMAAWLVAKNTLKIMPFKLPPVGPYDVRVRMKAVGICGSDVHYLREMRIAHFVVKEPMVIGHECAGVVEEVGAGVTHLSVGDRVALEPGVSCWRCRHCKGGRYNLCEDMKFFATPPVHGSLANQVVHPADLCFKLPDGVSLEEGAMCEPLSVGVHACRRAGVGPETGVLVVGAGPIGLVSLLAARAFGAPRVVVVDVDDHRLAVARSLGADAAVRVSPRAEDLADEVERIRAAMGSDIDVSLDCAGFSKTMSTALEATRPGGKVCLVGMGHNEMTLPLTAAAAREVDVVGVFRYKDTWPLCIDFLRSGKVDVKPLITHRFGFSQRDVEEAFEVSARGRDAIKVMFNL

SEQ ID NO: 41949 - protein, 191 aa, Legionella pneumophila subsp. pneumophila str. Philadelphia 1
MLRILLYFLLLINTTFCLAKTEKAIFAGGCFWCMEADFDHLPGVLSTTSGFDGGTLKDPTYEQVSAGNTHYAESVMVEFEPNKLSYKKLVEYFFRHIDPTVKNAQFCDHGSQYRSAIFYLNDQQKKIAMEYKKELEQKFPTVYTEIAPSTSFYPAEEYHQNYYKKNPIRYKYYRYRCGRDTRIQEVWGNKK

SEQ ID NO: 41950 - protein, 202 aa, Escherichia coli
RRELKARHLTMIAIGGSIGTGLFVASGATISQAGPGGALLSYMLIGLMVYFLMTSLGELAAYMPVSGSFATYGQNYVEEGFGFALGWNYWYNWAVTIAVDLVAAQLVMSWWFPDTPGWIWSALFLGVIFLLNYISVRGFGEAEYWFSLIKVTTVIVFIIVGVLMIIGIFKGAQPAGWSNWTIGEAPFAGGFAAMIGVAMIVG

SEQ ID NO: 41951 - protein, 585 aa, Zea mays
MESLGGSQISGEVGLLQQRLEKKLSRVLTWTDGFYNGEVKTRKISNSVELTSDHLVMQRSDQLRELYEALLSGEGDRRAAPARPAGSLSPEDLGDTEWYYVVSMTYAFRPGQGLPGRSFASDEHVWLCNAHLAGSKAFPRALLAKSILCIPVMGGVLELGTTDTVPEAPDLVSRATAAFWEPQCPTYSEEPSSSPSGRANETGEAAADDGTFAFEELDHNNGMDIEAMTAAGGHGQEEELRLREAEALSDDASLEHITKEIEEFYSLCDEMDLQALPLPLEDGWTVDASNFEVPCSSPQPAPPPVDRATANVAADASRAPVYGSRATSFMAWTRSSQQSSCSDDAAPAAVVPAIEEPQRLLKKVVAGGGAWESCGGATGAAQEMSGTGTKNHVMSERKRREKLNEMFLVLKSLLPSIHRVNKASILAETIAYLKELQRRVQELESSREPASRPSETTTRLITRPSRGNNESVRKEVCAGSKRKSPELGRDDVERPPVLIMDAGTSNVTVTVSDKDVLLEVQCRWEELLMTRVFDAIKSLHLDVLSVQASAPDGFMGLKIRAQFAGSGAVVPWMISEALRKAIGKR

SEQ ID NO: 41952 - protein, 365 aa, Kalanchoe grandiflora
SDSGKDAGRLSAAWQLYKAQEELIEVAKQHGVKLTMFHGRGGTVGRGGGPTHLAILSQPADTIQGSLRVTIQGEVIERSFGEAQLCFKTLQRYTAATLEHGMIPPLTPKQEWRALMDEMAVVATERYRSIVFREPRFVEYFRLATPELEYGRMNIGSRPSKRKPSGGIESLRAIPWIFAWTQTRFHLPVWLGFGEAFRHIIDKDNKNLLMLQQMYNEWPFFRVTIDLVEMVFAKGNPGIAALYDKLLVSEELLPLGEQLRTGYNDTKSYLLKITGHNEILEGDPFLKQRLKLRNAYITALNVCQAYTLKRIRDPSYRVPVRPPIAKEIMEGSDSSANQLVKLNPTSEYAPGLEDTLILTMKGIAA

SEQ ID NO: 41953 - protein, 647 aa, Prochlorococcus marinus str. NATL2A
MAVKITNQSLSWTIQNSSELYGIDRWGKGYFTINEKGNISICPNGSNNKSHDLMELLDELESRKLKFPLLIRFDDILEDCLKNLHKAFEKAINDYQYQGKYQGVFPIKCNQQRHVVEELITCGSKWNFGLEAGSKPELLIALSILEDPKALLICNGYKDQRYIETAILARQLGRQPIVVIEQANDVELIIKSSNLLGASPLIGIRAKLSSQSSGRWSSSIGDKSKFGLSIPEILKAIKRLKEANLLNELKLLHFHLGSQINDIGVLKDALQEAGQIYAELINLGAPMGYLDVGGGLGIDYDGSQTASIASTNYSLQNYANDVVATIKECCESKKIPLPTLITESGRAIASHFSILIFNILGKNSLPSDIPKENEKECLSVRNLRETLVHINSLELKQEKDLAKLQEAWNDSLKFKADALAAFRLGYIDLVERAKAEQLTWACAKTIVNQLPKNILLPKELKKLSESLAVTYYANLSVFRSAPDTWAIDQVFPIMPIHRLSKEPKKLGHFADLTCDSDGKLDQFIDNGKIKNLLPLHEFNQNEKYLIGLFLGGAYQEVMGNLHNLFGSTNAVHIRFTENGNYKVEHVIRGNTKSNVLEYLEHDPEILLERLRKSSELAIQGGHLKIHDAQKLIEHVEASLRQSTYLQS

SEQ ID NO: 41954 - protein, 263 aa, Zea mays
  misc_feature (240)..(240): Xaa can be any naturally occurring amino acid
  unsure (1)..(263): unsure at all Xaa locations
MLLLKIFTALFFYITSIVSAADTSAWKSRSIYFVLTDRIARSSSDTGGSACGDLGNYCGGTFKGLESKLDYIKGLGFDAIWITPVVSNKAAGYHGYWAEDLYAVNSNYGTAADLKSLVAAAHAKGIYMMVDVVANHMGPGAITNNRPEPLNQASSYHTACNIDYSNQNSIEICQIAGLPDINTTKSEIRTLLNTWVNWLVKEYSFDGVRIDTVKHVEKDFWPGFSAATGVYSIGEVFDGXPTYLAEYAKLMPGLPHYAVYYPM

SEQ ID NO: 41955 - protein, 283 aa, Arabidopsis thaliana
MRKRERENPCSICGHYHKYEEGEVCGVCGHCMPVSSDTVAPQQVHVSAFPSEILPEFLYLGSYDNASRSELLKTQGISRVLNTVPMCQNLYRNSFTYHGLDNEKVLQFDDAIKFLDQCEKDKARVLVHCMSGKSRSPAVVVAYLMKRKGWRLAESHQWVKQRRPSTDISPGKYLDFGLETYLLFLKLLLIAFSLYTEFYQQLQEFEQGIFGSEMMSAMNINDAPTFGFGFPKIDNQAQAPVFNNAPTSSIFSSPASSIPPQEFTFGATPPKPTTGGDIAMDGS

SEQ ID NO: 41956 - protein, 365 aa, Kalanchoe pinnata
SDSGKDAGRLSAAWQLYKAQEELIEVAKQHGVKLTMFHGRGGTVGRGGGPTHLAILSQPADTIQGSLRVTIQGEVIERSFGEAQLCFKTLQRYTAAALEHSMIPPLTPKQEWRALMDEMAVVATERYRSIVFREPRFVEYFRLATPELEYGRMNIGSRPSKRKPSGGIESLRAIPWIFAWTQTRFHLPVWLGFGEAFRHVIDKDNKNLLMLQQMYNEWPFFRVTIDLVEMVFAKGNPGIAALYDKLLVSEELLPLGEQLRTAYNDTKSYLLKITGHNEILEGDPFLKQRLKLRTAYITTLNVCQAYTLKRIRDPSYQVPVRPPIAKEIMEGSVSSANQLVKLNPTSEYAPGLEDTLILTMKGIAA

SEQ ID NO: 41957 - protein, 193 aa, Escherichia coli
RELKARHLTMIAIGGSIGTGLFVASGATISQAGPGGALLSYMLIGLMVYFLMTSLGELAAYMPVSGSFATYGQNYVEEGFGFALGWNYWYNWAVTIAVDLVAAQLVMSWWFPDTPGWIWSALFLGVIFLLNYISVRGFGEAEYWFSLIKVTTVIVFIIVGVLMIIGIFKGAQPAGWSNWTIGEAPFAGGFAAM

SEQ ID NO: 41958 - protein, 399 aa, GIBBERELLA ZEAE PH-1
MAYSQHDDTFFVESDEPQHRITAQEAARMMARQRQDIIGVELSRLAGDEYLEDIMQHMRQMEDETLPDASLIDMQREIQWFMRPYLIDFLIEAHAAFGLLPETLFLTVNLLDRYCSKRVVYKQHYQLVGCAALLIAAKYGDKKDRVPQIHELNNMCCGLYDAGMFTQMEMHVLNTLDWIIGHPTVDFFSQLMVAEEGDDQEVSHMAAYLCEIALYHRDFVSTKPSVLARSSLALARAILGRTEVNDGGWDQTENVTLITLSHHLHQPSPTLARKYSTTGFSRVSQKLAEFMAEQAAIARRAASANPATPLAEPINKHTSNIYSTPSKGHSAMGFDGYLTPPITPDGNTLMGNHNLAKESYVLPPRCPVTPTPPHHAAVYGQQQQQNQYVGYVNQHGMNQ

SEQ ID NO: 41959 - protein, 400 aa, Cryptococcus neoformans var. neoformans JEC21
MSINVALLGSGVFAQASYVPALLSLARFRTLVLHTIWSRSESSAQTLHDKYTSVGAPSPQLLYGDDGLEAVLANKEIDAVLFVLPITKQPDLVRKAWKAGKHVLSEKPLARDVKEAMELIEEYERDYKPKGLIWRVAENYAHEPALRFAGDILAKTPELGPVLFWDLKFTSYVEDGSKYHATGWRTIPDYQGGFLLDGGVHWAALLRTVLPPAALPASFIGFASLHRTHLLPHDTVQAIALPIPSATIPPNGPKSKLDSAVHTEKDLTSQPGQSTPRGQITFSFAKPDMPPEGRTSNGFVVTLLNGVLTVEQTFDRQFITTLIPAEGSGLEKKTITTRQVGVEVEIEMFVNAVQAVKEGRENKEENFGEPRGALWDLSVVEAMLKSDGKEISLESLIKGE

SEQ ID NO: 41960 - protein, 365 aa, Kalanchoe pinnata
  misc_feature (194)..(194): Xaa can be any naturally occurring amino acid
  unsure (1)..(365): unsure at all Xaa locations
SDSGKDAGRLSAAWQLYKAQEELIEVAKQHGVKLTMFHGRGGTVGRGGGPTHLAILSQPADTIQGSLRVTIQGEVIERSFGEAQSCFKTLQRYTAATLEHSMIPPLTPKQEWRALMDKMAVVATERYRSIVFREPRFVEYFRLATPELEYGRMNIGSRPSKRKPSGGIESLCAIPWIFAWTQTRFHLPVWLGFXEAFRHVIDKDNKNLLMLQQMYNEWPFFRVTIDLVEMVFAKGNPGIAALYDKLLVSEELLPLGEQLRTAYNDTKSYLLRITGHNEILEGDPFLKQRLKLRTAYITTLNVCQAYTLKRIRDPSYQVPVRPPIAKEIMEGSVSSANQLVKLNPTSEYAPGLEDTLILTMKGIAA

SEQ ID NO: 41961 - protein, 185 aa, Escherichia coli
HLTMIAIGGSIGTGLFVASGATISQAGPGGALLSYMLIGLMVYFLMTSLGELAAYMPVSGSFATYGQNYVEEGFGFALGWNYWYNWAVTIAVDLVAAQLVMSWWFPDTPGWIWSALFLGVIFLLNYISVRGFGEAEYWFSLIKVTTVIVFIIVGVLMIIGIFKGAQPAGWSNWTIGEAPFAGGFA

SEQ ID NO: 41962 - protein, 365 aa, Kalanchoe pinnata
SDSGKDAGRLSAAWQLYKAQEELIEVAKQHGVKLTMFHGRGGTVGRGGGPTHLAILSQPADTIQGSLRVTIQGEVIERSFGEAQLCFKTLQRYTAATLEHGMIPPLTPKQEWRALMDEMAVVATERYRSIVFREPRFVEYFRLATPELEYGRMNIGSRPSKRKPSGGIESLRAIPWIFAWTQTRFHLPVWLGFGEAFRHVIDKDNKNLLMLQQMYNEWPFFRVTIDLVEMVFAKGNPGIAALYDKLLVSEELLPLGEQLRTAYNDTKSYLLQITGHNEILEGDPFLKQRLKLRTAYITTLNVCQAYTLKRIRDPSYQVPVRPPIAKEIMEGSVSSANQLVKLNPTSEYAPGLEDTLILTMKGIAA

SEQ ID NO: 41963 - protein, 203 aa, Escherichia coli
KARHLTMIAIGGSIGTGLFVASGATISQAGPGGALLSYMLIGLMVYFLMTSLGELAAYMPVSGSFATYGQNYVEEGFGFALGWNYWYNWAVTIAVDLVAAQLVMSWWFPDTPGWIWSALFLGVIFLLNYISVRGFGEAEYWFSLIKVTTVIVFIIVGVLMIIGIFKGAQPAGWSNWTIGEAPFAGGFAAMIGVAMIVGFSFQG

SEQ ID NO: 41964 - protein, 226 aa, Pseudomonas aeruginosa PAO1
MKRMRLKAVLFDMDGTLLDTAPDFIAITQAMRAAHGLPPVDEQRVRDVVSGGARAMVAAAFGLSLDSPEVEPLRQEFLDRYQEHCAVLSRPYDGIPELLAAIEKAGLIWGVVTNKPVRFAEPIMQRLGYAERSRVLVCPDHVTRSKPDPEPLLLACSQLGIDPSRVLFIGDDLRDIESGRDAGTKTAAVRYGYIHPEDNPAHWGADVIVDHPRELIDVLDRALCDC

SEQ ID NO: 41965 - protein, 199 aa, Campylobacter lari RM2100
MQEDFKEHAELFESLKNKQNPHTLFIGCADSRVIPNLITNTGPGELFVVRNIGNIVPPYRVGDDFLATTSAIEYAFNSLHIKNIIVCGHSNCGGCAALYANENDLKNMPNVKTWLTLLEPIKNKVLKIAGSDLAMRAWMTEKMNLVNSLQNLLTYPGVEEALNKKEIELHAWYYIIETGEIYEYDFNFENFVLIQERRS

SEQ ID NO: 41966 - protein, 365 aa, Kalanchoe pinnata
SDSGKDAGRLSAAWQLYKAQEDLVKVAKEFGVKLTMFHGRGGTVGRGGGPTHLAILSQPPDTIHGSLRVTVQGEVIEQSFGEEHLCFRTLQRYTAATLEHSMCPPASPEPEWRELLNEMAVAATKEYRSIVFHEPRFVEYFRLATPELEYGRMNIGSRPSKRKPSGGIESLRAIPWIFAWTQTRFHLPVWLGFGAAFKHVIDKDIKNLLMLQEMYTRWPFFRVTIDLVEMVFAKGDPGIAALYDKLLVSEDLWPFGEQLRNNYNETKNLLLQVAGHKDLLEGNPYLRQRLRLRDSYITTLNACQAYTLKRIRDPSYQVPVRPPIAKEIMEGSVSSANQLVKLNPTSEYAPGLEDTLILTMKGIAA

SEQ ID NO: 41967 - protein, 596 aa, Zea mays
MEGGMATSTKPQQDNRHWSGLEKYRADPIYYRCIRPAGTILSGPTKDGATQPPTRDPSICRTPPNSQTITRSVDMDKAYIAALSAAALFLLHYLLGRRAGGEGKAKAKGSRRRLPPSPPAIPFLGHLHLVKAPFHGALARLAARHGPVFSMRLGTRRAVVVSSPDCARECFTEHDVNFANRPLFPSMRLASFDGAMLSVSSYGPYWRNLRRVAAVQLLSAHRVACMAPAIEAQVRAMVRRMDRAAAAGGGGVAARVQLKRRLFELSLSVLMETIAHTKTSRAEADADSDMSPEAHEFKQIVDELVPYIGTANRWDYLPVLRWFDVFGVRNKILDAVGRRDAFLGRLIDGERRRLDAGDDSESKSMIAVLLTLQKSEPEVYTDTVITALCANLFGAGTETTSTTTEWAMSLLLNHREALKKAQAEIDAAVGTSRLVTADDVPHLTYLQCIVDETLRLHPAAPLLLPHESAADCTVGGYDVPRGTMLLVNVHAVHRDPAVWEDPDRFVPERFEGAGGKAEGRLLMPFGMGRRKCPGETLALRTVGLVLATLLQCFDWDTVDGAQVDMKASGGLTMPRAVPLEAMCRPRTAMRGVLKRL

SEQ ID NO: 41968 - protein, 526 aa, Triticum aestivum
VRSPANSSVASTPARGGFKRPFPPPSPAKHIRALLARRHGSVKPNEASIPEGGEPELGLDKSFGFSKHFFAKYELGEEVGRGHFGYTCAAKAKKGEHKGQDVAVKVIPKAKMTTAIAIEDVRREVRILSSLTGHSNLVQFYDAFEDEDNVYIVMELCSTSELLDKILARGGKYSEEDAKVVMLQILSVVSFCHLQGVVHRDLKPENFLFSSKEENSPLKVIDFGLSDFVKPDERLNDIVGSAYYVAPEVLHRSYGTEGDMWSIGVIAYILLCGSRPFWARTESGIFRAVLKAEPSFDEAPWPTLSAEAKDFVKRLLNKDYRKRMTASQALSHPWIRDAQQVKIPLDMIIYKLIRAYISSSSLRKSALRALAKTLTENQLFYLKEQFELLGPNKSGLISLQNLKSALVKNSTDAMKDSRVIDFVNTVCTLQYRKLDFEEFAASAISVYQMEALETWEQHARRAYELFDKEGNRPIVIEELASELGLGPSVPLHVVLQDWIRHADGKLSFLGFIKLLHGVSSRSIPKA

SEQ ID NO: 41969 - protein, 146 aa, Arabidopsis thaliana
MGSVQMQTSPESDNDPRYATVTDERKRKRMISNRESARRSRMRKQKQLGDLINEVTLLKNDNAKITEQVDEASKKYIEMESKNNVLRAQASELTDRLRSLNSVLEMVEEISGQALDIPEIPESMQNPWQMPCPMQPIRASADMFDC

SEQ ID NO: 41970 - protein, 312 aa, Coniochaeta ligniaria
GQSGAGNNWAKGHYTEGAELVDQVLDVVRREAEGCDCLQGFQITHSLGGGTGAGMGTLLISKIREEFPDRMMATFSVVPSPKVSDTVVEPYNATLSVHQLVENSDETFCIDNEALYDICMRTLKLSNPSYGDLNHLVSAVMSGVTTCLRFPGQLNSDLRKLAVNLVPFPRLHFFMVGFAPLTSRGAHSFRAVTVPELTQQMFDPKNMMAASDFRNGRYLTCSAMFRGKVSMKEVEDQMRNVQNKNSSYFVEWIPNNVQTALCSIPPRGLKMSSTFVGNSTAIQELFKRIGEQFTAMFRRKAFLHWYTGEGMD

SEQ ID NO: 41971 - protein, 272 aa, Pisum sativum
FVRQLNTYGFRKVDPDRWEFANEGFLAGQRILLRTIKRRRNVAQSPSMQRESGGACIELGEFGLEGEIERLRRDRSVLVAEIVKLRQQQNNSRDQISAMEARLLITEKKHQQMMAFLARALSNQSFIQQLANNKELKGVEMKRKRRLPASSSLENLQNDSVTMMTVPIESVVDYSSREQQEGLTAIESEIETLLSAYDNESRSEIKDPSANESNLSDWEELLNQKLVGGNPEDEVLIGDFSQIDAPVEDLVEKNDDWTVDLQNLVDEMDFEP

SEQ ID NO: 41972 - protein, 365 aa, Stylosanthes humilis
MGSTGETQITPTVVSDEEANLFAMQLASASVLPMVLKSAIELDVLEIIAKAGPGVHLSPADIAANVPTTNPDAAVMLDRMLRLLACYNILNHSLRTLPDGKVERLYGLAPVAKFLVKNEDGVSLSALNLMNHDKVLMESWYYLKETVLEGGIPFNKAYGMTAFEYHGTDPRFNKVFNKGMNDHTTITMKKILEIYTGFEGLKSLVDVGGGVGAVVNMIVTKYPHIKGINFDLPHVIEDAPSYPGVEHVGGDMFVSVPKADAVFMKWICHDWSDEHCIKFLKNCYDAVPDNGKVIVAECILPVAPDSSLATKGVVHIDVIMLAHNPGGKERTEKEFEALAKAAGFQGFRVVCCAFNTYIMEFLKKP

SEQ ID NO: 41973 - protein, 266 aa, uncultured bacterium
MNRIEARFQELRRQGRKAFIPYIAAGDPTLERTAEIVLALEQAGADVVELGIPFSDPLADGAVNQEAALRALRHGASLRDVLGMVKTLRQRSHVPIVLFTYFNPVHSYGLDRFGPDCRDAGVDGVLCVDLPPEEAGEYKASLDALDIATIFLLAPTSTDKRIETVSRHCTGFVYYVSRTGVTGEQARVGEDVRAMVAKIKQHTDKPVAVGFGISKPEHAAEIARYADGVIVGSAIVRMIGELGDSPETAPKVGEFAKSLADAAKHA

SEQ ID NO: 41974 - protein, 327 aa, Coniochaetidium savoryi
RPDNFVFGQSGAGNNWAKGHYTEGAELVDQVLDVVRREAEGCDCLQGFQITHSLGGGTGAGMGTLLISKIREEFPDRMMATFSVVPSPKVSDTVVEPYNATLSIHQLVENSDETFCIDNEALYDICMRTLKLSNPSYGDLNHLVSAVMSGVTTCLRFPGQLNSDLRKLAVNMVPFPRLHFFMVGFAPLTSRGAHSFRAVTVPELTQQMFDPKNMMAASDFRNGRYLTCSAIFRGKVSMKEVEDQMRNVQNKNSSYFVEWIPNNVQTALCSIPPRGLKMSSTFIGNSTAIQELFKRIGEQFTAMFRRKAFLHWYTGEGMDEMEFTEAE

SEQ ID NO: 41975 - protein, 222 aa, Zymomonas mobilis subsp. mobilis ZM4
MTSSLQHIENWIFDLDNTLYPPDADLFTHIDKRMAYYISVKLNLPLEKSQKLQQDYYLKYGASLVGLYRYHNIDPYDYLAYVHNIEMDSLSPDLTLRRSIENLPGRKWIFTNGDRPYAEQVLERRGLSGVFEGVFDIHSSQYRPKPDPSCYQRMLEEFQADGEKSLFVDDMACNLLPAKDQGMTTVWVNHGLKGQDGHITEGHEKIDYEIYDVGSWLKEITA

SEQ ID NO: 41976 - protein, 161 aa, Streptomyces spectabilis
YATWWIRQAMSRAMADQARTIRVPVHVVELINRVVRVQRRMLQERGYEPSPEEVAAHLDLPHERVRGLRLAQEPVSLHAPVGEEDDVALGDLIEDGDAASPVESAAFLLLREHLEAVLSTLGERERKVVQLRYGLADGRPRTLEEIGRIFGVTRERIRQIE

SEQ ID NO: 41977 - protein, 321 aa, Diaporthe phaseolorum
FGQSGAGNNWAKGHYTEGAELVDQVLDVVRREAEGCDCLQGFQITHSLGGGTGAGMGTLLISKIREEFPDRMMATFSVVPSPKVSDTVVEPYNATLSVHQLVENSDETFCIDNEALYDICMRTLKLSNPSYGDLNYLVSAVMSGVTVSLRFPGQLNSDLRKLAVNMVPFPRLHFFMVGFAPLTSRGAHSFRAVTVPELTQQMFDPKNMMAASDFRNGRYLTCSAIFRGKVSMKEVEDQMRNVQSKNSSYFVEWIPNNVQTALCSIPPKGLKMSSTFVGNSTAIQELFKRVGEQFTAMFRRKAFLHWYTGEGMDEMEFTEAE

SEQ ID NO: 41978 - protein, 279 aa, Zea mays
MSGLYSQGFSPARNLSPQIRSNPDVDSQYLAELLAEHQKLGPFMQVLPICNKLLSQEIMRVSSIVHNHGFGDHDRHRFRSPSPMSSPNPRANLPGNGFSTWSGLQERLGFPQRASMDWQGAPPSPSTQVVKKILRLEVPVDSYPNFNFVGRILGPRGNSLKRVEASTGCRVFIRGNGSIKDPGKEDKLRGKPGYEHLSDPLHILIEAEFPASIIDARLRHAQEIIEELLKPVDESQDFYKRQQLRELALLNSTLREDSPHPGSVSPFSNGGMKRAKTGQ

SEQ ID NO: 41979 - protein, 162 aa, Streptomyces peucetius
YATWWIRQAITRSIADQARTIRIPVHMIETINKLNRISRQMLQEMGREPTPEELGERMEMPEDKIRKVLKIAKEPISMETPIGDDEDSHLGDFIEDSTMQSPIDVATVESLKEATRDVLSGLTAREAKVLRMRFGIDMNTDHTLEEVGKQFDVTRERIRQIE

SEQ ID NO: 41980 - protein, 323 aa, Eutypa sp. SMH3580
LVFGKSGAGNNWAKGHYTEGAELVDQVLDVVRREAEGCDCLQGFQITHSLGGGTGAGMGTLLISKIREEFPDRMMATFSVVPSPKVSDTVVEPYNATLSVHQLVENSDETFCIDNEALYDICMRTLKLSNPSYGDLNHLVSAVMSGVSTSLRFPGQLNSDLRKLAVNMVPFPRLHFFMVGFAPLTSRGAHSFRAVTVPELTQQMFDPKNMMAASDFRNGRYLTCSAIFRGKVSMKEVEDQMRNVQNKNSSYFVEWIPNNVQTALCSIPPRGLKMSSTFVGNSTAIQELFKRVGEQFTAMFRRKAFLHWYTGEGMDEMEFTEAE

SEQ ID NO: 41981 - protein, 554 aa, Shewanella oneidensis MR-1
MDKAIKTPIEMLAHWANTRGDEIYLRQPIKGQYLDFTWNEVQEKVQQLAGALRHLGLEPGDKIAVLSKNCAEWFITDLALMHGGYISVPIYPTANPDTIRYVLQHSGAKAIFLGKLDHWADQEAGVGGELLRLAMPYDTMPAQYQWEQLLNMGNPLIEAPLPEPDQIMTLIYTSGSTGQPKGAIQTFASYGWTCQAVVRDLRTNGNDRLLSYLPLAHITERVAIEGSSFYSGSVVAFVESLDSFVADVQRAKPTVFFSVPRLWSLFQKNIIDKIGVSKLNLLLKIPLISSLVKHKIHKGLGLNHCRLLGSGSAPIPPSLIHWYHSIGLNICEAWGMTENCAYSIINYPFDVRKIGTVGKPVQDCQIRQGEDGELLIKSPGLMTAYYLQPEATAAAFDADGFFHTGDLCAIDADGCVTITGRVKDNFKTAKGKYVAPVPIERKLAQDPHVELICVIGSGLPHPVALVQLSEGANLQAREEVRASLKATLDSVNPHLESHEHVDAIVVVNEPWSIENDVLTPTLKIKRHVLEKAFSERVDGIRGAQVRWEDELAKK

SEQ ID NO: 41982 - protein, 652 aa, Arabidopsis thaliana
MSTAPSPGTTPSPSPPSPPTNSTTTTPPPAASSPPPTTTPSSPPPSPSTNSTSPPPSSPLPPSLPPPSPPGSLTPPLPQPSPSAPITPSPPSPTTPSNPRSPPSPNQGPPNTPSGSTPRTPSNTKPSPPSDSSDGLSTGVVVGIAIGGVAILVILTLICLLCKKKRRRRHDDEAAYYVPPPPPSGPKAGGPYGGQQQYWQQQNASRPSDNHVVTSLPPPKPPSPPRKPPPPPPPPAFMSSSGGSDYSDLPVLPPPSPGLVLGFSKSTFTYEELSRATNGFSEANLLGQGGFGYVHKGILPSGKEVAVKQLKAGSGQGEREFQAEVEIISRVHHRHLVSLIGYCMAGVQRLLVYEFVPNNNLEFHLHGKGRPTMEWSTRLKIALGSAKGLSYLHEDCNPKIIHRDIKASNILIDFKFEAKVADFGLAKIASDTNTHVSTRVMGTFGYLAPEYAASGKLTEKSDVFSFGVVLLELITGRRPVDANNVYVDDSLVDWARPLLNRASEEGDFEGLADSKMGNEYDREEMARMVACAAACVRHSARRRPRMSQIVRALEGNVSLSDLNEGMRPGHSNVYSSYGGSTDYDTSQYNDDMIKFRKMALGTQEYGTTGEYSNPTSDYGLYPSGSSSEGQATREMEMGKIKKTGQGYSGPSL

SEQ ID NO: 41983 - protein, 235 aa, Arabidopsis thaliana
MLKLWRWYQRCLTVHPVKTQVISSGFLWGFGDVTAQYITHSTAKRRLLRLTETNKDADADAEIKVKWKQDAEFKVNWKRVAITSMFGFGFVGPVGHFWYEGLDKFIKLKLRYVPKSTRFVAAKVAMDGLIFGPVDLLVFFTYMGFATGKNTAEVKEGLKRDFLPALALEGGAWPLLQIANFRYVPVQYQLLYVNIFCLVDSAFLSWVEQQKDAAWKQWFTSSFQPLKERGGQGGV

SEQ ID NO: 41984 - protein, 235 aa, Glycine max
MDSLKFASLTLPPCSRRSGMLGKRLNSPLLIIDSSAQFCYCKTDLAAASSSIPLPNMRFSCRFSPSVAAETWTSNLSSKQWILHSTAQIENIITSNEDQSMWEACKQALSAFNFSDEEKDKILGKAFGLIHSPYWGEERSKEVPKLKTVNGVLDYLRSLNLSDDDLSILLKKFPEVLGCNLEEELKGNVKILEEQWSIKGNSLRKLLLRNPKVLGYNVDCKGDCIAQCTRCWARF

SEQ ID NO: 41985 - protein, 378 aa, Arabidopsis thaliana
MTKMSNLPNDLAEEVLSRVSLTSLRNVRLTCKDWNTLSKGESFAKNHLGYQAIVAAKEKEFMMVLMMDFRVYLIRVNVHNDIESCIKPEGELISLGDEVDVSQVFHCDGLLLCITEDNEDNAKVVLWNPYWGQTRWIESTNNFHKLDMYTYALGYKKSSKSSRSYKILRFIDFSPTCSEFKIYNINSDSWKVLDVSPDWKIDSYIRGVSLKGNTYWIARERHGYGHTFLVCFDFTRERFRSRLPLPSQPCVLDTVSLSSVREEQLAVLFQCSSTLEMQIWVTTKIEPNAVLWNSKVFLAVDMHSLKFQFQVRASSFFIDEEKRVVVVFDKEKRYLASSRNKAYIVGVDGTWEQVDLGMSVDKFVYPLVCSYVPSLVHF

SEQ ID NO: 41986 - protein, 406 aa, Arabidopsis thaliana
MSEEKVVAVIMVGGPTKGTRFRPLSFNTPKPLIPLAGQPMIHHPISACKKISNLAQIFLIGFYEEREFALYVSSITNELKIPVRYLKEDKPHGSAGALYYFRDRIMEEKPSHVFLLNCDVCCSFPLQGILDAHRRYGGIGTMLVIKVSAEAASQFGELIADPDTKELLHYTEKPETFVSDLINCGVYVFTSDIFNAIEEVYSQIRDTSSNYQSATRSVPADFVRLDQDILSPLAGKKQLYTYENKDFWEQIKTPGKSLKCSALYLSQFRETSPHILASGDGTNRKPTIIGDVYIHPSVKLHPTAKIGPNVSISANVRVGPGVRLISCIILDDVEIKENAVVINSIIGWKSSIGRWSRVQASGDYNDRLGITILGEAVTVEDEVAVIGSIVLQNKTLNVSVQDDIIL

SEQ ID NO: 41987 - protein, 452 aa, Cryptococcus neoformans var. neoformans B-3501A
MSPIASTASPLPSSKPTLSSQEVMNLEHEYSAHNYHPLPICFEKGLGAHVWDPEGNEYLDFLSAYSAVNQGHCHPEILNTLVTQASKLTLSSRAFYSSNLGPFAKKITSMFGYDMVLPMNTGAEAVETAIKLARKWGYEKKKIPDGKAKVLSVEGNFHGRTIGIISMSTDPESRTGFGPFLENVGPRWDTGLIRYNHTEDLEKVLEKHGDEVAAFLVEPIQGEAGIFVPDDGYLAKCAEICKKYNVLLICDEIQTGLCRTGKMLCYEWDNIRPDMVILGKALSGGMYPVSCVLADKDIMLCIKPGEHGSTYGGNPLGCAVAMTALDVLVKEDLANRSLKLGEIFRSELAKLNSPFIKLIRGRGLFNGVVIDETASKKGRTAWQLCLLMKSKGLLAKPTHVNIIRFAPPLVISEEDVRKAVKIIGESLEELDTIEKIPGDEGEEHKAAIKLDD

SEQ ID NO: 41988 - protein, 562 aa, Saccharomyces cerevisiae
MAARPQQPPMEMPDLSNAIVAQDEMGRPFIIVKDQGNKKRQHGLEAKKSHILAARSVASIIKTSLGPRGLDKILISPDGEITITNDGATILSQMELDNEIAKLLVQLSKSQDDEIGDGTTGVVVLASALLDQALELIQKGIHPIKIANGFDEAAKLAISKLEETCDDISASNDELFRDFLLRAAKTSLGSKIVSKDHDRFAEMAVEAVINVMDKDRKDVDFDLIKMQGRVGGSISDSKLINGVILDKDFSHPQMPKCVLPKEGSDGVKLAILTCPFEPPKPKTKHKLDISSVEEYQKLQTYEQDKFKEMIDDVKKAGADVVICQWGFDDEANHLLLQNDLPAVRWVGGQELEHIAISTNGRIVPRFQDLSKDKLGTCSRIYEQEFGTTKDRMLIIEQSKETKTVTCFVRGSNKMIVDEAERALHDSLCVVRNLVKDSRVVYGGGAAEVTMSLAVSEEADKQRGIDQYAFRGFAQALDTIPMTLAENSGLDPIGTLSTLKSKQLKEKISNIGVDCLGYGSNDMKELFVVDPFIGKKQQILLATQLCRMILKIDNVIISGKDEY

SEQ ID NO: 41989 - protein, 371 aa, Kalanchoe streptantha
SDSGKDAGRLSAAWQLYKAQEELIEVAKQHGVKLTMFHGRGGTVGRGGGPTHLAILSQPTDTIQGSLRVTIQGEVIERSFGEGQLCFKTLQRYTAATLEHGMIPPLTPKQEWRALMDDMAVVATERYRSIVFREPRFVEYFRLATPELEYGRMNIGSRPSKRKPSGGIESLRAIPWIFAWTQTRFHLPVWLGFGEAFRHVIDKDSKNLLMLQQMYNEWPFFRVTIDLVEMVFAKGNPGIAALYDKLLVSEELLPLGEELRTGYNDTKSYLLKITGHNEILEGDPFLKQRLKLRNAYITTLNVCQAYTLKRIRDPSYQVPVRPPIAKEIMEGSVSSANQLVKLNPTSEYAPGLEDTLILTMKGIAAGMQNTG

SEQ ID NO: 41990 - protein, 1994 aa, GIBBERELLA ZEAE PH-1
MSSAALQTAPHQHTALASSPLGTPSSRQYRPSQSSPNSQAYNAQQTSTASSSSRRPPSRKTNDSAPSPSYHLTPGFGSPVTASVANHQEPVASDWQGNMPPVAPPRSSSNHQSGSSRRSHYPNEKPPSSPRRNESTRTGSRGEQAAAENGYRSSKADTAARASSRDGKAAPSQLPVRSTHSTPSKPVHDATDSLTKAIAAAQDTIDRDRNHASNQHNGDDTAAPPPAVATGEHGEERRQRSRHDHSRSNKGNTKFGDFILGNTIGEGEFGKVKLGWKQDSSVQVAIKLIKRDTVGSNPSRFAKIYREVAILRGVQHPNIVRLIDKVETDRHIGIILEYASGGELFDYILNHRYLKDNAARRLFAQLVSGVGYLHKKGIVHRDLKLENLLLDRNRNIIITDFGFANTFDAHEELTKEEELNLTDKEFVKRMGLDRVKMNGSRKGDLMQTSCGSPCYAAPELVVSDSLYTGRKVDVWSCGVILYAMLAGYLPFDDDPANPEGDNINLLYKYIVTTPLTFPEYVTPHARDLLRRILVPNPRKRADLFEVARHSWLSEYANLVEFITSTTTLPSEVPDSGVSPDDYAEAPTVARSNSVREASKHKQPHPPVVGGLAKTHGSVDPDSEATHRGTPKDAKRRTVQVEYVAPTTKTQRGADVAPSKPSSHSLQQQQPANTPEPVTEKPLPREPPLTKDNPSRAQQSRRPQSSHKNAPPPHRPSRDTRATSDNAFMTGGTTTTRPRTQGSMQSSTSMGLQSQTNYGQPAPPTIADTNAHGRIQQPQNPEEEGNIAKDVGSVPPKVMKMTTFQNETKAAGRGHKRSNTLGDIGSKIMGRSGSIFGGRSKKRPEQQQQQQQQQAEKSSRKYPPVSMSNTMLPGEDAGPRPSMDSKASRRSFSIGLGKKRSGSVQGSSDKQNRRFSLAKAMGLGRNEGSVTGSEADSQQDLPIQHPRTEQLRGYSAHDEPRHSEPYFDAPYEQYPQRDTAQSSPVYNTRYGSQQQDGRRPSAIPTYIQGGSHLNTGSDSSVDMRRPNDPRSRPYQEDFSGSEGYDGRPVGSSREDRPGVLHKSHKKFADAYDGENYRGHEGSSGAAKRVMDFFRRRGKARGATSNEGRTPRALDDAHSQLGDHPGQLILTTYARDWLCFDCYNHINWRSVVCFDGNETRDDETTISSLTVPFAKQITSHELAGKLTERAKKLSSQRVATIAYLEYMYMRPGSVSLPDTYVTWAKLAFAYSGIQTHRRIDLNLPFGSDASYTRMLSPLRHVTSNVGFASYGSRSVAQPTAPTAQGLSEQPRLQEFDEKKTRLDNQNGRKTKSLHKIPSAGGVSSPAAGSGSVLEAPSKAEEPAQGETPSTTSKNAGFFAELKRSVRIVITYSWLNVFMVFVPVGIAVSQVPGVPAGLIFGMNAIAIIPLAGLLAFATESVALKMGDALGALLNVTFGNAVELIIFILALVKNEIRVVQSALLGSILANLLLILGMSMLLGGLRFREQVYNSTVTQMSACLLSLSVISLVLPTAFHASFKDNDKADRESLKISRGTSVVLLIVYVIYLTFQLKSHAYMYESTPQHIIDAELAPGPAAGFLDSSSSDDSSSSSSDSSDSDSSHGTMRKRMKKVLRNRRHRRSSAASADTADTKGTRSASFATNNTTTPQEEVSEAKASRQRVPRSASYEGSEHAVDDDDEEEAERSHRRRRYRRHRHRRSKKEARKAKKEAKNAQSQNGVPESIPENKGEGEPRRVDFAVQDDLEAGPSTNGGKRPFPLRGISVKALAPVFTEKPPTASGPAPHVRYGIRRTNSLPDRLQFRAPGAMLPAQIPPMLNAPGVKSTDSDEEDEEEHLSQFSAVILLLVSTALVAVCAEFLVDSIQEVVKTSHINQVGIGLIILPIVGNAAEHVTAIKVAYKNNMDLAIGVAVGSSIQIALLLTPFMVILGWIMNKEMTLYFTLFETVCLFVSAFIVNFLVLDGRSNYLEGALLCAVYIIIAVVAFFYPDSEDASVWGGGT

SEQ ID NO: 41991 - protein, 94 aa, Bacillus subtilis subsp. subtilis str. 168
MLKPLGDRVVIELVESEEKTASGIVLPDSAKEKPQEGKIVAAGSGRVLESGERVALEVKEGDRIIFSKYAGTEVKYEGTEYLILRESDILAVIG

SEQ ID NO: 41992 - protein, 308 aa, Zea mays
MAAAAGGGAVRALSQKEQDIQMMLAADVHLGTKNCDFQTERYVFKRRSDGIYIINLGKTWDKLQLAARVIVAIENPQDIIVQSARPYGQRAVLKFAQYTGAHAIAGRHTPGTFTNQLQTSFSEPRLLILTDPRTDHQPIKESALGNIPTIAFCDTDSPMRYVDIGIPANNKGRNSIGCLFWLLSRMVLQMRGTILPGHKWEVMVDLFFYRDPEEAKEQEEEAAAAPEFAAITDYQGTDQWGGDQWTSDVAAPPVAPTGADWGAALAPVPTGEGWDQAGAPVPADGTVHPVVAPTGWDQAAPPTAQGWE

SEQ ID NO: 41993 - protein, 365 aa, Kalanchoe streptantha
SDSGKDAGRLSAAWQLYKAQEELIEVAKQHGVKLTMFHGRGGTVGRGGGPTHLAILSQPADTIQGSLRVTIQGEVIERSFGEAQLCFKTLQRYTAATLEHGMIPPLTPKQEWRALMDDMAVVATERYRSIVFREPRFVEYFRLATPELEYGRMNIGSRPSKRKPSGGIESLRAIPWIFAWTQTRFHLPVWLGFGEAFRHVMDKDSKNLLMLQQMYNEWPFFRVTIDLVEMVFAKGNPGIAALYDKLLVSEELLPLGEELRTAYNDTKSYLLKITGHNEILEGDPFLKQRLKLRNAYITTLNVCQAYTLKRIRDPSYQVPVRPPIAKEIMEGSVSSANQLVKLNPTSEYAPGLEDTLILTMKGIAA

SEQ ID NO: 41994 - protein, 784 aa, Oryza sativa
MSLMRTAALTLTVLAVVFVVLVQGKPVTTDAVTEVNAPSLGEGATAFFLVAIPAIGFAFGMYWWQLAAEISIDPAKAAGRNSFLTTEIMRNVQNISQKVSDGATAFLFAEYKYLFMFMTGFGGLLCFMLGTSLASPTSGEKPVEAPWVNAFLSLVAFAMGASTSIVSGWIGMRIAVFCNSRTAVRATEGADEGDQGAGFAAAFETAFRGGITMGFCLTSLGIFSLFCCVKICQGYFGTSQAMAPQLYECVAAFGLGGSAVACFGRVGGGIFTKAADVGADLVGKVEKNIPEDDARNPGVIADCIGDNVGDIAGMGSDLFGSFGEASCAAFVVASQSAELSASFTSMMYPLLITASGVIVCMGTSLLAATNCGVKKAEDVEPTLKRQLLVSTVVATFVLMAVTDVCLPEHIKVGNTETTKWRALVCVLFGLWSGLFIGYTTEYYTSNTYRPVQEISEACETGAATNIIYGLALGYLSVLPPTVAMASTVYVSYKMADLYGYALAALGVLSTMCIALTIDAYGPISDNAGGFAEMAHMGHEIREVTDALDAAGNTTAAIGKGFAISSAAFVALALYGAYVVRVQIPVVNILDQRVMPGLMIGAMLPYWFSAMTMKSVGIAAMDMVEEIRRQFQDPKVADGTKEPDYNACVAIATQASLRQMVAPSVLVIFSPIVIGVLFGKYTLAGMLPGAVVSGVQMATSSSNTGGAWDNAKKYIERGGLGKGKGKGSPQHAAAVTGDTVGDPLKDTSGPALNILIKLMAIISVVFAPVMQSKMGGILMNYLEAM

SEQ ID NO: 41995 - protein, 364 aa, Kalanchoe streptantha
SDSGKDAGRLSAAWQLYKAQEDLVKVAKEFGVKLTMFHGRGGTVGRGGGPTHLAILSQPPDTIHGSLRVTVQGEVIEQSFGEEHLCFRTLQRYTAATLEHSMCPPASPEPEWRELLDEMAVAATKEYRSIVFHEPRFVEYFRLATPELEYGRMNIGSRPSKRKPSGGIESLRAIPWIFAWTQTRFHLPVWLGFGAAFKHVIDKDIKNLLMLQEMYTRWPFFRVTIDLIEMVFAKGDPGIAALYDKLLVSEDLWPFGEQLRNNYNETKNLLLQVAGHKDLLEGNPYLRQRLRLRDSYITTLNACQAYTLKRIRDPNYHVTVRPHLSKEIMESHKAAAELVKLNPTSEYAPGLEDTLILTMKGIAA

SEQ ID NO: 41996 - protein, 552 aa, Synechocystis sp. PCC 6803
MSKFVFVTGGVVSSIGKGIVAASLGRLLKSRHYSVSILKLDPYINVDPGTMSPFQHGEVFVTEDGAETDLDLGHYERFTDTSMSRLNSVTTGSIYQAVINKERRGAYMGGTVQVIPHITNEIKERILRVAQNTNPDVVITEIGGTVGDIESLPFLEAIRQFRKEVGRHNVIYMHVTLIPWIPAAKEMKTKPTQHSVKELRSIGIQPDILVCRCDRPLHPGMKEKLSEFCDVPVESVITCQDASSIYEVPLILEKEGLAHQTLELLRMENRSPDLSQWQSLVEKMQSPHHDITVALVGKYVQLSDAYLSVVEALGHAAIASDSKLHLRWISAEEIEAQGAATFLKDVDGVLVPGGFGIRGVDGKVQAIEYARENQLPFLGLCLGMQCSVIEWARNVAKLPEANSAEFETETPNPVINLLPEQQDVVDLGGTMRLGLYPCRIAPDTLAFSLYQKEVVYERHRHRYEFNNSYRTQFTDTGFVVSGTSPDGRLVEIVEYPHHPFFIACQFHPEFHSRPNQAHPLFSGFINAVLKRRNAPAKIAVNCHTVTEDHEPS

SEQ ID NO: 41997 - protein, 430 aa, Deinococcus radiodurans R1
MSNVFYRSSKPYPVAVRGEGVFLYDDAGRRYLDGSSGALVANIGHGRAEVGERMAAQAARLPFVHGSQFSSDVLEEYAGRLARFVGLPTFRFWAVSGGSEATESAVKLARQYHVERGEPGRFKVITRVPSYHGASLGSLAASGMGARRELYTPLMRPEAWPKLPKPDPARNGAEDAEGLRALLEREGPETVAAFMAEPVVGASDAALAPAPGYYERVRDICDEAGIIFIADEVMSGMGRCGSPLALSRWSGVTPDIAVLGKGLAAGYAPLAGLLAAPQVYETVMGGSGAFMHGFTYAGHPVSVAAGLSVLDIVEREDLTGAAKERGAQLLAGLQALQARFPQMMQVRGTGLLLGVVLGDLATGQAFETPGIASRIGAAALKRGLITYPGSGAEPNGRGDHLLLGPPLSITAAEVDELLALLAGALEDVLG

SEQ ID NO: 41998 - protein, 1774 aa, Neurospora crassa
MSSNSAEIGELSPQQQNKEAQSNGSSAVEPSNALPSGLPTRSAVPAPLTANKSPAVDGQQDDQALVSPRHMLTGKQEHYLKRELVSEQVKWEISELNSPTALRRFGAPFKSDLGEISPLDSELPILRYIFVHHVREFPFLDKAKEKEFWQDKLQVFLESFASKNISSSEDRLEETKRRKLALKAQKLVELMMVSGVRTSSGFEERIRFSELEIVDANAIDTGVLSSMPEGNYLHGWDVNIAGVRITSIKRNIRYHKHAEYFVGRRYGDFSKLYKNLRLELPGKVLPVLPKKNKTSTTATGLFGGGDDSEVSSISSVSTQMVNKDAQPNGESGSTGGVSRFLSVREHRRTGSSSSRRSSPRRSVDDHRSDSPRKEENVTLFRESQRISLRAFLRTLLQNPQIAHTKAISDFLTNNPTTLKDEDLEDIVRRKQMDEKRVEEQKKFYEIARKRAADLDVYMEKFRQDIVEHNGLTNLFKEIKEKETIQDLSIQYQKFAEWLRIEVAATIYHLFLAEDNSPELFAQAKKIHSLIPYTIMKNVIRIANPAAVMSNVLDIFLAQPFGTRSLMQRIFSLTLNDGIRSVQKSIDALAAKIGDPVFVDKLKQFSDGDEALKLAIREEAVQDDVDIIVAILRSEQIYPALNADQVTRLYNAYVAFNSAVENVDEELKQGAQLFSYLKQLMKLYLRQRDKSMMLNLIEEPVTLQLFRDLFTIFYEPLVRVYKSANVYNSVTDFAVFVDDLIQVVEKCRDQDASADPNQTVQAFIDLCQRHEQHFYKFVHEVHTHDNGLFTQLMGWIEGILEFLRHGPKNGTLDINALFEGAVQSGAIDHDKAIDEINKLIAWQEARKKWHQDKTRQKMAAEGGAMGIDAVPGGFSASDFGLDQMDLEDMQYEDDLSDSEAEQEVQEEMDPIDAERRRRTKKQDRLRRNAGEPTKPEVSEVHKLKDDFLAKLRQDDNVQGFVRFGCPWKTSSWCWRARDESLLEQQQQQRREKEGDAPGLEVVVLLDLSGLCREQRSRASSEANTPLALAARSPAYVRMDVVAVPVRSASKGTGGALESNRPKCHWVGFRSRGTKAGRNQVVRRRRRRRRRMRRENEALGDLQSQYCAHGDRKRSSLHTPREKNIVTDQSLVFTPARACRQQSPEQSLFLDKAGRLTGVITARVIAPGPLRAKEASPHLSSKYHVIDHEYDAIVVGAGGAGLRAAFGLAEAGFNTACISKLFPTRSHTVAAQGGINAALGNMHEDDWRWHMYDTVKGSDWLGDQDAIHYMTREAPASIVELENYGCPFSRTEDGKIYQRAFGGQSKEFGKGGQAYRCCAAADRTGHALLHTLYGQSLRHNTNYFIEYFAVDLIMQDGECRGVLAYNQEDGTLHRFLANNTVLATGGYGRAYFSCTSAHTCTGDGSAMVARAGLPNQDLEFVQFHPTGIYGAGCLITEGARGEGGYLLNSEGERFMERYAPTAKDLASRDVVSRSMTMEIREGRGVGPEKDHIYLQLSHLPAEILAERLPGISETAGIFAGVDVRKQPIPVLPTVHYNMGGIPTRYTGEVLTVDEQGNDKVVPGLFACGEAASVSVHGANRLGANSLLDLVVFGRAVSHTIRDKFTPGSKLKPIEADAGSESIEVLDKIRTSDGPKSTAEIRLAMQKTMQRDVSVFRTQESLDEGVEKITQVDQMFDQVGIKDRSMIWNSDLVETLELRNLLTCATQTAVSAANRKESRGAHAREDYPERDDKNWMKHTLSWQKQPHGKIELGYRRVIDTTLDEKECPPVPPFKRVY

SEQ ID NO: 41999 - protein, 365 aa, Kalanchoe petitiana
SDSGKDAGRLSAAWQLYKAQEELIEVAKQHGVKLTMFHGRGGTVGRGGGPTHLAILSQPADTIRGSLRVTIQGEVIERSFGEAQLCFKTLQRYTAATLEHGMIPPLTPKQEWRALMDEMAVVATERYRSIVFKEPRFVEYFRLATPELEYGRMNIGSRPSKRKPSGGIESLRAIPWIFAWTQTRFHLPVWLGFGEAFKHLINKDNKNLLMLQQMYNEWPFFRVTIDLVEMVFAKGNPGIAALYDKLLVSEELLPLGEQLRTAYNDTKSYLLKITGHNEILEGDPFLKQRLKLRNAYITTLNVCQAYTLKRIRDPSHQVPLRPPIAKEVMGGSISSANQLVKLNPTSEYAPGLEDTLILTMKGIAA

SEQ ID NO: 42000 - protein, 468 aa, Bartonella henselae
MSYDVVVIGAGPGGYVAAIKAAQLGLKTAIIEKRMTLGGTCLNVGCIPSKALLHASEVFAETQHGFETLGISIAKSKLNLEQMMAHKKAVVTANTSGVSFLMKKNKIDTFFGTAKILNAGQIEVVARDGNKQTIETKNIIIATGSESSGIPGVNVEIDEKVIVSSTGALALEKVPTRMIVVGAGVIGSELGSVWSRLGAKVTIIEYLNKVLGSMDGEVSRQFQKIMEKQGIEFKIGAKVTAITQSGSVAQVTFEAVKGGPSETLEADVVLIATGRFPYTEGLGLEEAGVQLDERGFITIDAHWQTNIPGVYAIGDVVKGPMLAHKAEEEGVAVAEILAGQKGHVNFDVIPSVVYTQPEIASVGKTEEELKAAGIDYNVGKFPFMANGRARAMQKSDGFVKILADKKTDRVLGGHILGFGAGEMIHEIAVLMEFGGSSEDLGRCCHAHPTLSEAVREAALATFAKPLHI

SEQ ID NO: 42001 - protein, 329 aa, Rhodococcus erythropolis
MQMRAATYHKSGEASDVLSIIQCEKPEPGPGQVLVRVSFSAVNPSDVKTRSGKTPRPIDDFQIPHMDGCGRIVAVGPGVHEGRIGQRVWLWLAALGSRWGTAAEYTLVPANQAVALPDSASDELGACLGIPAMTAHECLLHAGPVTHKKVLIAGGAGAVGHFAIELARWAGATVIATVSTPDKAKLARQAGADFVVNYRDDDVADQITAFTNGVDIFVEVAIVDNWNIDLAVAAPGASIATYATDGRELSIPIRECMAAGLGLRFFLLYTHSRSALSLAAQSITDALAEQALTPLPHLTFPLDEIALAHEAVENGESRKVLLDLRDSDT

SEQ ID NO: 42002 - protein, 365 aa, Kalanchoe grandiflora
  misc_feature (115)..(115): Xaa can be any naturally occurring amino acid
  misc_feature (117)..(117): Xaa can be any naturally occurring amino acid
  misc_feature (146)..(146): Xaa can be any naturally occurring amino acid
  misc_feature (148)..(148): Xaa can be any naturally occurring amino acid
  unsure (1)..(365): unsure at all Xaa locations
SDSGKDAGRLSAAWQLYKAQEELIEVAKQHGVKLTMFHGRGGTVGRGGGPTHLAILSQPADTIQGSLRVTIQGEVIERSFGEAQLCFKTLQRYTAATLEHGMIPPLTPKQEWRAXMXEMAVVATERYRSIVFREPRYVEYFRLATXEXEYGRMNIGSRPSKRKPSGGIESLRAIPWIFAWTQTRFHLPVWLGFGEAFRHIIDKDNKNLLMLQQMYNEWPFFRVTIDLVEMVFAKGNPGIAALYDKLLVSEELLPLGEQLRTGYNDTKSYLLKITGHNEILEGDPFLKQRLKLRNAYITALNVCQAYTLKRIRDPSYRVPVRPPIAKEIMEGSDSSANQLVKLNPTSEYAPGLEDTLILTMKGIAA

SEQ ID NO: 42003 - protein, 449 aa, Pseudomonas putida KT2440
MSTMIESVDNFLARLKQRDPGQPEFHQAVEEVLRTLWPFLEANPHYLQSGILERMVEPERAVLFRVSWVDDQGKVQVNRGYRIQMSSAIGPYKGGLRFHPSVNLSVLKFLAFEQVFKNSLTSLPMGGGKGGSDFDPKGKSDAEVMRFCQAFMSELYRHIGADCDVPAGDIGVGAREIGFMFGQYKRLANQFTSVLTGKGMTYGGSLIRPEATGYGCVYFAEEMLKRQDKRIDGRRVAVSGSGNVAQYAARKVMDLGGKVISLSDSEGTLYAEAGLTDAQWDALMELKNVKRGRISELAGQFGLEFRKGQTPWSLPCDIALPCATQNELGAEDARTLLRNGCICVAEGANMPTTLEAVDIFLDAGILYAPGKASNAGGVAVSGLEMSQNAMRLLWTAGEVDSKLHNIMQSIHHACVHYGEEADGRINYVKGANIAGFVKVADAMLAQGVV

SEQ ID NO: 42004 - protein, 512 aa, Arabidopsis thaliana
MSFSVVAALPVLVAVVVLWTWRIVKWVWIKPKMLESSLKRQGLTGTPYTPLVGDIKRNVDMMMEARSKPINVTDDITPRLLPLALKMLNSHGKTFFIWIGPLPTIVITNPEQIKEVFNKVNDFEKASTFPLIRLLAGGLASYKGDKWASHRRIINPAFHLEKIKNMIPAFYHCCSEVVCQWEKLFTDKESPLEVDVWPWLVNMTADVISHTAFGSSYKEGQRIFQLQGELAELIAQAFKKSYIPGSRFYPTKSNRRMKAIDREVDVILRGIVSKREKAREAGEPANDDLLGILLESNSEESQGNGMSVEDVMKECKLFYFAGQETTSVLLVWTMVLLSHHQDWQARAREEVMQVLGENNKPDMESLNNLKVMTMIFNEVLRLYPPVAQLKRVVNKEMKLGELTLPAGIQIYLPTILVQRDTELWGDDAADFKPERFRDGLSKATKNQVSFFPFGWGPRICIGQNFAMLEAKMAMALILQKFSFELSPSYVHAPQTVMTTRPQFGAHLILHKL

SEQ ID NO: 42005 - protein, 331 aa, Haemophilus somnus 2336
MQKRKGILALGNLLVDRTLVISDYPKETMLATISEMGLHCGGGCTNVLFNLSKLDPELSLFLSGAIGKDSEGQFILRQAKKHNVVLTAMLESDLPTSFTDVMINSQNGERTFFHYIGAMQQYDHQTVTSIDCNAKIAHIAYLPLLPALLDVSKLVKTLTVLKEKGFLISIDLVSCENKQIFKNVIRPILSYVDFVIINDVEAKILTEQVNIASTEKELVTTAKAIMQLGVKKAVIVHSPKYAVACDLLGNIVTVPSYWVEKDKILSTLGAGDAFCSGILYGLHQNLPLQKTLQLGHGLAYFNLFSLSATEGAVSYVKLKDFIRTKETMQNT

SEQ ID NO: 42006 - protein, 150 aa, Triticum aestivum
TRPWYNSYNYHYMEGESMRVMYEPWFVKYKVDLVFAGHVHAYERTHRISNVAYNIVNGLCSPIQDQSAPVYITIGDGGNQEGLATNMSEPQPSYSAFREASFGHAILDIKNRTHAYYAWHRNQDGAAVAADALWFTNRYWMPTDDSFDDV

SEQ ID NO: 42007 - protein, 402 aa, Streptomyces anulatus
MEFRQSSKLSEVCYEIRGPVIEHANALEEAGHSVLRLNTGNPALFGFEAPEEIVQDMIRMLPQAHGYTDSRGVLSARRAVAQRYQALGLDEVSVDDVFLGNGVSELVTMAVQALLEDGDEILIPAPDFPLWTAVTTLSGGKAVHYVCDEAADWYPDLDDMASKITDQTKAVEIINPTGAVYPKEILEGILDLARRHGLMVFADEIYDQILYDDAVHHSVAALAPDLVVLTFCGLSKTYRVAGFRSGWLVITGPRQHARDYLEGLTMLASMRLCPNAPAQFAIQAALGGRQSIRELTAPGGALHEQRDRAWEKLNEIPGVSCVKPKGALYAFPRLDPKVHPIHDDEKFVLDLLLQEKIQVVQGTGFNWPRPDHFRILTLPHADDLDAAISRIGRFLSGYRQGR

SEQ ID NO: 42008 - protein, 542 aa, Crocosphaera watsonii WH 8501
MRTRCCPVLRNSWIPLSSPLLGYRSSSSAFRMTWLTTLMIISTTISYHTVVYLENETKPTGISDFVCSVFWRHLTMFNRKKIDIPRLQPSWRAIIGEFPPNQSSQSLWHCQGFSLVEGVPKLSKNKRFAVVGDVSLSNTDLLLKRLAINPSRWQEDHQTLIAWGWEELGKDCLHYLRGIFSFVVWDTHEKQGWAIRDRVGGRTLYYYQQDSTFYISPRLKNLSPYFKKNLDLIALRDYLCTGFIPGKRTLWQGVKELRPGTILSLPQEKIETYWTPQENISQSPLSFDKSSEILRELLETIIQEYLPPQEPVGVYLSGGLDSSCVTALAKQFHQETVHTYSIHFGEDYPNELEFSSLVAAHCQTKHHILAISPQEMWENLPITMANLDSPIGDPLTVPNYLLAQLAKQDVKVILNGEGSDPCFGGPKNQPMLLHSLYHNSEQKIDLLSSYLTSFKKCFLDLPNLLNPDIFKQVKDAPSVFEADLLSSADYLNRLMLLNIKFKGSDHILNKVNNLTLSGLLEGRSPLFDSRVVDKIFIHSSSL

SEQ ID NO: 42009 - protein, 439 aa, Thermosynechococcus elongatus BP-1 [sequence omitted]

SEQ ID NO: 42010 - protein, 214 aa, Zymomonas mobilis subsp. mobilis ZM4
MSEMTGQKSWAFLAQNDLGEGGAPLALIFDCDGTLLNSLPVYERAWVAIWGELGYSMEHSWYQPRSGFSEDNLITAFEEKVGQKFDHKAISDKMKTYYLANIQHVVEITPVADIARNAYGKFPMAVASCAPRSLLLEGLKITGLFDLFDTILSVDDIGVPKPAPDIFLKAAERLGVEAEHCLVFEDSVTGFEAAKRAHMPVIDVTPLIASNQKD

SEQ ID NO: 42011 - protein, 934 aa, Rubrivivax gelatinosus PM1
MATAKTPRSADRGADKNRPLIEDIRLLGRILGDVIREQEGALAFELIERIRQLAVAYRLKRDTQAGRALDRLLKNLSVEQAVSVVRAFSYFSHLANLAEDRHHVRRREHHEQLGHVQEGSLAMSFERLAKRGVRATEIAELLGHAYLSPVLTAHPTEVQRKSVLDAERAVAELIGARDTLPTQRERAANEAMLRARVTQLWQTRLLRTSKLSVANEIDNALSYYQSTFLRQIPRLYAELEALLPGFEVAPFFRMGNWIGGDRDGNPNVTAETLRLALARHSETVLRFYLTEVHELGAELSISALLVQVTPELQALADRSGDHNAHRLDEPYRRALIGVYARLAGTLTALTGTEALRHAVAPSTPYATAEELLADLRTVEASLASHHGAALAAARLKPLIRAVQVFGFHLATVDLRQSSDQHEAVLAELMAGARIEADYAAMPEEAKVALLLGLLNDARSLQVRGAVYSERTRGELAIFEAAREGRALYGHAAIRHCIISHTETVSDLLEVLVLQKEAGLLQGTLDTDARCDLIVVPLFETITDLRQAAPIMREFYALPGVLPLVLRSGADQYCEQDVMLGYSDSNKDGGFFTSNWELYRAETALVELFEPLKREHGLTLRLFHGRGGTVGRGGGPSYQAILAQPPGTVNGQIRLTEQGEVIASKYANPEIGRRNLETLVAATLEATLLPPKRHAPKLFLDTADTLSQLSMAAYRKLVYETPGFADYFFAATPIREIAELNIGSRPASRKATRAIEDLRAIPWGFSWGQCRVALPGWYGFGSAVEGFLGDAPKQRKERLALLQRMHAQWPFFGTLLSNIDMVLAKSDLAIATRYVELVPDKRAAKKIFAAVQAEWQRTDAVLAAITGEPRRLAGNAALARSIEHRLPYIDPLNHLQVELMRRYRAQQGRGELHERVQRGIHMSINGVAAGLRNSG

SEQ ID NO: 42012 - protein, 543 aa, Thermosynechococcus elongatus BP-1
MTKYVFVTGGVVSSIGKGIVAASLGRLLKSRQYSVSILKLDPYINVDPGTMSPFQHGEVFVTDDGAETDLDLGHYERFTDTPMSRLNSVTTGSIYQAVINKERRGDYMGGTVQVIPHITNEIKERILRVAKDKNPDVVIIEIGGTVGDIESLPFLEAIRQFRTEVGRHHVLFMHVTLVPWIPSAGEMKTKPTQHSVKELRSIGIQPDILICRCDRPLVPGIKEKLSQFCDVPVECVIPSPDAKSIYEVPLLLEREGLATQVLNLLNLEQRQPDLSQWQALVERLYGSHRPLEVAIVGKYVRLSDAYLSVVEALRHSAIALDQELRIRWVNSEELVENGVETALSNVGAIVVPGGFGIRGVEGKIAAIQYAREQGIPFLGLCLGMQCAVIEWARHIAGLENANSAEFDANTPHPVIHLLPEQQDIVDLGGTMRLGLYACRLAPHSLAEKLYGETVIYERHRHRYEFNNAYRNLFLETGYQITGTSPDGRLVEIIEYPAHPFFIAVQFHPEFRSRPNAPHPLFYGLLAAAAKNSNRDHPQLVPSF

SEQ ID NO: 42013 - protein, 261 aa, uncultured bacterium
MDRIEKAFRNNQPYIGYLTGGDGGIEASVNYALALIEGGVDLLEIGFPFSDPVADGPVIQKAHERALAGGTTSATLLEIARRVRKVSDVPLVLFSYFNPVLQKGAQFLNELKSAGFDAVLIVDLAVCTDTSDSEPFFNALADAGLIPILLATPSTNLERLEMISKMAKGFLYYVSQKGTTGIRSQLADDFSTQMMRMKQLFQIPVVAGFGIADRANAQAVLEHADGFVVGSAFVKLIEQKKAPKELTKFAQSIDPRKEAIA

SEQ ID NO: 42014 - protein, 362 aa, Magnetospirillum magnetotacticum MS-1
MPVNLMPVNAADSAALSDESIVGGDGGVDGGDVSNGRASFGRPPARPAGPRTDYDGHFRAALDRLHSERRYRVFADIERISGRFPQATWRRPEGGSREITVWCSNDYLGMGQHPEVVGALTQTAARCGVGAGGTRNIAGNNSPLVDLERELADLHGKEAGLVFTSGYVSNQSGISTIAKLIPNCLILSDAFNHNSMIEGVRHSGCEKRVFRHNDLEHLEQLLAEAGDRPKLIAFESVYSMDGDVAPIGAICDLADAYGAMTYLDEVHAVGLYGERGAGIAERDGVMHRVDVIEGTLAKGFGCVGGYITGSANLCDAVRSHAAGFIFTTALPPAIAAAARASVRYLKRSKTEREAHQLQAART

SEQ ID NO: 42015 - protein, 602 aa, Aspergillus oryzae
MATQHKTQSSPVNAAWWKEASVYQIYPASFKDSNGDGIGDIPGIISELDYLKALGIDLNWLSPILQSPQVDMGYDVSDYYRIHPPYGTVEDVDALIQGLHQRGMRYVMDLVVNHTSDQHEWFKQSRSSSDNEYRDWYIWKKPKYDANGVRQPPNNWGAYFGGSAWQYDETTDEYYLHLFAPEQPDLNWENPKVRSAVHQIMRYWLDKGVSGFRMDVINMISKDQSFPDAPITDPKAQWQHGAMHYCCGPRLHEYLQELGRVLKEYDAFSVGEMPNVYDPVEIGKAVGFDRGELAMAFQFEIMDIDHGPAGKFSPHKYRMSDLKHIVSKWQDFMYENEGWNALYLENHDQGRTISRFTSAGPEYRATAGKMLATFLGLQGGTPFVYQGQEIGLVNVPETWGIEQFRDIETLNYWNEITAAYPNDTELHKVTSQQFRVKSRDNGRTPMQWTSGKFAGFTAAHNGPWIDVHDDYEDWNAASQVGNPNSVFQHWAKVLALRKAHKRLFVYGSYKLIDEANNDLFTYLRVYGSQSALVLANFTGKEVSWVVPAETISILKNGAVLLESYQRHRPVRPDGTIAVMPFESFVMFLDSPNARVGAGGGKL

SEQ ID NO: 42016 - protein, 109 aa, Lactobacillus reuteri
MCGIVAFVDNEKPQIKDQLIKKMKDRIIHRGPDAEGQYVDDDVALGFRRLSFIDVKSGNQPIFNEDSSKAIEFNGEIYNFEELREELISKGHTFKTHADTEVIDHCQQV

SEQ ID NO: 42017 - protein, 235 aa, Streptococcus pyogenes MGAS10394
MVKSYSKTANHNMRRPVVKEELVHYMRTRQKQITGFLAELEQFARQENIPIIQPEVVAYFRFLLQSLQPKHILEIGTAIGFSALLMAENAPDATIVTIDRNREMIDFAKANFAKYDSRQQIRLLEGDAADILSTLEGNFDFVFMDSAKSKYIVFLPEILRLLKVGGVVILDDVFQGGDITKPIEDIRRGQRTIYRGLQSLFDATLTHPNLTTSLVPLSDGLLMIRKNQADIVLPD

SEQ ID NO: 42018 - protein, 343 aa, Crocosphaera watsonii WH 8501
MVSERTLPEFNTVSIQLTKAEGLMLYEDMTLGRLFEDKCAEMYYRGRMFGFVHLYNGQEAVSTGIIKALRPGEDYVSSTYRDHVHALSCGVPPREVMAELFGKETGCSKGRGGSMHLFSEKHRLLGGYAFVAEGIPVATGAAFQSKYRREMMGDDSADQVTACFFGDGASNNGQFFECLNMASLWKLPIIYVVENNKWAIGMAHDRATSEPEIYKKASVFDMVGVEVDGMDVLAVRKVAQEAVDRARAGEGPTLIEALTYRFRGHSLADPDELRSPDEKQFWGNKDPIQRLEAYLIEHNLANQSELDEIKQKVQASVDDAVKFAEESPEPDPKELYRYIFAED

SEQ ID NO: 42019 - protein, 344 aa, Xanthomonas axonopodis pv. citri str. 306
MTDRLRFPAEWEPQSAVLVAWPHAGTDWAERLADVEETYIALVTAISRFEPVVICVADDDLQIYAEARLRSARVDMTRVRFVIAAYNDTWLRDSGPITLRQEAGFRLMDFRFTGWGGKFEASLDDQLVSSLDAAQVFVPAQVETVDFALEGGAIETDGAGTLLTTWKCLHERHPQRTRESLSSDLATWLAQERVLWLDHGYLEGDDTDAHIDTLARFAGPDAIVYQGCDVASDSHYVELQAMGAELAALRKADGQPYRLFVLPWAQPILDEGRRLAASYANFLIVNGAVLMPAYGDAADATAQAVLAQAFPHHEIVPVPCRALIWQNGSLHCLTMQLPAGLLAA

SEQ ID NO: 42020 - protein, 169 aa, Zea mays
HASAHASDYHCQLSLKCKPLPSSSQSPSLHTPSGQTQGKADYKSLSEEEWKKRLTEEQYYVTRQKGTERAFTGEYWNTKTPGIYQCVCCDTPLFQSSTKFDSGTGWPSYYKPIGENVKSKLDMSIIFMPRTEVLCATCDAHLGHVFDDGPPPTGKRYCINSASLKLKPQ

SEQ ID NO: 42021 - protein, 199 aa, Triticum aestivum
MSSNLSFVLNKPGDVSFEERPKPSLASPHDVLVAVNYTGICGSDVHYWVHGSIGKFVVEDPMVLGHESAGTVVEVGDKVKTLKAGDRVALEPGYPCRRCQNCLAGKYNLCPDMVFAATPPYHGTLTGFWSAPADFCFKLPDNVSLQEGALIEPLAVAGHIVKQARVKPGDSVVVMGAGPVGLLCAAVAKAYGASKDVSV

SEQ ID NO: 42022 - protein, 281 aa, Nostoc punctiforme PCC 73102
MVVAAKFMDKTHPISELYVFGDSLSDTGMVFRATGGMYPPNPTYFQGRYSNGRVWIEYLAESLHLSPKQTHNFAYGGATTANVGNSYVPSLLNQVQSFTQTHQQTNPDALYVLWAGANDYLQGVSSASIPVKNVTTAINSLTDVGAKKILVGNLPDLGQLPATRNSTNSVSLSALTQAHNQGLRRSLKVLGQQHSDLEIVQLDANALYRHAIAKPAAFNFTNVISPCLSGDRTCSNPDQFLFWDGIHPTAAAHRIIAETAFSTIQEAGMTNPLLSLSLEYN

SEQ ID NO: 42023 - protein, 602 aa, Burkholderia vietnamiensis G4
MRGTGFPLVSGRSSGRACARPDGSALRVSSNENPIMSNQDTFTAESNESNASNEPAASVSRRGFLKLAGVSSLATAASGLGAARAAAATPDGTPEQVHLTWGNDPSSEVAISWASLAPAVNPRARIVADGEPARTVHGVQRIYTDGLNGETVFTYHARVHGLKPNTRYRYELTADNDSNAAQPFAATFATAPRGRAPFRFTSYGDLATPNGAWVLSSPQSRFAVQAVEQFQPLFHLLNGDLCYANLNPAHQPEVWRDFGNNNQSSAANRPWMPCPGNHEIEFNNGPQGLDSYLARYQLPENGTRFPGRWYSFRVSSVLFISLDADDVVYQDAAAFVAGPAPLVPAASTGHAPIEPGTSFYVRGYSNGEQTRWLEHTLRHAAHDDDIDWIVVQMHQDALSSSKTGNGSDKGIREAWLPLFDRYGVDLVLCGHDHDYERSYPVRGCNHRAGVDASTGEVVETLQPRPVGPADPDRTTFDTSAGTIHLILGGGGTSAPLDVYGENPATGYAQAKVFTKPNRPVPGTAPNTFVRKPADALEDAIWSARRDTGTGYGIAVFDHDPGKPGGHTTITMRYYHAPGADQHPSPQYELFETIELRKQRREH

SEQ ID NO: 42024 - protein, 236 aa, Cryptococcus neoformans var. neoformans B-3501A
MPFHAEPLKPSEEIDMDLGHSVAAQKFKEIREVLEGNRYWARKVTSEEPEFMAEQVMGQAPNFLWIGCADSRVPEVTIMARKPGDVFVQRNVANQFKPEDDSSQALLNYAIMNVGVTHVMVVGHTGCGGCIAAFDQPIPTVENPGATPLVRYLEPIIRLKHSLPEGSDVNDLIKENVKMAVKNVVDSPEAWEKARKGEFREVFVHGWLYDLSTGNIVDLNVTQGPHPFVDDRVPRT

SEQ ID NO: 42025 - protein, 1313 aa, Rhizopus stolonifer
MKRDHSTSRSSVTAQSDSGDTQLNTTENHDEKILLQQEIAAAERSDVKSEETDKKKKKEKQLSVPIYKIFRFATKLELLMICIAAIFSAGIGAMQPISIIIFGQFMTTISTAMASGDYQALVDATHPLVLIFVYMGTAVLVCAYIAQCFWVLTGENQVRRIRNLYIHSILRQDMSWFDKAEEGSLTTRLATDTQLIQDGISDKFGLLVMCIGQFLAGFIIAFVKGWRLAVVILATIPLLAGTGAAMGYFITKYTLKSQDAYAEAGSVAEQVFSGIRTVYSFSLQNRFAELYSNRLENAMKTGIRRGQVLGFGFGGFMFVLFCTYALSFWYGSKLTREMIMTGSDVLVVFFAMIIGAMALLQLPPNLSAVSSGCGAAYKIYSTIDRVPEIDPDSQEGLKPQSYNANLEFRDVMFKYPTRPDITILKKLNLTIRPGMTVAFVGPSGSGKSTSVQLIQRFYDPNAGSVFLDGHNLRDYNVAWLRSQIGVVSQEPVLFNMSIKQNLLMGISKQVSNDEIVDACKKANCHSFVSQLPDGYDTMVGEHGGMLSGGQKQRIAIARAILKNPPILLLDEATSALDTQSERLVQAALDAASADRTTIVIAHRLSTIRNADLIVVMHQGDLVEQGSHNELLALNGVYADLVKKQEIATKQVGTVTEEPDSEELLRREEREIAQEKQRAAEELDEKDTNDHLFRVTTGASSVDAYELKRRKEKEERKNAKKQSIPMGKVLNQMRSEWHLLAIGVCGAAIAGAVFPCFALIFARVIALLISPDMSPPGPMSGTNLYSFLFVVIGICAFIGFSSQVISFEVAGERYTKRLRSDIFRAFMRQEIGFFDHDDNSLGALTSRLAIDSKNVNELVTKTWGDITQIIVTAITGLSIAFSQTWALTLVILCMTPFIAFATGYESKIHRGFEDKTKKANEQSGEVAGEAIKEIRTVTALNKQNFFETKYHRATDHPHKLAQRKAYMSSIGYALQQGITLYTNAVAFYAGIRFMANGMIDFQQMFTCMMAIMLTAQGVGRASVFTSTLSKAKYSAIAAFDILEREPEIDPDLEGIEPAHSQINGDIAFENITFRYPARPDTSIFNGEFNLHGKSGQTIALVGPSGCGKSTTIGMLQRWYDPISGTVRLDDNNVKNYSLNNLRSHMALVGQEPILFDMTIGENISFGVDESIQVTQEQIEDACRASNIHKFIVGLPQGYDTRVGDKGSQLSGGQKQRIAIARALIRKPRVLLLDEATSALDSESEKLVQAAIDNILEEGGRTTITIAHRLSTIQNADLICVVKNGRVIEQGTHWELLKLSGVYSDLVYQQSLNAH

SEQ ID NO: 42026 - protein, 823 aa, Arabidopsis thaliana
MERRNEALMIRKSKWQYPQVGSPTPRILQLPRRHSVRRNASKGLKTTVSSSSQKDRRVKLEVLFHQERTFDRGASIVMVNDNGGEKKDEEEGRRRGKVADGREIGVSGLSSSSAVDEVEEAKWRFQAEMLRSECNLLRIEKEIALKKMERRKKRMERTLRSAVLTLLSGKERISEGTKESKVLEDEISYLVEKLNELKSPKVKDMEARNFKHNFDKQASVLRRELERFDEAVSEEVCVKGIQKMAEASFSVHSDQNALRNNNGNIDTLSSKMEALSKGVLLERMEKEYGSSLVAPSSSSVQDMYCKGIKAHEEKKDCSRHCKVVMRKIADEVRAEAEQWSQMQEMLNQVRKEMEELQSCRDFWQNRALEADSEIQNLHSSVEGWRRKALSSEAKLKNLQAEVCGLQEEIKRLRKEDKLEPEKNKLPSESEKRVLICRLKENRHSNNGDWSKYSEGRTTKPSSSRPPLREVKNSSVIARQRNSNIMKIKKKRENKSERRMSSEEEKTVCVTGASGYIASWIVKLLLLRGYTVKASVRDPNDPRKTEHLLALEGAEERLKLFKANLLEEGSFDSAIDGCEGVFHTASPFYHDVKDPQAELLDPAVKGTINVLSSCLKTSSVKRVVLTSSIAAVAFNGMPRTPETIVDETWFADPDYCRASKLWYVLSKTLAENAAWKFAKENNLQLVSINPAMVIGPLLQPTLNTSAAAVLSLIKGAQTFPNATFGWVNVKDVANAHIQAFENPDADGRYCLVERVAHYSEVVNILHDLYPDFQLPEKCADEKIYIPTYKVSKEKAESLGVEFVPLEVSIKETVESLRDKGFIRF

SEQ ID NO: 42027 - protein, 333 aa, Mycobacterium bovis AF2122/97
MQNATMRVLVTGGTGFVGGWTAKAIADAGHSVRFLVRNPARLKTSVAKLGVDVSDFAVADISDRDSVREALNGCDAVVHSAALVATDPRETSRMLSTNMAGAQNVLGQAVELGMDPIVHVSSFTALFRPNLATLSADLPVAGGTDGYGQSKAQIEIYARGLQDAGAPVNITYPGMVLGPPVGDQFGEAGEGVRSALWMHVIPGRGAAWLIVDVRDVAALHAALLESGRGPRRYTAGGHRIPVPELAKILGEVAGTTMLAVPVPDSALRVAGSVLDQAGPYLPFNTPFTAAGMQYYTQMPEPDDSPSEKELGITYRDPRDTVADTVTALRGLGS

SEQ ID NO: 42028 - protein, 554 aa, Xylella fastidiosa 9a5c
MTPLIFVTGGVVSSLGKGIAAASLASILEARGLKVTMVKLDPYINVDPGTMSPFQHGEVYVTDDGAETDLDLGHYERFVRTRLSRNNSVTTGRIYQNVICKERRGDYLGATVQVIPHITDEIRRCIDEATASFDVALVEIGGTVGDIESLPFLEAIRQVRIERGAERTMFMHLTLVPYIAAAGELKTKPTQHSVKELRSIGIQPDVLLCRSEQVIPDSERRKIALFTNVSERAVIGCPDIDVLYGMPLELRRQGLDEIVIDQFKLSGTASLADLSEWEDVVDAIKHPLDEVTIAVVGKYVDYQDAYKSVGEALKHGGLRQRTKVNLKWVEAQDLEGSDMGALKDIDGILVPGGFGDRGFEGKVLASRYAREQRVPYFGICYGMQAAVVDYARHVAGLEGANSTENDRQSPHPVIALITEWRTTTGEVERRDEKSDLGGTMRLGLQEQRLKAGTLVRELYGRDVVGERHRHRYEFNNRYRTQLEDAGLVIAAKSMDDTLVEMIELPREMHPWFLACQAHPEFLSTPRDGHPLFIGFVKAARARKAGGKLLREVCV

SEQ ID NO: 42029 - protein, 240 aa, Glycine max
  misc_feature (184)..(184): Xaa can be any naturally occurring amino acid
  misc_feature (189)..(189): Xaa can be any naturally occurring amino acid
  misc_feature (211)..(211): Xaa can be any naturally occurring amino acid
  unsure (1)..(240): unsure at all Xaa locations
MSWWWAGAVGAVKKSQEERTEPSFQSVALVVGSTGIVGTSLVDILPRHDTLGGPWKVYAVSRRPLPPWSPPPSPAVTHLHLDLADPVAVAEALTPLTDITHVFYAAWSSHPTEAQNREANSAMLRNVLSVVVPGCPALAHVCLQTGRKHYIGPYEAIGKIPVPDPPYTEDMPRLDYPNFYYDQXDVLLXEVSRRRRAVSWSVHRPSWAFGXSPRSAMNVLASLCVYARICPQEGAMLKLA

SEQ ID NO: 42030 - protein, 428 aa, Geobacillus kaustophilus HTA426
MQWTKSEQLYKEALQHIVGGVNSPSRSYKAVGGGAPVVMERAQGAYFWDVDGNKYIDYLAAYGPIIAGHAHPHIAEAIRRAAETGVLYGTPTPHEITFAKMLKEAIPSLEKVRFVNSGTEAVMTTIRVARAYTGRSKIVKFEGCYHGHSDLVLVAAGSGPSTLGTPDSAGVPPSIAQEVITVPYNDVESFREAMNVWGEQVAAVLVEPIVGNFGIVLPKPGFLEAINEIAHKEGALVIYDEVITAFRFMYGGAQNLLGVEPDLTAMGKIIGGGLPIGAYGGRQDIMEQVAPLGPAYQAGTMAGNPASVLAGIACLEVLKQEGVYEHLDRLGAMLEEGILAHARQCGLPVTVNRLKGALTVFFTDEKVENYKQAQRSDGELFAKFFKLMLKQGINLAPSKYEAWFITLAHTEDDIAYTIDAVGKAFRQL

SEQ ID NO: 42031 - protein, 313 aa, Yarrowia lipolytica CLIB122
MPIITETFKLNDGRSIPALGLGTASDANVEEVTYAAIKDGYKHIDTAYIYKSEEAIGKGIKRAIADGLIKREELFVTTKVWPTFHGRVKESLDYSLKDLGLDYVDLLLVHWPAALHPDPNDRHAYVPKNADGSAHYTDNNDWISIYEELEKEQAAGRTKSIGVSNVSEKYLKELLKRVKTVPAVNQFENHPYLPQKKEIEFNKKHGILVTAYSPLGSSNGKIKLHENPVVAEIAKKHNATTGSVLINWHISQGRSVIPKTRSVERVKANAQKVDLDSDDLAKLDKIWEQTGTQRAIGLDWLDKAGDNLGFEDK

SEQ ID NO: 42032 - protein, 209 aa, Shigella flexneri
LRRELKARHLTMIAIGGSIGTGLFVASGATISQAGPGGALLSYMLIGLMVYFLMTSLGELAAYMPVSGSFATYGQNYVEEGFGFALGWNYWYNWAVTIAVDLVAAQLVMSWWFPDTPGWIWSALFLGVIFLLNYISVRGFGEAEYWFSLIKVTTVIVFIIVGVLMIIGIFKGAQPAGWSNWTIGEAPFAGGFAAMIGVAMIVGFSFQGT

SEQ ID NO: 42033 - protein, 371 aa, Kalanchoe gracilipes
SDSGKDAGRLSAAWQLYKAQEELIEVAKQHGVKLTMFHGRGGTVGRGGGPTHLAILSQPADTIRGSLRVTIQGEVIERSFGEAQLCFKTLQRYTAATLEHGMIPPLTPKQEWRALMDEMAVVATERYRSIVFKEPRFVEYFRLATPELEYGRMNIGSRPSKRKPSGGIESLRAIPWIFAWTQTRFHLPVWLGFGEAFKHVINKDNKNLLMLQQMYNEWPFFRVTIDLVEMVFAKGNPGIAALYDKLLVSEELLPLGEQLRTAYNDTKSYLLKITGHNEILEGDPFLKQRLKLRNAYITTLNVCQAYTLKRIRDPSYQVPLRPPIAKEVMEGSISSANQLVKLNPTSEYAPGLEDTLILTMKGNAAGMQNTG

SEQ ID NO: 42034 - protein, 738 aa, GIBBERELLA ZEAE PH-1
MAGIVAVTWKFSSEREQWAHRPEPGQWYASRHWSKQLKQWDAEDHEDNLELKTIIWGSLMFCGETETLIPFLNPRASDKCWKRILEMNRSIRQSSESFESCLPSQSIHGLTSDLVPPASIKFQEPKPQLLASRAFRLAGLAVGLGLSALTAYQRNQAQQMSSHAERHGHLDATAGREVVYCHACANEWYRDEDGLTCPECRGEITEIIDPENDPRDLDHHSSASTSPELHPYDSDPDEADIDEHTNQGFVFRRNIREGSGHHHHHDPAYAPTIESFVNMLNQFGARTPDGRSFSHGPGEHGEHQGHGEHERQGHEGQAGEGEHAHPNFARVQRATFTGPFGSGRTTITMISTPMHTTHTVPPGAPGLQTFQEYAQSLSRRPDGPRGLRVTAISLTMGANQPSSIFSDLLRDTGPPPGHEHVGEDGMGGGPPPGFGRGLQDLLNLLTPGNAVHGDAVYSQEALDRIITRLMEANPQSNAAPPATDEALRNLERKPVNKQMLGSEGKAECTICIDEMKEGDMATFLPCSHWFHEECVTLWLKEHNTCPICRTPIEKNDRGASNNSGNNNSSGSNQSQGPASGPSSDRSNPFAAHMPNAYNTDWEPFDWTSQPHSHSRPAQYSRPPSQSQSRLNEVLRNISTQREERDREHGRDRATTSGYSYDTSRLQRRSSHSPTSPRARAPSEHGARMRQRSPSQSSRRSTADSDQQSRTSGHGPISWLRGQFSRGPGTGSPRDGSRQ

SEQ ID NO: 42035 - protein, 407 aa, Phaseolus vulgaris
MVVAGDAVMKAVPGLLEGNLDCASDMVVARGAREKTAPRVLKAYQVFVSHMVEGVDARLLDVQKGHKGAQCFAKQLEDGRTLADYNIQKESTLHLVLRLRGGMQIFVKTLTGKTITLEVESSDTIDNVKAKIQDKEGIPPDQQRLIFAGKQLEDGRTLADYNIQKESTLHLVLRLRGGMQIFVKTLTGKTITLEVESSDTIDNVKAKIQDKEGIPPDQQRLIFAGKQLEDGRTLADYNIQKESTLHLVLRLRGGMQIFVKTLTGKTITLEVESSDTIDNVKAKIQDKEGIPPDQQRLIFAGKQLEDGRTLADYNIQKESTLHLVLRLRGGMQIFVKTLTGKTITLEVESSDTIDNVKAKIQDKEGIPPDQQRLIFAGKQLEDGRTLADYNIQKESTLHLVLRLRGGF

SEQ ID NO: 42036 - protein, 397 aa, Candida albicans
MFLKNIFIGLAIALLVDATPTTTKRSAGFVALDFSVVKTPKASPVTNGQEGKTSKRQAVPVTLHNEQVTYAADITVGSNNQKLNVIVDTGSSDLWVPDVNVDCQVTYSDQTADFCKQKGTYDPSGSSASQDLNTPFKIGYGDGSSSQGTLYKDTVGFGGVSIKNQVLADVDSTSIDQGILGVGYKTNEAGGSYDNVPVTLKKQGVIAKNAYSLILILQMSPRDKSFSVGLIMLNIVGSLIALPVTSDRELRISLGSVEVSGKTINTDNVDVLLDSGTTITYLQQDLADQIIKAFNGKLTQDSNGNSFYEVDCNLSGDVVFNFSKNAKISVPASEFAASLQGDDGQPYDKCQLLFDVNDANILGDNFLRSLILFMIWMIMKFLWLKSNILLFQYFSLT

SEQ ID NO: 42037 - protein, 371 aa, Kalanchoe petitiana
SDSGKDAGRLSAAWQLYKAQEELIEVAKQHGVKLTMFHGRGGTVGRGGGPTHLAILSQPADTIQGSLRVTIQGEVIERSFGEAQLCFKTLQRYTAATLEHSMIPPLTPKQEWRALMDEMAVVATERYRSIVFREPRFVEYFRLATPELEYGRMNIGSRPSKRRPSGGIESLRAIPWIFAWTQTRFHLPVWLGFGEAFRHVIDKDNKNLLMLQQMYNEWPFFRVTIDLVEMVFAKGNPGIAALYDKLLVSEELLPLGEQLRTAYNDTKSYLLKITGHNEILEGDPFLKQRLKLRTAYITTLNVCQAYTLKRIRDPSYQVPVRPPIAKETMEGSISSANQLVKLNPTSEYAPGLEDTLILTMKGIAAGMQNTG

SEQ ID NO: 42038 - protein, 209 aa, Triticum aestivum
MDHRKQQQQRSPSPRSGGSSGKHGGKGGSKAGGGGSKKPIKVVYISNPMRVKTNAAGFRALVQELTGRHADPSKYNTDDGFDDGGTAQELSLSPEGSAAGSTPDAGAPGPAATGGQPELAGAAFGDGDGDREDEEDIFGSQLLDNDYAVFSPPPLLYDYPHSNPGVVTSHPRSLPHASCMLADGLTRGPPLLNCMSFEEILRIAWGGPL

SEQ ID NO: 42039 - protein, 474 aa, Glycine max
  misc_feature (280)..(280): Xaa can be any naturally occurring amino acid
  misc_feature (288)..(289): Xaa can be any naturally occurring amino acid
  unsure (1)..(474): unsure at all Xaa locations
MGLNWHRWVVSAFLLVAWALILDTGEICFCMGGKTSDFLRNDYLSLDMPIDSDTFRVPPGYNAPQQVHITQGDHVGKGVIISWISPHEPGSSTVIYWAENSEFKWQAHGFFLTYKYFNYTSGYIHHCTVHNLEFDTKYYYEVGIGNTTRQFWFKTPPPVGPDVPYTFGLIGDLGQTYNSNRTLTHYEQSPAKGQTILYVGDLSYADDYPLHDNIRWDTWGRFTERIAAYQPWIWTAGNHEIDFAPQLGETRPFKPYTARYHVPYKASDSTSPLWYSLKRXSAYIIVMXXYSALGKYTPQYKWLEKELPKVNRTETPRLIVLMHSPIYNSYVTHYMEGETVRVMYEKWFVEYKVDVVFAGHVHAYERSERVSNIAYNVVNGLCRPINDQSAPVYITIGDGGNLEGLATAMTEPQPSYSAYREASFGHGILDIKNRTHAHFSWNRNQDGYAVVADSVWLHNRYWNHPEQTSLAAFR

SEQ ID NO: 42040 - protein, 215 aa, Phaseolus vulgaris
LEVESSDTIDNVKAKIQDKEGIPPDQQRLIFAGKQLEDGRTLADYNIQKESTLHLVLRLRGGMQIFVKTLTGKTITLEVESSDTIDNVKAKIQDKEGIPPDQQRLIFAGKQLEDGRTLADYNIQKESTLHLVLRLRGGMQIFVKTLTGKTITLEVESSDTIDNVKAKIQDKEGIPPDQQRLIFAGKQLEDGRTLADYNIQKESTLHLVLRLRGGL

SEQ ID NO: 42041 - protein, 698 aa, Candida albicans
MTSLQQQQQQQRVKYGPPHHIKRRPYHPILESLEFQTNQHLIQEYSLDIVNTLSQLESLTLVNPAMIDLQPEIQWFMRPFLLDFLIELHSSFKLQPTTLFLCLNIIDRYCAKRIVFKRHYQLVGCTALWIASKYEDKKSRVPTLKELTIMCRNAYDEEMFVQMEMHILSTLDWSIGHPTLEDCLQLAIDSNNLSNNTTNDIENKSVRPNRKSSISSAVTAVARFLCELSLYDKYFLSVPPSLIAITANLLSCSMLQIPHASITLKNLIEQEIINPQQKKQKKAFSSNSSRTTTASYTHQNQSDVRHSSFDEDIDLDSGDEGDDDEDYIDEFYETNNYDDTNATTFDESINKSTTINDENQPPQIHTPFLSGLDEDSILSIKKICLMLIIQLSKVTEVLSKKYENLGVIQVINNFHSNYKFIIQSIYENQELLLNTINDSTNNNEIDYKLIQSSEILLQFPKFDEYLTEDEDENVSTDDEANSQPQGYDGSGSDGNNQLFTPKSPNAFSSNSSLTLNNHPQSMVPVTPPSATSQYSLFSNKNNRTHESTSGLNSTCNTPTHISISSFAPPQPPPGSILKPKLTSINSTNSLKIKKLTSNSNSSNINIHHGHHNTKQEKRYSHISIGSNSSSKYDGFSPIKSISTNGSLITNNGSFTNIVNNTNSSSPLMNQQQQYYHQQQHQQQVTQSSLYQHHHQYHQ

SEQ ID NO: 42042 - protein, 387 aa, Chlamydomonas reinhardtii
MKELNIKDKDDEAGSSKAQQNAATAEIFEGRLIEGDLKTGGHVLSASSGTGASRQTYNYSTDRVVGNGSFGVVFQATCLETGETVAIKKVLQDKRFKNRELQIMKLVDHPNIVKLKHCFYSHTDKDETYLHLVLEFVPDTVYRISKHYAKNNQRMPNLFVKLYAYQMCRALNSIHKMGICHRDIKPQNLLVNTETHQLKLCDFGSAKVLVKGEPNISYICSRYYRAPELIFGATDYTSAIDVWSVGCVLAELLLGQPLFPGESGVDQLVEIIKVLGTPTREEINAMNPNYTEFKFPQIKAHPWTKVFSKRMPPDAVDLVSKLLQYAPQKRMTAVQAMTHPFFDELRDPATRLPNGRALPPLFNWLPGELDEVPADIVRKLQPVAKAS

SEQ ID NO: 42043 - protein, 323 aa, Campylobacter lari RM2100
MAKNNLIGGSIWDEYSQKVQDRMNNPQHMGEFTQEDAQKANAKLIVADFGAESCGDAVRLYWLVDEKTDKIIDAKFKSFGCGTAIASSDTMVDLCIGKTVDEAVKITNLDVEFAMRDNPETPAVPPQKMHCSVMAYDVIKQAAAHYKGVDPEDFEDQIIVCECARVSLGTIKEVIKLNDLHTVEEITQFTKAGAFCKSCVKPGGHEKKDYYLVDILAETRAEMEREKLKDQSKTDIAFDDMTMVKQLKAVEAVLDSDVRPMLHGDGGDLEVIDIQKSENKNIDIYIRYLGACSGCSSGSGATLYAIENILQEELSPNIRVIPV

SEQ ID NO: 42044 - protein, 372 aa, Leucobryum juniperoideum
SDSGKDAGRLSAAWQMFKAQEDLVKVAKQYGVRLTMFHGRGGTVGRGGGPTHLAILSQPPDTINGRLRVTIQGEVIEQSFGEQHLCFRTLQRFTAATLEHGMHPPIAPKPEWRGLMDSMAEVSTKEYRSVVFQNPNFVEYFRTATPELEYGRMNIGSRPSKRKPSGGIESLRAIPWIFAWTQTRFHLPVWLGLGYALRQALESEPRNIGHLRRMYNQWPFFRVTIELVEMVFAKGDPRIAALYDDLLVSDELVSRYGEELSARSIYETRDLLSQVAGHEDILQGNPTLKQRLRLREPYITALNVQQALVLKKMRDQSSQFCVIDNGTPKAPKSPKRAAELVELNPTTEFPPGLEDTLILTMKGIAAGMQNTG

SEQ ID NO: 42045 - protein, 197 aa, Glycine max
MSASRFIKCVTVGDGAVGKTCLLISYTSNTFPTDYVPTVFDNFSANVVVNGSIVNLGLWDTAGQEDYNRLRPLSYRGADVFILAFSLISKASYENVSKKWIPELKHYAPGVPIILVGTKLDLRDDKQFCIDHPGAVPITTAQGEELRKLINAPAYIECSSKTQENVKAVFDAAIRVVLQPPKQKKKKGKAQKACSIL

SEQ ID NO: 42046 - protein, 366 aa, Leptobryum pyriforme
SDSGKDAGRLSAAWQMFKAQEDLVKVAKQYGVRLTMFHGRGGTVGRGRGPTHLAIFSQPPDTINGSLRVTIQGEVFEQSFGEEQLCFRTLQRFTAATLEHGMHPPIAPKPEWRDLMDSMAVAATEEYRSIVFKNPRFVEYFRTATPELEYGRMNIGSRPSKRKPSGGIESLRAIPWIFAWTQNRFHLPVWLGLGAAFKTALEAKPENMNTLARMYDQWPFFRVTIDLVEMVFAKGDPRIAQLYDTLLVKEELRPFGEELRRKYNETKLHLLKIARHTDILQGNPTLKQRLLLREPYITALNVQQAYTLKKMREQNSSQPPQPESPKPTKPASELVTLNPTTEFAPGLEDTVILTMKGIAAGMQNTG

SEQ ID NO: 42047 - protein, 465 aa, Candida albicans
MFPNSPDAFHQVRMMQSSIKASNFKLQSMEFRCHSNNVCEYQMEMLHHLLSVEAKTLPSLSLIEQQPEIKLGMRPLLLDFLMEVITILNLSRSTFPLTVNLIDRYCSTRIVKKQHYQLLGLTSLWISCKNLDSKFKVPTLNDLRKICVDSYYKELFVEMEKHILKSLEWVVNAPTFDAFIDLYSNLLISNSSNFEVANIIKKSSHKIKLFSNYIGELFQFYPNIYYDYTSSQIALIAILITVLTLKIPVDLISLLNFYNGLVKTEMFKSNVEQGAEDQFEEILSVDSFKSLFNKSFFKNLIKIIDNPPSSLKIKYFAENGKYSVLMKQLVTTASNTLKCILDPVPTTPKANSFVKHQQQQHHYHPRPPMSINTSMIPLTPVSNSTSPNRFSPDQIFSENESTPGIAFGTMTPDSQSTSPGEKRSYECIDELEIGTSTIAGYTLKNHDTLKRSKSANYGTLFYLQQ

SEQ ID NO: 42048 - protein, 368 aa, Marchantia calcarata
SDSGKDAGRLAAAWSMFKCQEDLVKVAKQYGIKLTIFHGRGGTVGRGGGPTHLAILSQPPDTIHGSLRVTVQGEVIEQSFGEEHLCFRTLQRFTAATLEHGMHPPISPKPEWRELMDEISRVSTEEYRSIVFKHPQFVHYFRAATPGTEYGRMNIGSRPAKRKPSGGIESLRAIPWIFAWTQTRFHLPVWLGFGGAFKAAFQKSNQNVVLLRQMYNEWPFFRVTIDLIEMVFAKGDPRIAALYDELLVSEELKPLGEKLRLMYAETRELLLKVAGHDDVLQGNPTLKQRLRLREPYITPLNVQQAFTLKKIRDQSFHVRDPETPKGENSGKQSSELVGLNTTTEYPPGLEDTLILTMKGIAAGMQNTG

SEQ ID NO: 42049 - protein, 368 aa, Bacillus halodurans C-125
MSIKQPFVPGLDRVIAAETAISFLDTEREKIIIRGHDLIDLSVSNDYLDIVHLLLDGTLPNASEKSALEDTLKKHYDIPSYVMEILSLLPETTHPMDGLRTGLSALSSVDKEIENRSTEANKARAYKLLGKLPAITVNSYRLINGLKTVQPVPTLSYSANFLYMITGKEPKPFEAKIFDRSLLLYSEHEMPNSTFTARVIASTHSDLYGALTGGVASLKGNLHGGANEAVMYMLQSVDSAAEFQQLIQKKLVNKEKVMGFGHRVYMKKMDPRALEMKESLKQLCEKKGDYSLLDRCEAGEKTMLEEKGLYPNLDYYAAPVYWMLGIPIELYTPIFFTARTAGLAAHVMEQHQNNRIFRPRVSYIGESY

SEQ ID NO: 42050 - protein, 273 aa, Vibrio sp. Ex25
MERVGIIQMTSGPDITANLDFIEKQCALASKQGAKLVLTPENTVLFANREAYHQHAEPLGSGVIQQRLSEIARKNQLTLIVGSMPIQTAKGVTTTTLVLPPHGKCMAHYDKLHMFDVDVADGYGSYRESDTFMAGNQIVVAETDIGSVGLSICYDLRFPELYKVLRQEGADIIVVPAAFTAVTGQAHWEVLLRARAIETQCWILASGQTGTHPCGRKTWGHSMVVDPWGRIHKQLQDEVGLLVTEIDLSQSQQVRQNMPLTQHSRFQNELRRK

SEQ ID NO: 42051 - protein, 320 aa, Lasiosphaeriella nitida
DNFVFGQSGAGNNWAKGHYTEGAELVDQVLDVVRREAEGCDCLQGFQITHSLGGGTGAGMGTLLISKIREEFPDRMMATFSVVPSPKVSDTVVEPYNATLSVHQLVENSDETFCIDNEALYDICMRTLKLSNPSYGDLNHLVSAVMSGVTTCLRFPGQLNSDLRKLAVNMVPFPRLHFFMVGFAPLTSRGAHSFRAVTVPELTQQMFDPKNMMAASDFRNGRYLTCSAIFRGKVSMKEVEDQMRNVQNRNSSYFVEWIPNNVQTALCSIPPRGLKMSSTFVGNSTAIQELFKRIGEQFTAMFRRKAFLHWYTGEGMDEME

SEQ ID NO: 42052 - protein, 284 aa, Shigella flexneri 2a str. 301
MIENEFGEVSVDDQLIGDRATQIKTLTNGCICCSRSNELEDALLDLLDNLDKGNIQFDRLVIECTGMADPGPIIQTFFSHEILCQLYLLDGVIALVDAVHADEQMNQFTIAQSQVGYADRILLTKTDVAGEAEKLRERLARINARAPVYTVTHGDIDLGLLFNTNGFMLEENVVSTKPRFHFIADKQNDISSIVVELDYPVDISEVSRVMENLLLESADKLLRYKGMLWIDGEPNRLLFQGVQRLYSADWDRPWGDEKPHSTMVFIGIQLPEEEIRAAFAGLRK

SEQ ID NO: 42053 - protein, 372 aa, Pseudomonas putida KT2440
MRSKVTGAKRWVVKIGSALLTADGKGLDRGAMAVWVEQMVALREAGVELVLVSSGAVAAGMSQLGWTKRPSAMNELQAAASLGQMRLVQAWESSFGEHGKHTAQILLTHDDLSDRKRYLNARSTLRTLVDLGVVPVINENDTVVTDEIRFGDNDTLAALVANLVEADLLVILTDRDGMFDADPRNNPEAQLIYEARADDPSLDAVAGGTGGALGRGGMQTKLRAARLAARSGAHTIIIGGRIERVLDRLKAGERLGTLLSPERGMLAARKQWLAGHLQTRGTLVLDAGAVQALRQANKSLLPVGVKTVQGSFRRGEMVVCVGPDGVEVARGLANYSALEAQKIIGQSSEAIESILGYSAEPELVHRDNLVLV

SEQ ID NO: 42054 - protein, 325 aa, Linocarpon appendiculatum
DNFVFGQSGAGNNWAKGHYTEGAELVDQVLDVVRREAEGCDCLQGFQITHSLGGGTGAGMGTLLISKIREEFPDRMMATFSVVPSPKVSDTVVEPYNATLSVHQLVENSDETFCIDNEALYDICMRTLKLSNPSYGDLNYLVSAVMSGVTTCLRFPGQLNSDLRKLAVNMVPFPRLHFFMVGFAPLTSRGAYSFRAVTVPELTQQMFDPKNMMAASDFRNGRYLTCSAIFRGKVSMKEVEDQMRNVQSKNSSYFVEWIPNNVQTALCSIPPRGLKMSSTFVGNSTAIQELFKRVGEQFTAMFRRKAFLHWYTGEGMDEMEFTEAE

SEQ ID NO: 42055 - protein, 323 aa, Pantoea agglomerans
MKPEVLLYKSLPDDLRARLDEHFTVTAINGLSPETIAEHGGAGARRRHDRLQQHGGSSAAGENAKLRAASTISVGYDNFDVEALNQRGIVLIDTPTVLTETVADTMMALVLSSARRVVEVAERVKAGEWRRSIGPDWFGIDVHHKKMGILGMGRIGLALAQRAHHGFGMPILYNARKHHEEAESRFNAQYCDLDTLLRESDFLCISLPLTEQTHHMIGREQLAKMKPSAILINAGRGPVVDEQALIAALKDKTIHAAGLDVFEQEPLPVDSELLTLPNVVALPHIGSATHETRYGMARDAVDNLIAALAGKVEKNCVNPQVLR

SEQ ID NO: 42056 - protein, 492 aa, Rubrivivax gelatinosus PM1
MDMKNSPLATLADPTLLKTAALIDGAWVDRGEHFAVTDPATGQVLAQVANLGAADAEAALAAAARAWPAWRAKTAKERASVLMKWYQLLLQHADDLARIMTAEQGKPLAEAKGEVGYGASFIEWFAEEAKRVYGETVPTTDNNKRYLVLKQAMGVCAAITPWNFPIAMITRKVAPALAAGCPVVIKPAEQTPLSALAVAELAQRAGMPAGVLNVLTADAERSIQIGNVLCASDTVRHLSFTGSTEVGRILMKQCAPTIKKLSLELGGNAPFIVFDDADLDSAVEGAMISKYRNAGQTCVCANRLYVQAGVYDAFVEKLAAKVKAIKVGNGFEAGVTQGPLIDEAALAKVESHVADALAKGAKLLTGGQRIGERFYSPTVLAQATGEMLCAREETFGPVAPVFRFETEAEVVALANDTEFGLASYFYSRDVGRIFRVGEALEYGMVGINTGLISTAEVPFGGVKQSGLGREGSHHGIDDYVEIKYLCLGDIQK

SEQ ID NO: 42057 - protein, 280 aa, Zea mays
MEFEDRCHKVQEPKFDCLLFDLDDTLYPLSSGIAGHVKKNIEHYMVEKLGIDESKIENLGNLLYKNYGTTMAGLRAIGYSFDYDEYHAFVHGRLPYDNIKPDPVLKHILKNLRIRKLIFTNGDKVHAVRALERLGLEDCFEGIICFETLNPPCPPQGDREPEIFDIAGHFARSGAAAELPKTPVLCKPNVDAMEEALRIANVNPHKAIFFDDSVRNIQAGKQIGLHTVLVGKSQRVKGADHALESIHNVREALPGLWEEAEKAEDVLYAERVAMETSVTA

SEQ ID NO: 42058 - protein, 530 aa, Toxicodendron vernicifluum
VDVHNYTFVLQEKNFTKWCSTKSMLVVNGSFPGPTITARKGDTIFVNVINQGKYGITIHWHGVKQPRNPWSDGPEYITQCPIKPGTNFIYEVILSTEEGTIWWHAHSDWTRATVHGALVILPANGTTYPFPPPYQEQTIVLASWFKGDVMEVIISSEETGVFPAAADGFTINGELGDLYNCSKETTYRLSVQPNKTYLLRIVNAVLNEEKFFGIAKHTLTVVAQDASYIKPINTSYIMITPGQTMDVLFTTDQTPSHYYMVASPFHDALDTFANFSTNAIIQYNGSYKAPKSPFVKPLPVYNDIKAADKFTGKLRSLANEKFPVNVPKVNVRRIFMAVSLNIVKCANKSCNNNIGHSTSASLNNISFALPQTDVLQAYYRGVFGRDFPTVQKKANFSLNTAQGTQVLMIEYGEAVEIVYQGTNLGAATSHPMHLHGFNFYLVGTGAGTFNNVTDPPKYNLVDPPELNTINLPRIGWAAIRFVADNPGVWFLHCHFERHTTEGMATVVIVKDGGTTNTSMLPSPAYMPPCS

SEQ ID NO: 42059 - protein, 325 aa, Neurospora pannonica
DNFVFGQSGAGNNWAKGHYTEGAELVDQVLDVVRREAEGCDCLQGFQITHSLGGGTGAGMGTLLISKIREEFPDRMMATFSVVPSPKVSDTVVEPYNATLSVHQLVENSDETFCIDNEALYDICMRTLKLSNPSYGDLNHLVSAVMSGVTVSLRFPGQLNSDLRKLAVNMVPFPRLHFFMVGFAPLTSRGAHHFRAVSVPELTQQMFDPKNMMAASDFRNGRYLTCSAIFRGKVSMKEVEDQMRNVQNKNSSYFVEWIPNNVQTALCSIPPRGLKMSSTFVGNSTAIQELFKRIGEQFTAMFRRKAFLHWYTGEGMDEMEFTEAE

SEQ ID NO: 42060 - protein, 313 aa, Nitschkia grevillei
NWAKGHYTEGAELVDQVLDVVRREAEGCDCLQGFQITHSLGGGTGAGMGTLLISKIREEFPDRMMATFSVMPSPKVSDTVVEPYNATLSVHQLVENSDETFCIDNEALYDICMRTLKLSNPSYGDLNYLVSAVMSGVTTCLRFPGQLNSDLRKLAVNMVPFPRLHFFMVGFAPLTSRGAHSFRAISVPELTQQMFDPKNMMAASDFRNGRYLTCSAIFRGRVAMKEVEDQMRNVQNKNSSYFVEWIPNNVQTALCSIPPRGLKMSSTFVGNSTAIQELFKRVGEQFTAMFRRKAFLHWYTGEGMDEMEFTEAE

SEQ ID NO: 42061 - protein, 331 aa, Thermoanaerobacter tengcongensis MB4
MAKMYYDQDADAEVLKGKKIAVIGFGSQGHAHALNLRDSGFDVVVGLYEGSKSKERAEKEGLTVLTVEEAAKVADVIMMLIPDEKQAKVYKESIEKNLTEGKALAFAHGFNIHFKQIVPPENVDVFMVAPKGPGHLVRRMYQEGKGVPCLVAVHQNYTGKALDIALAYAKGIGGTKAGAIETTFKEETETDLFGEQAVLCGGLTELMKAGFETLVEAGYQPEIAYFECVNEMKLIVDLIYEGGFSYMRYSISDTAEFGDYMTGKRIITEETRKEMKKILEEIQTGKFAKEWLLENQVGRPQYNAIKEREANHPIEKVGKSLREMMPWLSKK

SEQ ID NO: 42062 - protein, 567 aa, Oryza sativa
  misc_feature (254)..(254): Xaa can be any naturally occurring amino acid
  unsure (1)..(567): unsure at all Xaa locations
MDSARSWLQKLQPRDKDRGKPASPTAARKDGAAAMAEDGEEAISSTTATKVAAAKQFIENHYKDQMRSLEERKERRRMLESKLADPDVSEEEQNNILKDFENREREIMRSRRHKMGVDDFELLTIIGRGAFGEVRLCREKATSNVYAMKKLKKSEMLRRGQVEHVRAERNLLAEVDSAYIVKLYCSFQDEEFLYLVMEYLPGGDMMTLLMRKDTLTDDESRFYVAETILAIESIHKHNYIHRDIKPDNLLLDRXGHLKLSNFGLCKPLDSSSFPNLSEFDYAVGKNINPSMDGDKLLSSSAAPRRTQQEQLLHWQKNRRMLAYSTVGTPDYIAPEVLLKKGYGMECDLWSLGAIMYEMLVGYPPFYSEDPMSTCRKIVNWRSHLKFPEEAKLSPEAKDLISKLLCNADLRLGTKGAHEIKAHPWFKGLEWEKLYQMEAAFIPEVNDELDTQNFEKFEEIAPMQTSSKAGPWRKMLSSKDTNFLNFTYINLELSDDPEHPGIAQVKKKNNKPTRRTFKSILHEFADTEEEPQSSSLNSTPSQLDQLPESLEPSPHSSISSEDSQSRHR

SEQ ID NO: 42063 - protein, 357 aa, Pseudomonas syringae pv. phaseolicola 1448A
MTERVLVTGGGGFVACHLIQQLLASGNVVNTTVRNLTNRAKVLPLLTLQKQHPGKLYLFEADLLVDGAFDAPMHDCTVVHHVASPFLLPEKIKDGRREMLEPALLGTRNVLSSVDKTPSVLRVVMTSTVGAIFGDYIDVLHMKNKTLTEDYFNTSSTLETNPYHYAKVEAEKEAWRICEKQTRWSLVTINPGMILGPSLTPASDSGSLFLLDEMFRGYFFYGMPDLSLTTVDVRDVAAAHIIAANKVDAQGRYILAEQHMISFVEIAGIVRRLHRRPWLLPRYRIPDAIVRLIGPFFGLTQDYLSKHLGIRFVVDNQRSLNDLGIKYRSITETLTDHYRCWDMQRQLNSQANEKHRS

SEQ ID NO: 42064 - protein, 417 aa, Neurospora crassa
MEQTKALNALEPFIVLSKSATSPRAAADLVTRVTSAPNTFIFTELLQTPQIQSLEYSHEFSSYLTLLQIFSHGTYADYIANASALPALNDDQKLKLRQLSLLTLVANDGSNVPLDYDAMQRENNQAQPPNQSYASLTRRLELSSARELEELVISAIYAGLIEGQLDPANEMVQINSVAALRDVPARGVNGLLSSLQGWAGRCQATLQELEATMANLRDEADRRATEEQEWNNKMSQLLEDEQKGAVPSSSSSSLPFSWFNNTRGGGGGGDGAGAGGSFRGSGYSRGGGLSQGYRSSQRGSHQQHQNQSRQQQNHHHHHQSNQSGTNSLLTSGGGSYLSFREGPSAVSPSAAAGLMGSSTSFAALGGMETGSGSGSGPLGKRGSSDMDDSEEDIDDDTMDLDDEGDETKRGSKRKLTA

SEQ ID NO: 42065 - protein, 401 aa, Rickettsia conorii str. Malish 7
MSIISTRLSSIKPSPTLAVVKKTLELKKAGVDIITLGAGEPDFDTPDNIKEGAIKAIKDGFTKYTNVEGMPLLKQAIKDKFKRENNIDYELDEIIVSTGGKQVIYNLFMASLDQGDEVIIPAPYWVSYPDMVALSTGTPVFVNCGIENNFKLSAEALERSITDKTKWLIINSPSNPTGASYNFEELENIAKVLRKYSHVNVMSDDIYEHITFDDFKFYTLAQIAPDLKKRIFTVNGVSKAYSMTGWRIGYGAGSKTLIKAMTIIQSQSTSNPCSISQMAAIEALNGPQDYIKPNALNCQKKRDLALSILKRVKYFECYKPEGAFYLFVKCDKIFGHKTKSGTIIANSNDFAEYLLEEAKVAVVPGIAFGLEGYFRISYATSMEELEKACIRIEKTIDVIPA

SEQ ID NO: 42066 - protein, 391 aa, Candida albicans
MFLKNIFIALAIALLVDASPAKRSPGFVTLDFDVIKTPVNATGQEGKVKRQAIPVTLNNELVSYAADITIGSNKQKFNVIVDTGSSDLWVPDASVTCDKPRPGQSADFCKGKGIYTPKSSTTSQNLGSPFYIGYGDGSSSQGTLYKDTVGFGGASITKQVFADITKTSIPQGILGIGYKTNEAAGDYDNVPVTLKNQGVIAKNAYSLYLNSPNAATGQIIFGGVDKAKYSGSLIAVPVTSDRELRITLNSLKAVGKNINGNIDVLLDSGTTITYLQQDVAQDIIDAFQAELKSDGQGHTFYVTDCQTSGTVDFNFDNNAKISVPASEFTAPLSYANGQPYPKCQLLLGISDANILGDNFLRSAYLVYDLDDDKISLAQVKYTSASNIAALT

SEQ ID NO: 42067 - protein, 225 aa, Mycoplasma gallisepticum R
MKLNMIKGFIFDLDGVITDTAKLHYIAWKKIVAQLGINFLEEENEKLKGLSRLDTLKAILRLKKPKNDLSQAELIKICEQKNDLYKKLLTTEIYQNSILKGIDQLIIKAKANKIKLAVASSSHNAPLISEKLGLLDSFDYIVNPSEINQGKPAADIYLKAAEGLDISTDQAIGFEDAISGLKAIKAAKMKAVVIIHGSNEDFSKADLIYQSTSELNFDFIMRHFQ

SEQ ID NO: 42068 - protein, 198 aa, Escherichia coli
RHLTMIAIGGSIGTGLFVASGATISQAGPGGALLSYMLIGLMVYFLMTSLGELAAYMPVSGSFATYGQNYVEEGFGFALGWNYWYNWAVTIAVDLVAAQLVMSWWFPDTPGWIWSALFLGVIFLLNYISVRGFGEAEYWFSLIKVTTVIVFIIVGVLMIIGIFKGAQPAGWSNWTIGEAPFAGGFAAMIGVAMIVGFS

SEQ ID NO: 42069 - protein, 371 aa, Mnium hornum
SDSGKDAGRLSAAWQMFKSQEELVQVAKQYGVQLTVFHGRGGTVGRGGGPTHLAILSQPPDTVNGSLRVTIQGEVIEQSFGEDELCFRTLQRFTAATLEHGMHPPLAPEPEWRALMDDMAAVSTAEYRKIVFNNPQFVRYFRKATPVLEYGRMNIGSRPSKRKPKGGIESLRAIPWIFAWTQTRFHLPVWLGMGAAFKQVLKADDIIITILRKMYNQWPFFRVTVDLVEMVFAKGDPRISALYDRLLVDDELEHIGVELRSRYDETKELLHQVVEHDELLAGSPFLKHKLRLREYFISPLNVQQVYTLKKMRDSRSQICDPLQEAILEELRSGKESSELVTRNTTTEHPPGLEDTLILTMKGIAAGMQNTG

SEQ ID NO: 42070 - protein, 158 aa, Brassica napus
VWLGFGAAFRYAIKKDVRNLHMLQDMYKHWPFFRVTIDLIEMVFAKGDPGIAALYDKLLVSKDLWAFGEKLRTNFEETKSLVLQTAGHRDLLEEDPYLKQRLRLRDSYITTLNVCQAYTLKRIRDPNYNVTLRPHISKEIMQSSKSAQELVKLNPTSE

SEQ ID NO: 42071 - protein, 588 aa, Candida albicans
MQRVLELLLLSSTALAVIGDGFIALPVHKLQAGEGSAHFPNRLPIFDVVNGVAKSVEDDVNQIIQPIFGNGIFSGGSIQGTHSGNGHSVKYEVSLPSSSAQKGSNGPSSTDNKDTDPSKTGFSLDDLMNSISTDFWNLIGLNKPPTSSDNGSKDADFTPSAVSQVEQPTSKSVESTAPGSASSASSSSSSEAASSSQPSEDSQPSSSANKKTGAFFLSLDNTQTLYTATLKVGSPAQEVQVMIDTGSSDLWFISSGNSQCKVNGGSIDCDKYGVFDKSKSSSWHDNKTDYSISYYDGDKASGTMGQDNITFADGFSIENANFAVIDNTTSSIGVFGVGYPELEAVKSKYTNLPFAMKEQNLIAKVAYSLYLDSRDAVQGYILFGGIDHAFYTGDLKAFDIVQCNDKYVYSQIPLTSVASSLNNYTNAYGLPAGSNHPKVGAVIYNGTDSFNGGVDLKDTLTLLDTGTTYSYLSKDQVESIVGLYGNVTYNDAGKAYEVPCWVGNPGNYLEFNFKNEQYIKVPTSEFVISVGTYASGAELCVFGILPGTHSILGDNFMRSVYAVFDLEDHVISIAQAAYNDNHAVVPIE

SEQ ID NO: 42072 - protein, 267 aa, Escherichia coli CFT073
MAIPAFGLGTFRLKDDVVISSVKTALELDYRAIDTAQIYDNEAAVGQAIAESGVPRHELYITTKIWIENLSKDKLIPSLKESLQKLRTDYVDLTLIHWPSPSDEVSAEEFMQALLEAKKQGLTREIGISNFTIPLMEKAIAAVGAENIATNQIELSPYLQNRKVVAWAKQHGIHITSYMTLAYGNALKDKVIARIAAKHNATPAQVILAWAMGEGYSVIPSSTKRENLESNLKAQNLQLDAEDKKAIAALDCNDRLVSPEGLAPEWD

SEQ ID NO: 42073 - protein, 686 aa, Geobacillus stearothermophilus
SSSASVKGDVIYQIIIDRFYDGDTTNNNPAKSYGLYDPTKSKWKMYWGGDLEGVRQKLPYLKQLGVTTIWLSPVLDNLDTLAGTDNTGYHGYWTRDFKQIEEHFGNWTTFDTLVNDAHQNGIKVIVDFVPNHSTPFKANDSTFAEGGALYNNGTYMGNYFDDATKGYFHHNGDISNWDDRYEAQWKNFTDPAGFSLADLSQENGTIAQYLTDAAVQLVAHGADGLRIDAVKHFNSGFSKSLADKLYQKKDIFLVGEWYGDDPGTANHLEKVRYANNSGVNVLDFDLNTVIRNVFGTFTQTMYDLNNMVNQTGNEYKYKENLITFIDNHDMSRFLSVNSNKANLHQALAFILTSRGTPSIYYGTEQYMAGGNDPYNRGMMPAFDTTTTAFKEVSTLAGLRRNNAAIQYGTTTQRWINNDVYIYERKFFNDVVLVAINRNTQSSYSISGLQTALPNGSYADYLSGLLGGNGISVSNGSVASFTLAPGAVSVWQYSTSASAPQIGSVAPNMGIPGNVVTIDGKGFGTTQGTVTFGGVTATVKSWTSNRIEVYVPNMAAGLTDVKVTAGGVSSNLYSYNILSGTQTSVVFTVKSAPPTNLGDKIYLTGNIPELGNWSTDTSGAVNNAQGPLLAPNYPDWFYVFSVPAGKTIQFKFFIKRADGTIQWENGSNHVATTPTGATGNITVTWQN

SEQ ID NO: 42074 - protein, 485 aa, Candida glabrata CBS138
MSQTIVIKLGTSSLVDEKTREPKLSIMTQVVETVIQLKRQGHKVVIVSSGGIAVGLNAMEMDKKPTDLAEIQAIAAIGQGRLIGRWSMLFQQYGEKIAQILITRNDILGWTQYKNAQNTILQLLEMGVVPIVNENDTLSISEIKFGDNDTLSAITAALVSADHLFLLTDVDCLYTENPRTNPDAKPIVIVPNMDQGVPGVDTSNADAGSSVGTGGMRTKLIAADLATNAGVNTIIMKSDAPSNVKHIVDYLVKYPKKVLYDDNKSSREQSSEPLSLDQLKNHPYGKGGVISPPKSEEDLLSLQDAELKEIKERNVPLHTVFLAKDIDHHLKNREFWILHGLVTKGVLIIDEDAYNTLTNESGDEEHVSEAYVSEVEDDEMSEVDQDHGLLPKDVIEVKGSFHELECVDIKVGKRLPNGKLDPDAPLEYVGRARCNFTSVELNRIKGLPVDRVQDVLGYDVSEYVAHKDNLAFPPSASSVSLQLKT

SEQ ID NO: 42075 - protein, 261 aa, Neisseria meningitidis Z2491
MSRIRQAFAALDGGKALIPYITVGDPDIRTTLALMHGMVANGADILELGVPFSDPMADGPVIQRAAERALANGISLRDVLDVVRKFRETDTQTPVVLMGYLNPVHKMGYREFAQEAAKAGVDGVLTVDSPVETIDPLYRELKDNGVDCIFLIAPTTTEDRIKTIAELAGGFVYYVSLKGVTGAASLDTDEVSRKIEYLHQYIDIPIGVGFGISNAESARKIGRVAEAVIVGSRIVKEIENNAGNEAAVVGALVKELKDAVR

SEQ ID NO: 42076 - protein, 479 aa, Oryza sativa (japonica cultivar-group); identical to SEQ ID NO: 1100

SEQ ID NO: 42077 - protein, 356 aa, Schizosaccharomyces pombe
ISDAIHMAFDCIAILVGLVATTLAKMPLNYAYPFGFAKIEALSGFTNGIFLVLISFSIVGEALYRLFHPPQMNTDQLLLVSFLGLVVNLVGILAFNHGHNHDHGSHHHHSHSNHSMCLPNTTNDINIFEEFEEEKDNVEAQKMGYTNDDHVSQHEHTHENSQEHHHEHNHNHDHIHKYNEKCDHESISLQNLDNDHHCHHHHENHNMHGIFLHIIADTMGSVGVIVSTILIQWFSWTGFDPSASLIIAALIFVSVLPLIKDSAKNLLSVTDPESEYLLKQCLSNISLSHSVVSLSNPKFWTNERGEVYGILHIQVSIDGDLNVVRNEVFRKLSIAVPNLKHICIQSERPNNCWCGK

SEQ ID NO: 42078 - protein, 479 aa, Cryptococcus neoformans var. neoformans JEC21
MASRNPVVTRRAATRSRNDENAAPQQSVRTKPSISHLGPASKTAAVNVSVAAGKKPVAVKVGAKRTALGGVVVNGKGETEAGKKPLKASGKTVTEARQPLASRQNNAQPTRPIAAIPHRSKATPANVYAPVEAPAKLTVEEDMQMEIDARRSQPVSNAADFATVDEELLDDESEEDDMEEEDEEDWLRMSEEEMVKAQEQLDVVQATFKDDVDMFDTTMVAEYADEIFEHMERLEESVMPNPRYMDFQTEIEWTMRTTLIDWLLQVHLRYHMLPETLWIAVNIVDRFLSTRVVSLVKLQLVGVTAMFIAAKYEEILAPSVEEFVYMTENGYTKDEILKGERIILQTLDFTISSYCSPYSWVRRISKADDYDVQTRTLSKFLMEVTLLDHRFLRCKPSMIAAIGMYLARKMLGGDWNDAFIYYSNFTESQLITGASLLCERLIEPDFESVYVYKKYANKKFLRASTFARDWALTNAANSS

SEQ ID NO: 42079 - protein, 206 aa, Ustilago maydis 521
MVGTLVLTRHGQSEWNKLNLFTGWKDPALTELGREEALTGAKRVAATGIKFDVAFTSALQRAQTTLGIQLKEIGQEDIPIHKDQALNERDYGELSGLNKDDARKKWGEDQVHIWRRSYDIPPPGGESLKLTAERVWPYYHKEILPLVKQGKNVIVAAHGNSLRAMIKDIENISDDDIVGLELATGVPILYKLDSDGKVVSKEILQG

SEQ ID NO: 42080 - protein, 470 aa, Erwinia carotovora subsp. atroseptica SCRI1043
MEQHASGSEGQFKRTMKARHLVMLSLGGVIGTGLFFNTGYIISTTGAAGTLLAYLIGALVVYLVMLSLGELSVAMPETGAFHVYASRYLSPATGYTVAWLYWLTWTVALGSSLTAAGFCMQYWFPQVPVWTWCLLFCALIYLLNVVSSRFFAEGEFWFSIVKVVTILAFIVLGAGAMFGFIPMQDGSPAPFFQNITASGWLPHGGLPILMTMVAVNFAFSGTELIGIAAGETENPQKVVPMAIRTTVARLVIFFLGTVLVLAAIIPMEEAGIAKSPFVLVFEKIGIPYAADIFNFVILTAILSAANSGLYASGRMLWSLSNEGTLPRRFSRLTRRGIPLFAISVSMLGGLLALFSSVVAPDTVYVALSAISGFAVVAVWLSICASHYMFRRHHIRSGKSLSELQYRAPWFPITPILGFLLCLLACVGLVFDPSQRIALWCGIPFVALCYGAYYFTQSVKKRGLTGVEDIA

SEQ ID NO: 42081 - protein, 551 aa, Triticum aestivum
TQTQAQRERKREEAVAPSLCVRVCRPPSASVSLEMMMSEGQGQQEIISQQHQQQQQQQPLEMDITFGMSSHQHHHAPPSSSSSSSMHAAAASFMSSKEASGVYDHLGELDQALFMYLDHGHASTQQEQRQTLNIFPSQPMHVEPSPKGELGLVLSPAPVGSKMPSPDHHHHHHQQQAAAAAMEELAAGSRRQQQEHHLHLQHQQQQPAFATAESAGVSNNKDVKPLTKKEHKRGLSTGERDPKTLRRLAQNREAARKSRLRKKAYIQQLESSRIRLAQIEQELHSARAQGVLYPGSSLLAEQGIAGKGLGGIDGLSSEAAMFDVEYARWQEEHNRLMYELRAALQQHLPEGELQMYVESCLAHHDEVLAIKDAVIKGDVFHLISGVWRSPAERCFLWLGGFRPSEVIKMVLSHVDPLTEQQIVAVYGLQQSAVQTEEALSQGLDTLYQALSDTVVSDALTCCSTPNVSNYMGQMGLAVHKLTTLEGFVRQAEKLRQQMLHRLHQVLTARQMARSLLAVSDYFHRLRVLSSFWVNRNRMAPQDQQLEAGPHT

SEQ ID NO: 42082 - protein, 571 aa, Candida glabrata CBS138
MLRNYPKNLIGPRTIARTTHTSCYNGGSIKTYVEDQVKAVTEWFGSDRFQNIKRTYTPLDVVKHRGSINPCEVIYPSAFPSRKLFSLVEEHFKDKKPLHTLGVLDPVQMTQLSRCEDLKVAYVSGWACSSTMVGSTNDVSPDFGDYPYNTVPNQVERIMKAQQMHDRKAYLEKFMTDQKSSSNAEFIDYLKPIIADGDMGHGGPTTVMKVAKLFAEKGAAAVHLEDQLVGGKRCGHLSGAVLVPTGAHLSRLISTRFQWDIMGTENLILARTDSCNAKLISSDIDPRDHSFIQGILNPSKTDRWADKLLELERKEVDKSIIAEAEKEWYDQNKLYTYEEMIQIRFTESEYKDYLTRKDKYLQTQGKNFLSVREMKNIATEVNSTKRLEFCWMAPRTKEGYYMFKGGMEPAIRRSLVFAPYSDMIWLETKTPDLEQAKSFSKEIHNTYPHVKFVYNLSPSFNWTAHGFNGDKLKSFIWDLAKEGFVLQLVSLAGLHTNAASFWDLAKNFQKDGMKAYVDKVQKIEKQLDCDVLTHQKWSGAEYMDSLLNVVQNGSSSQTMSTSGESFTENQF

SEQ ID NO: 42083 - protein, 604 aa, Xanthomonas oryzae pv. oryzae KACC10331
MWRLCMRACATVRKGIWAVAKKSARVHAYFIWSGCKFIVEYAGCPRSSLVACRLAESADGGFRFAVFRLHQHYDRCSMVAMMPLHATTARLERSTMLPALKKGGRPRDALGRFIRHHERLPVSLADTRGVLFVVSEMADFIKAGGLGDVAAALPRALRHRYDVRVLIPGYRAVLERAGKVEIVGRVLAHAALPACDIGRIVQSDGLPIYILLSRELFERDGSPYVSTSGSEFEDNAIRFATLSHAAADIAAGHAGLGWKPRLLHLNDWPCALAAGYVRWSGGTTPCLLTIHNLAYQGLVPYSMAGALGIPAERVAELEFYGQMSFLRGGIVNADHVNTVSVSYAKQITGPAQGCGLDRLLAGRAAKGALTGIVNGIDASWDPRTDEYLDSHFSVNQWQGRQDNAAQVRKAFGLRESTGPLFAVVSRLVHQKGLDLICEVAPQIVAAGGQIAVIGGGEPDIERQVAELTRRYPGQVGAFIGFEEGLARRMFAGADFLLMPSRFEPCGLSQMYAQRFGCLPIAHATGGLIDTVDDGVTGFLFQHASVEALRRCLERAFRTFRLPGLLAAMRRAAMLRPSGWDVAGNKYLSLYERTAAIAPALATVS

SEQ ID NO: 42084 - protein, 544 aa, Neisseria meningitidis MC58
MAAKDVQFGNEVRQKMVNGVNILANAVRVTLGPKGRNVVVDRAFGGPHITKDGVTVAKEIELKDKFENMGAQMVKEVASKTNDVAGDGTTTATVLAQSIVAEGMKYVTAGMNPTDLKRGIDKAVAALVDELKNIAKPCDTSKEIAQVGSISANSDEQVGAIIAEAMEKVGKEGVITVEDGKSLENELDVVEGMQFDRGYLSPYFINDAEKQIAALDNPFVLLFDKKISNIRDLLPVLEQVAKASRPLLIIAEDVEGEALATLVVNNIRGILKTVAVKAPGFGDRRKAMLQDIAILTGGVVISEEVGLSLEKATLDDLGQAKRIEIGKENTTIIDGFGDAAQIEARVAEIRQQIETATSDYDKEKLQERVAKLAGGVAVIKVGAATEVEMKEKKDRVEDALHATRAAVEEGVVAGGGVALLRARAALENLHTGNADQDAGVQIVLRAVESPLRQIVANAGGEPSVVVNKVLEGKGNYGYNAGSGEYGDMIEMGVLDPAKVTRSALQHAASIAGLMLTTDCMIAEIPEDKPAVPDMGGMGGMGGMM

SEQ ID NO: 42085 - protein, 299 aa, Glycine max
MHASSKMGEKYKPWIIFLHLLVITCSCNRSCRARGLIETEDKFFKATSNDHHETEHAHAHSHVDHIDPSVMVFFTIEDLKVGKTMPIHFPKRDPATSPKLWPREEADSLPFSLNKLPNLLKIFSVSQNSPKAKAMEDTLRECETKPIKGEVKFCATSLESMLDFTQSILGFTSDLKVLSTSHQTKSSVTFQNYTMLENIIEIPASKMVACHTMPYPYTVFYCHSQESENKIYRVPLAGENGDRVDAMVVCHMDTSQWGHGHVSFQVLKVKPGTTSVCHFFPADHLIWVPKLQPQGFATM

SEQ ID NO: 42086 - protein, 96 aa, Neisseria meningitidis MC58
MTIRPLHDRVVVKRLEAEEKTASGIVLPGAAAEKPDMGEVIAVGAGKIGKDGSRRPLDVKVGDKIIFGKYSGQTVKADGEELLVMREEDIFGIVEK

SEQ ID NO: 42087 - protein, 528 aa, Bartonella quintana str. Toulouse
MVQISTYFQLMRAVWVLAREGVLSALPGDDLRGFPTLCHRIAGILARRKTKKKRRSENISHAINKLGPSYIKLGQFLATRPDIVGRDIAKDLVQLQDRVQTFSCSAAIDQIESSLGRSINDLFVNFYPPIAAASIAQVHPAEYYDEAGHKKKCAVKVIRPDIRTRFAKDLRSFYLVAYLQERYMPASRRLRPVCVVDTLAQTTRIEMDLRLEAAAISEMAENIQHDTGFRVPQIDWERTGRNVLTMEWIDGIRISEIAALKEAGFDLKVLAVTLIQSFLHHTLRDGFFHADMHPGNLFVDQKGCIVAVDLGITGRLGKKEKHFLAEILYGFITRDYHRVARAHFEAGYVPPHHNIESFAQANRAIGEPIHGQSAQSISMAKLLTLLFEVTELFDMQTRPELLLLQKTMVVVEGVARTLDPNFNMWKASEPVVKEWISKNLGPAGMAKDFSEGAQAFLSLARKTPQLIQNFQRMEENLNQMIERGFHLSPATLKQFAVEQSHSNRYSRYSLFIIALCCGCLIFYLFALF

SEQ ID NO: 42088 - protein, 321 aa, Ophioceras tenuisporum
FGQSGAGNNWAKGHYTEGAELVDQVLDVVRREAEGCDCLQGFQITHSLGGGTGAGMGTLLISKIREEFPDRMMATFSVVPSPKVSDTVVEPYNATLSVHQLVENSDETFCIDNEALYDICMRTLKLSNPSYGDLNYLVSAVMSGVTTCLRFPGQLNSDLRKLAVNMVPFPRLHFFMVGFAPLTSRGAHSFRAVSVPELTQQMFDPKNMMAASDFRNGRYLTCSAIFRGKVAMKEVEDQMRNVQSKNSSYFVEWIPNNIQTALCAIPPRGLKMSSTFIGNSTSIQELFKRVGEQFTAMFRRKAFLHWYTGEGMDEMEFTEAE

SEQ ID NO: 42089 - protein, 468 aa, Pseudomonas fluorescens PfO-1
MNSLNSKDLNGQLAQGFKPRHVTMLSIAGIIGAGLFVGSGHAIAAAGPAVLLAYLFSGLLVVLVMRMLGEMAVAHPDTGSFSTYADQAIGRWAGFTIGWLYWWFWVLVIPIEALAAGHVLNQWFPQVDAWLFALLSIILLVVTNLFSVSKYGEFEFWFAMAKVVAIIGFIGLGFAVLMGWIPGREASGLSRLMEEHGGFAPNGLSAVVGAFITIMFSFIGTEAVTIAAAESSNPAQNIAKATRSVIWRIGVFYLLSIFVVISVVPWNDPLLASVGSYQRALELMNIPNAKFLVDVVVLIAVASCMNSSIYISSRMLFSLGRRGDAPQPLKVTSAAGVPRAAVIASTVIGAGVTLFSYFMPGGLFQFLLASSGAIALLVYLVIAISQLRMRRMLRRQNVELTFRMWLFPWLTWLVIAFICAALAVMMVTPEHRLEVTSTIGLALTISFIGLVTTRQHGQMRAVVSAGKA

SEQ ID NO: 42090 - protein, 323 aa, Podospora decipiens
FVFGQSGAGNNWAKGHYTEGAELVDQVLDVVRREAEGCDCLQGFQITHSLGGGTGAGMGTLLISKIREEFPDRMMATFSVVPSPKVSDTVVEPYNATLSVHQLVENSDETFCIDNEALYDICMRTLKLSNPSYGDLNHLVSAVMSGVTVSLRFPGQLNSDLRKLAVNMVPFPRLHFFMVGFAPLTSRGAHSFRAVSVPELTQQMFDPKNMMAASDFRNGRYLTCSAIFRGKVSMKEVEDQMRNVQNKNSSYFVEWIPNNVQTALCSIPPRGLKMSSTFVGNSTAIQELFKRIGEQFTAMFRRKAFLHWYTGEGMDEMEFTEAE

SEQ ID NO: 42091 - protein, 544 aa, Zymomonas mobilis subsp. mobilis ZM4
MARFIFITGGVVSSLGKGLMAASLAALLQERGFRVRIRKFDPYLNVDPGTMSPYQHGEVYVTDDGAETDLDLGHYERFSGVPSRRSDNITSGRIYQNIIAKERRGDYLGATVQVIPHVTDAIKDFARDDTDDLDFVLCEIGGTVGDIESLPFIEAIRQLKNDLGRGNVVFVHLTLVPYIAAAGELKTKPTQHSVRDLTSFGIQPDVLVCRTEHPLPDSERSKIALFCNVPKEAVIPALDAKSIYDVPLHYHAEGLDKAVLSAFGLNIETPLDLHRWKEISDRLANPEGEVTIGVVGKYVGLQDAYKSLHEALVHGGIANRVKVNIVWLDAEMFEGNNPEAAEALSSLHAILVPGGFGERGSEGKIAAVKFAREHKVPFFGICLGMQMACIEGARNTAGLKKASSSEFGPSEEPVIGLITEWERDGEREERAADGDLGGTMRLGAYPAVLKAGSQVAEIYNSREITERHRHRYEVNIHYKEPLEKGGLVFSGMSPDGLLPEIVERPDHPWFIGVQFHPELKSKPFDPHPLFSDFVAAALKQSRLV

SEQ ID NO: 42092 - protein, 168 aa, Pseudomonas fluorescens PfO-1
MTTQTETAILAGGCFWGMQDLLRRYPGVLQTRVGYTGGDVPNATYRNHGNHAEAIEIVFDPAVISYRQILEFFFQIHDPSTPNRQGNDLGPSYRSAIYYLNEQQRDIAEDTAADVDASGLWPGRVVTEIEPAGPFWEAEPEHQDYLERIPNGYTCHFIRPNWKLPKRG

SEQ ID NO: 42093 - protein, 551 aa, Kineococcus radiotolerans SRS30216
MTDVASQSSAPGDERPVLTNRQGHPVYDNQNQRTVGARGPATLENYQFLEKISHFDRERIPERVVHARGTTAFGYFEAYGSFGDEPISKYTRAKLFQEKGKRTDLAIRFSTVAGGRDSAETLRDPRGFAVKMYTEDGNWDLVGNNLGVFFIRDAIKFPDFIHSQKPDPVTFDRQVPNRVFDFASQTPESLHMFTLVFSPRGIPASYRTQQGFGVNTYKWVNSEGETVLVKYHWHPKQGVKSWTSADAAAVQAQDLGPHTRDLYAAIDAGDYPEWELLVQTMSDEEHPELDFDPLDDTKVWPENLFPLTPIGKMVLNRKPVDFFTESEQIAFGTGVLVDGLDFSDDKMLVGRTFSYSDTQRYRVGPNYLQLPVNAAKVPVRTNQRDGQMAYGVDGRGENPTVNYEPSIIGGLREGTYPTHDEQGPVITGRVTRKRIPRTNDYQQAGERFQLSEDWEKDELVANFVDALSQCIRPIQERMVWHMFMADDEYGRRVGEGLGITADDVRHLEPLQTQTLTEEELQRAANLGKNGPRDVTGLVMTHAVPNERDVRA

SEQ ID NO: 42094 - protein, 588 aa, Bartonella quintana str. Toulouse
MTKKRISSFDKHLIIRLLRENFYKHARWYSAAIFSMIIISCTTAASAWIMRDVVNYLIDAQNFAMIVLISSIIAFIFILKGIATFAQTYFLSKAGNNIVAEQQRKIYARLMEQGVSFYNNNTSSDLLVRVTHNATAARNIIDTIITTFVRDLLSVNGLLLVMFIQNFALISITLIVGPLAFLGVRMALKRVRSLVEKELFSLGEIIKIMQESSIGIRVIKAFSLEELMKKRMNKAICDVEKQANNIATLEAITNPIMETLAGIAIAGIICFSGYLANQRAGVQGEFMSFIVALLLAYEPAKRLANVRVKIESGLVNIRTMFEILDHPLTIIEHEKAKDLDKTQGPIRFEHVSFAYTDGQIVLRDINLEIEPGKMTALVGPSGSGKSTLINLIMRLYDPTQGRILINDQDIHYITFRSLRKLIAYVGQDTFLFQGTVKYNIGLGKEGASDNDIIKAAKTANAHDFIMNLPNGYDTQIGNNGDNLSGGQKQRIAIARAMLHDSEILILDEATSALDSHTEAQINEALYHLTKGRTTIIIAHRLSTITRAHKIVVIQNGQLIEQGTQKELLAKEHGFYKKLHHIQFEKQMS

SEQ ID NO: 42095 - protein, 359 aa, Staphylococcus aureus subsp. aureus N315
MMTIKVGIIGCGGIANGKHMPSLQKVENVEMIAFCDVDISKAASAAEAYGTDNAKVYDDYKALLKDDTIDVIHVCTPNDSHCEITVAGLHAGKHVMCEKPMAKTTAEAQKMIDTAKSTGKKLTIGYQNRFRPDSQFLHQAAQRGDLGDIYFGKAHAIRRRAVPTWGVFLNEEAQGGGPLIDIGTHALDLTLWMMDNYEPESVMGSTFHKLNKQHDAANAWGSWNPDEFTVEDSAFGFIKMKNGATIILESAWAINSLEVDEAKCSLSGTKAGADMKDGLRIHGEDMGTLYTKHVELENKGVDFYEGNEVDEAEEEAKAWIDAVVNDTEPVVKPEQAMVVTKILEAIYQSAKSGKAIYFE

SEQ ID NO: 42096 - protein, 315 aa, Rhodobacter sphaeroides 2.4.1
MTASKPGRIAVVGSNMVDLVTYITRMPAPGETIEAPDFEIGCGGKGANQAVAAAKLGSAVSMVTKVGDDIFGENTRRNLAQHGIDIRHVETVAGKSSGVAPIFVEASGENSILIVKGANADLLPADVDTAEETLRAADLILMQMEVPRETVIHTVRRAAEWGVRTILNPAPAAADLNVDDLRDLSFLVPNESELALISGLPTGSEEEIAAAALSLIERGIGTVIVTLGGRGARLVTRAGVVPIAPVRVTPVDTTGAGDAFIGAFAHFLAATGEVEGALAHAARYAAHSVTGRGTQKSYATPEAFEAFCRALPPSA

SEQ ID NO: 42097 - protein, 162 aa, Triticum aestivum
  misc_feature (61)..(62): Xaa can be any naturally occurring amino acid
  misc_feature (72)..(72): Xaa can be any naturally occurring amino acid
  misc_feature (87)..(87): Xaa can be any naturally occurring amino acid
  misc_feature (94)..(94): Xaa can be any naturally occurring amino acid
  misc_feature (108)..(108): Xaa can be any naturally occurring amino acid
  misc_feature (117)..(117): Xaa can be any naturally occurring amino acid
  unsure (1)..(162): unsure at all Xaa locations
QYYQLIRLGFEGYKNIMENCQENATVLKQGLEKTGKFNIVSKDNGVPLVAFSLKDSSRHSXXEISDFLRRFXGWARAGYTIPPNAQXVTVLRRXIREDSNRTSPERLXVLHIEKVLXHQLDPLPPFSQAGTTRVAGRSTKRKWRTTQVFPWKRLPHQEDASL

SEQ ID NO: 42098 - protein, 100 aa, Arabidopsis thaliana
MATFIGQVSVLSLIALFGAATTALITTARKGVTLLLSYLIFTKPLTEQHGSGLLLIAMGIVLKMVPMDSKAPAKIPARPAVRIAGGDGDREEDEERKSLV

SEQ ID NO: 42099 - protein, 715 aa, Fusobacterium nucleatum subsp. vincentii ATCC 49256
MSIKYLYDRKKIAVTYGEQKYSYADVIKYVNYYSEFLDISKGDRVALMMENRPESIFSFFSIWAKKGIALSLDAGYTVEQLAFVLNDSKPKYIFVSNKVKEVVKKANEKIGNIVKIIVVDEITLPTNYVAKQEEFENDSDEDVAIIVYTSGTTGNPKGVMITYENIKANMDGVRAVDLVTDTDTILGMLPYHHIMPLCFTLILPMYLGVPVILLTEISSASLLKTLQENRVTVILGVPRVWEMLDKAIMTKINQSALARFMFKVASKIDSMSVRKMLFSKVHKQFGGHIRLMVSGGAKIDKNILEDFRTMGFRAIQGYGMTETAPIIAFNVPGRERSDSVGEVIPDVEVKIADDGEILVKGKNVMKGYYNNEQATKEAFDKDGWFHTGDLGRMEGKYLIIIGRKKEMIVLPNGKNIDPNDVEAEIIKNTEQIVNIKDAIKWEVIDKYNVTAPNYKKIHDIKIVKEELPKTRLGKIRRFMLKDLLEDKTENTDKKVEKKVVEVPAEMKEKFNVINKYIDERYHKAIDLDSHIELDLGFDSLDIVEFMNFLNDTFGITLVEQDFVENKTISAIIKLVDEKAGKLVEKVDKNENLKKIIESDSNVKLPKDARYAKVLKFILSPMFKFYFKYKYSGKENLGEGAGIIVGNHQSYLDAFMLNNAFTYKEMENNYYIATALHFKSDFMKYLSGHGNIILVDANRNLKNTLPASLLKVLKNG

SEQ ID NO: 42100 - protein, 474 aa, Legionella pneumophila subsp. pneumophila str. Philadelphia 1
MLRRTKIVATLGPASKEPEILRSMLAAGVNVVRINFSHADSSALQLIALVRKIADELNHPVAVMADLQGPKIRVGRFQNKSITLIDGQNFTLDCMAPDTLGDINGVSVAYPNLANELSIGDHLLINDGLIELEVIEISGSKIHCKVVEGGVLTDLKGLNRKGGGLAARTLTEKDRNDLRTAIEAEVDYISLSFVKDAEDIRQARALMKDYGAQITPIIAKIERMEALDHLTDIIREADAIMVARGDLGVEVGAAEVPAIQKHIIEQTRLLDKVVITATQMMESMISNPQPTRAEVSDVANAILDGTDAVMLSAETASGLFPVKVITMVNKICLSAEKHASFFYHSDPETCHYQRADQAIAMATMHTANHFPIQAIITLTESGDTALWVSRHHSTVPIFAISANKRTIGRLSLVNNVFPIYIDFHQFNPEGLNQQILHELIKSGHLEKRGYVLLTRGTQIGMPGGTNCMEIIPVV

SEQ ID NO: 42101 - protein, 180 aa, Solibacter usitatus Ellin6076
MMKMMLLGMAMGAMAFGASSVYDFTLNSIDGAPTPLSTFKGKVVLLVNVASKCGFTPQYAGLEKLYEKYKDQGLVLVGVPANNFGAQEPGSNEEIKTFCSRNYNVTFPMMSKVSVKGADKTPLYQYLTDASANPKTAGEIKWNFTKFLIDKKGNVINRFESAVTPESADMLKAIEAALAQ

SEQ ID NO: 42102 - protein, 571 aa, Corynebacterium glutamicum
MHYAHLRTKDLRGLQQRLSSVGATRLTTTEPAVQARLKAARNVIGAFAGEGPLYPPSDVVDAFEDADEILDEHAEILLGEPLPDTPSCIMVTLPTEAATDIELVRGFAKSGMDLARINCAHDDETVWKQMIDNVHTVAEEVGREIRVSMDLAGPKVRTGEIAPGAEVGRARVTRDKTGKVLTPAKLWITAHGSEPVPAPESLPGRPALPIEVTPEWFDKLEIGSVINVPDTRGSRRAFTVTRVFDGAVLAEGPQKAYISNGTLLEHNYDRSRVYGIPAVVQRINLKVGDRLILTDEELTYDPSLGSGRTPRISCTLPQAVDAIKVGHRVLFDDGAIAAVCIDKASTTDGFNDVELEVTRARPQGVNLAAYKGINLPDSELPLPSLTEEDLQHLRFVVQYADIAAISFIRNVADVEYLLQALADIGDPAAVERLGLVLKIETIPGYEGLAQILLTGMRHENFGIMIARGDLAVELGFDRMAEVPQLIMALAEAAHVPTILATQVLENMAKNGLPSRAEITDAAMALRAECVMLNKGPHINDAIKVLTKMSRKLGASQRKSRLLLRKVKSWEE

SEQ ID NO: 42103 - protein, 684 aa, Aspergillus niger
MGYNDVDQLAINTIRTLAVDATFKANSGHPGAPMGMAPVSHVLFNKFMSFNPQNPDWANRDRFVLSNGHGCMLQYALLHLFGYQVSMDDLKSFRQLDSITPGHPEAHDTPGVEVTTGPLGQGFANAVGLAIAERHSAAVFNKPGYTLFNNYTYCFFGDGCAMEGIASEAASMAGHLKLGNLIAIYDDNGISIDGDTKCAFTEDVMKRFEPYGWHTEYVKDGDHDLEGIEAAIKKCQAVTDKPSVIRLTTTIGFGSKLQGTGGVHGNPLKADDCEGVKQLLGFDPKQTFVVPQQVYDLYHKHAAEGAAKEQEWNQLLQKYASEYPKEHAELTRRLSGKLAEGWEKSLPVYKPTDAAVATRKLSEAVLEKIHDVVPELLSGSADLTGSNNTRWKNAVDFQPPEYNIGDWSGRYLRYGVREHAMAAVMNGLAAYGTVIPAGGTFLNFVSYAAGAVRLSALSRVRTIYVATHDSIGLGEDGPTHQPIETLAHFRALPNCMVWRPADGNETSAAYYSALTSKHTPSILALTRQNLPQLEASTIEKALKGAYVALEAPDAAVTLISTGSEVSICIEAATYLKEKHGIAARVVSVPCFEVFDAQDKAYKLQVLPDNIPVLSVEALTTMGWERYAHEQFGLNRFGPSGPYKDVYKKFEFTPEGISKRAVATIDFYKGHTVRSPINRAFQQIL

SEQ ID NO: 42104 - protein, 692 aa, Legionella pneumophila subsp. pneumophila str. Philadelphia 1
MNGLLADLCLLSDNSASVKCKRVGMNSFTELANAVRMLSIDAVNQAQSGHPGMPLGMADIATVLWKKFLKFNPKNPHWFNRDRFVLSNGHGSMLLYSLLHLTGYNLDISELKNFRQLHSKTPGHPEHGHTPGVETTTGPLGQGLANSVGMALAERVLASTFNHDHFNLVDHYTYTFAGDGCLMEGISHEACSLAGTLGLGKLIVFYDDNGISIDGKVESWFTDDTTSRFKAYNWQVIGPIDGHDADQIEQAISAARENTTQPSLIICKTVIGLGSSVAGSEKAHGSPLSAQDINNVREFFNWKHAPFEIPDSIYKQWDHREQGEKEEQQWLQLLHEYRQQHPSEHDEFLRRANGDLPDDWQEISAGFLKQCLNNEKAIATRKASQQCIEFFAPILPEMFGGSADLTGSNNTDWSGSKAITAHNFSGNYLYYGVREFAMAAIMNGLAVHGGFIPYGGTFLVFADYARNAIRLSALMKQRVIYVLTHDSIGLGEDGPTHQPIEHIAMLRMTPGMTVWRPADLMETAVAWQQSLEHHNGPSALLLSRQNLPALAHGTDAADLIKKGGYIIADCEGKPDAILIATGSEVQLAITAAEKAKARGLQVRVVSMPCAERFLAQSDDYKNQVLPGQVRTRIAIEAASSAYWHQFVGFDGAVIGLDCFGVSAPATDAFNYLGITVEKIINTLDTLTKQTMV

SEQ ID NO: 42105 - protein, 3482 aa, Anabaena circinalis 90
MAQNTDYKKLIATTLTKMEAMQARITELETRQSEPIAVVGMGCRFPGGISSPEAYWNFCQAGLDAIVEVPQSRWDISKFYAPEPTPGKMNTRYGGFLQQDITEFDARFFSISSREATSMDPQHRLLLEVAWEALENANLPPTNLAGDRVGVFVGITSVDHAMTVYKSKYDEIDSFFGTGNSLSAAAGRLSYFLNLRGPCMSIDAACASSLVALHQAIRSLRNHECKIALVGGVNLILDPAITINLCQSGMMSPDGRCKTFDAAANGYVRGEGCGVLVLKRLSVAEKNGNRILALLRGSAVNHNGAAAGLTVPSGPAQQDLLRQALADARVKPQEVGYIEAHGTGTSLGDPIEMNAIAAVYGERSQPLYVGSVKTNIGHLEAAAGIAGTIKTILALQHGEIPSHLHFQEPNPLINWQGYPIKIPSQAIPWSNNGQVRIAGVSSFGFSGTNAHIIIEQAPAANIPEIKLQRPSHLLTISAHSETGLKELALRFHTRLESHPEMGDICHSAAIGRSSLPERLAIVADTLTELQQRLAAFAEEKNIDHGIFYRRFTGEKYPKIVFLFTGQGACYAGMGNQLYQTQPTFRQYIDQCADILGNYLEFPLQQILFGDRTDLLNQTAYAQPAIFALEYSLAMLWQSWGIKPSLLIGHSVGEYVAACIAGVFSLEAGLALIVKRGQLMQTAPLGKMASVFADEATVSALIQNYGNTVSIAAINHPQQIVISGESNSIDEIVANCKSQKIAVQLLSVNGAFHSPLMESILDDFEIAAREVSYHPPQILLVSGIDGQPLTTAPDASYWRQQSRQAVQYFQSLITALNKGYNLFLEVGPRPILAEQGRRYNDDAIWLSSLNRGLDNWQTMLSALAQLYINGVNFNAEKFNKDYGYRNIQLPNYPFQRKRFQFKSTVLSQSSLTKEVPLERELMETNMNLAKVANIKKNQQEIGNKLKSILALLLKEDENDIRDDETLLNLGADSIILTDFVRKIEEKFGVKVKIDQLFTDLQTIDEISIYLSDYIKQKPSNTSDETAINDILTKTSVQVSNSESELNNYLWVISQLQPIAVAYILKALEVLGKRLSIADTWTTEDLLQTLPIASKYHILVNRYLKTLEQTGIIQNQGNVWIVKSLPTPFSLPEAIENLQTICPAAKPELDMLQRCGENLAEVLKGNIDPLELIFPAGSVVHAESIYGNSPVSRLMNQRVSQAINSILNNFSSSDRPYQIIEVGGGTGATSEAIVNNLNLNHTTYFFTELSPVLLNKARQKFKNRHKFNFNQLDIEKSPVSQGLTAHSYHIVVAANVLHSTRNITETLNNIRELLIPGGYLVLLETVENNSWLDLTFGLTPGWWRFQDKELRLDTPLLSGESWCAALKRCGFVNADIYSQQNNISIYNGQELIIASTSPESAIDHQSKTVAVSIPTSGKEALMMAQLQSLKELKDIHEKTIIKQLEILQSAPVAPSNTPEVLLIQTETAPTPKISKTETTPPTQKISSPNLNPLALKLTESKSLTEQQQAFIQKLEIVYNQRTAKSKAYSQNSRKTMVDVKPTIDFRMALKEFQYPIVSESAQGAYFRDIDGNDYIDLAMGFGVNFFGHSPDFVLTEIQQQMQHGIGLGMQSNIAAETAALICEITGVERVAFSNTGTEAIMAAVRIARSRTKRQKIVIFAGSYHGTFDGILARAGEEAGTAEPLSLGTPSGMVEDVIVLTYGAEESLEIIAEQADNLAAVLVEPVQSRKPDLQPKEFIQKLRKLTQQKEIALIFDEIITGFRITPGGAQEWFEIEADIVVYGKAIGGGLPISMICGKADFLDTVDGGFWSYGDDSHPQTELTAYGGTFCRHPLALAACRAVLLHLREQGATLQETVNQLTNRLAIEVNQFFQETGIPIRIVHFGSLFRFESSGAYSIFLKPIELPLFYYLLNLKGVYTWEKRVCFLSTRHTNEDINKVVAAVKEAIIELRQAGFFANAKPPQTKKREASDRTEDEDARNNLNQQFPTSEAQRQLWLLAELDTTASASYNVTTSLELRGALDISSLQQAINEVVNRHEALRTKILEQGELQEVISSVTIDLPLINLMDEDNPEATALVLRTELSQKPFDLGVAPLFAAVLMRLAPEHYLLTLKTHHIVADGWSLGLILNELGKLYSAKIGVATESLSPPMQFRKYLALRQQEAQSPQMQAHRDFWLKTYEGEIPIFELPTDFPRPAVKTYTGGRESKIIAPQLWQNLQTVGRKNQATLFMTMFAAYTAFLRRISGHDDLVIGIPISGRQVEGSEKLVGFCSQFLPIRIQTDVTASFVTHLRHTKETLIAAFKHQTHALEELLAALQLQRDFSRSPLISVSFNLDPKLTLPEFEGLNVSLPPEPIGYTPFDLGFNFIEVNDALIIYCNYNTELFKPETIKQFLESFEILMQGVIKDANILLSELHLLTQVQQEELLAKLTGSTIELPQNSTIIDDFIAQVKSTPDAPALIVEEKTLTYRELNEKVNRLTNYLREKYNLGAGKAIALAIGRNQNLIIAILATFKTGAIYVPIDPQYPSSRIDFILKDSGCHLCLTESNFISQLPQEIEAICLDKIDNILTDFDINEPNFQPDTNQIAYILYTSGSTGNPKGVMGRHISILNVIRSLRLTFNLNKHPEWRYIFTAPVTHDPSFRNIFLPLTIGAALYMYEVQHIGHLVSFLQENKINVLHTTPSIYREILAVLAPEETIPTLKYISCGGEKLDRETAIALRKRFPAEIVSNVYGSTETCVGVSQYTIDDNLNTDVPLGQVFHNNRLFVLDEFNHPVPLHVIGEICVEGAALAVGYRNLPEITREKFQPNFLNSEKILFRTGDLGKQIAPGVIEFIGRKDNQVKVNGYRVDPGEIEYQISRYAEIEKAIVLPIEVNNQIQLSAYCQTDKDIKFSEIREFLAKYLPVYMIPSSFIFLKQFPLTKHGKFDLRSLIALKPTDQLTQVSYTAPRNTLESKLVHIWEKILTKHPIGIFDNFFEIGGHSLLLSRVVTHVHKELNVLVKLADFFKVPTILGLAALISKAQSNYQEPIPAITQQESYPMSHGQRRLWALEFLDHNHYAYGMPSAYQFNGDLNIAAFENAFKKLIERHEILRTTFTLINNEPRQIVNEQVDFAVNQIDLVDDENQAAKIAEAIRNNAKTTFDLESGLLLKINVLKLSQQSNIVLFNMHHIISDGWSAGVLIKDFLAHYHAYGKENVELPPPLRIHYKDYTSWQNQQLQTPKLQAQRDYWLPKLIPAPAPLDLPLDYTRPAVQSFSGSVVIWKPNQEFIKDFELLTKTQEASLFMGLLTLVKGFLFRYTEQNEITVGSPIAGRNHPDLEEQIGFYVNTLVLRDQITVDDSFATLLAKVKTTTIEAYDNQEYPFDKLVSDLNFKRDPSRNPLFDVVVVLQNNQNVDLAIDGIAVNTLEQELVTAKFDLEFIFVDEAELYLKLIYNTDIFANERISLMIKLLETLLEEVVKSPDTPLLHLCDHTDKACQEDNSLFATNFNF

SEQ ID NO: 42106 - protein, 537 aa, Triticum aestivum
  misc_feature (516)..(516): Xaa can be any naturally occurring amino acid
  unsure (1)..(537): unsure at all Xaa locations
MASAKSSRSRPAGHSGVFPVGAAATGVGGGGGGGGGGDGGVQLADKLKIFKTDNFDPDAYVQSKCQTMNEKEIRHLCSYLQDLKKASAEEMRRSVYANYAAFIRTSKEISDLEGELLSIRNLLNTQAALIHGLSEGVQIDSLTSGTEGSTEEDISNVEGQEPSEIQKWSADFPDMLDVLLAERRVDEALDALDEAERVAADRTQTLTTAEISALRSAVSDNRQKLADQLAEAACQSSTRGIELRAAASALKRLGDGPRAHSLLLSAHNQRLQCNLQTIHPSSTSYGRAYTAALAQQVFSVVAQALSDSVEVFGDESCYASELVTWATQQVLSFALLVKRHVLSSCAAAGGLRAAAECVQISIGHCSLLEARGLSVSAVLLKQFKPSLEQALDANLRRIEESTAALAAADNWTLTYPPNGIRPLARSSVANLALQPKLSSSAHRFNSMVQDYFEDVTPLLSLQLGGSTMDGIAKNFSLYVNLLISALPGSMDDEANIDGLGNKIIRMAETEEQQLAXLLANASLLAEECYLSTYGLHL

SEQ ID NO: 42107 - protein, 486 aa, Saccharomyces cerevisiae
MVHLGPKKPQARKGSMADVPKELMDEIHQLEDMFTVDSETLRKVVKHFIDELNKGLTKKGVNIPMIPGWVMEFPTGKESGNYLAIDLGGTNLRVVLVKLSGNRTFDTTQSKYKLPHDMRTTKHQEELWSFIADSLKDFMVEQELLNTKDTLPLGFTFSYPASQNKINEGILQRWTKGFDIPNVEGHDVVPLLQKEISKRELPIEIVALINDTVGTLIASYYTDPETKMGVIFGTGVNGAFYDVCSDIEKLEGKLADDIPSNSPMAINCEYGSFDNEHLVLPRTKYDVAVDEQSPRPGQQAFEKMTSGYYLGELLRLVLLELNEKGLMLKDQDLSKLKQPYIMDTSYPARIEDDPFENLEDTDDMFQKDFGVKTTLPERKLIRRLCELIGTRAARLAVCGIAAICQKRGYKTGHIAADGSVYNKYPGFKEAAAKGLRDIYGWTGENASKDPITIVPAEDGSGAGAAVIAALSEKRIAEGKVSGIIGA

SEQ ID NO: 42108 - protein, 486 aa, Saccharomyces cerevisiae
MVHLGPKKPQARKGSMADVPKELMQQIEIFEKIFTVPTETLQAVTKHFISELEKGLSKKGVNIPMIPGWVMDFPTGKESGDFLAIDLGGTNLRVVLVKLGGDRTFDTTQSKYRLPDAMRTTQNPDELWEFIADSLKAFIDEQFPQGISEPIPLGFTFSFPASQNKINEGILQRWTKGFDIPNIENHDVVPMLQKQISKRNIPIEVVALINDTTGTLVASYYTDPETKMGVIFGTGVNGAYYDVCSDIEKLQGKLSDDIPPSAPMAINCEYGSFDNEHVVLPRTKYDITIDEESPRPGQQTFEKMSSGYYLGEILRLALMDMYKQGFIFKNQDLSKFDKPFVMDTSYPARIEEDPFENLEDTDDLFQNEFGINTTVQERKLIRRLSELIGARAARLSVCGIAAICQKRGYKTGHIAADGSVYNRYPGFKEKAANALKDIYGWTQTSLDDYPIKIVPAEDGSGAGAAVIAALAQKRIAEGKSVGIIGA

SEQ ID NO: 42109 - protein, 270 aa, Pseudomonas syringae pv. phaseolicola 1448A
MSRLEQRFAQLKTEGRAALVTFITAGDPGYDTSLQVLKGLPAAGADVIELGMPFTDPMADGVAIQLATLRALDAGQTLQKTLQMVSEFRVDDQTTPIVLMGYYNPIHRFGVEAFVAQAKEAGVDGLIIVDLPPEHDAELATPAQASGIDFIRLTTPTTDDARLPRVLERSSGFVYYVSVAGVTGAGSATTEHVTEAIARLRRHTSLPISVGFGIRTPEQAAAIARLADGVVVGSAFVDKIATAESPEKAIDGVLTLCAALAEGVRNARIG

SEQ ID NO: 42110 - protein, 768 aa, Zea mays
  misc_feature (200)..(200): Xaa can be any naturally occurring amino acid
  misc_feature (212)..(212): Xaa can be any naturally occurring amino acid
  misc_feature (274)..(274): Xaa can be any naturally occurring amino acid
  unsure (1)..(768): unsure at all Xaa locations
MASHIVGYPRMGPKRELKFALESFWDGKSTAEDLEKVATDLRASIWKQMADAGIKYIPSNTFSYYDQVLDTTAMLGAVPERYSWTGGEIGFDTYFSMARGNATVPAMEMTKWFDTNYHFIVPELGPNTKFSYASHKAVNEYKEAKALGVDTVPVLVGPVSYLLLSKPAKGVEKGFPLLSLLSSILPVYKEVIAELKAAGXASWIQFDEPTLXVLDLDSDKLAAFSAAYAELESVLSGLNVLVETYFADVPAESYKTLTSLSSVTAYGFDLVRGXQTLGLVTSAGFPAGKYLFAGVVDGRNIWADDLATSLSTLQSLEAVVGKDKLVVSTSCSLMHTAVDLVNETKLDSEIKSWLAFAAQKVVEVDALAKALAGQKDEAYFAANAAAQASRKSSPRVTNEEVQKAAAALKGSDHRRATNVSARLDAQQKKLNLPILPTTTIGSFPQTVELRRVRREYKAKKISEEEYVTAIKEEINKVVKLQEELDIDVLVHGEPERNDMVEYFGEQLSGFAFTANGWVQSYGSRCVKPPIIYGDVSRPNPMTVFWSKTAQSMTSRPMKGMLTGPVTILNWSFVRNDQPRFETCYQIALAIKKEVEDLEAGGIQVIQIDEAALREGLPLRKAEHAFYLDWAVHSFRITNCEIQDTTQIHTHMCYSNFNDIIHSIIDMDADVITIENSRSDEKLLSVFREGVKYGAGIGPGVYDIHSPRIPSAEEIADRIDKMLAVLDTNILWVNPDCGLKTRKYTEVKPALTNMVSAAKLIRTQLASAK

SEQ ID NO: 42111 - protein, 200 aa, Shigella flexneri
RELKARHLTMIAIGGSIGTGLFVASGATISQAGPGGALLSYMLIGLMVYFLMTSLGELAAYMPVSGSFATYGQNYVEEGFGFALGWNYWYNWAVTIAVDLVAAQLVMSWWFPDTPGWIWSALFLGVIFLLNYISVRGFGEAEYWFSLIKVTTVIVFIIVGVLMIIGIFKGAQPAGWSNWTIGEAPFAGGFAAMIGVAMIV

SEQ ID NO: 42112 - protein, 412 aa, Candida parapsilosis
MTTIAIFTKNVLLAIAFALFAQGAAIPDPAKRDDNPGFVALDFEVTRKPLDVNATSELSKRSSPSSPLYFEGPSYGIRVSVGSNKQEQQVVLDTGSSDFWVVDSSASCQKGNCKQYGTFDPHSSTSFKSLGSSFRSIGYGDKSSSIGTWGQDTIYLGGTSITNQRFADVTSTSVNQGILGVGRVETESANPPYDNVPITLKKQGKIKTNAYSLYLNSPGAATGTIIFGGVDNAKYSGKLIEEPLVSDRYLAVNLKSLNYNGDNSNAGFGVVVDSGTTISYLPDSIVNDLANKVGAYLEPVGLGNELYFIDCNANPQGSASFTFDNGAKITVPLSEFVLQSTANACVWGLQSSDRQNVPPILGDNFLRHAYAFQLDKETVLSRSGEVHFCLKCFSNLETSIVWKAFFYNRYIQ

SEQ ID NO: 42113 - protein, 402 aa, Candida parapsilosis
MVAIVTLTRQVLLTIALALFAQGAAIPEEAAKRDDNPGFVALDFDVLRKPLNLTEALLREKRDSISLSLINEGPSYASKVSVGSNKQQQTVIIDTGSSDFWVVDSNAQCGKGVDCKSSGTFTPSSSSSYKNLGAAFTIRYGDGSTSQGTWGKDTVTINGVSITGQQIADVTQTSVDQGILGIGYTSNEAVYDTSGRQTTPNYDNVPVTLKKQGKIRTNAYSLYLNSPSAETGTIIFGGVDNAKYSGKLVAEQVTSSQPLTISLASVNLKGSSFSFGDGALLDSGTTLTYFPSDFAAQLADKAGARLVQVARDQYLYFIDCNTDTSGTTVFNFGNGAKITVPNTEYVYQNGDGTCLWGIQPSDDTILGDNFLRHAYYLLYNLDANTISIAQVKYTTDSSISAV

SEQ ID NO: 42114 - protein, 309 aa, Escherichia coli
MSKKIAVIGECMIELSEKGADVKRGFGGDTLNTSVYIARQVDPAALTVHYVTALGTDSFSQQMLDAWHGENVDTSLTQRMENRLPGLYYIETDSTGERTFYYWRNEAAAKFWLESEQSAAICEELANFDYLYLSGISLAILSPTSREKLLSLLRECRANGGKVIFDNNYRPRLWASKEETQQVYQQMLECTDIAFLTLDDEDALWGQQPVEDVIARTHNAGVKEVVVKRGADSCLVSIAGEGLVDVPAVKLPKEKVIDTTAAGDSFSAGYLAVRLTGGSAEDAAKRGHLTASTVIQYRGAIIPREAMPA

SEQ ID NO: 42115 - protein, 192 aa, Shigella flexneri
LKARHLTMIAIGGSIGTGLFVASGATISQAGPGGALLSYMLIGLMVYFLMTSLGELAAYMPVSGSFATYGQNYVEEGFGFALGWNYWYNWAVTIAVDLVAAQLVMSWWFPDTPGWIWSALFLGVIFLLNYISVRGFGEAEYWFSLIKVTTVIVFIIVGVLMIIGIFKGAQPAGWSNWTIGEAPFAGGFAAMI

SEQ ID NO: 42116 - protein, 545 aa, Sodalis glossinidius
MAAKDVKFGNDARVKMLRGVNVLADAVKVTLGPKGRNVVLDKSFGAPVITKDGVSVAREIELEDKFENMGAQMVKEVASKANDAAGDGTTTATVLAQSIVNEGLKAVAAGMNPMDLKRGIDKAVIAAVEELKKLSVPCSDSKAIAQVGTISANADETVGTLIAEAMAKVGKEGVITVEEGSGLQDELDVVEGMQFDRGYLSPYFVNKPETGAVELESPFILLADKKISNIREMLPVLEAVAKAGKPLLIIAEDVEGEALATLVVNTMRGIVKIAAVKAPGFGDRRKAMLRDIAILTAGTVISEEIGLELEKATLEDMGQAKRVVITKDTTTIIDGEGDKALIDSRVTQINQQRDEATSDYDREKLQERVAKLAGGVAVIKVGAATEVEMKEKKARVEDALHATRAAVEEGVVAGGGVALIRVANRIAELRGDNEDQNVGIKVARRAMEAPLRQIVANAGEEPSVIANKVKAGEGNTGYNAATEEYGNMIDMGILDPTKVTRSALQYAASIAGLMITTECMVTDLPKEDKPDLGGAGGMGGMGGMM

SEQ ID NO: 42117 - protein, 502 aa, Arabidopsis thaliana
MATAAVIGLNTGKRLLSSSFYHSDVTEKFLSVNDHCSSQYHIASTKSGITAKKASNYSPSFPSSNRHTQSAKALKESVDVASTEKPWLPNGTDKELEEECYDDDDLISHSVEAILLLQKSMLEKSWNLSFEKAVSSEYPGKGTIRKKKIPVITCSGISARQRRIGAKKKTNMTHVKAVSDVSSGKQVRGYVKGVISEDVLSHVEVVRLSKKIKSGLRLDDHKSRLKDRLGCEPSDEQLAVSLKISRAELQAWLMECHLAREKLAMSNVRLVMSIAQRYNNLGAEMSDLVQGGLIGLLRGIEKFDSSKGFRISTYVYWWIRQGVSRALVDNSRTLRLPTHLHERLGLIRNAKLRLQEKGITPSIDRIAESLNMSQKKVRNATEAVSKVFSLDRDAFPSLNGLPGETHHSYIADTRLENNPWHGYDDLALKEEVSKLISATLGEREKEIIRLYYGLDKECLTWEDISKRIGLSRERVRQVGLVALEKLKHAARKRKMEAMILKN

SEQ ID NO: 42118 - protein, 420 aa, Bacillus halodurans C-125
MGAIAEKGKESSILSSTQDVIQQALGKLGYEEGMFELLKEPVRMLTVRIPVRMDDGTVKVFTGYRAQHNDAVGPTKGGVRFHPEVTADEVKALSLWMTLKCGIVNIPYGGGKGGIVCDPRTMSFPEIERLSRGYVRAISQIVGPSKDIPAPDVFTNSQIMAWMVDEYSRIREFDSPGFITGKPIVLGGSHGRETATAMGVTICIEEAAKLKQLDLREATVIIQGFGNAGGYLAKILSDRGAKIIGISDAYGALYDETGLDIEYLLDRRDSFGTVTTLFKNTITNEELLEKKCDILVPAAIANQITEANAREIKASIIVEAANGPTTTEATNILTERGVLIVPDVLASSGGVTVSYFEWVQNNLGYYWSEEEVSEKLRSKIVEAFHQVVETATRYNVDPRLAAYMVGVRKTAEASRFRGWI

SEQ ID NO: 42119 - protein, 396 aa, Lycopersicon esculentum
MDGSVPQTDTMMSDVAAPPAQQPPPPSQPLAGMDNIPATLSHGGRFIQYNIFGNIFEVTAKYKPPIMPIGKGAYGIVCSALNSETNESVAIKKIANAFDNKIDAKRTLREIKLLRHMDHENIVAIRDIIPPPQREAFNDVYIAYELMDTDLHQIIRSNQGLSEEHCQYFLYQILRGLKYIHSANVLHRDLKPSNLLLNANCDLKICDFGLARVTSETDFMTEYVVTRWYRPPELLLNSSDYTAAIDVWSVGCIFMELMDRKPLFPGRDHVHQLRLIMELIGTPSEAEMEFLNENAKRYIRQLPLYRRQSFTEKFPHVNPAAIDLVEKMLTFDPRRRITVEDALAHPYLTSLHDISDEPICMTPFSFDFEQHALTEEQMKELIYRESIAFNPEYQRM

SEQ ID NO: 42120 - protein, 400 aa, Bacillus halodurans C-125
MKMQSSTSAVIEKTEKYGAKNYHPLPIVISEAKGVWVKDPEGRKYLDMLSAYSAVNQGHCHPKIIQALKDQADKITLTSRAFHNDQLAPFYEKVSKLTGKNMLLPMNTGAEAVETAVKAARRWAYDVKGVPDNQAEIIVCEDNFHGRTMTAVSLSSNDEYKRGFGPMLPGIKVIPYGDLEALKAAITSHTAAFLVEPIQGEAGIRIPQEGFLKEAYALCKRENVLFIADEIQSGLGRSGKWFACDWEDVKPDMYILGKALGGGVFPISVVCADRDILGVFEPGSHGSTFGGNPLACAVSIAALEVLEEEKLVERSYEYGNYLLTKLKEIDNPIIKDVRGRGLFIGVELHEPARKYCEQLKEEGLLCKETHETVIRFAPPLVISKEDLDWAIEKIYYVLKP

SEQ ID NO: 42121 - protein, 328 aa, Podospora fimiseda
FRPDNFVFGQSGAGNNWAKGHYTEGAELVDQVLDVVRREAEGCDCLQGFQITHSLGGGTGAGMGTLLISKIREEFPDRMMATFSVVPSPKVSDTVVEPYNATLSVHQLVENSDETFCIDNEALYDICMRTLKLPNPSYGDLNHLVSAVMSGVTVSLRFPGQLNSDLRKLAVNMVPFPRLHFFMVGFAPLTSRGAHSFRAVSVPELTQQMFDPKNMMAASDFRNGRYLTCSAIFRGKVSMKEVEDQMRNVQNKNSSYFVEWIPNNVQTALCSIPPRGLKMSSTFVGNSTAIQELFKRIGEQFTAMFRRKAFLHWYTGEGMDEMEFTEAE

SEQ ID NO: 42122 - protein, 325 aa, Coniochaeta discoidea
PDNFVFGQSGAGNNWAKGHYTEGAELVDQVLDVVRREAEGCDCLQGFQITHSLGGGTGAGMGTLLISKIREEFPDRMMATFSVVPSPKVSDTVVEPYNATLSVHQLVENSDETFCIDNEALYDICMRTLKLSNPSYGDLNHLVSAVMSGVTTCLRFPGQLNSDLRKLAVNMVPFPRLHFFMVGFAPLTSRGAHSFRAVTVPELTQQMFDPKNMMAASDFRNGRYLTCSAIFRGKVSMKEVEDQMRNVQNKNSSYFVEWIPNNVQTALCSIPPRGLKMSSTFIGNSTAIQELFKRIGEQFTAMFRRKAFLHWYTGEGMDEMEFTEA

SEQ ID NO: 42123 - protein, 773 aa, Arabidopsis thaliana
MVKEIASWLLILSMVVFVSPVLAINGGGYPRCNCEDEGNSFWSTENILETQRVSDFLIAVAYFSIPIELLYFVSCSNVPFKWVLFEFIAFIVLCGMTHLLHGWTYSAHPFRLMMAFTVFKMLTALVSCATAITLITLIPLLLKVKVREFMLKKKAHELGREVGLILIKKETGFHVRMLTQEIRKSLDRHTILYTTLVELSKTLGLQNCAVWMPNDGGTEMDLTHELRGRGGYGGCSVSMEDLDVVRIRESDEVNVLSVDSSIARASGGGGDVSEIGAVAAIRMPMLRVSDFNGELSYAILVCVLPGGTPRDWTYQEIEIVKVVADQVTVALDHAAVLEESQLMREKLAEQNRALQMAKRDALRASQARNAFQKTMSEGMRRPMHSILGLLSMIQDEKLSDEQKMIVDTMVKTGNVMSNLVGDSMDVPDGRFGTEMKPFSLHRTIHEAACMARCLCLCNGIRFLVDAEKSLPDNVVGDERRVFQVILHIVGSLVKPRKRQEGSSLMFKVLKERGSLDRSDHRWAAWRSPASSADGDVYIRFEMNVENDDSSSQSFASVSSRDQEVGDVRFSGGYGLGQDLSFGVCKKVVQLIHGNISVVPGSDGSPETMSLLLRFRRRPSISVHGSSESPAPDHHAHPHSNSLLRGLQVLLVDTNDSNRAVTRKLLEKLGCDVTAVSSGFDCLTAIAPGSSSPSTSFQVVVLDLQMAEMDGYEVAMRIRSRSWPLIVATTVSLDEEMWDKCAQIGINGVVRKPVVLRAMESELRRVLLQADQLL

SEQ ID NO: 42124 - protein, 328 aa, Pseudohalonectria lignicola
FRPDNFVFGQSGAGNNWAKGHYTEGAELVDQVLDVVRREAEGCDCLQGFQITHSLGGGTGAGMGTLLISKIREEFPDRMMATFSVVPSPKVSDTVVEPYNATLSVHQLVENSDETFCIDNEALYDICMRTLKLSNPSYGDLNYLVSAVMSGVTTCLRFPGQLNSDLRKLAVNMVPFPRLHFFMVGFAPLTSRGAHSFRAVSVPELTQQMFDPKNMMAASDFRNGRYLTCSAIFRGKVAMKEVEDQMRNVQSKNSSYFVEWIPNNIQTALCAIPPRGLKMSSTFIGNSTSIQELFKRVGEQFTAMFRRKAFLHWYTGEGMDEMEFTEAE

SEQ ID NO: 42125 - protein, 191 aa, Brassica napus
  misc_feature (111)..(111): Xaa can be any naturally occurring amino acid
  unsure (1)..(191): unsure at all Xaa locations
ATNGSATTGQLSQKEADIKMMCAAEVHLGTKNCNYQMERYVFKRRNDGIYIFNLGKTWEKLQMAARVIVAIENPQDIIVQSARPYGQRAVLKFAQYTGANAIAGRHTPGRXVGVYVLQPIKEGALGNIPIIAFCDTDSPMRFVDIGIPANNKGKHSIGCLFWLLARMVLQMRGTIRPAQKWDVMVMRHRSL

SEQ ID NO: 42126 - protein, 428 aa, Zea mays
MPLHASPGGAPAPTPPWLVRELRSDERGLCLIHLLLNCAAAAGAGRLDAANAALEHIASLASPDGDAMQRVAAAFAEALARRALRAWPGLCRALLLPRAGPTPAELAAARRHFLDLCPFLRLAGAAANQSVLEAMESERMVHVVHLSGADAAQWVELLHLLAARPEGPPHLRLTAVHEHRDVLTQTAVALTKEAERLDVPFQFNPVVSRLEALDVESLRVKTGEALAVTSSLQLHCLLASDDDSAKDSCHQQSSGDKRQRSPESGVSPSTSRADAFLSALWGLSPKVVVVTEQEASHNAAPLTERFVEALNYYAALFDCLESAAPRGSVERARVERWLLGEEVKNIVACDGADRRERHERLDRWAARMEGAGFARVPLSYYALLQARRAAQGLGCDGFKVREEKGAFFLCWQERAIFSVSAWRGRRFD

SEQ ID NO: 42127 - protein, 314 aa, Schizothecium curvisporum
VFGQSGAGNNWAKGHYTEGAELVDQVLDVVRREAEGCDCLQGFQITHSLGGGTGAGMGTLLISKIREEFPDRMMATFSVVPSPKVSDTVVEPYNATLSVHQLVENSDETFCIDNEALYDICMRTLKLSNPSYGDLNHLVSAVMSGVTVSLRFPGQLNSDLRKLAVNMVPFPRLHFFMVGFAPLTSRGAHSFRAVSVPELTQQMFDPKNMMAASDFRNGRYLTCSAIFRGKVSMKEVEDQMRNVQNKNSSYFVEWIPNNVQTALCSIPPRGLKMSSTFVGNSTAIQELFKRIGEQFTAMFRRKAFLHWYTGEGMD

SEQ ID NO: 42128 - protein, 416 aa, Glycine max
  misc_feature (175)..(175): Xaa can be any naturally occurring amino acid
  misc_feature (184)..(184): Xaa can be any naturally occurring amino acid
  misc_feature (194)..(194): Xaa can be any naturally occurring amino acid
  unsure (1)..(416): unsure at all Xaa locations
MTDMDHSKKVADRYLKREVLGEGTYGVVFKAIDTHTGQTVAIKKIRLGKRKEGVNFTALREIKLLKELKDPNIVELIDAFPHKGNLHLVFEFMETDLEAVIRDRNIFLSPGDTKSYLQMTLKGLAYCHQKWVLHRDMKPKYLLIGSNGQLKLADFGLARMFGSPDRRFTHQVFAXRWYRAPELXFGAKQYGPGXDVWAAGCIFAELLLRRPFLQGYKGLDQLGKVFSAFGIPTAPQWPDMVYLPDYVEYQYVLAPPLRSLFPMATDDALDLLSKMFTYDPKTRISVHQALEHRYFSSAPLPSDPDKLPRPAPKRESRVSDFNSQEGPTILSPPRKSRRVMPGRDGFEGSSLQADKVDASFGDFRQTTDDNTGKNESAPMSVDFSIFGLKPPNRPTINSADRSYLKRKLDLEFQQPE

SEQ ID NO: 42129 - protein, 668 aa, Shewanella oneidensis MR-1
MKLIYTDSLVVGAGLAGLRVAIASKERGLDTLVLSLIPAKRSHSAAAQGGMQASLGNAVKGMGDDEDVHFQDTVKGSDWGCDQEVARMFAHCAPKAVRELANWGVPWSRVSAGPREVIVNAQKVTLQEAEEAHGLINARDFGGTKKWRTCYTADGTGHSLLYAMDNKAISMDIPVHERVEALALIHDGERCHGVVARCLISGELRAYVAKSTTIATGGYGRIYEVSTNAIICEGIGQALALETGVATLGNMEAVQFHPTAIVPVGILTTEGCRGDGGLLRDKDGYRFMPDYEPEKKELASRDVVSRRMTEHMRKGKGVDSPYGPHLWLDITLLGRKHIETNLREVQEICENFLGIDPAKDWIPVRPTQHYSMGGIRTKATGESPQLKGLFSVGEAACWDMHGFNRLGGNSLAETVVGGMIIGKYIADFCENNSLEINTTLAEQFMRQVQTEIDTLVDGDGHESPFELKHAMQRIMMDYVGIFRNGPELDKAVTELKALLERSRKLGIKCKKRHANPELVEALRVKRMLKVALTVACGAAARTESRGAHAREDYPQRNDRDWLNRTLASWPDANALEPVLSYEPLDVMKMELPPGYRGYGIDNAIAHPDTAKREQQIAQILAELGEDADRYQRQAALMPFELPPSLQANNERLSDTLQKPSANALGEKS

SEQ ID NO: 42130 - protein, 602 aa, Burkholderia vietnamiensis G4
MRRLLTSGSLMPSTFSRSLSLVALAVALIVPYSITNHTYPIPTFYSEFAALVLYLLVGVSVVLLARTGRPAEPFAAPAAFVAPLGFGAVLLAQVALLPLKVPSMNWLALGYLAAALVAMQAGYMLARGGLAEATARMMAGALLVGGVFAVATQIVQLFHFESALSPFVVVYSIAVDRRPYGNMAQANHLATYIAFALAGALYLVQTRRLAVWAWLALSIVLSAGLALTVSRGPWLQVAVMVVAGFWMAWVESRRAPGNRRAWLIPVVLALAFVAVNVAVRWANVHFHLGLAESAAERMRDAGQIAPRLALWKYGLAMFREHPLLGVGWGEFPSHQFALARALGGVEIANNSHDIFIDLLAKSGLVGLGVLALALVAWFVRAVRAPQSSTRVFGFALIGVLLMHALVEYPQQYMFFLLPAMFVIGLLDVKPLRWLPGRAAFALFAVLSVGGVLAAVPVLRDYQRAEVLYYGTEPAVQYRDAPSLLFGAWGDYGAATLLTISPDNLPLKLAAHERAIALLPGETVLRRYAALQALAGREADALDTVERLHVFAKELKDWPQQLALLYKLCDEQPGLKTFKAAVVAKYGEVPADAEDDDSEDDSE

SEQ ID NO: 42131 - protein, 614 aa, Oryza sativa
FARLLGGVETLGSSSPAMHPAGAVVAPAAGAPARAAPRVEKATSHLLMGPDWAVNLEICDIINADVWQTKDVVKAVKKRLQNKDPKVQFYALTLLETMMKNCGEYVQLEVAEQHVLQEMVKIIQKKNDMLVRDKILLLLDSWQEAFGGPGSKYPQYHFAYLEVKRIGAVFPRRPIDAPPIFTPPATHTSQSYGSPRYEAGSLNEIMSSDVETLSLGDLNNIRNVTELLCDMVHALNPSDHMAVKDEIITDLVSQCRSNQQKLMQFVSSTGNEQLLKQGLEINDRLQNIISKYDIMASSTHLAVEAPPADNVEAPKEDPAEKPSAPPISTLEEEEEEEDEFTRLAQRKNKSVMTSDDSLSSTGDLALVPIDMESSESSSSVASNALVPVDPALVSSSPQTKEQDMIDLLSLTLCSPTHEASTDSSTQGPNGPQQPAVTDGQHNPSGVPQFPSNHQSHPINQEYIRQNRNYVAPWAQSGQYYPAPPWAAPPSVNSNPFQSATYQEQPPPVGSVSSTYSAPSASYTSPSMAYVPPSASLPIWNGSTTSNGLSATQAQMNGNQQPPGSSAAASKPYYIPDNLFSDLIDLKGLSGGNKMGVPTSMGSANGGQPTIGGKK

SEQ ID NO: 42132 - protein, 209 aa, Zea mays
TRPGEAACASVHGANRLGANSLLDIVVFGRACANRVADISKPGEKQKPLEKDAGEKTIAWLDKLRNANGSLPTSKIRLNMQRVMQNNAAVFRTQETLEEGCELISKTWESFHDVKLSDQSLIWNSDLIETLELENLLINACITMYSAEARKESRGAHAREDFTTRDDEKWMKHSLGYWENEKVRLAYRPVHMNTLDDEVESFPPKARVY

SEQ ID NO: 42133 - protein, 371 aa, Bacteroides fragilis YCH46
MGIMVGLPTSGGTEKDLQLNFGLTVNDQVEMLAPFLPAEWFLQSGIQLTWPHAGTDWAYMLAEVQECFINIAREIAKRELLLIVTPYPEEVRKQIIGTVNMDNVRFLKCDTNDTWARDHGAITLMDTGGASLLDFTFNGWGEKFEARLDNQITRRAVEAGALKGQYKDCLNFVLEGGSIESDGVGTLLTTSECLLSPHRNSPMNRVDIEEYLCRVFHLQRVLWLDHGYLSGDDTDSHIDTLARFCSPDTIAYVKCTDSEDEHYEALCKMEEQLKTFRTTSGAPYRLLALPMADKIEVEGERLPATYANFLIMNDVVLYPTYNQPENDKLAKEVLCEAFPTYEVVGIDCRALIKQHGSLHCVTMQYPTGVIK

SEQ ID NO: 42134 - protein, 371 aa, Yarrowia lipolytica CLIB122
MSNNLASLINEELQRATPTPAQRLNVIEQAISRRVEAEYKDDIIAHMATMQQQTLPEASMMDLQPELEWHMRPYLLDFIVETHVTLRLQPQTLFLAINLIDRYCSKRVVYKKHYQLVGCTCLWIAAKYEDKKSRVPTISDLKHMCCGAYEEDMFCQMEGHVLNTLEWTVGHPTTDSYLDLFLGPESQQVTQTIRHVSRYLCEIALYPRTFFSFAPSLVASCARTLAYHILGIPCPNPNMHSSIYPSSAGGNSAEMHCLSTLAQHMQQPSRAVQKKYSRQSYCNAAQIVQSFVSQAANSNPTAIPNPATPPPTLSAPHSPASSIHTTFSEASTPSSAYFPISQQNSPANVKQHFSPQVYSMSNLSNVSVNYR

SEQ ID NO: 42135 - protein, 246 aa, Oryza sativa (japonica cultivar-group)
MFPGLIHHHRLLDADVGGGGGGSSAGLVLTADPKPRLRWTADLHDRFVDAVAQLGGPDKATPKTIMRTMGVKGLTLFHLKSHLQKYRLGKQSGKEMAEQSKDASYILGAQSGTNLSPTVPTPDLKESQELKEALRAQMEVQRKLHEQVEVQRHVQIRMEAYQNYIDTLLEKACNIVSEQLNGFSISDHDLTSAGVMLSSSDTLSPSIFHQLSVSSISLHSPGGKSSPFAADADLFFQKAPEKRKSY

SEQ ID NO: 42136 - protein, 600 aa, Schizosaccharomyces pombe
MKYVLVSGGVISGIGKGVIASSTGLLLKTLGLKVTSIKIDPYMNIDAGTMSPLEHGEVFVLNDGGEVDLDLGNYERYLNVTLTHDNNITTGKVYSNVIQKERRGDYLGKTVQIVPHVTNEIQDWVERVARIPVDQSGEEPDVCIVELGGTVGDIESAAFVEAMRQFQFRVGHENFVSIHVSLVPVINGEQKTKPTQQAIRDLRSLGITPDLIACRCKQPLEKSVIDKISLFCHVGPEQVLAVHDVSSTYHVPQLLEDKLLEYLKIRFALDKISVSRELALAGENMWSSWKHLTQGYDHLFKKVTIVLVGKYTHLQDSYISVIKALEHSAMRCGRKLDLQWVEASHLEASTNTSDPLSYHKAWHLVCSANGILVPGGFGSRGVEGMIAAAKWARENNTPYLGICLGMQVAVIEFARSVCGIEGAFSEEFDKECENNVVVYMPEIDKDKLGGTMRLGLRPTFFQPNSEWSKLRKLHKMVDEVLERHRHRYEINPAFVSRLEQGGISFIGKDERGERMEIIEKRDHPYFVGVQYHPEYLSKPLKPSPPIFGLVAASAGLLDEFIQSGEEVEWSNFSHFNAESALADMNDSVEVTEEATVVTIS

SEQ ID NO: 42137 - protein, 195 aa, Shigella flexneri
TMIAIGGSIGTGLFVASGATISQAGPGGALLSYMLIGLMVYFLMTSLGELAAYMPVSGSFATYGQNYVEEGFGFALGWNYWYNWAVTIAVDLVAAQLVMSWWFPDTPGWIWSALFLGVIFLLNYISVRGFGEAEYWFSLIKVTTVIVFIIVGVLMIIGIFKGAQPAGWSNWTIGEAPFAGGFAAMIGVAMIVGFS

SEQ ID NO: 42138 - protein, 479 aa, Pseudomonas syringae pv. phaseolicola 1448A
MSIPRMKSYFSLIAAVLMLGQVATAQAENLPDFTGLVEQASPAVVNISTRQKLPDRAIANQQMPDLEGLPPMLREFLERSMPPGSRPPGAGKGDRQRETQSLGSGFIISPDGYILTNNHVIDGADEILVRLSDRSELKAKLIGTDSRTDVAVLKIDGKDLPTAKLGNSNTLKVGEWVLAIGSPFGFDHSVTKGIVSAKGRSLPNDTYVPFIQTDVAINPGNSGGPLFNMAGEVVGINSQIFTRSGGFMGLSFAIPIDVAMDVANQLKASGKVSRGWLGVVIQEVNKDLAESFGLDKPAGALVAQVLEDGPAAKGGLQVGDVILSANGQPIIMSADLPHLIGNLKDGSKAELEVIRDGKRQKLTVTVGALPDEGQEMGDVAGTGAERSSNRLGVSVIELTAEQKKSLDLKGGVAIKEVTGGPASLIGLQPGDVITHLNNQAITSSKQFTEVAKSLPKDRSVSMRVLRQGRATFITFKLSE

SEQ ID NO: 42139 - protein, 327 aa, Arabidopsis thaliana
  misc_feature (165)..(165): Xaa can be any naturally occurring amino acid
  misc_feature (186)..(186): Xaa can be any naturally occurring amino acid
  misc_feature (249)..(249): Xaa can be any naturally occurring amino acid
  misc_feature (268)..(268): Xaa can be any naturally occurring amino acid
  unsure (1)..(327): unsure at all Xaa locations
MSFRGIVQDLRDGFGSLSRRSFDFRLSSLHKGKAQGSSFREYSSSRDLLSPVIVQTSRWANLPPELLFDVIKRLEESESNWPARKHVVACASVCRSWRAMCQEIVLGPEICGKLTFPVSLKQPGPRDAMIQCFIKRDKSKLTFHLFLCLSPALLVENGKFLLSSXRTRRTTRTEYIISMDAVYISXSSNSYLAKLISYFLGTNFLVYYTQPPPNTSSIALITDRTIPSLLSPYQLFPTFLSVIFNIAQXHLLAQRCLVHPGPLPFPCXYNSIPILSVEPIFSFPTNPSQFSCSYLFYYLFFYPPPFIFSPSPVPPSHNSRFSQCIFF

SEQ ID NO: 42140 - protein, 199 aa, Shigella flexneri
LKARHLTMIAIGGSIGTGLFVASGATISQAGPGGALLSYMLIGLMVYFLMTSLGELAAYMPVSGSFATYGQNYVEEGFGFALGWNYWYNWAVTIAVDLVAAQLVMSWWFPDTPGWIWSALFLGVIFLLNYISVRGFGEAEYWFSLIKVTTVIVFIIVGVLMIIGIFKGAQPAGWSNWTIGEAPFAGGFAAMIGVAMIVG

SEQ ID NO: 42141 - protein, 196 aa, Shigella boydii
LKARHLTMIAIGGSIGTGLFVASGATISQAGPGGALLSYMLIGLMVYFLMTSLGELAAYMPVSGSFATYGQNYVEEGFGFALGWNYWYNWAVTIAVDLVAAQLVMSWWFPDTPGWIWSALFLGVIFLLNYISVRGFGEAEYWFSLIKVTTVIVFIIVGVLMIIGIFKGAQPAGWSNWTIGEAPFAGGFAAMIGVAM

SEQ ID NO: 42142 - protein, 415 aa, Desulfovibrio vulgaris subsp. vulgaris str. Hildenborough
MTGKRVVVTGLAALTPLGNDIETSWDNLVAGKSGIGPITRFDATEYASRIAGEVKDFDPEKFMPAKQARRMDRFVQFAVATGKMLVEHSGLVIDESNADRVGVLLGVGLGGLETIEVFHTKLMEAGPNKVSPFMIPMLISNMAPGQVSIFTGARGPNVVMTSACASATHAIGYAFSEIKLGRIDAAITGGVESTITPMGVSGFTALKALSTAHNDSPEKASRPFDKERDGFVLGEGSGMLMLESLDSALARGATIYAEVVGFGASGDAYHMTAPHESGDGMALAMRNAVREAGIPVEAVDHINAHATSTHLNDLCETRAIKQVFGQHAYNIAITANKSMTGHLLGAAGGLESVFTVLTLHRGIIPGTINHETPDPECDLNYMTEGSKEMQAHYALCNSFGFGGTNASLLFKRYED

SEQ ID NO: 42143 - protein, 394 aa, Lycopersicon esculentum
MDGSAPQTDTVMSDAAAGQQPAMPPLPMAGMENIPATLSHGGRFIQYNIFGNIFEVTAKYKPPIMPIGKGAYGIVCSALNSETNEHVAIKKIANAFDNKIDAKRTLREIKLLRHMDHENIVAIRDIIPPPQREAFNDVYIAYELMDTDLHQIIRSNQGLSEEHCQYFLYQILRGLKYIHSANVLHRDLKPSNLLLNANCDLKICDFGLARVTSETDFMTEYVVTRWYRPPELLLNSSDYTAAIDVWSVGCIFMELMDRKPLFPGRDHVHQLRLLMELIGTPSEAEMEFLNENAKRYIRQLPLYRRQSFVEKFPHVNPAAIDLVEKMLTFDPRRRLTVEDALAHPYLTSLHDISDEPVCMTPFSFDFEQHALTEEQMKELIYREGLAFNPEYQHM

SEQ ID NO: 42144 - protein, 193 aa, Shigella flexneri
TMIAIGGSIGTGLFVASGATISQAGPGGALLSYMLIGLMVYFLMTSLGELAAYMPVSGSFATYGQNYVEEGFGFALGWNYWYNWAVTIAVDLVAAQLVMSWWFPDTPGWIWSALFLGVIFLLNYISVRGFGEAEYWFSLIKVTTVIVFIIVGVLMIIGIFKGAQPAGWSNWTIGEAPFAGGFAAMIGVAMIVG

SEQ ID NO: 42145 - protein, 457 aa, Campylobacter lari RM2100
MLDFLSSKKPKILVVGDFMVDHYIWCDCTRISPEAPVMVMKSQKEDKRLGGAGNVYANLKSLGAEVFALGLVGDDESGKFLKENLNAKLLIEKDRKTPLKSRVLSHSQQVLRLDDENNFDTKLEDEIIQEYKKIAKDYDAIILSDYAKGVLTSKVTKALIEHANTLNLPILIDPKGSDFSKYQNATLLTPNKKEAIQALGVEKIDNLEKALKKLKDDLNLTYSIITLSEEGIALFDEKLHIIPAKALEVYDVTGAGDSVIAMLAYALALKVDIIKACELANDAAAVVVAKVGSVSVSLEEIKNLKKASFEDKIKSKEELVKLIQNQKIVFTNGCFDIMHYGHIKYLEKAKKLGDILVVGLNSDESVKRLKGNSRPINLEFQRACMLASMYFVDYVVIFNEDTPYELIEFLKPDVLVKGADYKDKEVVGSNLVKKVELIDFEDGFSTTNIINRIANDK

SEQ ID NO: 42146 - protein, 716 aa, Trichodesmium erythraeum IMS101
MLPLLKKIGEIIANWWSEFTLQSKLMAVITLIVSLLMSSLSFWAVNTIQEDARLNDTRYGRDLGLLLAANVAPLMAEGNRNEVARFSRLFYKSTSSVRYMLYADEEGKIFLGIPFSESEVKTSLTLRRRIQLPEDFMANIEDEKYSALPLVRQHLTPNGQLTDVFVPLIDESKYLGVLAVGINPNPTVVVSSNLTRDVTLAVFVSIWAMVILGAVVHALIITKPIKKLSEGVKNIAQGNFKQRIDLSFGRELGELILSFNEMAEQLENYKKQNIEKLTAEKAKLETLVSTIADGALLLDANLQLILVNPTARRIFSWEEKKVIGGKVTDNLPVAVQMELNRPLYQIATGEIEGGEYRCTLDEPNKRTIRVLLTTVLLYRASGTESLCKSCIYDAYDSCSSANRPVVYECTLYENKLGTDFISPYRNSLKGIAMTVQDITREVELNDAKSQFISNVSHELRTPLFNIKSFIETLHEYGEDLSEVERREFLETANHETDRLTRLVNDVLDLSRLESCMIYHLNAVDVAQPIEQTLRTYHLNAKDKKIELNYDIESNLPTVVGHYDLLLQVFANLVGNAMKFTEPGGRIVIRAYLLESDIEIEQIEQGGWIVSPPPPRPTELNLKSNNQFVRIEISDTGSGIEPEDQEAIFERFFRVENRVHTLEGTGLGLSIVRNIIDKHHSKVNLVSELGVGTTFWFDLAVFEERSVPEENQLLEVP

SEQ ID NO: 42147 - protein, 348 aa, Bacillus halodurans C-125
MQALRWHGVKDVRVDDIAEPATLKGKVKIKVKWCGICGSDLHEYAAGPIFIPQNSPHSLTEEKAPIVMGHEFSGQVVEVGDGVTKCEEGDRVVVEPIFACGTCTACKQGKYNLCEQLGFLGLAGGGGGFSEYVTVDEHMVHKIPDTVSFEQGALVEPAAVALYAVRQSQFNVGDQAVVFGTGPIGLLVIEALKASGASKIYAVELSTERRQRAEQLGAIALNPAEVNVVEEIQRLTDGGADVSFEVTGVPIVLTQAIESTKLNGQTMIVSIFEKEASFQPNLVVMRERNIAGIIGYRDIFPAVISLMNQGYFSAETLVTKRIGLHDIVEQGFEALMKTNCNIKCDTTK

SEQ ID NO: 42148 - protein, 504 aa, Oryza sativa
MGLLVLKRLMSVQQERRHIQARMAKRKGSVCLQLANSEGGKIMGYSGLNLPEDIWSHIHSLMPLRDAARAACVSRAFRSFWRYHPNLIFRIETPDLNFIKKVDCILKNHSGIGIKSLRFESGIFYNASTSYYLDSWLQIAVTPLIEELTLGILSYNTNYFDSKYDDEYNFPCSLLSDGRGSSMRHLYLSRCSFHPTINLELRNLTRLHLAFVHITGNELGCVLSNSYALERLELNYCYGIICVKIPCLLQRLSHLEVFECRMLQVIENSAPNLGSFHFGINHVQLLLGESLQMKSLSMCYPGAVYYACAELPSNVPNLETLTIGSPHEMVDTPMLPSKFLHLKCLTISLVGMVTFSPAYDYFSLVSFLDASPSLETFFLDVSQERMGHVSIFGDSLQLRQMPEHHRHGNLQSVKITGFCSAKSLIELTCYILDNTTSLKCLTLDTTRGVSSCSTGEHKKCFPIGKMLTEANRAVLAIETFIERKVPSTVKLAVTKPCSRCHVKS

SEQ ID NO: 42149 - protein, 817 aa, ASPERGILLUS NIDULANS FGSC A4
MAGGTSLWVSKEARTDPREIFNLRHLYLMVTLAWAGCFYGFDTGNIGGILTLPSFETAFGLIDLPQKEYDDRKGTIAAMVAAGGAGGSLLAAPTSDVLGRKWSVFLWGLVFMLGAALQMVPNYDILLAGRFIGGLGVGASSMLSPQFLAENSPKSVRGSMTATYNLMIVTSLMLAFWWRTAMSIQLIPGGLMVLMIPFVPETPRYLINHGKAEQGVKNLCQLRKLPPDHPYIQLEFHEIQAQVQFEQETFQGHSYWVVLKDIFGNRSNLQRFVLALLLFIFHKLTGTDSLNYYAPQIFELIGVKDNSSLLTTGVYGAVKVAATIFYVTYLVDRVGRRLPLLMGATIQATAMLYLALYLRFAGTDNTDMGGTPAGGIVGIIWIYLYAFGWSFGHSVACYIVAAEIFPTRIRSACMGFCFFTNWIIDYGITRATPNMLTNMGYGAFLLYALLTYLGVVFIFFCLPELKGRSIESMDDLFQRPLWTLWRHAYPTAEETIIMQFLGFEHLSWYQPQEYPGKPRKMATDSFILNTGARIPAVGFGTWKAGPGEAAAAVQAAFDAGYRHFDCAPLYGNEAEIGQVFKNTKVPREGYFVTTKLWSSDHRRVEFALDKSLRDLNLMHWPVTLDPSPGDVNYGKEDRTVHATGWDFRDTWREMEKLLDTGKVKTIGVANFSTVNLRKLLETSRITPAVNQTEIQPLLPQEKLHAFCKEKGIHQTAFGPLGGSVSTLHQHPVINAIARKRGCETGNVMLSWGIQKGWSVIPKSTNPVRIKKNLSQNFVLDEQEMKDMDGLAKPKGKRFNRPNWGTVIFHDDVDVDLE

SEQ ID NO: 42150 - protein, 483 aa, Campylobacter lari RM2100
MLKKTKIVATIGPASENEATIRQMIINGVNVFRLNFSHGTHEYHSQNLATIRKVAAELNARIGILQDISGPKIRTLKIPETFELKNGDRLDFYKDTFEGEKLSSEHYKVCINHPEILSMLKVGEYIYLCDGSIKTKVVQVEKDFIQTQVENSGVLSSNKGINFPNTKINIDVITQKDKDDLAWGIKNDVDFLAISFVQNAHDIDEVKKILDENDAKIAIFAKIEKFDAVENIDEIINCSDGIMVARGDLGIEVPYYRVPNIQKLIIKKANEANKPVITATQMLFSLAKSKTATRAEISDVANAVLDGTDAVMLSEESAVGIDPANAVDIMTQTIIETEKNYPYEKFETFKCFNETDIIAKSSTQLATDLNANAIFTITSSGASAVKTARYRPKMDIIAITHSKKALNFLSIVWGVQPAILIEKHENLTELLSNSVKLGVEKGLMKKDGVYTLTAGFPVGVAGSTNLIRILQKDQIEYYLSLGK

SEQ ID NO: 42151 - protein, 509 aa, Prunus cerasus
MTDRRAQDNAVSGQPLLKKKPKRNLYAIGCAILASMTSILLGYDIGVMSGASIYIQKDLKISDVEVEILIGILNLYSLIGSAAAGRTSDWIGRRYTIVFAGAIFFTGALLMGLATNYAFLMVGRFVAGIGVGYALMIAPVYNAEVSPASSRGALTSFPEVFVNIGILLGYVANYAFSGLPIDLGWRLMLGVGVFPSVILAVGVLSMPESPRWLVMQGRLGEAKQVLDKTSDSLEEAQLRLADIKEAAGIPEHCVEDVVQVPKHSHGEEVWKELLLHPTPPVRHILIAAIGFHFFQQLSGIDALVLYSPRIFEKAGITDSSTLLLATVAVGFSKTIFTLVAIGFLDRVGRRPLLLTSVAGMIASLLCLGTSLTIVDHETEKMMWASVLCLTMVLAYVGFFSIGMGPIAWVYSSEIFPLKLRAQGCSMGTAVNRIMSGVLSMSFISLYKAITMGGTFFLYAGIATVGWVFFYTMLPETQGRTLEDMEVLFGKFWRWREGYALLRNKRAVVC

SEQ ID NO: 42152 - protein, 97 aa, Wigglesworthia glossinidia
MKIRPLHDRVIIKRKEAESKSAGGIVLTGSAAGKSTRGKVLAVGNGRILDNGETKPLDVKIGDIVIFNDGYGVKVEKIDNDEVLIMSESDILAIVEK

SEQ ID NO: 42153 - protein, 546 aa, Wigglesworthia glossinidia
MAAKDVKFGNDARSKMLRGVNVLADAVKVTLGPKGRNVVLDKSFGSPMITKDGVSVAREVELEDKFENMGAQMLKEVASKANDAAGDGTTTATVLAQSIVNEGLKAVAAGMNPMDLKRGIDKAVIGAVAELKKLSVPCSDSKSIAQVGTISANADKTVGTLIAEAMEKVGKEGVITVEEGSGLQDELDVVEGMQFDRGYLSPYFVNKPEARSVELDNPFILLSDKKISNIREMLPILESVAKAGKPLLIIAEDVEGEALATLVVNNMRGIVKVAAVKAPGFGDRRKAMLQDIAILTSGTVISEEMGLDLEKSTLEDMGQAKRVVITKDTTTIIDGTGNKSMISSRVSQINQERDEATSDYDKEKLQERVAKLAGGVAVIKVGAATEVEMKEKKARVEDALHATRAAVEEGVVAGGGVALIRVANRIVNLRGENEDQNVGIRVARRAMEAPLRQIVANAGEEPSVIANKVKAGEGNTGYNAATEVYGNMIDMGILDPTKVTRSALQYAASIAGLMITTECMITDLPKEEKPDLSGAGAGMGGMGGMM

SEQ ID NO: 42154 - protein, 451 aa, Buchnera aphidicola str. Bp (Baizongia pistaciae)
MKKHLHEIKMLLKITIPIFLAQISQTSMSLINSIMIGHLKENNIAAISVGISIWSPIILFGHGLLLSLVPTVSRIHGSGKINKIPEQINNAYWLATLISLVIMIVLWNSDVIIHTISQVNPIIEQESIKYIRILLWSTPGYLYFQVIQNQCEGLLKPKPAMVIGLIGLLFNIVVSYTLISEKFHCFNYGSTGCGISAIIVYWFMFIAMKKITKNDILINYNIKNKNISNLEMYLPNYKIIWNLFKMGFPIALSLFCEITLFTLITLLIASMETFQIIAHQIALNISSTIFILPLSIATAASIRLGFYLGKKSFSKISTIILSSQIIGLIISTTISTFIILFHYQIITLYTKNANIIKLTKQMLFITASYQIFDFFQIIGNGILRSYKDTNIIFIITCTSYWIVGFPFGYFLALTNYIVPHMGAIGFWYGILIALITSSIMILFRIYILQKK

SEQ ID NO: 42155 - protein, 522 aa, Kineococcus radiotolerans SRS30216
MTWAPGLGTPGRAGAGRVAVRWTSRSWRAPPAGPGAGPNRLGVMRRAKIVCTLGPAVAGHDGLRSLVDAGMDVARLNLSHGSHDDHRANFEGVRAAAAATGRSVAILADLQGPKIRLGRFADGPHDLAVGDVFTITTEDVVGTREICSTTYAGLPGDVSVGDAILIDDGKVGLVVTAVEGPRVTTLVTVPGPVSNNKGINLPGVAVSVPALSEKDVEDLRFALRLGVDMVALSFVRSAADADDVHKVMDEEGITVPVIAKVEKPQAVQNLREVVAAFDGIMVARGDLGVELPLEEVPLVQKLAIELARRQAKPVIVATQMLESMITAPRPTRAEASDCANAVLDGADALMLSGETSVGAFPYEAVRTMARIIENTETHGAERIAALGTVPHTKGGAITLAAAEVGKQLDAKLLVTFTQSGDSARRLSRLRSGIPLLAFTPDEATRRRLALSWGIEPEFAAFISTTDEMVKEVDRRLQEMGRCAVGDLVVIVAGAPPGIVGSTNALRVHRIGDATSGMSAAYA

SEQ ID NO: 42156 - protein, 409 aa, Photobacterium profundum SS9
MTSLYCHRIKSSQSNNVKYKESVMSAIAVTDSQKDKKALNGAGLRGQSAGTTSLCTVGQSGTGLTYRGYDITDLAHHAEFEEVAYLLLKGQLPTQRELDNYKQALQTARGLPSALCLVLEAIPASAHPMDVMRTGCSMLGNLDQEYDFSEQGDKTDTLLALLPAIICYWYRYSHHGVRINTANSTQDSIGGYFLEMLTDEAPSELYKKVMHCSLVLYAEHEFNASTFTARVCASTLSDLHSCITAAIGSLRGPLHGGANEAAMAMIEQWQSAEQAEAGTLEMLANKDKIMGFGHAIYRESDPRNALIKEWSRKLSQDVNDTHLFEVSEKVEQIMKREKGLFPNADFFHASAYHFMGIPTKLFTPIFVMSRVTGWAAHVFEQRENNRIIRPSADYQGPEHQDWLPIEQRL

SEQ ID NO: 42157 - protein, 327 aa, Sordaria fimicola
RPDNFVFGQSGAGNNWAKGHYTEGAELVDQVLDVVRREAEGCDCLQGFQITHSLGGGTGAGMGTLLISKIREEFPDRMMATFSVVPSPKVSDTVVEPYNATLSVHQLVENSDETFCIDNEALYDICMRTLKLSNPSYGDLNHLVSAVMSGVTVSLRFPGQLNSDLRKLAVNMVPFPRLHFFMVGFAPLTSRGAHHFRAVSVPELTQQMFDPKNMMAASDFRNGRYLTCSAIFRGKVSMKEVEDQMRNVQNKNSSYFVEWIPNNVQTALCSIPPRGLKMSSTFVGNSTAIQELFKRIGEQFTAMFRRKAFLHWYTGEGMDEMEFTEAE

SEQ ID NO: 42158 - protein, 589 aa, Arabidopsis thaliana
  misc_feature (262)..(262): Xaa can be any naturally occurring amino acid
  unsure (1)..(589): unsure at all Xaa locations
MSYDEHTSSSFTYISQMGVWWIVLVVAVLTHTASAAVREYHWEVEYKYWSPDCKEGAVMTVNGEFPGPTIKAFAGDTIVVNLTNKLTTEGLVIHWHGIRQFGSPWADGAAGVTQCAINPGETFTYNFTVEKPGTHFYHGHYGMQRSAGLYGSLIVDVAKGKSERLRYDGEFNLLLSDWWHEAIPSQELGLSSKPMRWIGEAQSILINGRGQFNCSLAAQFSNNTSLPMCTFKEGDQCAPQILHVEPNKTYRIRLSSTTALAXSLNLAVQGHKLVVVEADGNYITPFTTDDIDIYSGESYSVLLTTDQDPSQNYYISVGVRGRKPNTTQALTILNYVTAPASKLPSSPPPVTPRWDDFERSKNFSKKIFSAMGSPSPPKKYRKRLILLNTQNLIDGYTKWAINNVSLVTPATPYLGSVKYNLKLGFNRKSPPRSYRMDYDIMNPPPFPNTTTGNGIYVFPFNVTVDVIIQNANVLKGIVSEIHPWHLHGHDFWVLGYGDGKFKPGIDEKTYNLKNPPLRNTAILYPYGWTAIRFVTDNPGVWFFHCHIEPHLHMGMGVVFAEGLNRIGKVPDEALGCGLTKQFLMNRNRN

SEQ ID NO: 42159 - protein, 553 aa, Arabidopsis thaliana
MKYVVVSGGVVSGLGKGVTASSIGLILKSCGFRVTAIKIDPYLNIDAGTMSPIEHGEVYVLDDGGEVDLDLGNYERFMDIKLTSENNITTGKVYKHVLEKERRGDYLGKTVQVVPHITDAIQKWIERAARIPVDGQSGPADVCVIELGGTIGDIESMPFIEALGQFSYRVGTDNFCLIHVSLVPVLNVKTKPTQHSVRDLRGLGLSPNILACRSTKPLEDNVKAKLSQFCHVPMENVVTLYDCPNIWHIPLLLKVSNFLIHHSFKVSEPALEEWSLMAKMTDKLHVPVRIAVVGKYTELLDSYLSIHKALLHASVARRKKLIIDWISASDLEQGAKKENPDAYKAAWKLLKGADGVLVPGGFGSRGVEGKMLAAKYARENRIPYLGICLGMQLAVIEYARTILGLADANSTELDPNTKNPCVIFMPEGSKTHMGGTMRLGSRRTYFHSKDSKSARLYGNKSFVDERHRHRYEVNPAMVPRFESSGLTFTGKDETGQRMEIIELPNHPFYVGAQFHPEYKSRPGKPSPLFLGEEKHKNNAKALGFFLRVSTYLN

SEQ ID NO: 42160 - protein, 267 aa, Salmonella typhimurium LT2
MTIPAFGLGTFRLKDDVVIASVKTALELGYRAVDTAQIYDNEAAVGQAIAESGVPRNELYITTKIWIENLSKDKLIPSLKESLKKLRTDYVDLTLIHWPSPGDAVSVEEFMQALLEAKKQGLTREIGISNFTIPLMEKAIAAVGADNIATNQIELSPYLQNRKVVDWAKAHGIHITSYMTLAYGKALKDEVIARIAAKHNATPAQVILAWAMGEGYSVIPSSTRRENLASSLLAQDLHLDAEDKNAIAALDCNDRLVSPEGLAPAWD

SEQ ID NO: 42161 - protein, 328 aa, Sordaria macrospora
FRPDNFVFGQSGAGNNWAKGHYTEGAELVDQVLDVVRREAEGCDCLQGFQITHSLGGGTGAGMGTLLISKIREEFPDRMMATFSVVPSPKVSDTVVEPYNATLSVHQLVENSDETFCIDNEALYDICMRTLKLSNPSYGDLNHLVSAVMSGVTVSLRFPGQLNSDLRKLAVNMVPFPRLHFFMVGFAPLTSRGAHHFRAVSVPELTQQMFDPKNMMAASDFRNGRYLTCSAIFRGKVSMKEVEDQMRNVQNKNSSYFVEWIPNNVQTALCSIPPRGLKMSSTFVGNSTAIQELFKRIGEQFTAMFRRKAFLHWYTGEGMDEMEFTEAE

SEQ ID NO: 42162 - protein, 128 aa, Glycine max
NQGSNCLSEDEQKKKQEQRLQLNGGRNLGGMVAGRCQTDGESCCQDNEDSCCCQNDVFEEMTELSADNKRENVNVISRINKGKGALRKFSSMPTWLDSWEQEDTYAALAVVCAAVSVAIAYSCYKQLR

SEQ ID NO: 42163 - protein, 430 aa, Oryza sativa (japonica cultivar-group)
MESGGAGGEGETAGWRFGAANPALAVAGSQSIRAAVTRIYRCLDGSGDARPVAPLAHGDPSAFACFRAAPAATDAVAAAAASGKYNYYSPAVGIAPACSAVAAHLSRELPYAVSPADVVLTAGCNHAVEIMMSVLASPGANVLLPRPGYPLYASRAALSGLEFRHFDLLPDSEWEVDLAGVEALADANTVAMVIVNPNNPCGCVYSRDHLAKIAETARKLGIMVISDEVYDHFAFGSKPFVPMGVFGDVAPVMTLGGISKRWMVPGWRLGWIAATDPNGILRNKKIIDSVIDYRAISVDPVTFVQGALPDILAKTDDAFFTNALGVVKKAAEICYEKLKEIDCITCPHKPEGSMFVMAKLDLSSLDGIEDDVDFCSKLAKEESVVICPGSGLGMKNWLRITFAVDPQLLEDGLERTKCFCKRHGKIKEAS

SEQ ID NO: 42164 - protein, 78 aa, Zea mays
  misc_feature (31)..(31): Xaa can be any naturally occurring amino acid
  misc_feature (47)..(47): Xaa can be any naturally occurring amino acid
  unsure (1)..(78): unsure at all Xaa locations
IVQLAHLIGMTHGQSLDVSNAVFQVIKYLPXCPVQQIVPYLIRRATXNSGLLSASSLDRQLLREKLVSRFKGAVFERE

SEQ ID NO: 42165 - protein, 265 aa, Kineococcus radiotolerans SRS30216
MTTASTQEAPTSRRLPGRVAVVTGGGSGIGLATVRRLASEGAHVVVADVDATAGEAAAAEVGGLFVGTDVTDAVQVEELFATAHRTYGSVDVAFNNAGISPPEDDSILTTGLEAWQRVQEVNLTSVYLCCKAALPYMRAQGRGSIVNTASFVAVMGSATSQISYTASKGGVLALSRELGVQFARDGVRVNALCPGPVNTPLLRELFAADPERAARRLVHVPVGRFAEPEELAAAVAFLASDDSSFITASTFLVDGGISSAYVTPL

SEQ ID NO: 42166 - protein, 328 aa, Strattonia carbonaria
FRSDNFVFGQSGAGNNWAKGHYTEGAELVDQVLDVVRREAEGCDCLQGFQITHSLGGGTGAGMGTLLISKIREEFPDRMMATFSVVPSPKVSDTVVEPYNATLSVHQLVENSDETFCIDNEALYDICMRTLKLSNPSYGDLNHLVSAVMSGVTVSLRFPGQLNSDLRKLAVNMVPFPRLHFFMVGFAPLTSRGAHSFRAVSVPELTQQMFDPKNMMAASDFRNGRYLTCSAIFRGKVSMKEVEDQMRNVQNKNSSYFVEWIPNNVQTALCSIPPRGLKMSSTFVGNSTAIQELFKRIGEQFTAMFRRKAFLHWYTGEGMDEMEFTEAE

SEQ ID NO: 42167 - protein, 414 aa, Xanthomonas axonopodis pv. citri str. 306 [sequence omitted]

SEQ ID NO: 42168 - protein, 322 aa, Triangularia mangenotii
GFGQSGAGNNWAKGHYTEGAELVDQVLDVVRREAEGCDCLQGFQITHSLGGGTGAGMGTLLISKIREEFPDRMMATFSVVPSPKVSDTVVEPYNATLSVHQLVENSDETFCIDNEALYDICMRTLKLSNPSYGDLNHLVSAVMSGVTVSLRFPGQLNSDLRKLAVNMVPFPRLHFFMVGFAPLTSRGAHSFRAVSVPELTQQMFDPKNMMAASDFRNGRYLTCSAIFRGKVSMKEVEDQMRNVQNKNSSYFVEWIPNNVQTALCSIPPRGLKMSSTFVGNSTAIQELFKRIGEQFTAMFRRKAFLHWYTGEGMDEMEFTEAE

SEQ ID NO: 42169 - protein, 484 aa, Sinorhizobium meliloti
MSTIKAPRPSLKTVLKTTTVAGLAAVPVTTGLPAEVAQSFAEAVRVQAPAVAVSPMWSTPFRRRSSPSACRHVNASATMKATSPSISAAAGSRTCRKTIRCGVSSANSLRVKMTVPIVGATAAVRVAKVVSVRGRKAPASSSPKTVTSSPTTTSSPTARTFTVIMNDGTELDAKLVGKDSRTDLAVLKVDDKRKFTYVSFADDEKVRVGDWVVAVGNPFGLGGTVTAGIISARGRDIGSGPYDDYLQVDAAVNRGNSGGPTFNLSGEVVGINTAIFSPSGGNVGIAFAIPASVAKDVVDSLIKDGTVSRGWLGVQIQPVTKDIAESLGLSEANGALVVEPQAGSPGEKAGIKNGDVVTALNGEPVKDPRDLARRVAALRPGSTAEVTLWRSGKSETVNLEIGTLPSDAKEPAPATGEAQPDEGQAGEEALADLGLTVTPSEDGKGVTIASVDPDSDAGDRGLKEGEKIVSVNNQEVNRQTTFSR

SEQ ID NO: 42170 - protein, 484 aa, Haloarcula marismortui ATCC 43049
MTHTSDYDLVILGGGAAAFAAITEASRRDLSTAMVNTGLPIGGTCVNVGCVPSKHLLAVAESGAAASENPFDAVRYPEEPTVDWAAALNDTDELVERFRQENYVDIAEHFEIDIYEGYGQLVDDTTIEVVDGADEGARITGEKALVATGSSPWAPPIDGLYDVDYYTSETILEERDLPESILMLGGGYIALEWGQILHRVGIDVTVLQRSDRVLSDMEGQLGREMQRAFEEEGIEVITGNDFQRVRTLAADGGAEAIQSGVAVETTIDGDERTVTGDALFVATGVQPNSEGIGLETVGIETNPDGTIRVDEYFQTTNPDIYAAGDVIGEPELETVAAKEGNHAVKNAFGNEGVSIDYDAVPAVVFTSPEVAAVGTTELEYMDEHGTCSCRTVQMADVPRAKAVENTDGLVQVVKHHETDEIVGVHMVGPRAADMIMEATLAVTFGLTVDDIIDTVHPFPTFSEAFKQACQAFRRDISMMSCCIE

SEQ ID NO: 42171 - protein, 75 aa, Lactobacillus delbrueckii subsp. lactis
  misc_feature (1)..(1): Xaa can be any naturally occurring amino acid
  unsure (1)..(75): unsure at all Xaa locations
XAAGPDDFDTEFLDYIMAIKVVDGIEEAIDHIAKHSTHHSEAIVTEDQAAADRFTQAVDSAAVYVNASTRFTDGG

SEQ ID NO: 42172 - protein, 566 aa, Burkholderia vietnamiensis G4
MTKAARSATAEQRAGAGKRKRAPARADTTPRAAAAAGDAVVQHHEIQNKAMPGASTGTLPGTAAAGLADSGSRSVSPSASTLIQMRSFMQRATKIVATIGPASSSPEILLQMMQAGLDVVRLNFSHGTADDHRQRAEMVREAARKVGREIAIMADLQGPKIRVGKFENGKTTLAPGQAFILDAGCELGNDERVGLDYKELPRDLKPGDLLLLNDGLIVLTVERVLGEEIHTIVKVGGELSNNKGINRQGGGLSAPALTAKDMEDIRTAMSLGADLVAVSFPKNATDMEMARQLANIAGAPYGIKPKMIAKIERAEAIPALQSILDASDGIMVARGDLAVEVGNAAVPALQKRMIRMARESNKLVITATQMMESMIHAPVPTRAEVSDVANAVLDGTDAVMLSAETAAGKYPVVTIETMAAVCVEAEKSEHVELDKDFLDRTFTRIDQSIAMGALFTAYHLGAKAIVALTESGATALWMSRHYTHVPIFALTPRVGSERTMALYRNVTPLHVDFNSDRDAALQAALEMIVKQGYVQHGDMVVLTVGEPMGQAGGTNTLKIVRVGEHY

SEQ ID NO: 42173 - protein, 390 aa, Thlaspi goesingense
MESSSHIIEVNGGRSDEERRVVASKVCGEAPCGFSDAKNASGDAQERNASMRKLCIAVVLCLVFMSVEVVGGVKANSLAIMTDAAHLLSDVAAFAISLFSLWAAGWEATPRQTYGFFRIEILGALVSIQLIWLLTGILVYEAIIRLLTETSEVNGFLMFAVATFGLLVNIVMAVMLGHDHGHSHGHGHDHGNHSHDVTVTTHDHDHDHDHDDGHGHSHGEDKHDEAHGDVTEQLLEKPKQEKEKKKRNINVQGAYLHVLGDSIQSVGVMIGGAAIWYNPKWKIIDLICTLVFSVIVLGTTINMIRSILEVLMESTPREIDATKLEKGLLEMEEVVAVHELHIWAITVGKVLLACHVNARPDADADMVLNKVVDYIRREYNISHVTIQIER

SEQ ID NO: 42174 - protein, 336 aa, Bartonella schoenbuchensis
STASCESKITYIDGDEGVLLYHGYSIDQLAENGDFLEVCYLLLYGELPTKQEKDDFDRRIMHHTMVHEQFSRFFHGFRRDSHPMAVMVACLGAMSAFYHDSIDITDAKQRMIASIRLIAKVPTLAAMAYKYSIGQPFVYPRNDLGYAANFLHMCFSVPCEEYKVNPVLARAMDRIFTLHADHEQNASTSPVRLAGSSGANPFACIAAGVACLWGPAHGGANEACLKMLQEIGSIEKIREFIARAKDKNDPFRLMGFGHRVYKNYDPRAKLMQKTCHEVLKELNIKDDPLLDIAMELEKIALSDEYFIEKKLYPNVDFYSGITLKALGFPTEMFTVL

SEQ ID NO: 42175 - protein, 396 aa, Thlaspi goesingense
MESSSHIIEVNGGRSDEERRVVASKVCGEAPCGFSDAKNASGDAQERNVSMRKLCIAVVLCLVFMSVEVVGGIKANSLAIMTDAAHLLSDVAAFAISLFSLWAAGWEATPRQTYGFFRIEILGALVSIQLIWLLTGILVYEAIIRLLTETSEVNGFLMFAVATFGLLVNIIMAVMLGHDHGHSHGHGHGHDHGNHSHDVTVTTHDHDPTHDHDHDHDDGHGHSHGEDKHDEAHGDVTEQLLEKPKQQKEKKKRNINVQGAYLHVLGDSIQSVGVMIGGAAIWYNPKWKIIDLICTLVFSVIVLGTTINMIRSILEVLMESTPREIDATKLEKGLLEMEEVVAVHELHIWAITVGKVLLACHVNARPDADADMVLNKVVDYIRREYNISHVTIQIER

SEQ ID NO: 42176 - protein, 337 aa, Bartonella schoenbuchensis
STASCESKITYIDGDEGVLLYHGYSIDQLAENGDFLEVCYLLLYGELPTKQEKDDFDRRIMHHTMVHEQFSRFFHGFRRDSHPMAVMVACLGAMSAFYHDSIDITDAKQRMIASIRLIAKVPTLAAMAYKYSIGQPFVYPRNDLSYAANFLHMCFSVPCEEYKVNPVLARAMDRIFTLHADHEQNASTSTVRLAGSSGANPFACIAAGVACLWGPAHGGANEACLKMLQEIGSIEKIPEFIARAKDKNDPFRLMGFGHRVYKNYDPRAKLMQKTCHEVLKELNIKDDPLLDIAMELEKIALSDEYFIEKKLYPNVDFYSGITLKALGFPTEMFTVLF

SEQ ID NO: 42177 - protein, 409 aa, Schizosaccharomyces pombe
MSDYGFANIEEAKADAIFKLNAQYHQDEDPKKVNMSVGAYRDDTGKPWILPAVKKASKIVEEQASFNHEYLPIAGLPRFTKAAAEVLFRPNPHLLSEDRVASMQSVSGTGANFLAASFIETFYVKHTGAHVYISNPTWPVHRTLWEKLGVTVDTYPYWDAKNRSFDYEGMLSTIKSAPEGSIFLLHACAHNPTGIDPTREQWLSIFESLLSRKHLVVFDIAYQGFASGDLNRDSWALNEFVKYNKDFFVCQSFAKNMGLYGERTGCMHYVAKDASTKNKVLSQLCIVQRNTISNPPAYGARIAAEILNSPQLFAEWEQDLKTMSSRIIEMRKRLRDSLVALKTPGSWDHITQQIGMFSFTGLTPAQVQFCQERYHLYFSANGRISMAGLNNSNVEHVAQAFNHAVRELP

SEQ ID NO: 42178 - protein, 530 aa, Pyrobaculum aerophilum str. IM2
MPKLIIVTGGVMSGVGKGVVVASIGRILRARGLSVNAVKIDPYINVDAGTMNPYAHGEVFVTYDGGETDLDLGHYERFLDVELSKRNNITSGQIYLTVIEKERRGEYLGQTVQLIPHVTDEIKRRIVEASGGYDVTLVEIGGTVGDYEQLPFLEAARQLGLELGEDVVFIHVAWVPLLKITGEFKTKPLQHSVAELRRYGIQPDAVVVRSEKPIDANSIKKIALFAHVPQWAIFNSYDVDTIYRVPLILEQQGLGDFLTRRLRLPSRSPEYRDWEEFLSKLSAPKYRISVGMCGKYVELPDAYLSIVEALKHAGAALDARPELVWINSVEVEKNPDILRKLDLDAIVVLPGFGKRGTEGMIECIRHARMEKIPFLGICFGMQLAVVEFARNVLGLKGANSTELDPETPHPVVHLAPEQREVDVLGGSMILGNREVEIVPGTLAASLYGVSVITERHRHRYEVNLSYLPKFTEAGLVVSGWRRDIKRVEIIELPGHPYFIATQFHPEFKSRPAKPRPVFLGLLKAALFAKR

SEQ ID NO: 42179 - protein, 204 aa, Shigella boydii
RRELKARHLTMIAIGGSIGTGLFVASGATISQAGPGGALLSYILIGLMVYFLMTSLGELAAYMPVSGSFATYGQNYVEEGFGFALGWNYWYNWAVTIAVDLVAAQLVMSWWFPDTPGWIWSALFLGIIFLLNYISVRGFGEAEYWFSLIKVATVIIFIVVGVMMIIGIFKGAQPAGWSNWTIGEAPFAGGFAAMIGVAMIVGFS

SEQ ID NO: 42180 - protein, 535 aa, Schizosaccharomyces pombe
MLTSWRTISLLQKTTSRFIKRSKTYADVRYNSQALQNHGVPGNKRKWMKRFVFVGAAGIGVYAWDRVYNAHALTRSIRTVYTASIIAADYKLNFSEKKADKIDALHQRVAQRLFKTIYKNGGLYIKMGQIIAMQSNNLPEAYGKAFQGMFDNAPQVEWEELQDIFKEQYGRPVEEVFASIEKRAAASASIAQVHRAVLPSGEKVAVKIQKPDVAKQMSWDLLVYKYMMYVYDKWIFHIPLYFTVDYVSERLRSEVDFTTEANNSEHAREGVEETDYLRDKIYIPKVYKEISGKRVMVTEWADGIPLYDQTALSEAGMSKKEILTNLFRFLAFQMFHSKQVHCDPHPGNILVRKNQAGLCQTVILDHGLYVFESEKFRKEFALLFTAAYSLDKKSILQVMDAWGIGQPELFANRMLNIPMDEEQPHTGEKIISKKEAFQQQLAERKKFIGFLQDCTRLPKELLMLGRCLMLIQKNNQNFGYPVNSIAVMAKVADKYTTDKPSPTWYQRLLSPIFWVFQHLFYPGNFRLPELTNDKK

SEQ ID NO: 42181 - protein, 324 aa, Bartonella schoenbuchensis
STASCESKITYIDGDEGVLLYHGYSIDQLAENGDFLEVCYLLLYGELPTKQEKDDFDRRIMHHTMVHEQFSRFFHGFRRDSHPMAVMVACLGAMSAFYHDSIDITDAKQRMIASIRLIAKVPTLAAMAYKYSIGQPFVYPRNDLSYAANFLHMCFSVPCEEYKVNPVLARAMDRIFTLHADHEQNASTSTVRLAGSSGANPFACIAAGVACLWGPAHGGANEACLKMLQEIGSIEKIPEFIARAKDKNDPFRLMGFGHRVYKNYDPRAKLMQKTCHEVLKELNIKDDPLLDIAMELEKIALSDEYFIEKKLYPNVDFYSGITLK

SEQ ID NO: 42182 - protein, 468 aa, Pyrococcus horikoshii OT3
MGARDVIYAMEKWFPEVERPKKHVPLKEKFVWTGLALVLYYVLAEIPVYGIPKKIQDYFQFLRVVLAGRNGSILTLGIGPIVTAGIILQLLVGSELIRLDLANPEDRRFYQALQRVFSVFMCFFEAAIWVLGGAFGRVGVDVTYTIATLMIIQLALGGIILIVLDELVSKWGIGSGISLFIAAGVSQRILTRSLNPLTDPNIIDPLTGKPAIVGAIPYFIQHILDGDLKGALYRGGSAPDMIAVTATIIVFLVVVYFESMRVEIPLGYRGVTIRGRYPIKFLYVSNIPIILTFALYANIQLWARVLDRFGHPWLGRFDPVTGNPIGGFVLYVIPPRNIFTVIDNPVRAIIYLILTIIFSLLFGFLWVELTGLDARTIARQLQRAGLQIPGFRRDPRTLERVLQKYIPYVTFWGSLTVALISVLADFLGALGTGTGILLTVGILYRFYEEIAREQITEMFPALRRLFKG

SEQ ID NO: 42183 - protein, 318 aa, Bartonella schoenbuchensis
  misc_feature (25)..(25): Xaa can be any naturally occurring amino acid
  unsure (1)..(318): unsure at all Xaa locations
KITYIDGDEGVLLYHGYSIDQLAEXGDFLEVCYLLLYGELPTKQEKDDFDRRIMHHTMVHEQFSRFFHGFRRDSHPMAVMVACLGAMSAFYHDSIDITDAKQRMIASIRLIAKVPTLAAMAYKYSIGQPFVYPRNDLSYAANFLHMCFSVPCEEYKVNPVLARAMDRIFTLHADHEQNASTSTVRLAGSSGANPFACIAAGVACLWGPAHGGANEACLKMLQEIGSIEKIPEFIARAKDKNDPFRLMGFGHRVYKNYDPRAKLMQKTCHEVLKELNIKDDPLLDIAMELEKIALSDEYFIEKKLYPNVDFYSGITLKA

SEQ ID NO: 42184 - protein, 195 aa, Shigella dysenteriae
HLTMIAIGGSIGTGLFVASGATISQAGPGGALLSYMLIGLMVYFLMTSLGELAAYMPVSGSFATYGQNYVEEGFGFALGWNYWYNWAVTIAVDLVAAQLVMSWWFPDTPGWIWSALFLGVIFLLNYISVRGFGEAEYWFSLIKVTTVIVFIIVGVLMIIGIFKGAQPAGWSNWTIGEAPFAGGFAAMIGVAMIVG

SEQ ID NO: 42185 - protein, 385 aa, Erwinia carotovora subsp. atroseptica SCRI1043
MSWQQRIEAALVQRQHDDAYRVRQSNQGGSGRWLIQGDRCYLNFSSNDYLGLSHHPEIVRAWQQGAEQYGIGSGGSGHVTGYTDAHASLENQLADWLGYPRALLFISGYAANQAVVAALAQAEDRIFADKLSHASLLEAAAQSPATLRRFKHNQADSLQALLEKPTDGQTLVVTEGVFSMDGDTAPLPALQAQCRAHDAWLMVDDAHGIGVLGDEGRGSCWQQDIKPELLIVTFGKAFGVSGAAVLCTEPLAEYFLQFARHLIYSTSMPAAQACALSAAVNCVRQGGARRDALRRNIALFRAGFSNSSYQLMNSQSAIQPLIVGENARALALMNHLREQGVWVSAMRPPTVPPGSARLRITLTAEHQPEDINRLLTVLHHADRKL

SEQ ID NO: 42186 - protein, 280 aa, Listeria monocytogenes str. 1/2a F6854
MTLSFSDTYRLNNGIEMPRHGFGVYKLTDEARMRTALETAVDVGYRLFDTASFYHNEKELGDFFASSGLKRDEFFVTTKMWNTEQGYDETLWAFEKSQKKLQLDQIDLYLVHWPKQDTFFDTWRAVEKLYDEGLVRAIGVSNFEAHHLDRLRTSANVLPVVDQLETHPHFPNHLLHRYLEELHIVHQAWSPLGRGGVLQEQILIDLAEKHGKSPAQIVLRWHLQNNISIIPKSETPSRIRENAAIYDFELSEADMRQVERLNTGERVSHAPDVMYVRSEI

SEQ ID NO: 42187 - protein, 194 aa, Shigella dysenteriae
TMIAIGGSIGTGLFVASGATISQAGPGGALLSYMLIGLMVYFLMTSLGELAAYMPVSGSFATYGQNYVEEGFGFALGWNYWYNWAVTIAVDLVAAQLVMSWWFPDTPGWIWSALFLGVIFLLNYISVRGFGEAEYWFSLIKVTTVIVFIIVGVLMIIGIFKGAQPAGWSNWTIGEAPFAGGFAAMIGVAMIVGF

SEQ ID NO: 42188 - protein, 292 aa, Glycine max
MATITNTFIFKPPISHHPKQLLYSHRSSLRFLTKFKTPSGANSRRLVPKATAAPGAKKTEKPHERVQRVHSVEEFESALESAKDRLVVVEYAASDSEESSQIYPFMVELSRSCNDVEFILVMGDESEKTKELLKREKVENVPHFSFYKSKEKIHEEEGIGPDMLVGDVLYYGDNHSGVVQLHNVEDVQKLIEDHKLDHKLIVLDVGLKHCGPCVKVYPTVVKLSRQMDSVVFARMNGDENESCMQFLKDMEVIQVPTFLFIRDGNIEGRYVGSGKGELIGEILRYQGVRVTY

SEQ ID NO: 42189 - protein, 337 aa, Shewanella sp. ANA-3
MTILVTGGAGYIGTHTVVELLNAGSEVIVLDNLSNSSIEALNRVERITGKAVTFYQGDILNKALLQKVFSDHNIDAVIHFAGLKAVGESVAKPLKYYENNVTGTLILCQVMAEFKVKNLVFSSSATVYGDPASLPITEDFPTGATNPYGQSKLMVEHILADLHHSDPSWNIARLRYFNPVGAHASGLIGEDPNDIPNNLMPFIAQVAVGKREALSVFGNDYPTHDGTGVRDYIHVVDLALGHLKAIEKLTTKPGLVTYNLGTGQGYSVLDMVKAFEKACGKSIAYQIAPRRPGDIAACYANPDHAKTDLGWQATHSLEDMANSSWHWQSTNPNGYKG

SEQ ID NO: 42190 - protein, 573 aa, Hordeum vulgare
MSPARLPISRESCLTIPAGFSPSALLDSPVLLTNFKVEPSPTTGSLGMAAILHKSAHPDMLPSPRDKSVRNAHEDRGSRDFEFKPHLNSSSQSLAPAMSDLKKHEHSMQNQSMNPSSSSSNMVNENRPPCSRESSLTVNVSAQNQPVGMVGLTDSMPAEVGTSEPQQMNSSDNAMQEPQSENVADKSADDGYNWRKYGQKHVKGSENPRSYYKCTHPNCEVKKLLERAVDGLITEVVYKGRHNHPKPQPNRRLAGGAVPSNQGEERYDGASAADDKSSNALSNLANPVHSPGMVEPVPASVSDDDIDAGGGRPYPGDDATEEEDLESKRRKMESAGIDAALMGKPNREPRVVVQTVSEVDILDDGYRWRKYGQKVVKGNPNPRSYYKCTSTGCPVRKHVERASHDPKSVITTYEGKHNHEVPAARNATHEMSAPPMKNVVHQINSNMPSSIGGMMRACEARNYTNQYSQAAETDTVSLDLGVGISPNHSDATNQMQSSGPDQMQYQMQTMGSMYGNMRHPSSMAAPAVQGNSAARMYGSREEKGNEGFTFRATPMDHSANLCYSSAGNLVMGP

SEQ ID NO: 42191 - protein, 150 aa, Pyrococcus horikoshii OT3
MNTLKMQRRIAAELLKCGENRVWIDPEKVDEVASAITREDIRRLIKEGVIRKKPIEGQSRYRARIRHEQKKKGRHRGPGSRKGKKTARMGKKELWIKTIRALRRELRKLKEQKKIDRKTYRMLYIRAKGGQFKNKHQLYLFLEEHGLLKK

SEQ ID NO: 42192 - protein, 434 aa, Erwinia carotovora subsp. atroseptica SCRI1043
MSPEDITFDQRHIWHPYTSMTKPLPCYPVIAASGVELQLDDGRRLIDGMSSWWAAIHGYNHPAINQAVQSQLSQMSHVMFGGITHPAAVALCRQLVNITPDALECVFLADSGSVAVEVAMKMALQYCQARGETRQRFLTLRHGYHGDTFGAMSVCDPQNSMHSLYQGYLPTHLFVDAPPCAAINESGFTDEWQETNIAPLQAMLSAHAHEVAAVILEPIVQGAGGMRFYHPTYLRRVRELCDQWGILLIADEIATGFGRTGKLFACEHAGISPDIMCLGKALTGGYMTLSATLTTRTVAETISNGAAGCFMHGPTFMGNPLACAAANASLSLLADNRWQQQVQNIERQLREALQPCADSPLVANVRVLGAIGVVETHRPVNMARLQRFFVERGVWIRPFGRLIYLMPPFIIQPDELRKLTDAVCAAIHNAQLFE

SEQ ID NO: 42193 - protein, 506 aa, Ashbya gossypii ATCC 10895
MTISMIWCGTWARPSKRVSVVTVATVRCCYQYKRTLSQSYESEEARLEALSRCHKTCAEITLHALEKNGGIFIKLGQHIGAMTYLLPQEWTSTMIPLQDKCPQSTLEEIDGMFRHDLRQGLDELFETFDPHPIGVASLAQVHIATLKGSHEKVAVKCQHPHLKEFVPLDVMLTQNVFNVLDVVFPEYPMTWLSDELQSSIYVELDFTKEAENAINTANYFYKYRKETALRIPRVVSAAKRILVLEFVEGERLDNLRYLDTNGISRSEVSSCLSHIFNNMIFTPNVGVHCDPHGGNLAIRVLPKPKAGHNFEIVLYDHGLYRMPTTEMRRDYAKFWLALLDKDTEKMKLYAKKFANVKEEQFPIFAAAITGRSIDTALNYDISTVRSQDEIDRMKNALLSGGLLVDIMALLSTIPRIVLLILKTNDLTRHLDECLENPLGPERTFLILTQYCARTIYQETCERIDHMYRRWTFRWIFCEIKAWLEYERRKSQLIIFDVALWCKKYFV

SEQ ID NO: 42194 - protein, 182 aa, Ashbya gossypii ATCC 10895
MSSFFKFYKASLQSHPKRTNALTTGFLFGLGDIVAQTQFPEPGASYDPMRTLRPFLYGAVLFSLVGDKWYRFLSTVRLGRLPQAHWANVLARVACDQLIFAPIGVPLYYTAMALMEGGSLEDVRIRLSEKWWSTLLANWIVWPAFQLCNFSLVPVQHRLLTVNVLSIFWNTYLSYSNSTASS

SEQ ID NO: 42195 - protein, 469 aa, Desulfovibrio vulgaris subsp. vulgaris str. Hildenborough
MSSKFPSSFAEVRARWREPGGYREVLHIGLPLVAGMASTTVMQFTDRLFLSHYSVESIAAALPAGLASLLLLLTCMGVTGYASVFIAQYIGAGQPHRVGGVLWQSLIASLVFGGLLAMTSLLAEPIFSLAGHAPELQRLEETYFIILQLGSVLSLVGNSLGTFFSGRGRTRPVMLANIAAAVVNVPLDYVLINGVWFFPEMGIAGAAVATVMGWGVTAVLLAIAVFNRDHETRFGVRSQWRFDAVMMRRLMRYGLPSGVNFFMELFAVTWFVFVVGTLGEVALAATNIAFSINSVAFLPTVGLNIAVGTMVGQAMGRGDPDGAARATGSTLHVAMAWMTALALVFVLLPGPLVDLFRPDNLTPAAYADIRETTARLLAYVAFYCLFDSLTIIFCGALKGAGDTAFVMWNMTVGCIFVLIIPAYALRALGWWSLDSLWLVFSVYVSVLAVASYVRFRLGRWRKLRLVHPA

SEQ ID NO: 42196 - protein, 493 aa, Arabidopsis thaliana
MSLMFSSPVVTPALGSFTFSSRPRSNYIVMSAVRSNSASTCPILTKFQKDCATPTPYLRNVANAIADDMRDGLAVEGGGDLEMILTFVDALPSGNEEGLFYALDLGGTNFRVRSVQLGGKKERVLATESEQISISQKLMIGTSEELFGFIASKLANFVAKEKPGRFLLEEGRKRELGFTFSFPVKQTSIDSGTLSKWTKGFKVSGMEGKNVVACLNEAMEAHGLDMRVSALVNDGVGTLAGARYWDEDVMVGVILGTGTNACYVEQKHAIPKLRSKSSSGTTIINTEWGGFSKILPQTIFDLEMDETSLNPGEHLYEKMISGMYLGEIVRRVLLHMCETSDLFGHFAPAKLSTPLALRTEHLCKMQEDNTDDLRDVGSILYDFLDVEANMNARRRVVEVCDTVVKRGGRLAGAGIVAILEKIEKDTKRMGSGKRTVVAMDGALYEKYPQYRQYMQDALVELLGHKLASHVAIKHTKDVSGLGAALLAATNSIY

SEQ ID NO: 42197 - protein, 1701 aa, Medicago truncatula
MDETGDDESRRCSRNGSGGWRCKEQALPGKTHCERHHEYYKSRNSSSFVEKNGGIRNGVVVDDHDNGGKGLFGGDDHGVVEGFGGVFGDVEVNGGVNAGIGRERFNLWQQGDGQQGGRFEQASGNLGQFLGDGVEFVGGFVEDRNRAVGLGQQWGGVGVFGNGGGVSGVGKDDHGNGVDGVCGNDSPGFGSDGINGLIGEGGCFGNLYDRSFQALLSQGRVCDEDVNLTGGGTSFQGLGGESAYDFRGVGNLSQCGKFEGEKNVGSILTVPESSNKMGAFGVEEGMEMLLSGGVSINEEARGEALKPLAKRGRPKGSKNKIKKKEVDLVTNGETVCGSANVGTTVEILETEKSVFSGKADQEGVDMGDIARTKKRGQPEDWKRGRHIILAVGYEIDGVGEITGPMERGRKSKGSVNEEKNVEEVSSEVAGAGEIARPKKLGRMEASKCGKEIVVEVSNDVGGEIVRRKKRGRPKGSKCGKEIVLEVNNEVVGAEVIIEVAGAGEIARPKKLGRLEGSKCGKEIVVEVSNDVAGEIVRPKKRGRPKGSKCGKEIVVEVNHEVAGAGEIARSKKRGRPKGYKCQKEIVIKRGRPKGTKNKKKILEDQELHVQTLVQDEVQNVKPKLGRPKGSKNKKKNIAGEDGNKLHKEKKRRGWPKGFCLKPKEIAARLDEKIERRGRPKGSGMKPKETAVQLDAKIERRGRPKGAGKKPKEIVVRLDTKIERRGRPKGSGKKQKEVASQLALQIESQKSTRVDGALSTIVPHKHIQEESISPLKDPVNKEEKSDFVLECSKDSGIEKITKGLMSKSGDVHKRCSERLRTLLTDHKNSQDVEVEETFCENEVEEAIDHELESSDLMGEPETKKEPRNLRCHQCWKKSRTGIVVCTKCKRKKYCYECIAKWYQDKTREEIETACPFCLDYCNCRLCLKKTISTMNGNGEADADVKLQKLFYLLKKTLPLLQHIQREQKSELEVEASIHGSLMVEEKDILQAAVDDDDRVYCDNCNTSIVNFHRSCVNPYCRYDLCLTCCTELRNGVHSKDIPASGGNEEMVNTPPETIAWRAETNGSIPCPPKARGGCGTATLSLRRLFKANWIEKLTRDAEELTIKYQPPIVDLSLECSECRSFEEDAAHNSARKAASRETGHDNLLYCPDAIEIGDTEFDHFQRHWIRGEPVIVRNVYKKGSGLSWDPMVMWRAFRLAKNILKDEADTFKAIDCLDWCEVQVNAFQFFKGYLTGRRYRNGWPEMLKLKDWPPTNFFEDCLPRHGAEFTAMLPFSDYTHPKSGILNLATKLPTVLKPDLGPKTYIAYGALEELSRGDSVTKLHCDISDAVNILTHTADVKTPAWQSKIIKKLKKKYEVEDMRELYGLDSKAAGSRGRKRKKRRVGVTVDLKISEKEDINGRDSTLLESQEKEDKLDREACVQEFSESTKSKLDLNVSNQEVIDSPRFQQFDLNSLDSNFLVPRNDCESMLYDNVEQRCSRPRDGSCKGNTSVIDNQPCGGTKETTFVNGLDSSDISSSDIETDKIESVENEMPSNNLCGNDVHLETQYGSAVWDIFRRQDVPKLTEYLNKHHREFRHITSLPVNFVIHPIHDQHFYLNEKHKKQLKLEYGVEPWTFEQHLGEAVFIPAGCPHQVRNRKPCIKVAMDFVSPENVNECVRLTEEFRLLPKYHRSKEDKLEIKKMALYAADVAIAEATKLVGAK

SEQ ID NO: 42198 - protein, 402 aa, Xanthomonas campestris pv. vesicatoria str. 85-10
MTTAPAALTAHYAAELDAIQAQGLFKSERIITGPQSAEITLADGRRVLNFCANNYLGLADHPDIIQAAKDALDSHGFGMASVRFICGTQDLHKQLERSIAEFFGTEDTILYAACFDANGGLFEPLLGEHDAIISDALNHASIIDGVRLCKAKRFRYANCDMADLEAQLQAADAAGCKTKLITSDGVFSMDGFIAPLDEITALARKYNALVHIDECHATGFLGATGRGSAEVKGVLDQIDIFTGTLGKAMGGALGGFTTAKREVIELLRQRSRPYLFSNSLPPHVVAAGIKAFDMLDAAGELRTQLVENTTYFRARMTAAGFDVKPGVHPISPVMLYDAPLAQKFAERLLEEGIYAIGFFFPVVPKGQARIRTQISAAHTREHLDHAIEAFIKIGRELKVIDA

SEQ ID NO: 42199 - protein, 310 aa, Valsa ceratosperma
GQSGAGNNWAKGHYTEGAELVDQVLDVVRREAEGCDALQGFQITHSLGGGTGAGMGTLLISKIREEFPDRMMATFSVVPSPKVSDTVVEPYNATLSVHQLVENSDETFCIDNEALYDICMRTLKLSNPSYGDLNYLVSAVMSGVTVSLRFPGQLNSDLRKLAVNMVPFPRLHFFMVGFAPLTSRGAHSFRAVTVPELTQQMFDPKNMMAASDFRNGRYLTCSAIFRGKVSMKEVEDQMRNVQSKNSSYFVEWIPNNVQTALCSIPPKGLKMSSTFVGNSTAIQELFKRVGEQFTAMFRRKAFLHWYTGEG

SEQ ID NO: 42200 - protein, 322 aa, Valsonectria pulchella
VFGQSGAGNNWAKGHYTEGAELVDNVLDVVRREAEACDCLQGFQITHSLGGGTGAGMGTLLISKIREEFPDRMMATFSVVPSPRVSDTVVEPYNATLSVHQLVEHSDETFCIDNEALYEICMHTLKLSNPSYGDLNYLVSAVMSGVTTCLRFPGQLNSDLRKLAVNMVPFPRLHFFMVGFAPLTSRGAHSFRAVSVPELTQQMFDPKNMMAASDFRNGRYLTCSAIFRGKVAMKEVEDQMRNVQNKNSSYFVEWIPNNIQTALCAIPPRGLKMSSTFIGNSTSIQELFKRIGEQFTAMFRRKAFLHWYTGEGMDEMEFTEAE

SEQ ID NO: 42201 - protein, 506 aa, Dechloromonas aromatica RCB
MRILRLLKIASVASRFGLDEMVLEHEPSGRLVRIANALQFWRDLSTPRAVRLRLALESLGPIFVKFGQVLSTRRDLMPPDIADELARLQDRVPPFDSALALAEIEKAYGRPASEVFAEFDATPIASASIAQVHFAKLREEDGGHEVAVKILRPNMLSVIEHDLALMDNLAMLLEKLWSDGKRLKPREVVAEFAKYLRDELDLMREAANASQLRRNFTDSQLLIVPEVHWDFCTSTVMVMERMKGTPISQIDKLRADGIDLSKLSAAGVEIFFTQVFRDGFFHADMHPGNIFVAPDGRYIALDFGIVGTLTDSDKNYLAQNFLAFFRRDYKRVAEAHIESGWAPKDTRVDEFEAAIRAVCEPIFDRPLKDISFGKILLRLFQTSRRFNVEIQPQLVMLQKTLLNIEGLGRQLDPELDLWKTAKPFLERWMSEQIGWRGLIKTFKQEAPYLARTIPQLPRLVHQALSNPTKADLQPQLAQLIAAQHQQNRWLAIIALLLALLVGALFA

SEQ ID NO: 42202 - protein, 537 aa, Schizosaccharomyces pombe
MEPEYVSFSDKDTKSILNESKSSLKDVKPSLEEKSYITPGLVDDVEPKGKNFVVRFFDDFKPAKATGEDGTALKRSLKSRHMQMISIGGAIGTGLYVGSGSSLADGGPASVIINYSLIGIMMFFIVYALGEMAVAYPVAGGFNTYATRFIDPAWGFAVSWNYFINYFVTFPLELTTCAITFRYWTDINSAAWISIFLVVIIIVNLFGVRAYGEVEFILSTVKVVATFGFIILAIIINCGGVPTDHRGYIGGSIIKHKPFRHGFKGFCSVFTTAAFSFSGTEVIGLAAAEVDNPQKALPHAVKQVFWRIAIFYVVSLILIGLLISPDDPNLMGNGSTSVSPFVLAIKEANIKGLPSVFNAVIIISVVSVTNSSTYTAGRTLHGMANLKQAPSFFKYTDRLGRPLLAMIVVLLFGFFAYINEADKNGNDVSDTVFNWLLALSGLSNFFTWGSICLCHIIFRLAFKKQGHSLKELGFVSPMGIWGSCIGLFFNILCLMAQFYVSLFPIGGKPNANDFFQGYLAAPVTLAFFIGYKIYDRS

SEQ ID NO: 42203 - protein, 340 aa, Xanthomonas campestris pv. vesicatoria str. 85-10
MKALVKREANKGIWLEQVPVPTPGPNEVLIKLEKTAICGTDLHIYLWDEWSQRTIRPGLTIGHEFVGRVAELGSAVTGYQVGQRVSAEGHIVCGHCRNCRGGRPHLCPNTVGIGVNVNGAFAEYMVMPASNLWLIPDQIPSELAAFFDPYGNAAHCALEFDVIGEDVLITGAGPIGIIAAGICKHIGARNVVVTDVNDFRLKLAADMGATRVVNVSKTSLKDVMADLHMEGFDVGLEMSGNPRAFNDMLDCMYHGGKIAMLGIMPRGAGCDWDKIIFKGLTVQGIYGRKMYETWYKMTQLVLSGFPLHKVLTHQLPIDDFQKGFDLMEEGKAGKVVLSWN

SEQ ID NO: 42204 - protein, 570 aa, Oryza sativa (japonica cultivar-group)
MGNQCQNGTLGSDYHNRFPREHAVGYVQGDSYLDLKKFDDTWPEVNNFKPTAASILRRGLDPTSINVLGRKTADLREHYIIGRKLGQGQFGTTYLCTEINTGCEYACKTIPKRKLITKEDVEDVRREIQIMHHLSGHKNVVAIKDVYEDGQAVHIVMELCAGGELFDRIQEKGHYSERKAAELIRIIVSIVAMCHSLGVMHRDLKPENFLLLDKDDDLSIKAIDFGLSVFFKPGQVFTELVGSPYYVAPEVLHKRYGPESDVWSAGVILYVLLSGVPPFWAETQQGIFDAVLKGHIDFQSDPWPKISDSAKDLIRKMLSHCPSERLKAHEVLRHPWICENGVATDQALDPSVISRLKQFSAMNKLKKLALRVIAERLSEEEIAGLREMFKAVDTKNRGVITFGELREGLRRFGAEFKDTEIGDIMEAAHNDNNVTIHYEEFIAATLPLNKIEREEHLLAAFTYFDKDGSGYITVDKLQRACGEHNMEDSLLEEIISEVDQNNDGQIDYAEFVAMMQGSNVGLGWQTMESSLNVALRDAPQCQAAEATDEPVKVKVKVKCSNQIRRRRRQV

SEQ ID NO: 42205 - protein, 175 aa, Triticum aestivum
MAPTVMASSATSVYPFQGLKSTAGLPVSRRSNGASLGSVSNGGRIRCMQVWPIEGIKKFETLSYLPPVSTEALLKQVDYLIRSKWVPCLEYSKVGFISREHNASPGYYDGRYWTMWKLPMSGCTDATQVINDVEEVNKEYPDAFVRIIGYHNMRQVQCVSFIAFKPPGCEESGKA

SEQ ID NO: 42206 - protein, 323 aa, Zopfiella ebriosa
DNFVFGQSGAGNNWAKGHYTEGAELVDQVLDVVRREAEGCDCLQGFQITHSLGGGTGAGMGTLLISKIREEFPDRMMATFSVVPSPKVSDTVVEPYNATLSVHQLVENSDETFCIDNEALYDICMRTLKLSNPSYGDLNYLVSAVMSGVTVSLRFPGQLNSDLRKLAVNMVPFPRLHFFMVGFAPLTSRGAHSFRAVSVPELTQQMFDPKNMMAASDFRNGRYLTCSAIFRGKVSMKEVEDQMRNVQNKNSSYFVEWIPNNVQTALCSIPPRGLKMSSTFVGNSTAIQELFKRIGEQFTAMFRRKAFLHWYTGEGMDEMEFTE

SEQ ID NO: 42207 - protein, 411 aa, Rickettsia tarasevichiae
DSEFAELKIRGKIFKLPILKASIGEDVIDISRVSSEADCFTYDPGFMSTASCRSTITYIDGDKGILRHRGYDIKDLAEKSDFLEVAYLLIYGELPSSEQYNNFTKKVAVHSLMNERLHYLFQTFCNSSHPMAIMLAAVGSLSAFYPDLLKFKEADYELTAIRMIAKIPTIAAMSYKYSIGQPFIYPDNSLDFTENFLRMMFATPCTKYEVNPVIKNALNKIFILHADHEQNASTSTVRIAGSSGANPFACISTGIASLWGPAHGGANEAVINMLKEIGSSENIPKYIAKAKDKDDPFRLMGFGHRVYKNYDPRAAVLKETCKEVLKELGQLENNPLLQIAIELEASALKDEYFIERKLYPNVDFYSGIIYKAMGIPSQMFTVLFAIARTVGWMAQWKEMHEDPEQKISRPR

SEQ ID NO: 42208 - protein, 328 aa, Zygopleurage zygospora
FRPDNFVFGQSGAGNNWAKGHYTEGAELVDQVLDVVRREAEGCDCLQGFQITHSLGGGTGAGMGTLLISKIREEFPDRMMATFSVVPSPKVSDTVVEPYNATLSVHQLVENSDETFCIDNEALYDICMRTLKLSNPSYGDLNHLVSAVMSGVTVSLRFPGQLNSDLRKLAVNMVPFPRLHFFMVGFAPLTSRGAHSFRAVSVPELTQQMFDPKNMMAASDFRNGRYLTCSAIFRGKVSMKEVEDQMRNVQNKNSSYFVEWIPNNVQTALCSIPPRGLKMSSTFVGNSTAIQELFKRIGEQFTAMFRRKAFLHWYTGEGMDEMEFTEAE

SEQ ID NO: 42209 - protein, 233 aa, Zymomonas mobilis subsp. mobilis ZM4
MSRIPFDFIGFDLDGTLIDSSPDLHAALDYALKQMGRPVPTQEQVEKMMGKGIRRLMEQALEVTGGINQELMVKGFPLMLAYYKKHVLVHTRPYEGVEEILKALQDLGLKLIVYTNKPECLARPIIHQLGWDHYFSDIIGGDSFSVRKPDPKPLLEAIDAMGGGRTAFIGDSITDVKTGHNADLPVILVSFGYSDVPATALGADRVISNYQELIPTLASFSDDMMPDAVVKPD

SEQ ID NO: 42210 - protein, 366 aa, Cryptococcus neoformans var. neoformans B-3501A
MTVEIPSSNRKARIGVMGVGRMGKRHARNIAEFAPRAELVAVSDPYPEALEWAKANLPSTVKTYSSSEELINDPDVEGILIATETAFHAEYAIKVIEAGKHALIEKPISVDIELTKPVVAAAKKRPDLKVMVAFSRRFDASYQEAAKRIEDGQLGSAYLIKSCTNDLYDPTGYFLNYAKKSGGIFMDCGIHDIDIGRYLLNVGNTDGLKNPAKQVSKVFATGLNTVYPELAEMEDCDNALGIIEFENGSKLNIHLSRTSIHGHDVVCEVFGTKGKFVINAVPNISRVEIRDEHGVRTESHPSYYERFFEAFKTEVQTFSSCILDDTPVPTPPHDALEAAQIATALTHSFRTGNPVYFDDNGEPILK

SEQ ID NO: 42211 - protein, 177 aa, Arabidopsis thaliana
MVCLASRTGRQFQRYNKGRRQVVGCVPYRFKLSNDGKISDEVEVLVISSQKGHALMFPKGGWELDESVEEAASRECLEEAGVLGNVEHQLGKWDFLSKSRGTYYEGLMFPMLVTEQLELWPEQHVRQRIWMNVTEAREACRDWWMKEALDVLVERLSSPMNQPKEEKTMSISIETMC

SEQ ID NO: 42212 - protein, 349 aa, Thermoanaerobacter tengcongensis MB4
MKALLLAGGLGTRLRPLTDDLPKPMVPIMGKPLLERIILNLKKSGVDEVVISTHYKSDYIENYFKGKSKELGVKIHYVTEETPLGTGGAIKNAEKFFDDTFLILNSDIVSDIDYADLVKYHKRRRAQVTIASIEVRDTSQYGVIEFDSKGFITAFKEKPKPGESNSKYINAGVYVFEPEVLKEIPANTQVSVERETYPLLLSKGYKMAIYKFTGYWMDIGTVDKYKKVHEDILKGKSRFVAGLSTRGIILGENVKIHPTASVIGPAYIGDNTEVDAYATVGPYTVIGSNCRIGQESKVSNSVLWDNIKVRRFARLENSVVTSECVVEVNMEIKNTVFTANKLADITLTP

SEQ ID NO: 42213 - protein, 494 aa, Burkholderia vietnamiensis G4
MNTRFLARGAVAVAVAAALSAGYVAGTRHADPQIITPAQAAALMPAEAAAKTGIPDFSGLVETYGPAVVNISAKHVVKQVSRRVQQPQLPMDPSDPFYQFFKHFYGQVPGMGGDAQPDDQPSASLGSGFIVSPDGYILTNAHVIDGANVVTVKLTDKREYKAKVVGSDKQSDVAVLKIDASGLPTVKIGDPARSKVGQWVVAIGSPYGFDNTVTSGIISAKSRALPDENYTPFIQTDVPVNPGNSGGPLFNLQGEVIGINSMIYSQTGGFQGLSFAIPINEAIKVKDELVKTGHVSRGRLGVAVQGLNQTLASSFGLPKPDGALVSSVDPSGPAAKAGLQPGDVILAVNGSPVADSTSLPAQIASLKPGSQADLQIWRDKSKKSISVTLGAMTDAKLASNDGGPVEQGRLGVAVRPLTPQERSATNLSHGLMVQQAGGPAASAGIQPGDVILAVNGRPVTNPEQLRDAVKGAGNSLALLIQRDNAQIFVPVDLS

SEQ ID NO: 42214 - protein, 534 aa, Lycopersicon esculentum
MQIFVKTLTGKTITLEVESSDTIDNVKAKIQDKEGIPPDQQRLIFAGKQLEDGRTLADYNIQKESTLHLVLRLRGGMQIFVKTLTGKTITLEVESSDTIDNVKAKIQDKEGIPPDQQRLIFAGKQLEDGRTLADYNIQKESTLHLVLRLRGGMQIFVKTLTGKTITLEVESSDTIDNVKAKIQDKEGIPPDQQRLIFAGKQLEDGRTLADYNIQKESTLHLVLRLRGGMQIFVKTLTRKTITLEVESSDTIDNVKAKIQDKEGIPPDQQRLIFAGKQLEDGRTLADYNIQKESTLHLVLRLRGGMQIFVKTLTGKTITLEVESSDTIDNVKAKIQDKEGIPPDQQRLIFAGKQLEDGRTLADYNIQKESTLHLVLRLRGGMQIFVKTLTGKTITLEVESSDTIDNVKAKIQDKEGIPPDQQRLIFAGKQLEDGRTLADYNIQKESTLHLVLRLRGGMQIFVKTLTGKTITLEVESSDTIDNVKAKIQDKEGIPPDQQRLIFAGKQLEDGRTLADYNIQKESTLHLVLRLRGGDL

SEQ ID NO: 42215 - protein, 429 aa, Pseudomonas syringae pv. phaseolicola 1448A
MADKKAQLIIEGAAPVELPILTGTVGPDVIDVRGLTATGRFTFDPGFMSTASCDSKITYIDGDNGILLHRGYPIEQLAEQSDYLETCYLLLNGELPTAEQKAQFVAVVKNHTMVHEQLKTFFNGFRRDAHPMAVMCGVVGALSAFYHDSLDINNPQHREISAVRLVAKMPTLAAMVYKYSMGQPMMYPRNDLSYAENFLHMMFNTPCEIKPISPVLAKAMDKIFILHADHEQNASTSTVRMAGSSGANPFACIAAGIAALWGPAHGGANEAVLTMLDEIGDVSNIDKFIAKAKDKNDPFKLMGFGHRVYKNRDPRATVMKQTCDEVLKELGITNDPQLELAMRLEEIALTDPYFIERSLYPNVDFYSGIILKAIGIPTSMFTVIFALARTVGWISHWKEMLSSPYKIGRPRQLYTGNVQRDIVALQDRK

SEQ ID NO: 42216 - protein, 201 aa, Shigella dysenteriae
RELKARHLTMIAIGGSIGTGLFVASGATISQAGPGGALLSYMLIGLMVYFLMTSLGELAAYMPVSGSFATYGQNYVEEGFGFALGWNYWYNWAVTIAVDLVAAQLVMSWWFPDTPGWIWSALFLGVIFLLNYISVRGFGEAEYWFSLIKVTTVIVFIIVGVLMIIGIFKGAQPAGWSNWTIGEAPFAGGFAAMIGVAMIVG

SEQ ID NO: 42217 - protein, 644 aa, Mycoplasma gallisepticum R
MLLFIPLTFTRMAKNTNSTPKNKTASKAKNISQLSLKQRLELAKKQEKTPAKKLVNKKTETVSKTKKTAKPTKVEKPVSEKKLSVATKAKSEKVVVEQPKAKTTVKKVKAAPTKKEVVLKDKKAKAEPKSVAKEEKKNKLSLKSAKKSTKKKVTSKKDENLDLNNEIDFADFDNKDDEIDFSDFKHENYSSAFKETDFSEQDELDDKEFNLSDFFSDSKLDIDQPITAQKRQRGRKPKHAPSNEKNDLVYHEVLEASSKTKNNDQESIRATKTLLAKAKATKSLSNEEIIDVFKNYEFTEAEDLEILEELKDNKIKLEDNVEEKISLFRKNQDLSEIDKNLDDLISKGASTKDKVEDNVKAFLGTLGSSKILNFGEEIQIAKLLGSTDPETREYAINQLVTSNLRLVTSIAKKYLNRGLDFVDLIQEGSIGLMKAISKFNYKLGNKFSTYATWWIRQAITRAIADQARTVRIPVHMVETINKLIKTERMLTQQLGRDPTLEELTEAMGGQVNGFTPKKVADIKKLNQEPVSLDKPIGHDEESQFVDFVKDRDILKPDEYTEKLIVTEHINELFINTLTKKEEQIIRMRYGLHPWHQQMTLEEVGQKFNVTRERIRQIESKALRKLKHPSKNARLRSFLKHDSEN

SEQ ID NO: 42218 - protein, 643 aa, Cryptococcus neoformans var. neoformans JEC21
MSAPHHQQGDRVEYDEPNLPRLNQNEFEESSSEFSEDPKAPVKRGIASASRVLSVITKKDIRIAYLALTVLALGMAFAQYTQTTFTAYATSAFKSHSELAAAAVVSRVFSMIAYLIVPKICDNVGRISPSIIISMVVFTVLSDAMMAGCKNVQTYIGANVFSGLSSTGYTIALQIYYAETTAIRERALWNVAADSFSAIITLYSGSTIGGLILENWGTTSGWRWGYGMWSIINTVLAIPFIAILFSWHRRVRRNPNVPRLPPHTNVIDQLFHEYDLIGSCLLVASVALILVPLTLAKGVASQWTDDNIAMICVGFGLLVLFIVWSIPKKWRPKWFFTPRLPLIPWYTLKNRSLMSMFVINMCDFMSYGVFTTYFQTFMQVAVRTSASKASMIDNTLRIVFQVTALVVGLVMRFWTPACVKLGLGKRLFHTRYPVWIGIPLCALSIGIDINFVQHPRRKSAIASYVIAKAIYGVGRGMFQTSAQITVQASSRRRELAIATGIFYFAASLGGAIGIAVAGAIWLNILPDALANNLPAASANLASTIYGSITVAISYDPNSEIGLAILKSYVHTMKILAIVSTCLQIPMLISMFFIEDLQLTEDEQIILGGKRIGLGKKKQEQIDEREGEEEVKMVEKEKPVVRAD

SEQ ID NO: 42219 - protein, 194 aa, Shigella dysenteriae
LKARHLTMIAIGGSIGTGLFVASGATISQAGPGGALLSYMLIGLMVYFLMTSLGELAAYMPVSGSFATYGQNYVEEGFGFALGWNYWYNWAVTIAVDLVAAQLVMSWWFPDTPGWIWSALFLGVIFLLNYISVRGFGEAEYWFSLIKVTTVIVFIIVGVLMIIGIFKGAQPAGWSNWTIGEAPFAGGFAAMIGV

SEQ ID NO: 42220 - protein, 464 aa, Mycoplasma gallisepticum R
MMELKQDQIVNFLKNYGFVYQSSEIYNGLANSWDYGPLGALLKNNIKQLLLKHFVFSQPDMKLLDSSIILNPLVWQASGHLDNFSDPLVDCKKCKSRYRADKLIEELNDDSIKITENTDPSYLEQILVDKKVECKKCESTNWTKIRKFNLMFKTFQGVVEDSLNTIYLRPETAQGIFINFKNIVRTQRMKLPFGVAQIGKAFRNEITPGNFIFRTREFEQFEIEYFLEPELVKEKFDWYINQIEDFLINKLLINKQLIKRHEIAKDELAHYSSRTIDFQFNFPHGWSELWGLAHRGNFDLTAHSNESGKTLDYHNEIEKTKIIPDVIEPSLGIERILYAIFCAHYHVEQLADNDSREVLRLPVSLSPYQLAILPLVNKLKDQAYQLYLDLLKISDANLRFDFDSAGSIGKRYRRYDAIGAKYCLTYDFDSLEKGIVTIRERDSMEQIKIPISELRQWIRNNLHE

SEQ ID NO: 42221 - protein, 565 aa, Erwinia carotovora subsp. atroseptica SCRI1043
MELEYESKRPLYIPYAGPILLEFPLLNKGSAFTEEERADFNLAGLLPEAVETIEEQAERAWRQYQEFKHDIEKHVYLRNIQDTNETLFYRLLDGHLNEMMPIIYTPTVGEACEHFSDIYRRARGLFISYPNRANIDDMLQNATKQNVKVIVVTDGERILGLGDQGIGGMGIPIGKLALYTACGGISPAYTLPVVLDVGTNNPQRLNDPLYMGWRHPRITDDEYYAFVDEFIQAVKRRWPNVLLQFEDFAQKNATPLLNRYRDEICSFNDDIQGTAAVAIGSLIAASRAAGTQLRDQTVAFLGAGSAGCGIAEQIIAQMKSEGLSEEEARARVFMVDRFGLLTDKLPNLLDFQSKLVQKSELLADWDCNSDAISLLEVVRNAKPTIMIGVSGQPGLFTEEIIREMYKHCARPIVMPLSNPTSRVEARPEDIIRWTEGSALVATGSPFSPVHYQDKVFPIAQCNNSYIFPGIGLGVLASGANRITDGMLMAASRALADCSPLANNGEGALLPDLSDIQQVSKRIALDVGKAAQLQGVAVVTSADALQKAIDHNFWQPQYRSYKRTSF

SEQ ID NO: 42222 - protein, 511 aa, Rickettsia conorii str. Malish 7
MEYMVNLKIVIVIIVLISSNVVLAKENSRSLKVAAQEENEFTEINSAPLKVSEAARYSFADIVEPLIPAVVNISTIEYVNSKSENAEKDPLQEKVNDFLEKLNIPLNLEEVDQTPKSVPLGSGFIIEPNGLIVTNYHVIANVDKINIKLADNTELSAKLIGNDTKTDLALLKIDSEEPLPFVEFGDSNDARVGDWVIAIGNPFGNLGGTVTSGIISSKGRDIDIDTDNIVDNFIQTDAAINNGNSGGPMFNLDQKVIGVNTAIFSPLGTNIGIGFAIPSNTAKPIIERLKKDGKVSRGRLGVTIQDLTEDISEGLGLKNTRGVLVAKVQEDGPGDKAGIKTGDIIIEFADIPVKNTKKLRVIIADAPIDQEVKVKILRDKKELELPIKITSDNEEVTKDSTEETNKKEITNKEENNLSITKNNITFGNLTEELRQKYTIPQDKMGIVITNIDEEESSFKIGDLITNINQKSIDDISKLEELYENAKKSDKKNILLLIERGSSNMFVPLQVM

SEQ ID NO: 42223 - protein, 362 aa, Dehalococcoides ethenogenes 195
MQNLRIPGPTPCPEEVLTAMGQQMINHRGPEMAAIMKEVAEKLKYFFQTKNDVLVLTGSGTGGLEAAAVNFLSPGETVLSVSIGVFGERFAKIASIFGAKIIALNFEHGKAADPALVKKALAEHPEIKAVLITHNETSTGITNDLKSLASVVKGAGKLLMVDAISSLSSIDLPVDEWGCDVVVSGSQKGWMVPPGLAFISVSPDAWKANAESKMPRFYWDLAKHKASIEKGQTPWTPCVSVIVALHKALAMMEKEGMQNIFKRHQKIADFTRKGVKELGLTLLAEEKYASNTVTAVLATEGLDPKKLLKVMREEYNTVLAGGQGPLEGKIFRIGHLGWVTENDIKVTLDNLKLALPKAGFRS

SEQ ID NO: 42224 - protein, 458 aa, Bacillus anthracis str. A2012
MGYVMNTKKFAKVNEQIPGPKAASLLERRQNIVPKGVSNGIPTFVQSANGALVTDVDGNQYIDFAGAIGTINVGHCHPAVKEALHKQVDQYIHTGFNVMMYEPYIELAEKLAALAPGSFDKQVLFLNSGAEAVENAVKIARKYTKRPGIIAFSKGFHGRTLMTMTMTSKVKPYKFGFGPFAPEVYKAPFPYEYRCPEGLTEEQYDDFMIEEFKNFFISEVAPETIAAVVMEPVQGEGGFIVPSKKFAQEVRNICSEHGILFVADEIQTGFSRTGKYFAIDHYDVVPDLITVSKSLGAGVPISGVIGRKEIMNESAPGELGGTYAGSPLGCAAALAVLDVIEKENLNDRAIELGKVVMNRFEEMKNKYNCIGDVRGLGAMCAFELVQDRKTKTPDKTLTANLCTEANKRGLLLLSAGTYGNVIRVLMPLVITDEQLEEGLTIIEESLQICYEKANTARV

SEQ ID NO: 42225 - protein, 198 aa, Shigella dysenteriae
KARHLTMIAIGGSIGTGLFVASGATISQAGPGGALLSYMLIGLMVYFLMTSLGELAAYMPVSGSFATYGQNYVEEGFGFALGWNYWYNWAVTIAVDLVAAQLVMSWWFPDTPGWIWSALFLGVIFLLNYISVRGFGEAEYWFSLIKVTTVIVFIIVGVLMIIGIFKGAQPAGWSNWTIGEAPFAGGLAAMIGVAMIVG

SEQ ID NO: 42226 - protein, 116 aa, Pyrococcus horikoshii OT3
MEKMVRDIGLRIQPPAEKCDDPKCPWHGHLKIHGRVFEGIVISDKPRKTVTVERQYYHYLKKYERYELRRSRIHAHNPPCINAKVGDRVLIAETRPLSKTKHFVVVAVLERAEERR

SEQ ID NO: 42227 - protein, 483 aa, Bacillus anthracis str. A2012
MDKKATFVNVEKKAMYINGEWITLQEQIEVNNPATKEIFATVPKGGVTEAKQAVDAAHEAFKSWSKLTAADRAAKLKKWFTLIDENKEEIAAIMTKEQGKPFAEALGEVNYANSFVEWYAEEGKRVYGEMIPASHPNKRILVMKQPVGVMAAITPWNFPAAMITRKVAPALAAGCTAVVKPASQTPLTALKLAELAHEADIPKGVINIVTGSAKAIADTWMEDGRVRKVSFTGSTEIGKELMASAAQTMKKVSLELGGHAPFIVMNDADLDKAVEAVIGSKFRNAGQTCICTNRVFVQEEVYEAFVEKFEKAVGQLKVGDGFGDGTTVGPLIDENAVSKVQEHIEDAIQKGGTVLYGGQKVAELDGHFMQPTVIGLANDTMLCMNEETFGPVAPVAKFKTVEEVIERANHTPYGLAAYIFTKDISQAFQISEALEYGIIGLNDGLPSVAQAPFGGFKESGIGREGGHFGIEEYLEIKYISLGL

SEQ ID NO: 42228 - protein, 198 aa, Shigella dysenteriae
ARHLTMIAIGGSIGTGLFVASGATISQAGPGGALLSYMLIGLMVYFLMTSLGELAAYMPVSGSFATYGQNYVEEGFGFALGWNYWYNWAVTIAVDLVAAQLVMSWWFPDTPGWIWSALFLGVIFLLNYISVRGFGEAEYWFSLIKVTTVIVFIIVGVLMIIGIFKGAQPAGWSNWTIGEAPFAGGLAAMIGVAMIVGF

SEQ ID NO: 42229 - protein, 647 aa, Bradyrhizobium sp. BTAi1
MCGLAGVWCWDTPIDRPAIARALGLLDHRGPDGNGLWISEDGKVALGHTRLSIIDLVTGEQPLSHPNGKLQLVVNGEFYDYERIRNDLTARGARFRTRSDSEIALWLYDESGTRCFADLNGEFAFILWDAGAGRLIAARDRFGIKPLFYAVQSGRILLASEIKALLAMGVPAQWDVEGYLDAAHVLQNGTLFSGIRQVPPGCYLSATRHGITIQRYWDAPFASALSPIEDEHGALDQIRAQMSRATRWRMRADVPVAAYLSGGIDSMSVLALAAATTNRAPDAFTIAYEDAAYDESHRAESFATQLGTRFHRVPVNGAALADHFATSLWHSETACFNPHGTAKFILSKAVRDAGYKVVLTGEGADEIFAGYAPSRVDALGGSAAMQAMIATRDRATYAVTPQHTATDQLPLIAQRFGTVPTWLRHQMAHLLGVADLLRDDLRTAWSTDRPLAAFLKYLEPWTVPALDTVDLGIALMLKTTLPNYVLVTLGDRMEMAHSIEGRLPFLDHQVVELAWRLPSHLKIRDGVEKFALRQAMRNLLPADAVDRQKHPFIAPPTATDAKHPFGAMIRDVLHGPALAALPFFEPRKVRKLIDRLTSLPPEDRLRLEPLLVEIASLCIIHDLFKMSSSSDPSAQLSIQMPSTEALA

SEQ ID NO: 42230 - protein, 569 aa, Kluyveromyces lactis NRRL Y-1140
MNDTSEHSSDVSPIIFDDISQSKLKDSSENETTDRIIIKPVNDEDDTSVMITFNQKISPFILILTFTASISGFMFGYDTGYISSALVSIGTDLDNKALTYGDKEIITAATSLGALISAVFAGISADIFGRKPCLMFSNILFVIGAALQVSAHSFWQMAVGRLIMGFGVGIGSLLAPLFISEIAPKHIRGRLTVINSLWLTGGQLIAYACGAGLNKVHNGWRILVGLSLIPTVVQFTCFSFLPDTPRFYVIKGNYKKAAEVLQKSYINAPQELIDQKIRELSDLNEAIPGKTPVHKFFNTVKELHTVPCNFRALVIGCALQGIQQFCGWNSLMYFSGTIFQTVGFENSTAVSIIVAGTNFVFTLVAFFAIDKVGRRAILLIGLPGMMVSLVMCAIAFHFLDIKFTGAGESEVSNGGFSSWGIVVIVFIMVYAAFYALGIGTVPWQQSELFATSVRGVGTSYCTATNWAGSLIIASTFLTMLQNITPTGTFSLFAALAAVSTVFCYLCYPELSGLELEEVQTILSDGFNIKASKQLAKKRKQQNSEMQRRFREKDMEAYQKDKPSDELLES

SEQ ID NO: 42231 - protein, 280 aa, Nocardioides sp. JS614
MTSGDGSRTNRLRVALLQVAYGDDESLSDRVQRVSQWIREVGPADLVVLPELWAHGGFASTTWRATAELMNGPTIAQMASVAREVGVWLHAGSIIERAEDGADRGAERRGLWNTSVLISPQGTVHKTYRKIHRFGFGDGEPRVLEAGTDLAVAELVHDTGASRVGMATCYDLRFPELFRRLGDLGADVIVLPAAWPMRRVEHWRLLGRARALENQAWVLQCNTAGTHSGLDMGGHSQVVAPTGEVVAELGSDEDVLLTDIDLNLVASVRADFPVLADRRI

SEQ ID NO: 42232 - protein, 1288 aa, Ustilago maydis 521
MRITHAFMERGGRYRRLLSIGLAWVALILVLFVLLTASLSAAVPVSTTAERTEGTGNEAQSHFDGEEIDHRKLLRKRHEQISSGSVATGFAHPTHLYRRDADALPPPDKAYNMSVTQGIISPDGFERLGFLMNGNFPADPFVWDENDDVEINVINNGPVPFAIHWHGIHQIGSPEMDGVPGLSQWNIYPGESYTYRFKLVNQYGGYWYHSHERGYYADGLRGTIYIRPKPGRQKPWSYISTDQDDIEQMEAAEHDSQIMSLSDHWHINHTEMLLVVHETGVPPACFDSLHINGRGRQYCVNNWSKVISPIQASLLRNFSSTNPEGITSKGCISLVPPKSGYTVKGTLDERYGGVCQNTTAPLTVFSAAKAIKKGRRWLNLQVVDTATNWYYGISVDSHKMWIVAVDGHYIQPMQVDWAQITIGSRLSVMIQLDPALDGNMFPIRLTGARALQPIEGHAFLSYIDDVDGTWNPGQEEDFGYLMRTLTTAHVPMSGFVSDPSVVKWKQNLSVPFDPINQVPQTSNMTLHAVASQNSLNVWQVATMPLDTARLADDRPILFNATDGNATLNQMTPYASIPFGTVVDVIMENNIYSIVGGPNSPHPFHMHSRRFWIIGSGAGPFPADTVAEAQGQGILFNLETPPLRDGFDIDSNSWVVIRYVADHAAANILHCHIDDHAIEGMAAVLLEGLEKIPAGGNFSDTIKARPSKWVETKNDELGQVLEASWATGSANAKYVAPAPTDTVDPWGDPRSLAQSIQLYASSNSVLKAITSSLVSEMGEVKATATGVVTAITATVSDHLTTFTGVAASSSVFATTTASVTLATVTENAVASASSTAIVATATESASASVASAQSLAAVASTTTALTLAVETLTSVLSVSASQVINTVVSATDTSAAAVATSNTVTSINTAQSTLFAIAFTTEVVTASAAETPTVKSSVETPAIITSSSTVYVTVLATVAPTLSLSSLAAQSTKSSSSAAIKTTNASSTRVSLASQTTVAAVSTASLVSLLPYTTLYATVPASTALFSTGTSTLLKLDGQTAAATTTKTATSPSLSTQSASRTDADSGIEDDDVVTEETDNIGASATTSLSSQSMSSSASLRVASANLVLTTSVVAADSTSTAQASSTVVIERAGTTTIASLNRAASTHVSASTTSARAVLTEVATTSATQTPHTTISESQASRATSQSTSTGSEAASPTANAANYGTHSAATTFLAYSTSVETSEAALTSSSATVSEDEPAYDNPVFPSSTGAVSTSTTTAATKPTNSFTSSGTGNEGESGGYDTQADG

SEQ ID NO: 42233 - protein, 413 aa, Pyrococcus furiosus DSM 3638
MEEILEKKLESGPLNFESYFSEKALKMKASEVRELLKLVETSDVISLAGGLPNPKTFPKDIIKGILEEIMEEHADKALQYGTTKGFTPLRLAIAEWLRKRYNIPTSKVDIMITSGSQQALDLIGRVFLNPGDLVVVEAPTYLAALQAFNFYEPQYIQVPLDDEGMRIDILEEKLRKLKAEGKRVKLVYTVPTFQNPAGVTMTEERRKHLLELASEYDFIIVEDDPYGELRYSGKPVPKIKALDTEGRVLYLGTFSKILAPGFRLGWIAGEPHFIRKLEIAKQSVDLCTNSFGQVVAWRYLEGGHLEKHIPRIIEFYKPRRNAMLEALEQYMPEGVKWTRPEGGMFIWVILPEKINATTMLEKAVKKGVAYVPGEAFFAYRDVKNTMRLNFTYVDEDKIQEGVKRLAETIKEEL

SEQ ID NO: 42234 - protein, 480 aa, Pseudomonas putida KT2440
MHLTWLRSDLRIDDNTALSASTERGPTIALWLVSPGQWQAHDDADCKVDFWLRNLHDLRQSLEKLNIPLLIRTIDTWDQAPQAVLDICRQHQVQSVHWNEEYGINEQRRDDATRAMLEKSAIQAHSHLDQLFFRPGTVLTRSGDYFQVFSQFKKTCLEHLHRSLPALARRVKRQAPLNIGSDPIPQHVEGFGKTTPALRDHWPAGEAEAQSRLSRFLDETIDDYHHLRDLPAKPGTSQLSPYLAAGVISPRQCLHGALAGNRGEFDSGSTGVQTWINELLWREFYKHILSGYPQVSRHRAFRAQTEALPWRDAPADLAAWEQGRTGFPIIDAAMRQLLHTGWMHNRLRMVVAMFLSKNLLIDWRKGERHFMRHLIDGDLAANNGGWQWSASTGTDAVPYFRIFNPVSQSQRFDPQGRFIRHWVPELQELDEKAIHQPIKSTDLFGNTSYLSPIVDLSSSRQRALEAFKGLPRRQNQGITS

SEQ ID NO: 42235 - protein, 324 aa, Oceanobacillus iheyensis HTE831
MKREIILYKSISTDLLEQLKNRFIVHQHQLKSEMDDSFFSDLQRVEGIIGSKLRVDGHLLDQAPHLKIVTNISVGYDNLEIEELTKRGIMATNTPDVLTDTVADTVFGLLLATSRRICELDQYVKLGRWDENIGEHLFGVDVHHKTLGIIGMGRIGLAVAERAHYGFKMKIVYHNRSTHSYAEKNINATYASLEELLTVSDFVLVMAPLVPETVKLIGEKEFDLMKETAIFLNGSRGELVDELALIHALQSKKIWGAGLDVYEQEPISKESLLLQLKNVVTLPHIGSATRETRYKMAKLAVDNLMKGFTGEVPPSLINPDVLTD

SEQ ID NO: 42236 - protein, 327 aa, Gloeobacter violaceus PCC 7421
MKAFVLAAGKGTRLRPFTDALPKPLMPVVNKPVMTHILALCRKHGFDQIVANLHYRGEKIAERFADGHRHGVELRYSWEEQLLGTAGGVRRQADFLAGDAFLVISGDVMTDLDLGALVRFHKQSGAVATMAVKEVGDPSRFGVVLTDPDGRVESFQEKPAKGSERSRLANTGIYVLEPEVFEHIPEAAFFDFGNDLFPLLVSKGAPVYAMRTGAYWSDVGTLSQYLYTHWELLTHPELKQRVGANTVVESGAVVSEQALIGSGCTIEKGARVLGYSCVSDGCTIRAGSVVVDSVVWTSARWGHKLKGDLVRSIWGDGMQVSLGLPNL

SEQ ID NO: 42237 - protein, 633 aa, Phalaenopsis hybrid cultivar
MEGCDCIEPQWPADELLVKYQYISDFFIALAYFSIPLELIYFVKKSSFFPYRWVLIQFGAFIVLCGATHLINLWTFTMHSRTLAIVMTVAKVSTAVVSCATALMLVHIIPDLLSVKTRELFLRNKAEELDKEMGLIRTQEETGRHVRMLTHEIRSTLDRHTILRTTLVELGRTLDLAECALWMPSRTGLNLQLSHTLNNQIPVGSVVSINLPVVNQVFNSSRAVRIPHTCQLARFQPHTGRYVPPEVVAVRVPLLHLSNFQINDWPELSAKNFAVMVLMLPSDSARKWHVYELELVEVVADQVAVALSHAAILEESMRARDQLMDQNVALDLARREAEMAIRARNDFLAVMNHEMRTPMHAIIALSSLLLETELTPEQRLMVETILKSSNLLATLINDVLDLSKLEDGSFELEVTVFNLHTVFREVVNLIKPIAAVKKLSLIVSLSPDLPSCAVGDEKRLMQTMLNVVGNAVKFTKEGSISITASIAKPDSLRDPRDPEFYPIPSDGHFYLRVQIKDTGCGISPQELPHLFTKFAHAQNGSDKGYNGSGLGLAICKRFVNLMKGHIWLESEGIGKGCTTIFIVKLGISEDPAHRYQHKLLPPIRAGQSEADAFGSKRMPTDLIPLKNRYQRSL

SEQ ID NO: 42238 - protein, 399 aa, Lycopersicon esculentum
MKEGKRKSSRLQSEAAGAGSSRKLDLDGVAAERQERNGYPEDAGSKCEEEPVAGEGEGEGEEKDEAPEVVRVEKGDGDGVAKKVKPKLAEGFYEIETVRRRRTVKGKVYYLIKWRGWPESANTWEPETNLSSCTDIIDAYEESLKSGKLRRRKRKFGATQTHPMIKQQRRFSAPVATYNGPAVKVRIIEEPTPSPPLNVLKATDLVDSNGSELNSKVDEVVNGNGLRLREQNELNLKLSELKGATSTNGNPVDISGNGLTNGFPKVNGAEFYQSDRCTGAKKRKSGCVRRFKRETTSAVKDDTQDALAGGPLATFMQDGSHNHVMVADDSKDGYTITQLVNPVSYKASFSNDMLDVSVTFVAKRADGNLVLVDNKFLKMNNPLLLINFYEENMRYHPTE

SEQ ID NO: 42239 - protein, 468 aa, Arabidopsis thaliana
MGRVRKSDFGSIVLVLCCVLNSLLCNGGITSRYVRKLEATVDMPLDSDVFRVPCGYNAPQQVHITQGDVEGKAVIVSWVTQEAKGSNKVIYWKENSTKKHKAHGKTNTYKFYNYTSGFIHHCPIRNLEYDTKYYYVLGVGQTERKFWFFTPPEIGPDVPYTFGLIGNLGQSYDSNITLTHYENNPTKGQAVLFVGDISYADTYPDHDNRRWDSWGRFAERSTAYQPWIWTTGNHELDFAPEIGENRPFKPFTHRYRTPYRSSGSTEPFWYSIKRGPAYIVVLASYSAYGKYTPQYQWLEEEFPKVNRTETPWLIVLMHSPWYNSYDYHYMEGETMRVMYEAWFVKYKVDVVFAGHVHAYERSERVSNIAYNVVNGICTPVKDQSAPVYITIGDGGNIEGLATKMTEPQPKYSAFREASFGHAIFSIKNRTHAHYGWHRNHGGYAVEGDRMWFYNRFWHPVDDSPSCNS

SEQ ID NO: 42240 - protein, 1086 aa, Oryza sativa
MRIQCDACEAAAATVVCCADEAALCARCDVEIHAANKLASKHQRLPLDAALSAALPRCDVCQEKAAFIFCVEDRALFCRDCDEPIHVPGTLSGNHQRYLATGIRVGFSSVCSANADHLPPPAPKGNSKPPASGIAAAAAPKPAVSAAAQEKGSPIGFKDLEWLDDIDLFHVQSPAKGGSTAAEVPELFASPQPASNMGLYKASGARQSKKPRMVDQKRSKLDNCSQPISESDDINSESLPAKDDDYNCDSDDNSASHDIDVSQPHVNEISTNELLKTLKRKLSKSKRSEDDNIKMKRSESIELDNDVMINQVLRDIIQRDQIINSLKKKLNIHHNIGDQNLKVNYLDFLNFGSQKVLLDTPRIKVWKRSMIKDYSKFDKISEGVYGKRPVNDIASTCYQMVNNSSSSFADMLKSSVGDLLPSDVQDKICHLLCNHFGKEDEIFEDKAKKLLIDVLLLLADCSSNYPTQPAAHENSGIEPDHEPVEENNDDVNQAVQKNNNFTSSRKGNSKTVLDDDKLPIRNEEFNPVNKSTILNSSKEIKHINIDEIMRKLNKTGHVPINPPDETEKNSALTARNNQVFHDQPSFKIWDSDDDLHHENDDFKKEITPAHLVDSYQVIPDSYSPNPVLRNKITPRKLSQTFAAAVESPIICSDSPDNMYMVTLENSTSPNASLNENKENEKGCHIIKDSPDVVFIGEKKFSKKCADIGNKTNMMYNKMNRILLDSQKQNYKSFASPERVLLCNMKNFNPSTSGTKPIHHDLRRVINPAKYCTDPYTPQRSNFTVSQYERQIYNAICTLSTSRYQERHAVEIDGVHCKFSSFGGSFNFGHEVSNFVVSVFCRYLFHLSHPSKSKKHYFFSSIGDDDGAWGSSPGDRAGPPLPVRPGALGLGLLFYLVRGHHMGLKLPKKRNILFTMRASLQPEVTSDKHSTRLPLRSSALPVDARFNLHSMASDFLAMLALKPRMDLTGTDIPTPGVSMPAPARDKSQEALIIPMGRGEACDRPPTPQGVGAPQPSGPKRERPDPSGRQREGWPRHPRARLPRGGRAMWVIAATQASSHDTPGPMSPTVAPRRYARATAPLEGGARA

SEQ ID NO: 42241 - protein, 522 aa, Triticum aestivum
  misc_feature (144)..(144): Xaa can be any naturally occurring amino acid
  misc_feature (211)..(211): Xaa can be any naturally occurring amino acid
  unsure (1)..(522): unsure at all Xaa locations
MRRAAALGARHILAASVSASSRVASRRHMGSVDAGAAMEKIRAAGLLRTRGLIGGKWVDAYDGKTIEVQNPATGEVLANVACMGNRETADAITSANTTFYTWSKLTASERSKALRKWHDLLMSHKEELALLMTLEQGKPMKEAXGEVNYGASFIEFFAEEAKRVYGDIIPPTLADRRLLVLKQPIGVVGAITPWNFPLAMITRKVGPALGXGCTVVVKPSEFTPLTALAAADLALQAGIPAGALNVVMGNAPEIGDELMQSMQVRKITFTGSTAVGKKLMAGSANTVKKVSLELGGNAPCIVFDDADIDVAVKGSLAAKFRNSGQTCVCANRILVQEGIYEKFASAFVKAVQSLQVGNGLEESTSQGPLINEAAVQKVEKFVGDATSKGANIMLGGKRHSLGMSFYEPTVVGNVSNDMLLFSEEVFGPVAPLIPFKTEEEAIHLANDTNAGLAAYMFTKNIARSWRVSEALEYGLVGVNEGLISTEVAPFGGVKQSGLGREGSKYGMDDYLEIKYVCMGNLG

SEQ ID NO: 42242 - protein, 804 aa, Arabidopsis thaliana
MSFRGIVQDLRDGFGSLSRRSFDFRLSSLHKGKAQGSSFREYSSSRDLLSPVIVQTSRWANLPPELLFDVIKRLEESESNWPARKHVVACASVCRSWRAMCQEIVLGPEICGKLTFPVSLKQPGPRDAMIQCFIKRDKSKLTFHLFLCLSPALLVENGKFLLSAKRTRRTTRTEYIISMDADNISRSSNSYLGKLRSNFLGTKFLVYDTQPPPNTSSSALITDRTSRSRFHSRRVSPKVPSGSYNIAQITYELNVLGTRGPRRMHCIMNSIPISSLEPGGSVPNQPEKLVPAPYSLDDSFRSNISFSKSSFDHRSLDFSSSRFSEMGISCDDNEEEASFRPLILKNKQPRWHEQLQCWCLNFRGRVTVASVKNFQLVAARQPQPQGTGAAAAPTSAPAHPEQDKVILQFGKVGKDMFTMDYSLNLVLTLANQYGNTMEKIHRNEQREEGFKLESEKNVKGKMVSVSLSHHNLWPPESGSTAFRGFATAASVHACHHVSRHLRLDFHLRSSLKKLQHFSDDARMKFARYQRVFVFNGANFLKSRVDIRLSQSSPFVCFFNGGESRLNPRGGEEGSSNPETSKRNTVNGRRWTNVLLAINVIMYIAQIASDGKVLTWGAKINSLIERGQLWRLATASVLHANPMHLMINCYSLNSIGPTAESLGGPKRFLAVYLTSAVAKPILRVLGSAMSYWFNKAPSVGASGAIFGLVGSVAVFVIRHKQMVRGGNEDLMQIAQIIALNMAMGLMSRRIDNWGHIGGLLGGTAMTWLLGPQWKYEYTTRDGRRVFMDSAPIPLLLRWRNEQRRL

SEQ ID NO: 42243 - protein, 151 aa, Zea mays
NHPWFLKNLPIEMTDEYQMNFRKTLTRIISVQYAVPDFVRVSMECRHLLSRIFVAKPEQRITIPEIKNHPWFLKNLPIEMTDEYQMNLQLVDMNVPSQSLEEIMSIILEARKPGDGLKHAGQLPGLGSMELDDIDVDDIDVEDSGDFVCAL

SEQ ID NO: 42244 - protein, 398 aa, Triticum aestivum
FFYCFWWGLQSLSSLGQNLKTSTYTWENLFAVFVSISGLVLFALLIGNVQTYLQSASVRIEEMRVKRRDTEQWMAHRLLPENLKGRILRHEQYRWQETRGVDEEGLLMNLPKDLRREIKRHLCLSLLMRVPMFENMDEQLLDAMCDRLKPMLYTEDSCIIREGDPVNEMLFVMRGYLESMTTNGGQSGFFNSNVLKGGDFCGEELLTWALDPAAVSNLPSSTRTVKTLSEVEAFVLRADDLKFVATQFRKLHSKQLQHTFRFYSQQWRTWAACFIQAAWHRYCRKKLEDSLFEKEKRLQAAIVSDDSTKLSLGAALYASRFAGNMMRILRRNATRKARLQDRVPARLLQKPAEPNFLPLENNFDIPCYKQKVTTQLVKFVLMPSSSPSSAQFMTGCYT

SEQ ID NO: 42245 - protein, 472 aa, Debaryomyces hansenii CBS767
MRVNSLLKICALVPSVLSSCNPLKSTNCDAVQALGTSFKEDFKSKSPYFDIVEANGVSFGDDGLELKLAKRFDNPTLQSNFYIMFGKIEVTMQAAEGQGVISSFFLQSDDLDEIDIELFGGDGYEFQLNYFSKGDTTTYDRGEYHATSSNPLQNFHTYTLDWTKDSLTWSLDGKVVRTLDADNPQGYPQSPMFLRMGIWAGGDPSSEQGTIEWAGGLTDYSEMPFSMYIKSLIVTDYSSGDKYEYGDNSGDWTSIKAINGEVNGRQKQADEDFETLQDGGSVDTDFEASSSSSSAASSSSSSSSSSSSSSSSPSSSSSSSPSSSSSSSPSSSSSSSSSSSSSSSTSSSSSSTKASSTTKASSTTKASSTTKDSPSTKASPSTLISSTSDEESSSTDTVYSTSSASTSTSANSAPTSESASSSNEANSVNTSSETASASSSAPQALTNENMSNLIRVSSFSTILTSFICYILI

SEQ ID NO: 42246 - protein, 458 aa, Burkholderia vietnamiensis G4
MQSNTVHPCDEVLPTGKLVTLGLQHVLVMYAGAVAVPLIVGGALKLPKDQIAFLISADLFSCGIATLIQTLGLWIFGIRLPVIMGCTFAAVGPMIAIGTNPGLGMLDIFGSTIAAGIIGIVLAPTIGKLLRFFPPVVVGTVIAVIGLSLMEVGINWAAGGVGNPDYGSPVYLGLSLLVLTLILLINKYGRGFIANISVLLGIVAGFAIAFAIGRVNTDGVAHAPWVGFVMPFHFGIPHFDPLSIATMVTVMFVTFIESTGMFLAVGDMVDRPVDQERLVRGLRVDGLGTLIGGIFNSFPHTSFSQNVGLIGVTGVKSRYVCATGGVILVLLGLFPKMAQVVASVPPFVLGGAGIVMFGMVAANGIKVLSKVDFVNNTHNLFIVAVSVGMGLVPVVSPHFFSKLPPALAPILHSGILLASASAVLLNIVFNGVKGEKDARCEIRRAGHDFDGRPADVHH

SEQ ID NO: 42247 - protein, 596 aa, Rickettsia conorii str. Malish 7
MTKAYNIIHHKFDVVVVGAGGAGLRSAFGMAKEGLNTACITKLFPTRSHTVAAQGGISAALGNMGEDDWRWHMYDTVKGSDWLGDQDAIEYMCKNAPDAILELEHYGVPFSRTEEGKIYQRPFGGMTTEYGKGKAAQRTCAAADRTGHAILHTLYQQSLKHKVQFFVEYFAIDLLMEDGECRGVVAWNLDDGSLHCFRAHNVVLATGGYGRAYFSATSAHTCTGDGGGMAIRAGLPLQDMEFVQFHPTGIYSAGCLITEGARGEGGYLVNANGERFMERYAPAAKDLASRDVVSRAMTIEIREGRGVGEHKDHVFLHLNHLSPEILHSRLPGISETAKIFAGVDVTKEPIPVLPTVHYNMGGIPTNYHGQVIIKDGKNHNSVVKGLMAIGEAACVSVHGANRLGSNSLLDLVVFGRSSALKAAELIKPASPHRSIKEESLEKIINRFDKVRHANGNILVAELRLKMQRTMQSHASVFRTQEVLDEGAGMISEIRSGYKDIKINDKSLIWNSDLVEALELDNLLDQALVTVYSAAARKESRGAHAREDYPDRNDEDWMKHTLSSIDEAGKVVLDYKPVTLTTLTDEVTAVPPVKRVY

SEQ ID NO: 42248 - protein, 164 aa, Lupinus polyphyllus
MARPQQRYRGFRQRHWGSWVSEIRHSILKTRIWQGTFESAEDAARAYDEAARLMCGTRARTNFPYNPNASQSSSSKLLSATLIAKLHRCYMASLQMTRPSSLPEAPRIIASPNNAVKGIGADAMLLPKKREQEEQETGGNLDFKKVKVECSQQFKPLEEDHIAQ

SEQ ID NO: 42249 - protein, 198 aa, Shigella dysenteriae
ARHLTMIAIGGSIGTGLFVASGATISQAGPGGALLSYMLIGLMVYFLMTSLGELAAYMPVSGSFATYGQNYVEEGFGFALGWNYWYNWAVTIAVDLVAAQLVMSWWFPDTPGWIWSALFLGVIFLLNYISVRGFGEAEYWFSLIKVTTVIVFIIVGVLMIIGIFKGAQPAGWSNWTIGEAPFAGGFAAMIGVAMIVGF

SEQ ID NO: 42250 - protein, 204 aa, Shigella dysenteriae
RELKARHLTMIAIGGSIGTGLFVASGATISQAGPGGALLSYMLIGLMVYFLMTSLGELAAYMPVSGSFATYGQNYVEEGFGFALGWNYWYNWAVTIAVDLVAAQLVMSWWFPDTPGWIWSALFLGVIFLLNYISVRGFGEAEYWFSLIKVTTVIVFIIVGVLMIIGIFKGAQPAGWSNWTIGEAPFAGGLAAMIGVAMIVGFSF

SEQ ID NO: 42251 - protein, 193 aa, Streptomyces avermitilis MA-4680
MQPLIDHARAHGQRPEEFAQLAEGQSPQALFITCSDSRVVPALITGARPGELFELRTAGNIVPPYAASQHPTSEAATIEYAVEVLKVTDVVVCGHSHCGAVGALVRGDDLTAVPAVRDWLAHAAPRPAGAVEDPAVTEAVQSHVLTQLLRLRSYPCVSAKLTSGQLRLHAWFYEVHTGSVLAHRPQTDTFTAL

SEQ ID NO: 42252 - protein, 357 aa, Pyrobaculum aerophilum str. IM2
MAECGIILAGGFATRLRPLSYTKPKPLFPILGRPVIDWVIEKVSEVAEPVISARYLSYIIRNHVNAKWGGRVRVVEEDRPLGDGGAVVNVIKSLGLRGPVIVANGDVFTDISIREMWDFHKKMGGAVTIALIEVPPEEIGRFGIAVLEGERVKRFVEKPKEPVGSNLANAGIYIFEPEAIAQFPDINSGELKIAKHIIPKLMQKFDIYGYVHRGLWFDIGTHGDYLKANFAALERCNCHREVPGVKIIPPVYIGEGAVVGPGSVLGPYVVIGNGSRLGPNVRIRESVLMDGVVAEAGAYVAKSIIGEGVVLGKWTRVIEAVVADGVYIRDEVLVGRGASIGPNREVEQDVKEGEILP

SEQ ID NO: 42253 - protein, 433 aa, Synechocystis sp. PCC 6803
MVNATPFITTKSEEIFAAAQHLMPGGVSSPVRAFKSVGGQPIVFDRVEGAQIWDVDGNQYIDYVGTWGPAICGHAHPDVISALKQALDKGTSFGAPCAQENVLAEMVIDAVPSIEMVRFVNSGTEACMSVLRLMRAFTGREKIIKFEGCYHGHADMFLVKAGSGVATLGLPDSPGVPSNTTKATLTAPYNDLEAVKALFVENPDSIAGVILEPVVGNAGFILPDAGFLEGLRELTKEYGALLVFDEVMTGFRVSYGGAQARFGITPDLTTLGKVIGGGLPVGAYGGREEIMAMVAPAGPMYQAGTLSGNPLAMTAGIKTLEILQKPGSYEYLDKITKRLVDGLLAAAQDAGHEVCGGSISAMFGIFFAPGPVRNYEDAKLADTNKFARFHRGMLERGIYLAPSQYEAGFPSLAHTQEQIDQTIAVAKEVFATL

SEQ ID NO: 42254 - protein, 695 aa, Ashbya gossypii ATCC 10895
MAQLEDPKERAGKVGESQHGQHHNTAFIHKLYSMLEDDNMKDLIWWSASQNSFLIKPNEKFSKALATFFKHTNVASFVRQLNMYGFHKVSDHKPSSAKGTSQDEDEAINLWEFRHSMGCFRKGDKESLKSIKRRSSKNQVLLSRNNSAQSLASQYNSQQDLGPGGSSIAGHVHPIEPADKYYSTTVYQPPYTDAPPLHSQSQIQAYPDMRFPQEQKPHTSSVITLPHLPNSAIEDLRATNLDMMKLLDLVQKAMHISSPPSANELGGSVCSTSGGSGLSSNQLGSASGSANDVTSPSSFARSPTGTRERTLEYLHQEIAAFRTTILMKLQRHAELQLHMLPPTPSQRHSHPQNSYAVSAPPSTGTNFLPYNGSGSIGMPTGYDAYPTNKPALAIPGAISHGFHGSPYLMLDPYAKGSSSSISRKRHMSVLVDPLAPAPMSAPAAMQVPSLAQPTSTSSSPVHAPEGNMPHANAAGANSPFHASCPVSRIDSRQDLHHHQTSNPSASEDKRPFSPSRKDSPPSQLLPLLTTNARGSGDGNSLLLAPQSPATLPPTASQHRLPAPTPQNNAGRGPAQVSITYKPYFPYGTIPPQPVLSSQYILPLFQSGSGSFTSGSSVTAAHAPLRSTTAIPETSSCNNSEIPSFPKPTTDEQQAPATVNQSATNSHRQSIVNQDTCSSPATSKSRGLYALLNHDT

SEQ ID NO: 42255 - protein, 426 aa, Methanocaldococcus jannaschii
MALKMDKSKELFEEAKKYLVGGVNSPVRYFKPYPFFVEKAKDCYLFDVDGNCYIDYCLAYGPMVLGHANDAVIKAVKEQLELGSAYGCPTEKEIILAKEVVKRVPCAEMVRFVNSGTEATMSAIRLARGVTGRKKIIKFDGAYHGAHDYVLVKSGSGALTHGHPNSPGIPEETTKNTILIPFNDEDAVKKAINENKDEIACIIVEPIMGNVGCILPKEGYLEFLREITEENDILLIFDEVITGFRLAKGGAQEYFGVVPDIATLGKILGGGFPIGAIVGRRELMEQFSPLGAIYQAGTFNGNPISITAGIATLKQLDDRFYKETARTAKILADTLRELADKHNIKAKVYNIASMFQIYFNDKEVVNYEIAKQSDTEKFMKYFWRLLEKGVFVPPSQFECCFTSIKHDDEVVDKTIKAMEDVFEGLE

SEQ ID NO: 42256 - protein, 144 aa, Ipomoea nil
MKGGKSKAKSDNKLAVKKQAADTKKTKKAVKDPNKPKRPPSAFFVFMEDFRKTYKEKHPNNKSVAVVGKAGGDKWKQLTAAEKAPFISKAEKRKQEYEKNLQAYNKKQAAGAAEEEESDKSRSEVNDDDEDQDGSGEDDSEDDD

SEQ ID NO: 42257 - protein, 263 aa, Arabidopsis thaliana
METDSIDSVIDDDEIHQKHQFSSTKSQGGATVVISPATSVYELLECPVCTNSMYPPIHQCHNGHTLCSTCKSSKLKHESQCNFRPYSCPYAGSECAAVGDITFLVAHLRDDHKVDMHTGCTFNHRYVKSNPREVENATWMLTVFQCFGQYFCLHFEAFQLGMAPVYMAFLRFMGDEDDARNYTYSLEVGGSGRKQTWEGTPRSVRDSHRKVRDSHDGLIIQRNMALFFSGGDKKELKLRVTGRIWKEQQNPDSGVCITSMCSS

SEQ ID NO: 42258 - protein, 424 aa, Bacillus licheniformis ATCC 14580
MVADQNTGHTEENTHDVLKSTQTVIHKALEKLGYPEEVYELLKEPIRFLTVKIPVRMDDGSVKIFTGYRAQHNDAVGPTKGGIRFHPGVTEKEVKALSIWMSLKCGIIDLPYGGGKGGIICDPRDMSFPELERLSRGYVRAISQIVGPTKDVPAPDVFTNSQIMAWMMDEYSRIDEFNSPGFITGKPLVLGGSHGRESATAKGVTICIKEAAKKKNIDIEGASVVVQGFGNAGSYLAKFMYDAGAKVVGISDAYGGLYDPEGLDIDYLLDRRDSFGTVTKLFNDTITNKELLELECDILVPAAIENQITAENAHNIKAKIVVEAANGPTTLEATKILSDRDILLVPDVLASAGGVTVSYFEWVQNNQGFYWTEEEVEERLEKMMVKSFNNIYEMAHNRRIDMRLAAYMVGVRKMAEASRFRGWI

SEQ ID NO: 42259 - protein, 421 aa, Pseudomonas putida KT2440
MQDGFNDPLWRQVVSGAQMLFVAFGALVLMPLITGLDPNVALFTAGIGTLLFQLVTGRQVPVFLASSFAFITPIILAKGQFGLAETMGGVMAAGFVYTFMGLMVKIKGTGFIDRMLPPVVIGPVIISIGLAMAPIAANMAMGKGGDGTALMPYKTAMLISMPALLTTLIVAVFGKGIFRLVPIISGVLVGFALSFAFGVVDTARIAAAPWLEIPNFTAPAFNWQAILFIVPVALAPAIEHIGGVIAVGSVTGRDYLKKPGLHRTLLGDGLATTAAGLFGGPPNTTYAEVTGAVMLTKNYNPKIMTWAAVFAITLAFIGKFGALLQSIPVPVMGGILCLLFGSIAAVGMNTMIRHKIDLGEARNLVIVSVTLVFGIGGVLIGSGDGPDDWGLKGIALCAIVAIALNLILPGNDSWKHKKLDV

SEQ ID NO: 42260 - protein, 160 aa, Arabidopsis thaliana
MASSSGTSSGSSLLQNSGSEEDLQAVMDQRKRKRMISNRESARRSRMRKQKHLDDLVSQVAQLRKENQQILTSVNITTQQYLSVEAENSVLRAQVGELSHRLESLNEIVDVLNATTVAGFGAAATSSTFVEPINNNSFFNPLNMGYLNHPIMASADILQY

SEQ ID NO: 42261 - protein, 476 aa, Candida glabrata CBS138
MSLSGNNFENPQNNGTSRLLKNVQRLALNNVTNTTAGPHVGFLGSQSQDNSALRSFKSSIANLKGDSVPTYKVNPLSRPALVNNERDLTKTKLGIQEEKETRNYEENKENHGPQKGHFTQYDERVEDKNQSESTVSSQTTTESTQITTSNGDDDQTEEENSEDADSKKKRPISTIVEQDIPKKFKSCNRFGTEEYEWEDLDAEDANDPFMVSEDVNDIFEYLHQLEIVTLPRKEDLYKHRNICQNRDILVNWLVKIHNKFGLLPETLYLAVNLMDRFLCKELVQLDKLQLVGTSCLFIASKYEEVYSPSIKHFASETDGACTEDEIKEGEKFILKTLEFNLNYPNPMNFLRRISKADDYDIQSRTLAKFLLEISLVDFRFIGVLPSLCAAAAMFLSRKMLGKGQWDGNLIHYSGGYTKNQLAPVCEMIMDYLVSPVVHDEFHRKYQSRRFMKASIISVQWALKVRKNGYDIMSLHE

SEQ ID NO: 42262 - protein, 547 aa, Listeria monocytogenes str. 4b F2365
MTVKPGFDYMNNPLLNKGTAFSKEERASYQLDGLLPPIIETIEQQAVRIETQIENLETPLHKHQLLTNLYNENRTLYYYVVTKNVTDYLPIIYTPTIGDAVIQYHKEYTAPDEALFIDAFAPEKLSASIKNYAKNNPNIDMIVITDGEGVLGIGDWGVNGVKIAVGKLAVYTVAAGLAPDRVLPVVIDAGTNNETLLNDPLYLGNKRPRLSESEYDAFIASFVNVMKEVFPKAILHWEDFGRANASRILHNYRDKICTFNDDIQGTGAMVVAAVLATIQVSKIPLSEQKIIIFGAGTAGIGIADQLSAQWMRETGLPFESAKKHFYLVDRNGLVLDNMTDLTTGQKKYAHPSTEWSNVPTDTLENLMEAVHPTMLIGCSGVTGAFKESIVKKMTQYTERPAILPLSNPTKLAEATASDLIQWTDGKALIVTGSPSKPVEYQHTTYEIGQANNALLYPGLGLGALVTRAKYITDGMLAAASMAVAEQISPNKAGAALLPHVRTLRETSRAVAIAVANQAIKENIHQVELTNVTEAIEREMWQPIYKGV

SEQ ID NO: 42263 - protein, 150 aa, Zea mays
MGVANRTDFDLNNHIESSGQDLRYFDQAANEKYVPYVIEPSFGLTRALMAFLLDSYHEDEAPNAKGGVDKRTVLRLDPRLAPVKAAVLPLSRNEQLSPVARGLADDLRKHWNVDFDDAGAIGRRYRRHDEIGTPFCITVDFDTLEDKAVT

SEQ ID NO: 42264 - protein, 925 aa, Kluyveromyces lactis NRRL Y-1140
MSSEDSFNKPIIPTSGSARSVMHRPTPPPIPMELSHPPLPTIRTTDDLSNLSEMKPFGKPNPPVLTKALTDVDNFISLDPKYLNRRNDSLSSVETIDSTRDDNISIPKELPISESMQRRQKEWADRGAAMIVKDVPDKQTGKITKQVIKKGINDFKFGETLGDGSYSTVLLATSIESNKKYAVKILNKEYLIKQKKVKYVNIEKNTLQRLKNTKGIISLYFTFQDESSLYFLLEYAPNGDLLSLMRKHGSVNEKCTQYYAAQIIDALGFMHDKGVIHRDLKPENILLDVDMKVKLTDFGTARLLDSTSEDDLKYDLLTRSNSFVGTAEYVSPELLNDNYVDFRCDIWAFGCILFQMIAGKPPFKANNEYLTFQKVMKVQFAFTAGFPMTVRDLVKNILIKNPERRLLINQIKAHQFFADVNFGNGSVWDKDPPELGPYKVSARALQSSVPKVASSPAINPIHEPVRQSSVSPKITPKNTTTAQRPNGDTTSTTTKRELDPRTQRILNNVKKEISQRNHRRAALKPSQQYSGSPSQGDITPNPATAAAAALQQIKQPLNETTAKSSTSSAGSGRSQRKPSGSNRSASTNSSSSKSAPPSSSSNIRKISSDLSPMSKLDIMWSYYLKNIQERVIKMGEINVTTLKNQSLEAKISKSKLSLLDADGRVQKKNTLLTQVVRGGGNVTGFRQENSNLVEHDFYSEYLIDPENVEASYRKQSGADEASHEGMSKLKHFFSKAPDAPAEFIAQSEYIKRMCVITTFGRCLLFARKNKINQNSNLFYDLEYEIDLSQLGVRIKEVVPEKKTSSKDIFVVQTPFKTFVFQTDESDTLVWLHSLTSAIKSKNERFTNNETSINPIANKAALLAEQEAETQLNGYKTTKTPFLTKRRSSFTSQRQKQNNNGKLGTRPISSGSRMLSRSEQIFRTNK

SEQ ID NO: 42265 - protein, 472 aa, Oceanobacillus iheyensis HTE831
MQSYKMFVGGKWFGNNLEQIDVINPATNEQIGTIPNGGKEEAKQAVDAAHNALKEWSARTAEDRSNYLVKWHELIKEERETIAKIMTEEQGKPLKEAIGEVDYANGFISWYAEEGKRIYGDIIPASHTNKRIFVQKKPVGVVAAITPWNFPAAMITRKVGPALAVGCTVVIKPATQTPLTAFKLVELAEKAGIPRGVINIVTGSSSQIGKVWNDDGRVRKLTFTGSTEVGKILMKDAANTMKKISLELGGHAPFVVMEDADLDKAVAGVIASKFRNAGQTCVCTNRVYVHESIKDIFQDKLTEAVSKLKVGNGLEEGINIGPLIDQSAVDKVDEQVKDAISKGGRVTFGGKSLRGLYVEPTIVVDATDDMLCMYEETFGPLVPVTTFRDEEEVIARANNSPYGLAAYVFTENIGRAIRISEALEYGIVGLNDGAPSTPQAPFGGFKESGLGREGGYYGIEEFLEIKYISLAF

SEQ ID NO: 42266 - protein, 124 aa, Brassica napus
QFPKMSRIMVLPKMPCDECFNHADKESLAVDDELLVFGRELFQFAIWKYGLRSRRWVKCEGMHRPRCLFASGSLGGIAIVAGGTDMNGNILASAELYDSSSGRWEMLPNMHSPRTLCSGFFMDG

SEQ ID NO: 42267 - protein, 709 aa, Arabidopsis thaliana
MLYQHLKINYFGEIRMIDTVNLLLLTKLESGERERKTENKNEDNSHLLFSFFFLFLHCLLIDDLEARIMRFLHRFLLEDMPKETFSDSLCKNNCIQELKTLGYCSSYCLDECPSICEIVVISGLSPPAEIHHDDNLKRILIISASSIITTLFLLTLLVLCFKFYYRRRRSITTSRRWSMEEARNWDFDGPAPVIVDHPIWHIRTIGLNPTVISSIKVCQYSKKDGVVEGTDCSVCLSEFEEEETLRLLPKCKHAFHLYCIDTWLRSHTNCPLCRAPIVEANTMIDDHSEGLEEISVMIPEENGDDTDEEIEEERDGFVSNISRDHGESQQQRVRRSVSLDSLSGLRVSEVVVGREKEKLKRGNNIGSGSFLTLGEICFGLFMYCTYEHSSDALCLIDPDSKYPTLLSRPFSWQPLPHTSLSPMILFLPRLSLISKLKRLKTTQLRIPASFRRKATNLQVMASGKTPGLTQEANGVAIDRQNNTDVFDDMKQRFLAFKKLKYMDDFEHYKNLADAQAPKFKQQFLVIACADSRVCPSAVLGFQPGDAFTVRNIANLVPPYESGPTETKAALEFSVNTLNVENILVIGHSRCGGIQALMKMEDEGDSRSFIHNWVVVGKKAKESTKAVASNLHFDHQCQHCEKASINHSLERLLGYPWIEEKVRQGSLSLHGGYYNFVDCTFEKWTVDYAASRGKKKEGSGIAVKDRSVWS

SEQ ID NO: 42268 - protein, 358 aa, Lactuca sativa
MALLSDLVNLDLSSITDKIIAEYIWIGGSGMDLRSKARTLSGPVSDPSELPKWNYDGSSTGQAPGEDSEVIIYPQAIFKDPFRRGNHILVMCDAYTPAGEPIPTNKRAAAAKIFSNPEVEKEVTWYGIEQEYTLLQKDTNWPLGWPLGGFPGPQGPYYCGIGADKAFGRDIVDAHYKACLYAGVNISGINGEVMPGQWEFQVGPSVGIAAADQIWVARYILERITEIYGVVVSFDPKPIPGDWNGAGAHTNYSTKTMREEGGYEVIKKAIEKLGLRHKEHIAAYGEGNERRLTGRHETADINTFLWGVANRGASIRVGRDTEKEGKGYFEDRRPASNMDPYVVTSMIAETTILWDNKS

SEQ ID NO: 42269 - protein, 382 aa, Bacillus anthracis str. A2012
MVLECGKENVALKTLELQERLTEIFQHLHENPEVSWKEYETTAYITNFLKEEGISYKTFDDCPGVIAEIGNGNPVVAIRADMDALWQEVNGEFKANHSCGHDAHMTIVMGLILQLKNMRWKSGTVRFIFQPAEEKGNGALKMVEKGAVDDADFLFGVHLRPIEELSLKQAASSIRHGAAGFLEGTIHGEDAHGARPHQGINAIDVISMINIGLKNIWLRPQSSYSVKMTRCQAGGDNLNIIPGNGHFSLDVRAENNTLLEELKKRIEHVIESAASMGSKTSYEWIDLAPGAEVSEEAERFMRKGILEVYGEDKCTGPLYTTGSDDFHYYTVKRPYLKAVMLGLGADLQPGLHHPYMKFDHSCIMDGVEILKQTVLKVLEDRG

SEQ ID NO: 42270 - protein, 399 aa, Candida glabrata CBS138
MSSMSSSSMDSAQRKPSEDEKMDRPALTNVEVNRALPGGRKAQPLTEQEKKRHPMYRKPSRIRREDSDASYMANSKKRQVFQDNADDDEPTGKDQESRIKRAKVQDRQIKWVDLDSKEKNNIAMVVEYTNDIFDFLYEREKNTIPMHNYLLDRKSKYHLRPATRAVLVDWLVEVHDKFQCYPETLYLGINIMDRFLSQHKVDINKLQLLAVTSLFIAAKFEEINLPKLSEYAYITDGAASKDDIKVSEMFILTELKFSLDWPNPLNFLRRLSKADGYDGECRMIAKFILEYSLCSSKFVGEKPSELAAMAIFLARRILKRESPIWDDTFIHYSGGIDALNDNHFQNLCTIMINEIAQPATKLTALCDKYKSIKGGTIYDKTIKWCKDQMERNYENVFSC

SEQ ID NO: 42271 - protein, 205 aa, Shigella flexneri
LRRELKARHLTMIAIGGSIGTGLFVASGATISQAGPGGALLSYMLIGLMVYFLMTSLGELAAYMPVSGSFATYGQNYVEEGFGFALGWNYWYNWAVTIAVDLVAAQLVMSWWFPDTPGWIWSALFLGVIFLLNYISVRGFGEAEYWFSLIKVTTVIVFIIVGVLMIIGIFKGAQPAGWSNWTIGEAPFAGGFAAMIGVAMIVGFS

SEQ ID NO: 42272 - protein, 180 aa, Pyrobaculum aerophilum str. IM2
MPVRPARCYKRIKGPPYTREEYIHGAPMIQIPKFDMGTTSAAARTAFTMTAKLVVEERGQIRMQALEAARQMASKYLTKYVGDANYYLRLNVVPHHVLRENRMLAMAGADRLQEGMRLAFGSPAGRAARVEPGQVLFYAEFKPEHLPHIKEALRRAASKLPLPTRIVIEPKGNGGNKTVT

SEQ ID NO: 42273 - protein, 496 aa, Trichodesmium erythraeum IMS101
MIMIGHTLELDDLKKISSPKKIVALFEKLGFNFQIEHLDIEQLELPSYCRETIDNTYKIYNPNQEELQVFLLELRQEKFKTNYKEQERIITISQGILRNKNNFLLIATKKYNKLIIVAPHRRENQNIKISIKWWLIDCQNPNYYDTYWLENVAINNCEPTEELTNKHNSEGSYDPDIEPPTGTFTEDSIQLYYKQVNSFARLHPEEEIHLAHQIDGLLALEKIYEKLEEKLNRSPNEIEWATEAKMSKWELCDRLEQGRRAKNQMVTANLRLVTSVAKRYQNRGLDFQDLIQEGVIGLLRATEKFDHTKGYKFSTYGIWWIRQAITRAICDYSRIVRLPVYLYETISQIKKIVKQISIECSPLTAEEVATRMEMTTEKLQFIIECAQETLSLDYPINKGENIIYKEMIKFNGETPTKYVFENCLQEDVESVLKTLTERERNVLQMRFGLDDGQEKTLKEIGDTFNLTRERIRQIEAKALRKLEDPKRNHILREYIH

SEQ ID NO: 42274 - protein, 192 aa, Shigella flexneri
ARHLTMIAIGGSIGTGLFVASGATISQAGPGGALLSYMLIGLMVYFLMTSLGELAAYMPVSGSFATYGQNYVEEGFGFALGWNYWYNWAVTIAVDLVAAQLVMSWWFPDTPGWIWSALFLGVIFLLNYISVRGFGEAEYWFSLIKVTTVIVFIIVGVLMIIGIFKGAQPAGWSNWTIGEAPFAGGFAAMIGV

SEQ ID NO: 42275 - protein, 557 aa, Pyrococcus horikoshii OT3
MKFKLSKKQKVLNSPIHLSTMTKFIFVTGGVVSGLGKGITSASIGLLMKARGYKTTNIKIDPYINYDAGTMNPYQHGEVFVLDDGGEVDLDLGNYERFLDTNLTFEHNITTGKVYSTVIEKERRGEYLGATVQVIPHITDEIKRRIREIAKDYDIVVVEIGGTVGDIESMPFLEAARQMQLEEGRENVAFVHVTYVPKLKVVGEQKTKPTQHSVKELRSLGIQPDAIVARSEDPLEEEARKKISLFTNVPREAVVSAYDVEDTYEVPLLLEREGLGKYLIKRLKLEDREPDLREWEKMVAKYKALKETVEIAIVGKYVKLTDSYLSIKEALKHASVSNDVKVKIRWIEAEDIEEHGTKLLEGVDGIIVPGGFGARGAEGKIMTIKYARENDIPFLGICFGFQLTVVEFARNVLGMKGAHSTEIDPQTPYPVVDLMPEQRNLEKLGGTMRLGAYPVKIKKGTLAYRLYKKELVYERHRHRWEVNPDYIEAFEKAGLVFSGVAGDDERRMEILELPDKRYFIATQFHPEFKSRPMRPAPVFHGLVRAAKEYKQEKNATN

SEQ ID NO: 42276 - protein, 138 aa, Brassica napus
  misc_feature (3)..(3): Xaa can be any naturally occurring amino acid
  misc_feature (5)..(6): Xaa can be any naturally occurring amino acid
  misc_feature (9)..(9): Xaa can be any naturally occurring amino acid
  misc_feature (17)..(19): Xaa can be any naturally occurring amino acid
  misc_feature (32)..(32): Xaa can be any naturally occurring amino acid
  misc_feature (46)..(46): Xaa can be any naturally occurring amino acid
  misc_feature (51)..(51): Xaa can be any naturally occurring amino acid
  misc_feature (60)..(61): Xaa can be any naturally occurring amino acid
  misc_feature (65)..(65): Xaa can be any naturally occurring amino acid
  misc_feature (70)..(70): Xaa can be any naturally occurring amino acid
  misc_feature (78)..(78): Xaa can be any naturally occurring amino acid
  misc_feature (82)..(82): Xaa can be any naturally occurring amino acid
  misc_feature (86)..(86): Xaa can be any naturally occurring amino acid
  misc_feature (88)..(88): Xaa can be any naturally occurring amino acid
  misc_feature (93)..(93): Xaa can be any naturally occurring amino acid
  misc_feature (97)..(97): Xaa can be any naturally occurring amino acid
  misc_feature (109)..(109): Xaa can be any naturally occurring amino acid
  misc_feature (112)..(112): Xaa can be any naturally occurring amino acid
  misc_feature (121)..(122): Xaa can be any naturally occurring amino acid
  misc_feature (124)..(124): Xaa can be any naturally occurring amino acid
  misc_feature (126)..(126): Xaa can be any naturally occurring amino acid
  misc_feature (129)..(129): Xaa can be any naturally occurring amino acid
  unsure (1)..(138): unsure at all Xaa locations
MKXSXXLLXSLNQRQPXXXPTRKPPKQKRKAXTTTNDNKPIKVRYXSNPMXVETCPFKFXXLVQXLPGQXAELPPDPXTYAXADPXQXEINPXPLEXVVSEYYSPLDEXVFXAPQMSAGLXXFXSXGFXNVNALGSIG

SEQ ID NO: 42277 - protein, 451 aa, Schizosaccharomyces pombe
MSTPYEPEFQQAYKEIVGSIESSKLFEVHPELKRVLPIISIPERVLEFRVTWEDDKGNCRVNTGYRVQFNSALGPYKGGLRFHPSVNLSILKFLGFEQIFKNALTGLPMGGGKGGSDFDPKGKSDNEIRRFSQAFMRQLFRYIGPQTDVPAGDIGVTGFVVMHMFGEYKRLRNEYSGVVTGKHMLTGGSNIRPEATGYGVVYYVKHMIEHRTKGAETLKGKRVAISGSGNVAQYAALKCIQEGAIVKSISDSKGVLIAKTAEGLVPEEIHEIMALKEKRASIADSASLCKKHHYIAGARPWTNVGEIDIALPCATQNEVSGEEAAALIKQGCRYVAEGSNMGSSAEAVEVFEKSRASGEGCWLAPGKAANAGGVAVSGLEMAQNAQFSTWTHAEVDAKLAGIMQNIFEQSTDVASKYCDSGSNNIPSLVDGANIAGFLKVATAMQAVGDWW

SEQ ID NO: 42278 - protein, 244 aa, Arabidopsis thaliana
  misc_feature (95)..(95): Xaa can be any naturally occurring amino acid
  unsure (1)..(244): unsure at all Xaa locations
SKLRLPQLNEQKLQSTHTHFQVSIQRWRGTEPERENREDETEVNEDEDTGAQVAPIVRLEEVAVTTGEEDEDAVLDLKSKMYRFDKEGNQWKERXGTVKLLKHKETGKVRLVMRQSKTLKICANHLISSGMSVQEHSGNEKSCLWHATDFSDGELKDELFCIRFASIENCKTFMEKFTEIAESQQVGKESTQGDEAAGLIENLSVEENISEEKAKEAEEKEPAKEDKETKKEKVEEEKKTEAST

SEQ ID NO: 42279 - protein, 309 aa, Schizosaccharomyces pombe
MSYKLDQLTRLPENKKCFDCDAPNPQWASCNLGIFICLDCSGQHRGLGVEKSFVRSITMDNWSERQVKMMEVGGNSNAKTFLSTDPMFSAAGSIREKYNTDIAEDLRQKIRAEVDGVEWVKVDRPKSVSSHASVTSSSTVPTIPSVSKEANDKYFAKLGSINSQRPDDLPPSQGGRYQGFGSSNSVNPNSSARNNGGSFLDQLSSNPVSALSHGWNMFSRSVSQQIQDVQDPETRKDYMNAINNFSSNVQEGAKQSFTQLKSFLDENVYSENPQNTRGTYDAEIDSPYSALAASPPPEDYSKKNFDKHD

SEQ ID NO: 42280 - protein, 597 aa, Schizosaccharomyces pombe
MTENYGSMEHRKKSFRNNENLEQQFHPLREELDNAGPINDRTSELSLEGVSKAEAIASTWSKRSIIVAYLGLYLLSFASSLEQQTTYSLQRYATSNFSAHSNLATINLVGNILLAVVRAPMVKAADVFGRSESLSLALGMTVLGYLSLAFSRNIQMFTVAYILYICGQTGLGLLSQLIIADTSSLLNRGILSAIPELPYLATVWIGPVLAQAFHPEKNYGWRLGYGIWAFILPTVSLPLLASLFLNQRKAKAAGLYREHHNLINHSTPEKLRLFYLFWQELDGLGIVLFVSGFTLLLLPFSHSSQVVSPDSTILTLFTITLSIALLVTLCFYDVKYARYPVFALKSLKDRTILGSCVLIFTYFMSYYIFSNFLTSFLQVSYGLSIDMSSLTLNVFVFSMTTTAILSGFLMKRFGRFKMLLMISVPMYVLGILGIILFGINDNHYTRPLVLVLILAGMGGGLLTLSAQIAVQSVSSHAKLGMNLTLYLTFSSVGGAFGSAIAGGVWSKRLSSRLLHDLKDHLPVPEIESIFRDLRTALSYPQGTQIRNIINVAYTATEKDLFHISLVASLFMFAGLVIIRDVPLSTENHDTAVETPSE

SEQ ID NO: 42281 - protein, 447 aa, Triticum aestivum
  misc_feature (363)..(363): Xaa can be any naturally occurring amino acid
  unsure (1)..(447): unsure at all Xaa locations
MGKEKTHINIVVIGHVDSGKSTTTGHLIYKLGGIDKRVIERFEKEAAEMNKRSFKYAWVLDKLKAERERGITIDIALWKFETTKYYCTVIDAPGHRDFIKNMITGTSQADCAVLIIDSTTGGFEAGISKDGQTREHALLAFTLGVKQMICCCNKMDATTPKYSKARYEEIVKEVSSYLKKVGYNPDKVPFVPISGFEGDNMIERSTNLDWYKGPTLLEALDQINEPKRPSDKPLRLPLQDVYKIGGIGTVPVGRVETGVIKPGMVVTFGPTGLTTEVKSVEMHHESLLEALPGDNVGFNVKNVAVKDLKRGFVASNSKDDPAKEAANFTSQVIIMNHPGQIGNGYAPVLDCHTSHIAVKFAEXVTKIDRRSGKELEALPKFLKNGDAGIVKMIPTKPMVVETFATYPPLGRFAVRDMRQTVAVGVIKGVEKKDPTGAKVTKAAIKKK

SEQ ID NO: 42282 - protein, 661 aa, Oryza sativa
MEETYTVKVGEATPAAGGKPSAGPVYRSIYSKDGLMKLPEDILSPWDFFSGAVKQYPKNKMLGQRKVSDGKAGDYVWLTYEEVYQKVIKIGSAIRSLRVKPGGHCGIYGSNCPEWVMAMQACNSQGICYVPLYDTLGANAVEFIMDHAEISIAFVQESKIQSVLSVVKRCRAHIKAIVSFGDVTSELKREAEQLGVSCFSWEEFSSMGKQNYELPKKQKDDICTIMYTSGTTGDPKGVIITNRALIAGVMTTEHLLKVTDKVVAEDDSYFSYLPLAHIFDQVIGNYCISKGASIGFWQADIRYLMEDVQMMKPTVFCGVPRVYDRIYTGINQKIQSGGMIAKSLFQYAYNYSRITKSVTLSSLISKLGNLRKGLKQDEASPFFDKIVFSKIKEGLGGRIRLLLSGAAPLPRHVEEFMRVTSCSVLVQGYGLTESCSGCFTSIANVFSMIGSVGPPVTTIEARLESIPEMGYDALSNVPRGEICLRGHTLFSGYYKRPDLTEEVFSDGWFHTGDIGEWQPDGTMKIIDRKKNIFKLSQGEYVAVEVWVYGNSFESFLVAVVVPEKQAIEDWAAQNNKTGNFAELCNDPKARMYIQDELNKTGKRLGLRGFEMLKAIHLETTPFSIEKDLVTPTFKLKRPQLLKYYKDCIDQLYKDAKVGNKQ

SEQ ID NO: 42283 - protein, 477 aa, Kineococcus radiotolerans SRS30216
MRGSRRSSRQHSRPQEHFVAGAAEQQYDVVILGGGSGGYACALRSAELGLKVALVEKDLLGGTCLHRGCIPTKALLHAAEVADSAKESETFGVRATFDSIDMAGVNKYKDGVIARLYKGLQGLVKSRKIDLVAGTGKLVAKNTVEVDGQRYTGKAVVLASGSYSRSLPGLEVGGRIMTSEQALALDSVPDRVVVLGGGVIGVEFASVWRSFGADVTIVEALPHLVPLEDEAASKALERAFRKRGIKFSLGVRFKGVEQTDSGVVVSLEDGKTFEADLMLVAVGRGPNTAGLGYEDQGITMDRGFVLTDERLRTNVEGVYAVGDIVPGLQLAHRGFAQGIFVAEDIAGLAPAPIDELGIPKVTYCEPEVASVGLTEAKAREKYGDVDVVEYNLGGNGKSQIIGTTGFVKLVRQKDGPVVGVHMVGSRMSEQVGEAQLIVNWEAYPDDVASLVHTHPTQNEAVGEAFLALAGKPLHSHA

SEQ ID NO: 42284 - protein, 221 aa, Glycine max
MGRGKIVIRRIDNSTSRQVTFSKRRNGLVKKARELSILCDAEVGLIVFSSTGKLYDYASTSMKSVIERYNKVKEDHQQLINPASEVKLWQREVASLRQQVQYMQECHRQMMGQELSGLGIEELGNLEKRLEMSLKGVRMKKDQILIDEVKELHQKGSLAHQENVELNRKINLIRKENEELQKVIEAKCRKGVAASNPPFTINYGCNMLAPISLQLSLPEST

SEQ ID NO: 42285 - protein, 119 aa, Citrus limon
GGRVKCMKVWPPTGLKKFETLSYLPPLSDEALLKEINYLLRSGWIPCLEFELEKGWVYREHHRSPGYYDGRYWTMWKLPMFGCTDATQVLKEVGEVQKEYPHSFVRIIGFDNKRQVQCI

SEQ ID NO: 42286 - protein, 139 aa, Arabidopsis thaliana
MERIESYNTNEMKYRGVRKRPWGKYAAEIRDSARHGARVWLGTFNTAEDAARAYDRAAFGMRGQRAILNFPHEYQMMKDGPNGSHENAVASSSSGYRGGGGGDDGREVIEFEYLDDSLLEELLDYGERSNQDNCNDANR

SEQ ID NO: 42287 - protein, 92 aa, Ambrosia artemisiifolia
MSILGGITEVKDNDNSVDFDELAKFAIAEHNKKENAALEFGKVIEKKQQAVQGTMYYIKVEANDGGEKKTYEAKVWVKLWENFKELQELKLV

SEQ ID NO: 42288 - protein, 370 aa, Debaryomyces hansenii CBS767
MVSITEQTAILAKYLDLSQNGKVLAEYVWIDADGNSRSKCKTLDKKPSSVEDLPEWNFDGSSTGQAPGHDSDVYLRPVAFYADPFRKGDNIIVLTECWNNDGTPNKFNHRHESAKLMKAHADEEVWFGLEQEYTLFDQFDQPYAWPKGGFPAPQGPYYCGVGTGKVYARDLIEAHYRACLHAGVDISGINAEVMPSQWEFQVGPCEGIQMGDELWIARYLLQRVAEEFGVKVSFHPKPLKGEWNGAGCHTNVSTKSMRLPGGMKSIEVALSKLAKRHKEHMLLYGADNDQRLTGRHETASIEGFSSGVANRGASVRIPRSVAKEGYGYFEDRRPASNIDPYLVTGIMVETICGSIPDADMFKEYARESSD

SEQ ID NO: 42289 - protein, 615 aa, Oryza sativa
MDEDYLILPKDEPFFYQDDLNLCDPEGTAFPAPYIGELGLLHPTTLGGDDAEPEEAAAPSFPQFIGDLSAQPPPPTPGGSVKAAPQFIGDDVSAQPPYHNGAGEGSGLPPAMSSGMEEAAHLAPSNAPLHPFDDVFDLLEPFDEVPRPEETEELFAYALELDKGNDDQWILGAAHLDANPNQTPCSLLSQFDADSLLGTNHQTAIHNSAVATHQLVQEIPSSDTPPARAAADAMEMAELSRVADECGGEASMVWSSDEDKLLLDGFSRLANQDSVSMCMEIAYGLPKKTAMDVALRIRWFQNKNKSAAQAGVISKESAGGNTEKAQAQAGVRSTESTVRKTRKGKGIENPNKKRNKHALSERGQDCMSTKALNRDNSMLLDQIYDKLRTGQLACAPSMFDKVKTNLDAILAKMRAMGVNTDEYKIDLEALEEIKQGLHPSMNVDKLKKMAGAVRTGGKGSMRRKKKAVHKTTTTDDKRLQSTLKRVGVNNIPGIEEVNIFKDDVVIQFQNPKVQASIGANTWVVSGTPQTKKLQDLLPTIINQLGPDNLDNLRRLAEQFQKQVPGAEAGASAGNAQDDDDDVPELVPGETFEEAAEEKEPEEKKEAEVEEKKESS

SEQ ID NO: 42290 - protein, 476 aa, Azoarcus sp. EbN1
MADKQFDVLVIGGGPGGYVAAIRAAQLGFKTACAESNPYADPKGEPRLGGTCLNVGCIPSKALLHTSHLFEEAEHAFPTQGIRLEGKVSIDVPVMIGRKNKVVDQLTSGIKGLFKKNKVTFLAGHGSFEGNGPAGYVVRVGAETVEARHVIIATGSKPRHLPGIPVDNRIVCDNVGALDFDSVPKKLGVIGAGVIGLEMGSVWRRLGAEVTVLEALPDFMPFADMDVAKEALKVFTKQGLDIRTGVTIGETKVGADGVSLAYTGKDGKEARLECERLIVSVGRVPNTEGLNASTVGLDVSDRGQIVVDGHCRTNLPNVYAVGDVVRGPMLAHKAMEEAVMVAEIIAGQAGHANLDTVPGVIYTSPEIAWVGKSEQQLKAEGVAYRAGKIPFMANGRALGSGDPTGFVKMLADADTDRILGVHIIGANASELISEAVVAMEFGGAAEDLARICHAHPTLSEVVHEAALAVDKRPLHF

SEQ ID NO: 42291 - protein, 431 aa, Azoarcus sp. EbN1
MSTERTATLTVDGKTVEFPVMTGTHGNDVIDIRTLGAKTGFFTYDSGFLSTASCKSTITFIDGDKGELLYRGYPIEQLADKCSFLEVAYLLKNGELPNGTQKVEFENTIKNHTMLHDQMTKFFTGFRRDAHPMAVMVGVVGALSAFYHEAMDFSDSEHRNISINRLIAKLPTIVAMAYKYNMGQPFMYPRNELDYTANFMHMMFGTPCEEYKPNPVLVRALDTIFTLHADHEQNASTSTVRLAGSSGANPFACISAGIACLWGPAHGGANEACLNMLEEIGDVSRVGEYIARAKDKNDSFKLMGFGHRVYKNFDPRAKLMRQVCYDVLGELGLENDRLFKLAMELEKIALEDQYFVEKKLYPNVDFYSGIVQKALGIPTSMFTCIFALARTVGWITQWEEMITDPEYKIGRPRQLYIGAARRDVPTLAQRP

SEQ ID NO: 42292 - protein, 560 aa, Listeria monocytogenes str. 1/2a F6854
MQTELVNQIEVKLRKIYQAAYQPAYLEKMLACAENYSNNTRGSIDTISEKNVYLIAYGDSIFEKNKHPLQTLNEFLQEYAQDVITDVHLLPIFPSTSDDGFSVTDYKQIDEQLGDWDDVQKMSENFRVMLDFVANHMSKSSDWFKRFSDNEAPYNQFFIEKDSQFDYKNVTRPRTSPLFHKYENGKELWTTFSEDQLDLNVRNIDCLVALTDVLLFYASKQATSIRLDAIGFLWKTSGTTCMHLPETHEIISLWRLLIDELYPNLQIITETNVPHEENISYFGDGENEANMVYQFPLPPLVLHTFTCHDTTKLSKWAKSISQVSDTATYFNFLASHDGIGMRPATGILSDEEINSLVQKAVQNGGQVSYKDNADGTQSVYELNINYGEALQNLDEDTTEELVTKKIIAAHSILLTLQGVPAIYYHSLLGSKNDLVGYEESGINRRINREKLEKNQLVHELKTDTYRKTIFTSLKKLVQIRRNHTAFSPFATQEILDLGPDVFAIKRESEGECIYGIINVTSHDISKKVAFSGTNLLANQPVTSELELTAYEVVWIKKAVQ

SEQ ID NO: 42293 - protein, 214 aa, Triticum aestivum
  misc_feature (183)..(183): Xaa can be any naturally occurring amino acid
  misc_feature (206)..(206): Xaa can be any naturally occurring amino acid
  unsure (1)..(214): unsure at all Xaa locations
MVKETTEAHGGEVTIMSATTVEPALPLQQHRLPLSNLDLLLPPIDVGVFFCYLHPAPTAAALKEALAKVLVAYYPLAGEVVANGDGEPELLCNCRGVDFTEASAGDTELRELRLGIVDEGVDKLVPSKKAGVISVQVTKFKCGGAVVGCTFDHRVCDAYSFNMFLVAWAATSRGGSVPPAPTXRRSLVSPRDPSPRTYATNALIDXLFSPLSSA

SEQ ID NO: 42294 - protein, 165 aa, Mesorhizobium loti MAFF303099
MGDEERRWPCSRKSEGVAGRLSEDETMIARMLFGADPYRNMRRLQDEVSRLEFPAVNAFVNQDGVIITAELPGVRSEDLDILIHRDSVTLSGERQAEAEDARRGYHRRERRQGRFVRTVSLPFLVDPNNVGANLINGLLTLGLPRAEEDKPKRIHVNASKEARHG

SEQ ID NO: 42295 - protein, 563 aa, Ashbya gossypii ATCC 10895
MLRSSGTKSVLRGLRFYSHKELKFGVEGRAALLRGVETLADAVSATLGPKGRNVLIEQQFGAPKITKDGVTVARAITLEDHFENMGAKLLQEVASKTNEAAGDGTTSATVLGRAIFTESVKNVAAGCNPMDLRRGTQAAVEKVIEFLSKNKKEITTSAEIAQVATISANGDSHVGKLLASAMEKVGKEGVITIKEGRTLEDELEVTEGMRFDRGFISPYFITDAKANKVEFEKPLLLLSEKKISSIQDIIPALEISNQSRRPLLIIAEDIDGEALAACILNKLRGQVQVCAVKAPGFGDNRKNTLGDIAVLTGGTVFTEELDLKPENATLQHLGSADSITITKEDTVVLNGNGTKENIEARIEQIRNSIDLTTTNSYEKEKLQERLAKLSGGVAVIRVGGASEVEVGEKKDRYDDALNATRAAVEEGILPGGGTALLKATRVLDEVKTENFDQKLGVDIIRRAIAQPARKIIENAGEEGAVIVGKIIDDFGEDFTKGYDAAKGEYTDMLAAGIIDPFKVVRSGIVDASGVASLWLTTEVAIGDAPKPANAAPPAGMPGMPGMM

SEQ ID NO: 42296 - protein, 159 aa, Zea mays
RKMARKPLDYEELNENVKRVQYAVRGELYLRASELQKEGKKIIFTNVGNPHALGQKPLTFPRQVVALCQAPFLLDDPHVGLMFPADAIARAKHYLAMAPGGLGAYSDSRGIPGIRKEVADFIHLRTTILPAEEDFPAIMSSFKKFNDSFMEQYEGYSRL

SEQ ID NO: 42297 - protein, 87 aa, Glycine max
  misc_feature (35)..(35): Xaa can be any naturally occurring amino acid
  misc_feature (64)..(64): Xaa can be any naturally occurring amino acid
  unsure (1)..(87): unsure at all Xaa locations
SIPWTTLGHKNRPSGYLCYKTSTSPLLSRKWEDWXLLCCVTSLLTIRMTGRGLNAQLCLTMRTXCHEKWLERVKMRNWMTADGNKNN

SEQ ID NO: 42298 - protein, 531 aa, Triticum aestivum
  misc_feature (68)..(68): Xaa can be any naturally occurring amino acid
  misc_feature (87)..(87): Xaa can be any naturally occurring amino acid
  unsure (1)..(531): unsure at all Xaa locations
MAAAPPPKADELQPHPPKEQLPSVSFCITSPPPWPEAVILGFQHFIVMLGTTVIIPSALVPQMGGGNXEKARVIQTLLFVAGINTLXKTSFGSRLPVVMGGPYTFPAPPISIILAGRYDNETDPHEKFLRTMRGTQGALIIASTIQIILGFSGLWRNVVKLLSPLSAVPLVSLVGFGLYELGFPAVAKCVEIGLPELILMVAFSQYLPHVLHSGKGVFGRFSVLFTVSIVWLYAYILTISGAYKNVKLKTQAHCRVDRSGLPRGPPWISVPYPFQWGAPTFDAGECFAMMMTSFIAIVESTGAFIAASRYASATMIPPSIVSRGIGWQGIGILLDSFFGTANGTSVAVENVGLLAVTHVGSRRVVQISAGFMIFFAVLGKFGALFASIPLPIFAGMYCVFFAYVAGACGLSFLQFCNLNSFRTKFILGFSFFIGISVPQYFNEYASVSGHGPVHTGARWFNDMINVPFSNKPLVAGLVAYLLDNTMHLHQSAVRKDRGYHWWDKFRSFKKDARSEEFYSLPFNLNKFFPSV

SEQ ID NO: 42299 - protein, 147 aa, Listeria monocytogenes str. 4b F2365
MEQTYVMVKPDGVERGLIGEIVTRIEKKGLKIVAGKLMQIDRELAEKHYAEHIGKSFFEDLIGFITSGPVFAMVLEGDDAIATARRMMGKTNPLEADPGTIRADYAIHTNRNVIHGSDSPESAKREIQLFFAPQEILSYQKAIDTWI

SEQ ID NO: 42300 - protein, 180 aa, Buchnera aphidicola str. Bp (Baizongia pistaciae)
MILFKFFLACFSQIKSVWLTFINIFSKRETRMYPEESLSLSSRYRGRIILSRNSFGKERCVACGLCSVVCPVSCISLKKSTLKNNKWYPKFFRINLSRCIFCGLCEEACPTLAIQLISDVELSEYKRQDLVYEKDDLLISGQGKYLDYDFYKFSGVEVGTKNKGELDFESHPIDVKTLLP

SEQ ID NO: 42301 - protein, 311 aa, Chlamydomonas reinhardtii
VCRDFLFLEKVKRQCEKTLHRPATSEEIAAAVAMDVESLKLRYDAGLKAKELLLKSNYKLVMTVCKSFVGKGPHIQDLVSEGVKGLLKGVEKYDATKGFRFGTYAHWWIRQAVSRSLAETGRAVRLPMHMIEQLTRLKNLSAKLQTQLAREPTLPELAKAAGLPVTRVQMLMETARSAASLDTPIGGNELGPTVKDSVEDEREAADEEFGSDSLRNDMEAMLLELPEREARVVRLRFGLDDGKEWTLEEIGEALNVTRERIRQIEAKALRKLRVKTIDVSGKLMEYGENLEMLMDGSREMAARTSSGTRKT

SEQ ID NO: 42302 - protein, 408 aa, Streptomyces avermitilis MA-4680
MPRTVRDVVFVDGVRTPFGKAGPKGIYHETRADDLVVKAIRELLRRNPGLDPKKIDEVAIAATTQIGDQGLTLGRTAGILAGLPQSVPGYSIDRMCAGALTAVTATAGSIAFGAYDAVIAGGVEHMGRHPMGEGVDPNPRFVSEKLVDESALFMGMTAENLHDRYPHITKQRADEYAVRSQEKAAKAYANGKIQQDLVPVSVRNTNAEVGETGWGLVTADEPMRPGTTLENLAGLKTPFRVHGRVTAGNAAGLNDGATASIIASEDFAREHNLPVKMRLVSYAFAGVEPEVMGYGPIPATEKALAKAGLSIEDINLFEVNEAFAVQVLAFLDHYGIADDDARVNQYGGAIAFGHPLASSGVRLMTQLARQFEEQPEVRYGLTTMCVGFGMGATVIWENPHHKDAGGDK

SEQ ID NO: 42303 - protein, 593 aa, Bacillus licheniformis ATCC 14580
MKFWKSVVGKLWFTILLLVSFVLFILTFFLLEFIENYHVDEAEADLTKLASKVAVIMENHKDQETARSITWELADELTSIAVIKNENEYWYSPREHQKVASITLKDIKNDPDLNEALRKHQKVQKRTVISNQKNDQLIVGVPYGKGEDEGMVFLSQSLLAVKDTTQHTTRYILFAAAIAIVLTTIFAFFLSSRITYPLRKMRQGAQDLAKGKFDTKIPILTQDEIGELAIAFNQMGRQLKFHITALNQEKEHLSNILSSMADGVITINIDGTILVTNPPAERFLQAWYYEQNMNVKEGHELPPEARELFQNTVSTEKEQMIEMTLQGRTWVLLMSPLYNQSHVRGAVAVLRDMTEERRLDKLRKDFIANVSHELRTPISMLQGYSEAIVDDIASSEEEKKEIAQVIYDESLRMGRLVNDLLDLARMEAGHISLNVEPVELREFFERVFRKFYGVAGDKNITLSHNLDLHEAKFVFDPDKMEQVLTNLIDNAIRHTNAGGTVHVDVQSAESGLKIAVKDSGSGIPEEDLPFIFERFYKADKARTRGKGGTGLGLAIVKNIVDAHNGSITVHSMLNEGTSFTFYIPRNKQDDGQI

SEQ ID NO: 42304 - protein, 278 aa, Oryza sativa
MAFFRGLTAVSRIRSRMAQEATTLGGVRWLQMQSPSDLDLKSQLQELIPEQQDRLKKLKSEHGKVQLGNITVDMGIRFRGLSIPECQKVLPTAIKGGEPLPEGLLWLLLTGKVPTKEQVDALSKELVTRSSVPGHVYKAIDALPVTAHPMTQFTTGVMALQVESEFQKAYDKGMPKSKFWEPTYEDCLNLIARLPPVASYVYRSDHERGNVSAHTGHLVIIVSLFSTSILLSAANIVLTSHRITAGCCIILAAFYVLPFWHALLPRIPLQRFDLLHCD

SEQ ID NO: 42305 - protein, 197 aa, Archaeoglobus fulgidus DSM 4304
MMEKEYEYLVPPDDYLAAGVHIGTQIKTGDMKKFIFKVRQDGLYVLDIRKLDERIRVAAKFLSRYEPSKILLVAARQYAHKPVQMFSKVVGSDYIVGRFIPGTLTNPMLSEYREPEVVFVNDPAIDKQAVSEATAVGIPVVALCDSNNSSADVDLVIPTNNKGRRALAIVYWLLAREIAKIRGQDFTYSIEDFEAEL

SEQ ID NO: 42306 - protein, 720 aa, Zea mays
MEMNSSGEETVVKVRKPYTITKQRERWTEAEHKRFLEALKLYGRAWQRIEEHVGTKTAVQIRSHAQKFFTKLEKEAMNNGTSPGQAHDIDIPPPRPKRKPNSPYPRKSCLSSETQTKELPNDKSTKPNMPLSNGHVKMVGDASLQNFQRKELSEKGSRSEVLNLFRDAPSASFSSVNKSSSNHGAPRRTEASKTESRDMSIMENNSFNPNTQEDVKVISDQEMERLNGIQIRSKCEHSHEGYLDISTQQMKLMPKSVETTYVDEQTARASHTLAESNGTASVPVTVPEGTHPDQTSDQVGINGSMNPCIHPMVSADPKFGSSATPQTFPHNYAAFAPMMQCNCNQDTYRSFTNMSSTFSSMLVSTLLSNPAIHAAARLAASYWPAAEGNTPIDPNQENPADGVQGRNIGSPPSMASIVAATVAAASAWWATQGLLPFFAPPVAFPFVPAPSAAFPTVDVPRPSEKDRDCPVENAQNECQEARKQVQFEGLRVAASSESDGSGKGEVSLHTELKLSPAQNADATPTTGAGTNDAFRNKKKQDRSSCGSNTPSSSDVDAGNVPEEDNANEKAKQASCSNSSAGDTNHRRFRSNGSTSDSWKEVSEEGRLAFDALFSREKLPQSFSPPQAVDSKEVAKEEEDEVTTVAVDLNKNATSIDHDDLDTMDEPRASFPNELSHLKLKSRRTGFKPYKRCSVEAKENRVPTSDMVGTKRIRLDSEAST

SEQ ID NO: 42307 - protein, 403 aa, Ashbya gossypii ATCC 10895
MDTQTPLLDRRRRRATGGVAARLGRDLRVVFHSSPVNYLLVFVPLGLALGYAGASAGWVFLVNFLAIIPLAAILAFATEELAEHVGSTLGGLLNATLGNAVELIVSVIALRRGQVRIVQASMLGSLLSNLLLVLGFCFLFGGINGGQQKFNQTAAQTMSSLLVISCASLLIPAAFKATLPSETEEQSVIIGDKLLKLSRGTSMVLLVVYVLFLCFQLLTHHEMFEQQEEAVVETYEPRHAQLSVRSSLGYLLASTVLVSLAADFLVDSIDDIVESTGLSKTFIGLIVIPIVGNAAEHVTSVIVAMKNNMSLALSVAIGSSLQISLFVTPFMVLIGWWINVPMTLNFSTFETATLFTSVFLSNYLILDGESNWLEGVMSLAMYALISLAFFYYPDEEAIASVLA

SEQ ID NO: 42308 - protein, 967 aa, Candida albicans SC5314
MNGIGSSKVINNTAQLAAQFNDFYLEITSPKISQIGNYKIIKEIGEGAFGKAYLATHILLNINVVLKCGLIDDPNIVREIYYHKQLKHKNIVSLYEVIKTENHLWIALEYCQGGELYYYIYEKKRLELDECRNIFFQIVLGVKYVHSLNLSHRDLKLENILLADQKRTIVKLTDFGFIREFNPQSRKFLSTICGTTVYMAPELLTGQKYSGFVIDIWSMGVILYTMLNGMLPFDDDDEMKIQHKVINTEPMFYDHVPIDVNQLISKMLSKDPNQRPSLNEILNSSYLIDVYNKYLEKGTKRNSSGSGDAESIISINQHYNTVDRPFEAKIEKDLLRKLQRISFDTEELKATMYNNEINSLTAFYELLLTQEYSKKKQKYMREKKRKLYEAKKSLKKSRKRVKSVLSLSDQASGSQPLERIMSSLSIASNKNSSRHTSTIARKSLDKNDTTQIPPSPKSSQTSRLNIEIPSPRATNTSIALPPRSRRGSREISTTTAASSITADLNTPLRRTVSFVPDGRRLSQVISSEPKETIKKTNKSGKILHKLQFWKKNKGDEYQDDTISHYSTKSNHSKSTNDVMIESDGENPLELIVKGGNNSPIKFDNTMNSHQKMNTVPPEVLEQQRLDRFHKNDATRRQRENSNSDGQSGKLERPQQLQLQHHRQLSQSQSLNTGLSTSGIDSPHTPPSAENSRFARTRPSSMISQISQLSKLSQMSTMLSESELDILDETDTMDDDDDYDDEVYESSINTSQDNKLTGPNATPSSSNQGVKTSSKKRPTYRRGVASDTSITSTPSASGGGAGGGSGIISTIPKKKNSLSKLRSNSSEDISEDSYRFNDENMPMGRSGSPDLGKKRSFRALQQPIPLVNGTTSTSIAEKLNDATKMPYVRAPSPPIGFKYNAKANKKMMTTAINGNNNNNNNNQQQPPGYQDTKQVEDWIHNGTTGNTTTFTKSTIYQPVINEEEEENV

SEQ ID NO: 42309 - protein, 396 aa, Bacillus cereus ATCC 10987
MIQTKDIIELTDTYGANNYHPLPIVISKAEGVWVEDPEGNRYMDLLSAYSAVNQGHRHPKIINALIDQANRVTLTSRAFHSDQLGPWYEKVAKLTNKEMVLPMNTGAEAVETAIKTARRWAYDVKKVEANRAEIIVCEDNFHGRTMGAVSMSSNEEYKRGFGPMLPGIVVIPYGDLEALKAAITPNTAAFILEPIQGEAGINIPPAGFLKEALEVCKKENVLFVADEIQTGLGRTGKVFACDWDGVTPDMYILGKALGGGVFPISCVAANRDILGVFEPGSHGSTFGGNPLACAVSIAALEVLEEEKLTERSLQLGEKLVGQLKEIDNPMITEVRGKGLFIGIELNEPARPYCEQLKAAGLLCKETHENVIRIAPPLVISEEDLEWAFQKIKAVLS

SEQ ID NO: 42310 - protein, 481 aa, Photobacterium profundum SS9
MTKSTLTQANGTPVVDNDNSLTAGPSGPILLQDTWLLEKLAHFDRERIPERVVHAKGSAAFGTFTVTHDISALTKANLFSEVGKETDVLLRFSTVAGEKGAADAERDVRGFALKFYTDEGNWDLVGNNTPVFFIRDPLKFPDFIHTQKRNPITNLRSATAAWDFWSRHPESLHQVTILFSDRGIPTDYRHVNGYGSHTYSFINSNNERSWVKFHFKTQQGHKHYTDEEAVNVVGKSRESSQVDLFMNIEEGNFPRWDVKVQIMTEQQAQEVSFHPFDLTKVWPHGEFPLIDVGVLELNRNPENYFAEVEQAAFSPANIVSGIGFSPDRMLQGRLFSYGDTQRYRLGVNHGQLPVNKPKSPVHTTHRDGSMRGDDNGGKEPNYAPNHYNAYVPTHEQEPALALEKAALHYDFREYDEDYYTQPGNLYRIMDAEQQQRFIQNLIASLSEVDCEQIKRNQIYHFYQADKSLGKALAEGLGVSIG

SEQ ID NO: 42311 - protein, 412 aa, Brucella melitensis 16M
MGVCLLRSTRRTMRTINENTAAKTSRAPVRPEHNRIWILVFILSFLGLMIDGADLMLLSYSLTSIKAEFGLTSVEAGSLGSITLAGMAIGGIYGGWACDRFGRVKTVSWTIVLFSIGTAVLGLTHSYFQFAVARFVSSLGLGALYVACNTLMAEYVPTKYRTTALGTLQAGWSVGYIVATVLAGAILPVYGWRYLFFVAIVPVIIALLMHKGVPEPESWVRAKAERESGGSKFTTAKRESAFKAIFGNPRVRTLFIFWALTAGFLQFGYYGVNNWLPSYLETEMGMNFKSMTAYMIGSYTAMILSKVLAGVAADWLGRRAVFALGALGTAAFLPIIVLYHSPDTICGCWWCSASSMACLMASTRPIWLKASRPNIAVRLSAALTISVVRAQPLRRSPLASSQARSRSASASS

SEQ ID NO: 42312 - protein, 358 aa, Oceanobacillus iheyensis HTE831
MKRNMQEEFPMIRIMDQNGKITDTSYLEQIDKALVQQFYRQLICMRAFDQKAINLQRQGRIGTYPGFEGQEGAQVGSALALDEDDWMLPTYRDHAASITFGKSYTILSSWNGRVEGNLPPEGKNILPPSVPIATQLPLAAGIAMANKYKNSSQAVIAYFGDGATSEGDFHEGLNFASVFQAPVVFFNQNNQYAISTPISRQMNSETIVQKSVAYEIPGIRIDGNDIFAAYFETKKALERARNGEGPSLIEAVTWRYGAHTTADDPTKYRNQKEENEKHRQNDPITRLELFMKAYGFWDEAVVEQLKEEVKEEIDGAVKDLETMPPADVNDIYDYMFEKPTWTIEQQKEEYIKHLRGVK

SEQ ID NO: 42313 - protein, 379 aa, Oceanobacillus iheyensis HTE831
MKQLEFVKPKEKNTFEKIANHEQVVFCNDPATGLQAIIAIHDTTLGPALGGTRMYPYKSVDDALEDVLRLSEGMTYKCAASGLDFGGGKAVIIGDPEKDKSPALFRSFGQFVDSLNGRFYTGTDMGTTTDDFVEAFKETNFINGIPEVYGGSGDSSISTACGVIHALEATNEYLFNNNDLGNRTYAIQGLGKVGYKVAEQLLEAGAKLYITDLNQDVMTQLNTKAKDTNGEVEQVDSEAIYSTDADIFIPCAMGAIINDQTIGQLKVKAIVGSANNQLQSPAHAKMLQEKGILYAPDYIVNAGGLIQVADELYGPNTKRVLVKTKAIYRSLLDIYVQAELDAITTVEAANRKVRSVLEEQRNRNNFYSRKRRPKWNIRE

SEQ ID NO: 42314 - protein, 311 aa, Gloeobacter violaceus PCC 7421
MVVLVTGAAVVDILVSAPQELPAPGASRLTDTIALAAGGCGVNTAIGLARLGVPVEFAAHLGADGAGEWIKAELSRAGVGLAHFRQSAEVATKSAVVLLSAAGERSFLRTRGGGNAIARADLEHLDWSGIGHLHIGGCYSLRRLLGEDLAAVLRSARRAGVVTCLDTVWSSDGNWEALLPALGQIDHLLPSLAEARAITGESTPQAMARWLIAHGSTRVIIKLGERGAYACGPDIDAVVPALPVPGGRVIDTTGAGDAFCAGYLAALAEGLTAPRAVRWANAWGAVAVSGLGATAALRDRSQLEALVVPTE

SEQ ID NO: 42315 - protein, 273 aa, Bacillus anthracis str. 'Ames Ancestor'
MSAFLGELIGTALLIVLGGGVCAGVSLKKSFAKDSGWIVITMGWGLAVAVAAYVVGSISGAHLNPALTIGLAFKGAFPWGDVPGYIAAQMIGAIIGAVIVYLHYLPHWKETEDPGTKLGVFATGPAIPNTFANLLSEMIGTFVLVFGILAIGANKFADGLNPFIVGFLIVSIGLSLGGTTGYAINPARDLGPRIAHFFLPIAGKGGSNWKYAWIPVVGPILGGSLAGLFHQVVFEGKQNAALIYVIIATVIVLAISYMTSKKSGSNTNSRKVA

SEQ ID NO: 42316 - protein, 431 aa, Rhodospirillum rubrum
MMRAFTFLPAALVALLAPALAYAQDAAPTLDSGNTAWMLTSTALVLLMTIPGLALFYAGMVRKKNVLATMMQSFIITALVSVVWMVAGYSIAFGTGNAYFGDFSKFLLSDISIDSLNGTFPETVFVVFQMTFAIITPALITGAFAERMKFSAMLWFIGLWVLIVYAPICHWVWSSSGFLFNAGVLDYAGGTVVHINAGVAGLVCALVLRRRAGFGSENMAPYNLSLAVIGAALLWVGWFGFNAGSAVAADGRAGMAMLATQLGAAGATLSWIAAEWLVRGKPSVLGAVSGAVAGLVAITPASGFVLPGGALVIGLVAGVVCFWGATWLKKTLGYDDSLDAFGVHGIGGLVGALLTGVFAAQSVGGEAAVGLLEGNPGQVLTQAWGCLATIVWTAVASYVILKVIDLAIGLRVSPEQESEGLDISLHGERLQ

SEQ ID NO: 42317 - protein, 320 aa, Gloeobacter violaceus PCC 7421
MSTHVLCLGEMLLDCLADQPDRPEAQVASWTSYPGGAPANVACALAAIGGKSCFVGCLGADPEGERLLAVLERSGVNTAGVQRAPWPTRKVYVTRTAAGERTFASFGGHPPDAFADTHLQAEKITPDLFDGAAFLTLGTLMMAFPDSARAVEGALDLADERFVKICLDVNWRPVFWEQPEQAPAVVRGLIERCDVLKVSEEEAEWLGMPSIEAITAAFDHLEGILLTRGENGCLWQVGERRGEHLGYRVPTVDTTGAGDAFVAALLHRLSRAPLRAWESEAAAVVDYACAAGALSTMIPGGIGSTPDEAAVQAFLRAQAL

SEQ ID NO: 42318 - protein, 121 aa, Arabidopsis thaliana
MAKSSFKQEHDLEKRRAEAARIREKYPDRIPVIVEKAEKSDIPTIDKKKYLVPADLTVGQFVYVIRKRIKLSAEKAIFIFVDNVLPPTGALMSSVYEEKKDDDGFLYVTYSGENTFGFGSP

SEQ ID NO: 42319 - protein, 205 aa, Lycopersicon esculentum
MKINQLFFPFLILAISFNSLLSSAAESPPEVVDIDGKILRTGVDYYILPVVRGRGGGLTMDSIGDKMCPLDAVVQEHNEIDQGLPLTFTPVDPKKGVIRESTDLNIIFSANSICVQTTQWKLDDFDETTGQYFITLGGDQGNPGVETISNWFKIEKYDRDYKLLYCPTVCDFCKVICRDIGIFIQDGVRRLALSDVPFKVMFKKA

SEQ ID NO: 42320 - protein, 350 aa, Pseudomonas fluorescens PfO-1
MQHNKNNNSGWMMPAEWVTHAATWMVWPHNQALWESGWGVTLPLVQEDFARVANAIARFEPVKMVVDPSAIASAKALCGPNIELIPLAVNDSWCRDSGPSFVVHPEQGLAGVSWRFNAWGGKSAHDLDESLARRVLNHLGGECFGTALSNEGGAIHVDGEGTLITTESVLLNPNRNPGVSKAEMEEIFSRLLGVKKTIWLPGDPDYVTGDMTDGHVDGVCAFARPGVLLVDATHDCSSVYAEVVRENRRALELATDAQGRKFELIELYEATDAVDTEAEVFCASYTNFYIANGAIIMPAYGIEADHVAAQTLAEAFPGREVVPVQINHLAHGGGGVHCITQQQPAWPVEG

SEQ ID NO: 42321 - protein, 587 aa, Oryza sativa
  misc_feature (152)..(152): Xaa can be any naturally occurring amino acid
  unsure (1)..(587): unsure at all Xaa locations
MHRMASLLLPPQFLCSLPCSTNSIRSHLHYKPHFLGNIMTKPKAKMRLLNRNVSSMAKKSSQDVAEGSSDDESDGETSKTKKRAPRRGRKKATIQASEGETQEGQVSTEEDESPEGTKKIKRRGRKKAATTASSSEEKDKAKKKKKRGRRKXKTVEELSDNEGEDLGEDLVPSNDRQEKISANDLESKIAALLLEDTDDNDINNLIPLVCCFGPAKYSFIPSGRPANRLIDHEIHEGMKDMFWSPDQFVRAPGGSSSNVALALAASGGRVEFMGKLGDDDYGQSTLYHLNVNGVQTRAIKMDPSAFTAMSLMKVTEDCFVQTDINPAVLKEAKMFYYNSSALLEPTTRSSLSKAIEVSKKFGGVTFFDLNLPLPLWSSSKETKSLVKEAWEAADIIEITKQELEFLCGIKPSEKFGTKDNDKSKFTHYSPEVVTKLWHENLKVLFVTNGTSKIHYYTKEHDGWVRGTEDAPITLFTGDMSQSGDAIVAALMKMLAINPHLVTDKDYLHTAMKHAITCGVIDQWLLARERGFLPRERADPTSEQFGVRFVTEKEYRTLPDSIHTEDSSESELLYVELNKENAEACNFQ

SEQ ID NO: 42322 - protein, 472 aa, Nostoc punctiforme PCC 73102
MNLVWQLFTLSSLPLKEYLATSYVHRSLVGLLSSWRQTSVLIQWGDAIAAVLLSSIYALAPFASSTLVGLLLVACVGFWLLLTLSDEVTPANVSSVTPIHLLVLLYWGIAVIATALSPVKKAALNDLGTLTLYLLLFALCARVLRSPRLRSWILTLYLHVSLIVSVYGLRQWFFGATALATWVDPESPLSKTTRVYSYLGNPNLLAGYLLPAVIFSLVAIFAWQSWLKKALALTMLIVNTACLILTFSRGGWIGLVVAVLAVMALLVFWKSVEMPPFWRTWSLPIVLGGLIGILLLAVIFVEPVRLRVFSIFADRQDSSNNFRRNVWDAVFEMIRDRPIFGIGPGHNSFNKVYPLYQHPRYTALSAYSILFEVTVETGFVGLACFLWLIIVTFNTALLQVRRLRRLRSVEGFWLIGAIAILLGMLAHGTVDTVWYRPEVNTLWWLIVALIASYWTPLTQNQTNPSNPEPAVN

SEQ ID NO: 42323 - protein, 597 aa, Azoarcus sp. EbN1
MNVAKRTFDAVIVGAGGAGLRAALQLSESGLKTAVLTKVFPTRSHTVAAQGGVAASLGNTTEDNWHWHMYDTVKGSDWLGDQDAIEFMCRKANEVVVELEHYGMPFDRTDNGKIYQRPFGGHSQNYGQAPVSRSCAAADRTGHAMLHALYQRNVRANTQFFVEWMALDLIRDADGDVLGVTAIEMETGEVCIFHAKATIFATGGAGRIFYSSTNAFINTGDGLGMAARAGVPLEDMEFWQFHPTGVFGAGVLITEGVRGEGGILRNASGERFMERYAPNLKDLASRDIVSRSMVTEINEGRGCGPDKDHVLLDITHLSPETIMKRLPGIREISIQFAGVDPIKAPIPVVPTAHYQMGGIPTNFKGQVVAPKDGNPNTPITGFYAAGECACASVHGANRLGTNSLLDLLVFGKSAGESVVEDFQSGDLSLKPLPADAADVSLARLARLEGQKNGESVFEVGLEMRRTMQKHAGVFRFDNLLKEGVARIKEVAERAKRTEIKDKSKVWNTARTEALELDNLIEVAKATMVSAEARKESRGAHVRDDAPDTAEFPNGRNDNQWLKHTLWYSEGNRLDYKPVTMEPLSQDVEPIALAKRTY

SEQ ID NO: 42324 - protein, 586 aa, Saccharophagus degradans 2-40
MSTPAKPTSVESYKRLLSYAFKYKAYFIISFIGFGVFAAMEAQLINILEYFVDRLEGRPSAPVLGLSADVTSSLWFVPISVVVLSIIRGIGAYFGNFYMSLVGLNVITNLRRQIFSQMIYLPQSFYDTKNSGELISLLVYNIEQVTGSVTNAVKTLFRDGMSVAWFLAMMLIINWKLTLAFICVAPVLGGLMYIASKYFRKVSHKIQSAVGRVSHVATESIQGIKLVKSYGGEKYELDRFNDATNQNLHYGTKFERVSAFQTPVLHIVLALALAVTFYLIMILWDSDSSKAVVYATYAAAIAKPFRQLTKINSIIQKGLAAADTIFEVLDLQAEPNSGQQKLNAPKGRVELKDVHFGYNQDTPALNGISFAIEPGQTVALVGSSGSGKSTIVSLLLRFYDNQQGSITIDGTPIQSLELHNLREHIALVNQQTILFNDTIAANIAYGSEHIDEARIQDAAKQANAHDFIMALPNGYQTPAGEDGSRLSGGQRQRIAIARALYKNAPILILDEATSALDNESEKQIQSALDELKQGRTTLVIAHRLSTIENADTILVMDNGRIVEAGNHQTLLDRSGVYANLYHSQFS

SEQ ID NO: 42325 - protein, 388 aa, Bacillus cereus E33L
MSSAFIYSDDFRGYSFSPDHPFNQLRVTLTYDLLQKGGFISPSQIISPRMATDEEIAYIHTEEYINAVKRAGEGKLEKSIAMTYGLGTEDTPMFPNMHEASALLVGGTLTAVDAVLSGKVKHALNLGGGLHHGFRGKASGFCIYNDSSIAMKYIQKKYGLRVLYIDTDAHHGDGVQWSFYDDPNVCTISLHETGRYLFPGTGAVNERGQGNGYSYSFNVPLDAFTEDESFLDSYRTVVKEVAAYFKPDIILTQNGADAHYYDPLTHLCATMNIYREIPKLAREIANEYCEGRWIAVGGGGYDHWRVVPRAWALIWLEMNNIQNISGYLPPEWIEAWKGQAETELPLTWEDPNNMYKPIPRKPEIEEKNALTVAKSLEIIRNNMKKSLY

SEQ ID NO: 42326 - protein, 329 aa, Azoarcus sp. EbN1
MSKAPVRVAVTGAAGQIGYSLLFRIASGEMLGKDQPVILQLLDLPQAQKAVKGVMMELEDCAFPLLAGMVATDDPNVAFKDADYCLLVGARPRGPGMERADLLTANGAIFTVQGKAIAENANENVKVLVVGNPCNTNAYIAGAAARKVGRTNPNNYHGMLRLDHNRALSQLAAKTGRPVSSLKKMVVWGNHSPTMYADYRFCTSNGDSVKALVNDHAWNNDVFLPTVGKRGAAIIDARGLSSAASAANAAIDHMHDWALGSDDWVTMGVPSDGSYGIPAGVVFGVPCECKNGDFKIIQGLEIDEYSREKINKTLGELEDERAAVADMLK

SEQ ID NO: 42327 - protein, 275 aa, Geobacillus kaustophilus HTA426
MNGLQDCATLHNGVKMPWVGLGVYKVKEGEEVRSAVRTALEIGYRHVDTAAFYENEEGVGRAIRESGIPREQVFVTTKVWNTDQGYETTLKAFDKSLKKLGFDYVDLYLVHWPVKGKYKETYKALEKLYKDGYVRAIGVSNFHIHHLQDVLADCEIKPMVNQVEYHPRLTQKELLTFCRENGIQLEAWSPLMRGEILSEPTIIDIGRKYGKTPAQVVLRWDLQHGVVTIPKSVTPARIKENADIFDFSLTDEEMKQIDALNLNKRVGPDPDNFNF

SEQ ID NO: 42328 - protein, 342 aa, Pyrobaculum aerophilum str. IM2
MRIFKTPGPIKYINCLLTAAMYFPGLEGVVVKETKICHIDLENSKIYYRGYDLEELAQYSTFEEVAYLLWFGKLPAGAELERFKAELMMYRKPPEHVDEAVKIAPKNAEPIDVLRTAVSAMALGEDLSDRSPEAELVRGLKITAAMPYIVASFDRLRRGSQPLHPGEAKSHAEYFLWALRGERPGEREVRALDVMLIIYAEHSMNNSAFTAVTVASTLSDMYAAITAAIASLKGPLHGGANVDAAKMLEEIGDAKRVESWVDQQLSRGRRIPGFGHRLYKKGPDPRLRVLRKLARDLASEKGDFKWVELAERLEEYVTAHLSQKGIYPNTDLYAAVIFKYLG

SEQ ID NO: 42329 - protein, 294 aa, Gossypium hirsutum
MGRSPCCEKAHTNKGAWTKEEDQRLINYIRVHGEGCWRSLPKAAGLLRCGKSCRLRWINYLRPDLKRGNFTEEEDELIIKLHSLLGNKWSLIAGRLPGRTDNEIKNYWNTHIKRKLISRGIDPQTHRPLNQTANTNTVTAPTELDFRNSPTSVSKSSSIKNPSLDFNYNEFQFKSNTDSLEEPNCTASSGMTTDEEQQEQLHKKQQYGPSNGQDINLELSIGIVSADSSRVSNANSAESKPKVDNNNFQFLEQAMVAKAVCLCWQLGFGTSEICRNCQNSNSNGFYSYCRPLDS

SEQ ID NO: 42330 - protein, 476 aa, Ehrlichia ruminantium str. Gardel
MRKFLLVISVLLLTTVPLVSSSSEDIEQYDPRSGFSRLIQDSSPAIVNVSIIQDSSSEQLSMLLNFEELLKSLVEGKSIKKAVPEEILSSGSGFVIDKSGIIVTNYHVVQNAKEIFVTFSDNKSVPAKLLGIDPQTDLAVLKVEVNQNLPYLSFGDSNSAKVGDWVVAIGNPFGLGGSASIGIISARARDLKIGATEFLQTDAAINSGNSGGPLFNIHGEVIGINTAMMSTQRGGGSIGVGFAIPSNSAVPIIKVLSQGKKVEHGWLGIVMQPVTEELIEPFKLKEVTGILVTTVVKDSPANKATILPGDVILEFNHNKVTTGSQLYQSVLRSKPGSDANILISRHGKLINLNVKMGKFEDPNLQDQSNEIYQNIKNVFQSPELGLTVGNIEPNMLPKCTEDTITGVIVLKAEHGNDAPSKNLRKGDVISQINQLAVANISDFKNAIKKTNRNKSVALLVHRNNFPSIFIPVKLKK

SEQ ID NO: 42331 - protein, 328 aa, Streptomyces avermitilis MA-4680
MTWLITGGAGFIGAHVVRTMLEAGERVAVYDDLSTGDPGRTPEGVPFVKGSTLDGGLLRRTLADLHITGVVHLAAKKQVAESVERPLYYYRENVHGLETLLDAAAETGVRNFLFSSSAAVYGMPDVKVVTEDTPCAPINPYGETKLAGEWLVRAAGRAHGMTTASLRYFNVAGAADERLADTGVFNLIPMVFEKLTQGTAPVIFGDDYDTEDGTCVRDFIHVEDIASAHLAAARALTGREPGSDLTVNIGRGEGVSVREMIELIGEVTGYGADAAPVSAARRPGDPARVVAAADRIQAELGWSARYDARAMVASAWAGWCARHPQARR

SEQ ID NO: 42332 - protein, 615 aa, Bacillus cereus ATCC 10987
MCGITGWVDYKRSLEGERDVVTKMAETLAKRGPDDNKVWIKGNVAFGHKRLIVVDPEGGKQPMTCLKGETNYAICYNGELYNTEDIRKELLRRGYTFKGHSDTEVLLASYMEWKEECVDHLNGIYAFAVWDEQKEQVFIARDRLGVKPLFYKYDSGRLLFGSELKAILAHPDVKAEVTLEGLSEIFGLGPSRTPGHGIYAGIKELRPGHAMTFSKNGLCIWRYWNVESKKHEDSFEETVEKTRFLLQDAITRQLVSDVPLCTFLSGGVDSSAITAIAAKEYERSGKGQLHTYSIDYEDNDKYFKANAFQPNSDAPFIHLMTETFQTIHHRCVISNEQLAQYLTEAVLVRDLPGMADIDSSLLWFCREIKQDFVVGLSGECADEIFGGYPWFYREDDLQSSAFPWMRSTEAREQLLKKEWRNKLNLQQYVQRRYEESIQEVPILEGESPIEAKRRQLFYLNMVWFMTTLLDRKDRMSMGASLEVRVPFADHRLVEYAWNIPWEMKMYKNREKGLLRKALEGLLPNDILYRKKSPYPKTHNPHYTKAVTVWLQDLLTDKGSILHELFDKEQLSGLIESGGSAFQTPWFGQLMTGPQLLAHLAQIHVWFKEYGVNIKE

SEQ ID NO: 42333 - protein, 449 aa, Bacillus cereus ATCC 10987
MNPNNRLTTNQGAPVGDNQNSRTAGRRGPVLLEDYHLVEKLAHFDRERIPERVVHARGAGAHGVFVTKNSMKQYTKAAFLQNEGTETPVFVRFSTVIHGQGSPETARDPRGFAVKFYTEEGNYDIVGNHLPVFFIRDAIKFPDMVHSLKPAPDTNIQTPDRYWDFMTLSPESTHMMTWVFSDYGTPASYREMEGFGVHSFKWINAEGKIVYIKYHWKPQQGVRNLSAKEVQEVQGKDFNHATRDLFDAIEKGNYPKWDLHVQVMQLEETDSLDFDPLDPTKVWPEDRFPLMEVGTMTLNRNPKNFFAEVEQVAFSPSATVNGIEPSEDKLLQGRLFSYPDTQRYRLGANYLQIPVNCPYAAVHNQQRDGAMQTNQNPSTINYEPSRHAENPVEDPAYRDSTMKVEGYVSREKIDKPNDFKQAGERYRSFSKEEQDNLIANLTNDLKRRK

SEQ ID NO: 42334 - protein, 353 aa, Populus tremula x Populus tremuloides
MVAGGAHLEDGDRHPSSASRRGGGGGATTGSWVSGQSVSTSGSVGSPSSRSEHAMATPASDSTFLRLNHLDIHADDAATQDAAANKKKKRGQRAVGADKSGRGLRQFSIKVCEKVESKGTTTYNEVADELVAEFADPSNSVSTPDQQQYDEKNIRRRVYDALNVLMALDIISKDKKEIQWKGLPRTSLSDIEELKVERLGLRNRFEKKAAYLQELEEQFVGLQNLIQRNEQLYSSGNAPSGGVSLPFILVQTRPHATVEVEISEDMQLVHFDFNSTPFELHDDNYVLKAMKFCERPQSDGMAPNPPADGGEGSSMSSMYQPQILASPSTNTPVRHPTSPPLPGIIKARVKNEH

SEQ ID NO: 42335 - protein, 209 aa, Glycine max
MVRGKTQMRRIENATSRQVTFSKRRNGLLKKAFELSVLCDAEVALIIFSPRGKLYEFASSSMQDTIERYRRHNRSAQTVNRSDEQNMQHLKQETANLMKKIELLEASKRKLLGEGLGSCSLEELQQIEQQLERSVSNVRARKNQVYKEQIDQLKEKERALYAENARLCEQYGIQPQPATKDPKEIQPYAESSPSSEVETELFIGLPRSI

SEQ ID NO: 42336 - protein, 900 aa, Neisseria meningitidis MC58
MQLHILNNPKDAALAADAEFLKQSLFNLLHEEASPLVVETVKLLSTSDDSAALIEKVLPQLDEQQTHDLTLACGLFAQILNIAEDVHHERRRQIHEEAGRGGAEGSLTETVRRLKAGKADGKSVQRQLDNTSVTAVLTAHPTEVQRQTVLSFNRRIRALLPQRERCTNADALARLRREIDTILLGLWQTSETRRHKLSVNDEINNGVSIFPMSFFEALPKLYRKMEHDFQTAYPGVRVPDILKIGGWIGGDRDGNPFVSAETLRFAFRRHADAVFRFYRGELDKLYRELPLSIRRVKVNGDVTALSDKSPDEEIARAEEPYRRAIAYIMARAMGKARALGLGMGCKFGFLEPYASAQEFLDDLKKLQRSLIDNGSRLLAEGRLADLIRSVSVFGFHMMPLDLRQHAGKHADVVAELFQHAGLEDYNRLNEEQKQTALLRELSHQRPLYSPFITYSDHTRHELAIFNEARKIKDEFGEDAVTQSIISNCEQPSDLLALALLLKETGLLAVENGKPHSRINIVPLFETIEALENACPVMETMFRLDWYDALLESRGNIQEIMLGYSDSNKDGGYVTSSWCLYQAELGLVELFKKYDVRMRLFHGRGGSVGRGGGPSYQAILAQPAGSVAGQIRITEQGEVITAKYADPGNAQRNLETLVAATLEASILPDKKDPDAKLMQALSDVSFKYYRELITHPDFIDYFLQTSPIQEIATLNLGSRPASRKTLARIQDLRAIPWVFSWMQNRLMLPAWYGFGSAVETLCEDKPETLAALREHAQSNPFFQAMLSNMEQVMAKTDITLAENYAGLSESPDKAKIIFGMIKEEYRRSRKALLDLLQTEELLRDNRSLARSLALRIPYLNALNGLQVAMLKRLRKEPDNPHALLMVHLTINGVAQGLRNTG

SEQ ID NO: 42337 - protein, 233 aa, Bradyrhizobium sp. BTAi1
MSRLHVHPESHLVARIGWLRAAVLGANDGIISTASLIVGVAAAAATRNDVLIAGVAGLVAGAMSMAAGEYVSVSSQSDTEQADLARERKELSDNPAFERDELADIYIKRGVEQSLARQVAEQLMAKDALTAHARDELGISEITAARPIQAALTSAMMFSVGAAMPLLMVVLSPVNALVPIVSAASLAFLAVLGAIGAKAGGANIPRATVRVTFWGAFALGLTAGIGKLFGAVV

SEQ ID NO: 42338 - protein, 225 aa, Oryza sativa
MAALAAASTAFAAKPRLARAPSSPAARFSVSCSASGNNGGAGEMAQSLAASAKTFSAALALSSVLLSSAATSPPPAAADIAGLTPCKESKAFAKREKQSIKKLQSSLAINATIEKTKRRFENYGKFGLLCGADGLPHLIVSGDQRHWGEFITPGLLFLYIAGWIGWVGRSYLIAISGEKKPAMREIIIDVELAVKLLPRGFIWPVAAYRELITGNLVVDDADIGY

SEQ ID NO: 42339 - protein, 218 aa, Antirrhinum majus
MVRGKTQMRRIENATSRQVTFSKRRNGLLKKAFELSVLCDAEVSLIIFAPRGKLYEFASSSMQDTIERYQCHTKELQANNPPAEHNIQHVRHEAASLMKKIEQLETSKRKLLGEGLGTCTFEELQQLEQQLERSVATIRARKTQMFKQQIEQLKEKGKSLAAENAMLHQKIGVEQQQVPALNLQKAVMGSSEISEVSDVETELFIGLRETRAKRPLQQ

SEQ ID NO: 42340 - protein, 953 aa, Zea mays
QSPSRRRSPARRGAHRRRAGADRAARKSGRAKPTEGPPASDRSRSKRAPWLPSIPSVPPPPRLLDFHDSSAVGLGVGDDGGGERGAAVARRHQPLAPFPRPVRRCSRPPTAARAPRHLQARTCRFVKEDDRKRALVSRLLQYSLVHHLLRIPFHLINIRRTTEGKPYLQNNSSAFPNFNFSTSHHGDYVGIASEPLCLVGLDIVSVSEPHGETAAEFVSNFSSCLTDHEWSCIVRAGTPRDVLTEFYRYWCLKEAFVKAIGAGVGFGLRRLEFHHEGWTDISIRIDGEVSKKWRFWLFKLDETHLASIAKGDPEDAINTFKKTLSNVIIAENQLSSALHSPEEAFTLQTVEELTQSQGTGQQHAFPAAAMGQCCSKGQCCSKGAEAAAAAKANAPIRGASASNADGQRPSSSCAAPGGGGGGGGGATKPASPTGGARASKPAAAAVGTVLGRPMEDVRATYTMGKELGRGQFGVTHLCTHRTSGEKLACKTIAKRKLAAREDVDDVRREVQIMHHLSGQPNVVGLRGAYEDKQSVHLVMELCAGGELFDRIIARGQYTERGAAELLRAIVQIVHTCHSMGVMHRDIKPENFLLLSKDEDAPLKATDFGLSVFFKEGELLRDIVGSAYYIAPEVLKRKYGPEADIWSVGVMLYIFLAGVPPFWAENENGIFTAILRGQLDLSSEPWPHISPGAKDLVKKMLNINPKERLTAFQVLNHPWIKEDGDAPDTPLDNVVLDRLKQFRAMNQFKKAALRIIAGCLSEEEITGLKEMFKNIDKDNSGTITLDELKHGLAKHGPKLSDSEMEKLMEAADADGNGLIDYDEFVTATVHMNKLDREEHLYTAFQYFDKDNSGYITKEELEHALKEQGLYDADKIKDIISDADSDNDGRIDYSEFVAMMRKGTAGAEPMNIKKRRDIVLYKCVFQKTTAGIYYSNWPRKNTDDAFERTICNKIY

SEQ ID NO: 42341 - protein, 285 aa, Populus tremula x Populus tremuloides
MGKDFEGGGELSAKDYHDPPPAPLIDAEEITQWSFYRAIIAEFVATLLFLYITVLTVIGYKNQTDVHKNGHECGGVGILGIAWAFGGMNFILVYCTAGISGRHINPAVTFGLFLARKVSLVRAILYMVAQCLWAICGCGLVKAFPKSYYTNHGGGTHGLAIRYSKGTGLGAEIIGTFVLVYTVFCATDPKRNARDSHVPVLAPLPIGFAVFMVHLATIPITGTGINPARSFGAAVIYNKEKAWDDHWIFWVGPFIGAAIAALYHQFILRAAAVKSLGSFRSSPNI

SEQ ID NO: 42342 - protein, 174 aa, Gloeobacter violaceus PCC 7421
MGKGVTLWFTGLSGAGKSTISGIVAKKLQEIGRNVEVLDGDEVRLNLSAGLSFSKADRDTNVRRIGYVCRLLSRNGVIAISAAISPYRNTREELRANIIDFLEIFVDCPLDVCIERDVKGLYAKALKGEIPAFTGVSDPYEAPANPDLTILTNTESKDESANRVVQLLYERGYL

SEQ ID NO: 42343 - protein, 285 aa, Populus tremula x Populus tremuloides
MAKDMEVAEAGSFSAKDYHDPPPAPLFDAKELTKWSFYRALIAEFIATLLFLYITVLTVIGYKSQIDGSADSCGGVGILGIALAFGGMIFVLVYCTAGISGGHINPAVTFGLFLARKVSLIRAVMYMVAQCLGAICGVGLVKAFQKSYYKKYGGGANTLADGFSIGTGLGAEIIGTFVLVYTVFSATDPKRSARDSHVPVLAPLPIGFAVFMVHLATIPITGTGINPARSLGAAVIYNQDKAWDHHWIFWVGPFAGAAIAAFYHQFILRAGAVKALGSFRSAQRF

SEQ ID NO: 42344 - protein, 285 aa, Populus tremula x Populus tremuloides
MGKDIEVGGEFIAKDYHDPPPAPLIDAEELTQWSLYRAVIAEFIATLLFLYITVLTVIGYKSQTDTAKNGDVCGGVGVLGIAWAFGGMIFVLVYCTAGISGGHINPAVTFGLFLARKVSLVRAILYMVAQCLGAICGCGLVKAFQKSYYTKYGGGANGLASGFSKGTALGAEIIGTFVLVYTVFSATDPKRNARDSHVPVLAPLPIGFAVFMVHLATIPITGTGINPARSFGAAVIYNEDKAWDDHWIFWVGPFIGAAIAALYHQYVLRAAAVKALGSFRSSSNI

SEQ ID NO: 42345 - protein, 600 aa, Azoarcus sp. EbN1
MRMPGDTLKQASTPRPLSALTGLWPFLQPYRGRIALAFILLCLGSAIILLLPLAFGDLVDLGFGAREQADGGLLGELNLTGHFIALFGLASAWALTVSARYYTVSWIGERATADLRCAVYRRVLSQSPQFFETLQTGEVLSRLTGDTTLIQTVIGSSVSMGLRSLFQFTGGMVMLAVTSLYLFSLNLGLMALLTLPIIAIGRKVKRLSRESQDRIADASALAGEILNAMPTVQAYTQERHEAERFATAAETGFTTAIRRTRVRAALTTLIITAVMGTIIFVLWVGVRQMHDGILTQGQLASFVLYAALVAGGVGTMAEVWGDVMRAAGAAERLLELLHADSAIREPSLPQSPAHPAQAAISFEQVTFRYPARPHPRALDDICLTIAPGESVALVGPSGAGKTSMFQVLLRYYEISGGAIRINGQDIRQLSLHDLRKGIAIVPQDPVIFSASALENIRYGRPAASDAEVIAAAQAALVDEFIERLPESYRTFLGERGTRLSGGQRQRIAIARAILKGAPMLLLDEATSALDVESEILVQQGLNAAMQGRTTLIIAHRLATVQKTDRIVVMDRGRIVETGTPEDLRHGGGLYARLAALQLDL

SEQ ID NO: 42346 - protein, 688 aa, Bdellovibrio bacteriovorus HD100
MFSESLLISPAIAGVVGLIVALALYLRVKAQPAGNETMNRIASYVREGSMAFLVREYKVLFVYAIVVGLALWFALGGIAAGSFILGAFLSLLAGFFGMKAATYANVRTSQAAAGGSKAAALLVALDGGAVMGLSVAGLGLIGLGGLYVAFQGDAHLGTILHSFAVGASSIALFARIGGGIYTKAADVGADIAGKVVENIPEDDPRNPGVIADNVGDNVGDVAGMGADIYESMVAAIVSAMAIALTIPAEGLSALMTGADAETVRVAGVALPILLSTLGLVISIIVIFAARAFKNGKPATVLRNALIFPPILLTIAAYIILPMFGINQSVTVALAAGAFGGALIGLITEYYTAARPIRLVAEAALTGAGTGVIRGLAVGMESTAIPMLIVVIAAYVADQALGLYGIAMAAVGMLAGTAVVMTVDAYGPIADNAGGISEMSGLGKDVRAITDELDAVGNTTAAIGKGFAIGSAILTVVALFSAFNMEVNHVREGAGLAKMSLDLTSSGVLIGILLGSILPFLVGATTMTAVGKAAQKIVQEIARQFKEIPGLREGKAEPQPAKIVDIATQAALFEMILPGMIAILAPVAVGFLLGPQALAGLLAGGLAVGATMSLFMANAGGAWDNAKKYIEKGGLPGHPKGSDAHKAAVVGDTVGDPFKDTSGPGVAILIKVMSVVSLLIAQLIATIGG

SEQ ID NO: 42347 - protein, 242 aa, Betula pendula
MEFQNQSMSVSPQRKLGRGKIEIKRIENTTNRQVTFCKRRNGLLKKAYELSVLCDAEIALIVFSSRGRLYEYANNSSVKTTIERYKKACAESSNSGSVSEANTQFYQQEAAKLRGQIRSVQNSNRHLLGEALSELNFKELKNLEIKLEKGINKIRSKKNELLFAEIEYMQKREAELHNNNQILRAKIAENERNQQNLNVMPGGGNYELMQSQSYDSRTYFQVDALQPNHHYPRQDQIPLQLV

SEQ ID NO: 42348 - protein, 463 aa, Triticum aestivum
  misc_feature (184)..(184): Xaa can be any naturally occurring amino acid
  misc_feature (228)..(228): Xaa can be any naturally occurring amino acid
  misc_feature (233)..(233): Xaa can be any naturally occurring amino acid
  unsure (1)..(463): unsure at all Xaa locations
GVAKCIAGRGQHYLLALRIQAFLTRIKKDHGSFDLDWLRCLPRESAKKYLLSINGLGAKSVDCIRLLSLEHKAFPVDVNVARIVTRLQWVELQCCSEEFHSVDLYPLMQDVQSYLWPRLCTIDKEKLYELHCLMITFGKVICTKVDPNCNACPFRGDCRYYKSKLTRPLLSPAEEHVRGGEEKXSIVTSERLLSNGSCMPSHQIEGNRTAGRQPSRSCEPIIEVPPSXEYEYXRVHYDVEINLCSNKPMVSNCSWTPNRGKDLALSNSQHTSRKMKHIGRLRTEHLAYVLPDDHPLLEEFEERVPEDPSPYLLVLHPCPDNPPPGAVENFIVKGTILIPCRTASRGNFPLNGTYFQDHEVFADDSSSRLPIDFSSECLNDLGKCMVYFAPSIHSITKGQTRQDIEDCYKKGYVCIRGLDRRTRSPRRLCAALHSINEKKEDNSKNKEGAGLGKSNEQKAPLTN

SEQ ID NO: 42349 - protein, 309 aa, Brassica napus
  misc_feature (253)..(253): Xaa can be any naturally occurring amino acid
  misc_feature (261)..(261): Xaa can be any naturally occurring amino acid
  unsure (1)..(309): unsure at all Xaa locations
MDLDSMDCASTIDVTDDEEIHQDRHSYASVSKHHSNNSNANAASGLLPTTTSVHELLECPVCTNSMYPPIHQCHNGHTLCSLVKNRVHNRCPTCRQELGDIRCLALEKVAESLELPCKYMSLGCPEIFPYYSKLKHETVCNFRPYNCPYAGSECSVMGDIPFLVAHLRDDHKVDMHSGCTFNHRYVKSNPREVENATWMLTVFHCFGQYFCLHFEAFQLGMAPVYMAFLRFMGDETEAWNYNYSLEAGGFCRXLIWEGTPXSVRDSHRKVRDSHDGLIIQRNMALFFSGGDRKELKLLFTGGIWKELFL

SEQ ID NO: 42350 - protein, 337 aa, Bartonella schoenbuchensis
STASCESKITYIDGDEGVLLYHGYSIDQLAENGDFLEVCYLLLYGELPTKQEKDDFDRRIMHHTMVHEQFSRFFHGFRRDSHPMAVMVACLGAMSAFYHDSIDITDAKQRMIASIRLIAKVPTLAAMAYKYSIGQPFVYPRNDLGYAANFLHMCFSVPCEEYKVNPVLARAMDRIFTLHADHEQNASTSTVRLAGSSGANPFACIAAGVACLWGPAHGGANEACLKMLQEIGSIEKIPEFIARAKDKNDPFRLMGFGHRVYKNYDPRAKLMQKTCHEVLKELNIKDDPLLDIAMELEKIALSDEYFIEKKLYPNVDFYSGITLKALGFPTEMFTVLL

SEQ ID NO: 42351 - protein, 219 aa, Methanocaldococcus jannaschii
MDREALLQAVKEARELAKPRNFTQSFEFIATLKEIDMRKPENRIKTEVVLPHGRGKEAKIAVIGTGDLAKQAEELGLTVIRKEEIEELGKNKRKLRKIAKAHDFFIAQADLMPLIGRYMGVILGPRGKMPKPVPANANIKPLVERLKKTVVINTRDKPYFQVLVGNEKMTDEQIVDNIEAVLNVVAKKYEKGLYHIKDAYVKLTMGPAVKVKKEKAKKK

SEQ ID NO: 42352 - protein, 433 aa, Bacillus anthracis str. A2012
MQPSAPPHLESTKTIFSNSITKLVVFICWLAILADGYDLGIYGAVLPKLLEDNSWALSPAHAGTIASYALFGMFIGAILVGTITDLIGRKWTLICCLALFSITMGLAALAPSPELFGLWRFIGGIGLGGVIPTASALTVEYSPKKRQSFIYALMFTGYPLGIVLGAILSMFMLEDFGWRIMFGIGMIPLLLIPFIIRYLPESIQFLLSRNRQEEVDKILNRFQIEFYAKDETHQAPSNIRKKNGFLTLFSKEYIKATLLFWITYIMGMFLIYGLNTWLPQMMRQAGYPLGSSLSFLLMLNITAAIGALFAGAIADRIGAKIVISISYLMAAICIGLLTIKPSVSIIYLLIGLAGIGSVGITQILNAYVTQYFPSHIRATSLGWGLGLGRVGAIAGPILVGIIMTMQYDLAWNFYLFSFAGLLAAISVFFIPTK

SEQ ID NO: 42353 - protein, 368 aa, Malus x domestica
MGKGGQSCNGMVRQAKPVEQENMAAWLVDVNTIKILPFKLPSIGPNDVRIRIKAVGICGSDVHYLKTMKCADFEVKEPMVIGHECAGIVDKVGSEVKHLVPGDRVAVEPGISCARCQQCKGGRYNLCPDMKFFATPPVHGSLANQIVHPADLCFKLPENVSLEEGAMCEPLSVGVHACRRANVGPETTVLIIGAGPIGLVSVLTARAFGAPRIVIVDMDDKRLAMAKSLGADEAVKVSTKMEDLDDEVAEIKKAMISEVDVTFDCVGFNKTMSTGLNATRPGGKVCLVGMGHGVMTVPLTPAAAREVDVVGVFRYQNTWPLCLEFLRSGKIDVKPLITHRFGFTEKEVEEAFATSARGGNAIKVMFKL

SEQ ID NO: 42354 - protein, 72 aa, Mimulus guttatus
MSSGCSCGSGSKCGDNCSCSMYPDMETNTTVTMIEGVAPLKMYSEGSEKSFGAEGGNGCKCGSNCKCDPCNC

SEQ ID NO: 42355 - protein, 342 aa, Bartonella schoenbuchensis
DPGFTSTASCESKITYIDGDEGVLLYHGYSIDQLAENGDFLEVCYLLLYGELPTKQEKDDFDRRIMHHTMVHEQFSRFFHGFRRDSHPMAVMVACLGAMSAFYHDSIDITDAKQRMIASIRLIAKVPTLAAMAYKYSIGQPFVYPRNDLSYAANFLHMCFSVPCEEYKVNPVLARAMDRIFTLHADHEQNASTSTVRLAGSSGANPFACIAAGVACLWGPAHGGANEACLKMLQEIGSIEKIPEFIARAKDKNDPFRLMGFGHRVYKNYDPRAKLMQKTCHEVLKELNIKDDPLLDIAMELEKIALSDEYFIEKKLYPNVDFYSGITLKALGFPTEMFTVLL

SEQ ID NO: 42356 - protein, 342 aa, Escherichia coli
MAILVTGGAGYIGSHTVLMLLKEQYEVIVLDNFHNSSVESLHRVKEITGSDICIINGDIRDRVILKSIFTENSITDVIHFAGLKSVSDSIQFPTEYYDNNVYGTLVLIEEMISNNIKNLIFSSSATVYGTPEKIPVKETFPVGGTTNPYGTSKLMVEKILHDVSLAYPFFRTTILRYFNPVGAHPSGKIGEDPNGIPNNLMPYICSVASGKYKQLSIYGNDYETKDGTGVRDFIHVMDLANGHIAALKHRDEGSNYKVYNLGTGHGYSVLELLAAFQRITSVNIPYVLVERRAGDIAECWSDPSKAYLELGWKACLGLDEMVRDAWNWQQSNPDGYKFSEKN

SEQ ID NO: 42357 - protein, 457 aa, Myxococcus xanthus
MSSRARVLVVDDHVEMGQMLKEPLTDDGYKVDIATGGADAIAQLRARVYDAVLCDLRMQDVDGFDVLDAARKLDPDLPVVMMTAFGGVESAVEAMKRGAFHYFTKPFRLDEVRLSLERALEQRRLRTEHRTLKQQAADRGGLGALVGSSTAMRDLYALIERVAWSGAPVLVRGESGSGKELVARALHFEGTRRAGPFVAVNCTALPHALLESELFGHVKGAFTGATTARRGLFVEADGGTLFLDEIGDMAPELQARLLRVLEDGEVRAVGADGSRTVDVRVVAATHQDLETRVKEGRFRADVFYRLNVVTLRLPPLRERREDIPALIEHFLQQAKARNPRSVVQRFSPETLAALGALPWAGNVRELENLVQRLVVLGSTEVVDLPQLRPHLPSDTSQENHPLAAAQRTIVPLRQLETEYIAWAVARCGGNKTKAAELLGIDVSTIHRRERAEGNPQR

SEQ ID NO: 42358 - protein, 341 aa, Bartonella schoenbuchensis
DPGFTSTASCESKITYIDGDEGVLLYHGYSIDQLAENGDFLEVCYLLLYGELPTKQEKDDFDRRIMHHTMVHEQFSRFFHGFRRDSHPMAVMVACLGAMSAFYHDSIDITDAKQRMIASIRLIAKVPTLAAMAYKYSIGQPFVYPRNDLSYAANFLHMCFSVPCEEYKVNPVLARAMDRIFTLHADHEQNASTSTVRLAGSSGANPFACIAAGVACLWGPAHGGANEACLKMLQEIGSIEKIPEFIARAKDKNDPFRLMGFGHRVYKNYDPRAKLMQKTCHEVLKELNIKDDPLLDIAMELEKIALSDEYFIEKKLYPNVDFYSGITLKALGFPTEMFTVL

SEQ ID NO: 42359 - protein, 596 aa, Listeria monocytogenes str. 4b F2365
MKIWNSIVGKIWSTIILLLIGILVISGFLVAMIYEKNNITQITNELEDKTASIITVMQENNEVISAENNNDSALILLDDTMGVIIEQNGKSVYQSQSPDTISSASANKLIQDKTLDKALEKDNSVTMKYNFKTEKSSLPVEISAQKFKLANGETGVVYVYQSYHDILKVNEKTMSTLIISGIIAIVITSILSFVFSSRMAFPLREMKKIAIAVSKGNFDNRVPTYTHDEIGELGVAFNDMAKQLKYNVSALRQEKEQLSNILVGMADGVIKFSVDKTIILSNPPAEEFLHNWFFSPENTEKVLIPVALNELLNDTLEKKESQVGEITFADHTYVAILTLLYTGEHVRSVVAVIRDMTEEKQLEKMKSDFVNNVSHELRTPISMLQGYSEAIIDGVAQSDEEVREFAQIIYDESLRIGRLVNDMLDLARMEAGFNQMDNQKLPLAPLLRKVISNFDVLAKENYVELGLELETPDLEYSYDPDRMEQVLINLIMNAIRHTGKEGYDGKVILKQTIDEARSNLVITVSDNGSGIAEEDIPYLFERFYKVDKARKRGKAVGTGIGLAIVKNIVEAHNGKISVESELGKGSDFIITLPLYK

SEQ ID NO: 42360 - protein, 586 aa, Bacillus anthracis str. A2012
MKTVANYSYFVMIVLRKRLHKISDGMQKERMTMNKTWWKEAVAYQIYPRSFMDSNGDGIGDLQGIIAKLDYLKDLGIDVIWICPMYKSPNDDNGYDISDYQDIMDEFGTMEDFDALLDEVHKRDMKLIIDLVINHTSDEHPWFIESRSSKDNPKRDWYIWHDGKDGAEPNNWESIFNGSAWEYDEVTGQYYLHLFSRKQPDLNWENKEVREVLYDTVNWWLDKGIDGFRVDAISHIKKEDGFKDMPNPKGLKYVPSFDKHMNVDGIQPLLEELKENTFSKYDIMTVGEANGVKIEDAELWVGEEQGKFNMVFQFEHLSLWDAEKKKDLDVVGLKKVLTKWQKGLENKGWNALYIENHDKPRIVSTWGDDKQYWRESATALGAMYFFMHGTPFIYQGQEIGMTNVQFPNIEDYDDVAIKNLYREKIAEGVSHQDMMEIIWASCRDNSRTPMHWDDEINAGFTTGTPWFGMNQNYKEINVAKQKNEENSIFNFYKKMIALKKEHDVLNYGTYDLLLEDDPQIYAYTRTLNDEKIVVISNISKEEAVYNEDLFALERKRLLLNNYEVAEHEQLTTITLKPYETRVYRIS

SEQ ID NO: 42361 - protein, 145 aa, Bacillus licheniformis ATCC 14580
MPLVPYEPFKHLNTIRREFDRVFADFPANFGGEHGFGDIRVDVHEAGNEIVASCDIPGLESKEDVHIEVENNMLHISGTINRSSEVKEENMHRKERFTGRFHRAVALPAPVSREGIRASYRNGVLEVRMPKDKPDEKKRIDVEFH

SEQ ID NO: 42362 - protein, 157 aa, Volvox carteri
MAPKKEEKPASQAAEAPEVKAEAKPKAVKAPKKKEKKAPAKKVAKEPSAGGEDGDKKSKKKAKVAKSETYKLYIYKVLKQVHPDTGISSKAMSIMNSFINDIFEKVATEASKLSRYNKKPTVTSREIQTAVRLVLPGELAKHAVSEGTKAVTKFTSA

SEQ ID NO: 42363 - protein, 421 aa, Campylobacter upsaliensis RM3195
MSNTITLIDNRNGKSCEFPIYNATLGPSVVDMSSFYKQTGMFCYDEGLTSTATCKSQITYIDGEKGILKHRGYSIEWLAENKLFLDVVHLLLYKELPSAERLESFRYELKKRSFIHEGMHKLFDAFPDNAHPMAVLQGAVSSLSAFYPDHLNMNVKEEYMEMAARIVAKIPTIVATAYRYKNGFPMAYPNLDRGFTENFLYMLRTYPYDHVKLRPIEIKALDTVFMLHADHEQNASTSTVRAVGSTHAHPYACISAGIGALWGHAHGGANEGVIRMLEMIGTPDRVDEFIKKAKDKNDPFRLMGFGHRVYKNFDPRAKVLKKLRDQLIDELDIDTNLIKVATKIEEIALQDDYFVQRNLYPNVDFHSGLILKALGIPNEMFATLFVIGRTPGWVAQWIEQKEQESLKIVRPRQLYLGEVEK

SEQ ID NO: 42364 - protein, 121 aa, Zea mays
MAELVGPRVYSCCTCRNHVCLHDDVISKAFQGRNGRAFLFSHAMNVVVGAKEDRHLMTGLHTVADIYCNDCREVLGWKYVRAYEETQKYKEGKFIFEKSKIVKENWKNMRRYLWFLDKGIA

SEQ ID NO: 42365 - protein, 497 aa, Zea mays
MVLSHASSGRDDDDAVASTFASRYVRERLPRYRMPERSIPREAAQQIISDELMLDGNPRLNLASFVTTWMEPECDKLIMDSINKNYVDMDEYPVTTELQNRCVNMIAHLFNAPIKEDETAIGVGTVGSSEAIMLAGLAFKRKWQNKRKEQGKPCDRPNIVTGANVQVCWEKFARYFEVELKEVKLSEGYYVMDPVKAVEMVDENTICVAAILGSTLTGEFEDVKQLNDLLTEKNKETGWDVPIHVDAASGGFIAPFLYPELEWDFRLPLVKSINVSGHKYGLVYPGVGWVIWRSKDDLPEELIFHINYLGTDQPTFTLNFSKGSSQIIAQYYQLIRLGFEGYRNIMQNCQENAAILREGIAATGRFDVLSKDAGVPLVAFSLRDSSRFSVFDVSENLRRFGWIVPAYTMPADAEHVAVLRVVVREDFSRSLAERLVSDVRKILRELDARATHAVRVATATAEQSGDGVVAKKSVLEIEREVAARWMNAVNKKKTGVC

SEQ ID NO: 42366 - protein, 546 aa, Brucella melitensis 16M
MAAKDVKFGRTAREKMLRGVDILADAVKVTLGPKGRNVVIEKSFGAPRITKDGVSVAKEVELEDKFENMGAQMLREVASKTNDTAGDGTTTATVLGQAIVQEGAKAVAAGMNPMDLKRGIDLAVNEVVAELLKKAKKINTSEEVAQVGTISANGEAEIGKMIAEAMQKVGNEGVITVEEAKTAETELEVVEGMQFDRGYLSPYFVTNPEKMVADLEDAYILLHEKKLSNLQALLPVLEAVVQTSKPLLIIAEDVEGEALATLVVNKLRGGLKIAAVKAPGFGDCRKAMLEDIAILTGGQVISEDLGIKLESVTLDMLGRAKKVSISKENTTIVDGAGQKAEIDARVGQIKQQIEETTSDYDREKLQERLAKLAGGVAVIRVGGATEVEVKEKKDRVDDALNATRAAVEEGIVAGGGTALLRASTKITAKGVNADQEAGINIVRRAIQAPARQITTNAGEEASVIVGKILENTSETFGYNTANGEYGDLISLGIVDPVKVVRTALQNAASVAGLLITTEAMIAELPKKDAAPAGMPGGMGGMGGMDF

SEQ ID NO: 42367 - protein, 222 aa, Thermobifida fusca YX
MFGFVKTDMVDPAKALPGRDTPMPVPERHEVLGTPLAPPYPEHAQLADFGMGCFWGVERIFWRLGAENGIITTAAGYAGGYTPNPTYEEVCTGRTGHAEVVRVVFDPERISYTDLLKVFWENHDPTQGMRQGNDVGTQYRSIILYHNEEQRAAAEASRDAFQPVLTRMGYGPITTEIVPATPFYFAEPYHQQYLSEAKNPHGYCGVSGTGATCPVGVARTSG

SEQ ID NO: 42368 - protein, 372 aa, Zea mays
  misc_feature (157)..(157): Xaa can be any naturally occurring amino acid
  misc_feature (166)..(166): Xaa can be any naturally occurring amino acid
  misc_feature (185)..(185): Xaa can be any naturally occurring amino acid
  misc_feature (197)..(197): Xaa can be any naturally occurring amino acid
  unsure (1)..(372): unsure at all Xaa locations
MAMAAIASPSSRTLIPPRHHGAAPSPSTSGDSSLRLLRAHPRHGRRGRAVSVSTPAARSRPFVFSPRAVSDSKSSQTCLDPDASTSVLGIILGGGAGTRLYPLTKKRAKPAVPLGANYRLIDIPVSNCLNSNISKIYVLTQFNSASLNRHLSRAYGXQHWGGYKNXDGFVEVLAAQQSPDNPNWXFQGTADAVRQYXLWLFEELNVMEFLILAGDHLYRMDYEKFIQAHRETDADITVAALPMDEKRATAFGLMKIDEEGRIIEFAEKPKGEQLKAMMVDTTILGLDDVRAKEMPYIASMGIYVFSKDVMLQLLREQFPEANDFGSEVIPGATSIGKRVQAYLYDGYWEDIGTIAAFYNANLGITKKPMPDF

SEQ ID NO: 42369 - protein, 344 aa, Bartonella schoenbuchensis
DPGFTSTASCESKITYIDGDKGVLLYHGYSIDQLAENGDFLEVCYLLLYGELPTQQEKADFDRRIMHHTMVHEQFSRFFHGFRRDSHPMAVMVACLGAMSAFYHDSIDITDAKQRMIASIRLIAKVPTLAAMAYKYSIGQPFVYPRNDLGYAANFLHMCFSVPCEEYKVNPVLARAMDRIFTLHADHEQNASTSTVRLAGSSGANPFACIAAGVACLWGPAHGGANEACLKMLQEIGSIEKIPEFIARAKDKNDPFRLMGFGHRVYKNYDPRAKLMQKTCHEVLKELNIKDDPLLDIAMELEKIALSDEYFIEKKLYPNVDFYSGITLKALGFPTEMFTVLFHL

SEQ ID NO: 42370 - protein, 362 aa, Streptomyces coelicolor A3(2)
MGQRSTPQQIPVVVLAGFLGSGKTTLLNHLLHRSGGSRIGAVVNDFGSIEIDAMAVAGALGDSTVSLGNGCLCCAVDASELDGYLARLARPEAGIDVIVIEASGLAEPQELVRMLLASEQPGIVYGGLVEVVDAAEFDDTRARHPEIDRHLALADLVVVNKTDRATDAERVLGLVHSLVGGAAVVPATYGRIDPEFLYDCRPGEERVGQLSFDDLHDHSEGGAHADHLHAAYDTLSFVSGLPLDPRRLMRFLDSRPKGLYRIKGYVDFGPYDTRNRYAVHAVGRFLRFYPEPWTPAGAAGGSGAPETGRTQLVLIGSGIDAAALGEELDACRRDADAPPADEHGMWGVLRYVADGEEPPDSP

SEQ ID NO: 42371 - protein, 166 aa, Oryza sativa
MSSVKRNNCSSVKETIERYKKANSDTSNASTVAEINAQHYQQEAAKLKQQITNLQNSNRTLVGDNITTMNHRELKQLEGRLDKGLGKIRARKETELQNDNMYLKSKVAESERGLQTVNMMGSASTSEYVQNMIHYDPRNFLQFNIMHQPQYYPEQEDRKAFMSDER

SEQ ID NO: 42372 - protein, 136 aa, Brassica napus
  misc_feature (133)..(133): Xaa can be any naturally occurring amino acid
  unsure (1)..(136): unsure at all Xaa locations
MEMDLFVTPEKQRNHPPSVSLGKTPVRRKLIVDDDNEVVSEKKGQSRTSGGGLRQFSVMVCQKLEAKKITTYKEVADEIISDFATIKQNSEKPLNDNEYNEKNIRRRVYDALNVFMALDIIARDKKEIRWKGXPIT

SEQ ID NO: 42373 - protein, 1081 aa, Candida albicans
MNPTKKPRLSPMQPSVFEILNDPELYSQHCHSLRETLLDHFNHQATLIDTYEHELEKSKNANKASQQALSEIGTVVISVAMGDLSKKVEIHTVENDPEILKVKITINTMMDQLQTFANEVTKVATEVANGELGGQAKNDGSVGIWRSLTDNVNIMALNLTNQVREIADVTRAVAKGDLSRKINVHAQGEILQLQRTINTMVDQLRTFAFEVSKVARDVGVLGILGGQALIENVEGIWEELTDNVNAMALNLTTQVRNIANVTTAVAKGDLSKKVTADCKGEILDLKLTINQMVDRLQNFALAVTTLSREVGTLGILGGQANVQDVEGAWKQVTENVNLMATNLTNQVRSIATVTTAVAHGDLSQKIDGHPKGEILQLKNTINKMVDSLQLFASEVSKVAQDVGINGKLGIQAQVSDVDGLWKEITSNVNTMASNLTSQVRAFAQITAAATDGDFTRFITVEASGEMDALKTKINQMVFNLRESLQRNTAAREAAELANSAKSEFLANMSHEIRTPLNGIIGMTQLSLDTELTQYQREMLSIVHNLANSLLTIIDDILDISKIEANRMTVEQIDFSLRGTVFGALKTLAVKAIEKNLDLTYQCDSSFPDNLIGDSFRLRQVILNLAGNAIKFTKEGKVSVSVKKSDKMVLDSKLLLEVCVSDTGIGIEKDKLGLIFDTFCQADGSTTRKFGGTGLGLSISKQLIHLMGGEIWVTSEYGSGSNFYFTVCVSPSNIRYTRQTEQLLPFSSHYVLFVSTEHTQEELDVLRDGIIELGLIPIIVRNIEDATLTEPVKYDIIMIDSIEIAKKLRLLSEVKYIPLVLVHHSIPQLNMRVCIDLGISSYANTPCSITDLASAIIPALESRSISQNSDESVRYKILLAEDNLVNQKLAVRILEKQGHSVEVVENGLEAYEAIKRNKYDVVLMDVQMPVMGGFEATEKIRQWEKKSNPIDSLTFRTPIIALTAHAMLGDREKSLAKGMDDYVSKPLKPKLLMQTINKCIHNINQLKELSRNSRGSDFAKKMTRNTPGSTTRQGSDEGSVKDMIGDTPRQGSVEGGGTSSRPVQRRSAREGSITTISEQIDR

SEQ ID NO: 42374 - protein, 284 aa, Malus x domestica
ILPFKLPAIGPNDVQIRIKAVGICGSDVHYLKTMKCADFEVKEPMVIGHECAGIVDKVGSEVKHLVPGDRVAVEPGISCAHCQQCKGGRYNLCPDMKFFATPPVHGALANQIVHPADLCFKLPENVSLEEGAMCEPLSVGVHACRRANVGPETTVLIIGAGPIGLVSVLAARAFGAPRIVIVDMDDKRLAMAKSLGADDTVKVSTKMEDLDDEVAEIKKAMISEVDVTFDCVGFNKTMATGLNATRPGGKVCLVGMGHGLMTVPLTPAAAREVDVVGVFRYKNT

SEQ ID NO: 42375 - protein, 559 aa, Melanocarpus albomyces
EPTCNTPSNRACWSDGFDINTDYEVSTPDTGVTQSYVFNLTEVDNWMGPDGVVKEKVMLINGNIMGPNIVANWGDTVEVTVINNLVTNGTSIHWHGIHQKDTNLHDGANGVTECPIPPKGGQRTYRWRARQYGTSWYHSHFSAQYGNGVVGTIQINGPASLPYDIDLGVFPITDYYYRAADDLVHFTQNNAPPFSDNVLINGTAVNPNTGEGQYANVTLTPGKRHRLRILNTSTENHFQVSLVNHTMTVIAADMVPVNAMTVDSLFLAVGQRYDVVIDASRAPDNYWFNVTFGGQAACGGSLNPHPAAIFHYAGAPGGLPTDEGTPPVDHQCLDTLDVRPVVPRSVPVNSFVKRPDNTLPVALDLTGTPLFVWKVNGSDINVDWGKPIIDYILTGNTSYPVSDNIVQVDAVDQWTYWLIENDPEGPFSLPHPMHLHGHDFLVLGRSPDVPAASQQRFVFDPAVDLARLNGDNPPRRDTTMLPAGGWLLLAFRTDNPGAWLFHCHIAWHVSGGLSVDFLERPADLRQRISQEDEDDFNRVCDEWRAYWPTNPYPKIDSGL

SEQ ID NO: 42376 - protein, 155 aa, Volvox carteri
MAPKTKEEKPASEAVEPKAEAKPKAEKAPKKKEKKAPAKKSAKEPAAGDAAEGDKKKKKAKVAKSETYKLYIYKVLKQVHPDTGISSKAMSIMNSFINDIFEKVATEASKLSRYNKKPTVTSREIQTAVRLVLPGELAKHAVSEGTKAVTKFTSA

SEQ ID NO: 42377 - protein, 428 aa, Shewanella sp. ANA-3
MADLKAKLELPGNDSIELPVKQGSAGFDVIDISKLGSKGYFTFDPGFLATASCESAITYIDGDQGILLHRGYPIEQLAVDSDYLDLCYLLLYGELPTKEQYAEFVHTVKTHTMVHEQLAFFFRGFRRDAHPMAMLCGVTGALSAFYQDSLDVNDPRHREIAAYRLVSKMPTIAAMCYKYSSGQPFVYPRNDLSYAGNFLSMMFAVPCEEYKVNPIVERAMDRIFILHADHEQNASTSTVRLAGSSGANPFACIAAGIASLWGPAHGGANEACLQMLEEIGSVDRIPEFIARAKDKNDPFRLMGFGHRVYKNFDPRAKVMRETCHEVLKELKVQDPLLDVAMELERIALEDEYFISKKLYPNVDFYSGIIMKAIGIPTSMFTVLFALARTVGWIAHWKEMLDQPGHKISRPRQLYTGETSRDFVSQDKR

SEQ ID NO: 42378 - protein, 944 aa, Candida albicans SC5314
MHKFRYSLHQHYSKRNSSDKSKDSPISQNSNEENDSTKLSSSSLQDLHDDLDDIYNNYTLAQGTNNNSVDTLDSENNQAINKFIDKPPAIHGMEPQLPVMHVSSRLSSLGNTTNETGESIAKSAPGTPLSSHSFDFRPHHPRAVTNSSLNVLLDTPNVSSEFNHLVDQTPPNESVERFDDSNNTVDNTEEEENNDDTDEIPKSETLKQNEENWEKKGAAVKTIKTMDGEMKTIRRNVTDFKFGKELGEGSYSTVILATDKITGKQYAVKVLDKRHIIKEKKVKYVNIEKHALNRLSNRLGVISLYFTFQDKDSLYFVLDYASNGELLTLIKRYNTLNEECTRHFGAQILDAIKYMHDNGVIHRDLKPENILLDDKMRIQITDFGTARLLEKKNDESEEYPVDVRAKSFVGTAEYVSPELLENKYCGKPGDVWAFGCIIYQMIAGKPPFKATNEYLTFQKITKLQFAFSAGFPTIIRDLIKKILVLQPSRRATIPEIQKHYFFQSVDFKDFDSIWLSDPPEIGPYKMTAKSMMKVPELNKAPITTVIKKNVKKSTNSNSNTNNVATAVGGSSSNGHKGSSPTPEKEPSPATINNKSTEKVSAASVAAYVLNKPATNQNSSTSEDSSKRSSNSNETRKLSYSQQDYIPGTNILRPQISTRPSVGSYVKTTPSKDRKTLTKVPSNIHQQQEKVKPKVMEVKPATTLEAAWEPYLTHPDERILRIGPVIAHKEPTEPFEKKNKASLHISPLDINKEQRSRSNTSLLTQIVNEVNNNTSELKKVENADESLAIIEPQYNMKRSPTSDSKKSMDIERSASTSGSRISKKAIFKKLGFSHLEKNDSEESNGPSLTEKPQTCTLVVTTHGRALLFIRNDIESNYLLIAEIKLKYPFIHFQELVISQTKFSKLVPSVGVFVISSIDNSLIFEVEKFEVNQWTEALAKSKYNEI

SEQ ID NO: 42379 - protein, 513 aa, Solanum melongena
MVILPSELIGATIIYIIVYIIIQKLIATGSWRRRRLPPGPEGWPVIGALPLLGGMPHVALAKMAKKYGPIMYLKVGTCGMVVASTPNAAKAFLKTLDINFSNRPPNAGATHMAYNAQDMVFAPYGPRWKLLRKLSNLHMLGGKALENWANVRANELGHMLKSMFDASHVGERIVVADMLTFAMANMIGQVMLSKRVFVEKGKEVNEFKNMVVELMTVAGYFNIGDFIPQIAWMDLQGIEKGMKKLHKKFDDLLTKMFEEHEATSNERKGKPDFLDFIMANRDNSEGERLSITNIKALLLNLFTAGTDTSSSVIEWALTEMMKNPTIFKKAQQEMDQIIGKNRRFIESDIPNLPYLRAICKEAFRKHPSTPLNLPRVSSDACTIDGYYIPKNTRLSVNIWAIGRDPDVWENPLEFIPERFLSEKNAKIEHRGNDFELIPFGAGRRICAGTRMGIVMVEYILGTLIHSFDWKLPNDVVDINMEETFGLALQKAVPLEAIVTPRLSFDIYQSSEPF

SEQ ID NO: 42380 - protein, 123 aa, Oryza sativa
MAELVGPRVYSCCHCRNHVCLHDDIISKAFQASDVRSAGLIWYIMLKKGRNGRAFLFSHAMNISMGPKEDRQLMTGLHTVADIYCRDCREVLGWKYERAFEESQKYKEGKFIFEKAKIVKENW

SEQ ID NO: 42381 - protein, 588 aa, Shewanella sp. ANA-3
MSIPVREFDAVVIGAGGAGMRAALQISKEGKSCALLSKVFPTRSHTVSAQGGITVALGNAHEDHWEQHMYDTVKGSDFIGDQDAIEFMCQTGPEAIIELEHMGLPFSRFDNGKIYQRPFGGQSKNFGGEQAARTAAAADRTGHALLHCLYQQNVKHKTQVFSEWYALDLVKNQDGAIVGCTAIEIETGEIVYFKAKATVLATGGAGRIYASTTNAHINTGDGVGMAMRAGVQMQDMEMWQFHPTGIAGAGVLVTEGCRGEGGYLLNKDGERFMERYAPNAKDLASRDVVARSMMTEIREGRGLDGPLGPHCLLKLDHLGKETLEARLPGVCELSRTFAHIDPADGPIPVLPTCHYMMGGLPTKVSGQVIRKNDDGSEQDVVGLFAVGEIACVSVHGANRLGGNSLLDLVVFGRAAGQHLGKALDETADPKDATDAEIQATLARLNRWESNKSGEDPAQIRKDLQLCMQLNFSVFRRGDAMAEGLEQLKAIRKRLENAKLSDNSREFNTQRIECLELDNLMATAIATAYAANFRTESRGAHSREDYLERDDDNWLCHTLFDPVTETMDRRAVNMAPKLREAFPPKKRTY

SEQ ID NO: 42382 - protein, 694 aa, Solanum tuberosum
HRRILPSTTVTKQQFSVRASAAVETLEKTDAAIVEKSVNTIRFLAIDAVEKANSGHPGLPMGCAPMGHILYDEVMKYNPKNPYWFNRDRFVLSAGHGCMLQYALLHLAGYDSVQEDDLKSFRQWGSRIPGHPENFETPGVEVTTGPLGQGIANAVGLAVAEKHLAARFNKPDAEIVDHYTYVILGDGCQMEGISNEVCSLAGHWGLGKLIAFYDDNHISIDGDTEIAFTEDVSARFESLGWHVIWVKNGNTGYDEIRAAIKEAKAVKDKPTMIKVTTTIGFGSPNKANSYSVHGSGLGAKEVEATRNNLGWPYEPFHVPEDVKSHWSRHTPEGAALETEWNAKFAEYEKKYAEEAADLKSIITGELPAGWEKALPTYTPESPADATRNLSQQNLNALAKVLPGFLGGSADLASSNMTLLKMFGDFQKNTPEERNLRFGVREHGMGAICNGIALHSLGLIPYCATFFVFTDYMRGAMRISALSEAGVIYVMTHDSIGLGEDGPTHQPIEHLASFRAMPNILMFRPADGNETAGAYKVAVLKRKTPSILALSRQKLPQLAGTSIEGAAKGGYIVSDNSSGNKPDVILIGTGSELEIAVKAAEELKKEGKTVRVVSFVCWELYDEQSAEYKESVLPSSVTARVSIEAGSTFGWQKFVGDKGKAIGIDGFGASAPADKIYKEFGITAEAVVAAAKQVS

SEQ ID NO: 42383 - protein, 140 aa, Arabidopsis thaliana
MSLKALDYESLNENVKNCQYAVRGELYLRASELQKEGKKIIFTNVGNPHALGQKPLTFPRQVVSLCQAPFLLDDPNVGMIFPADAIARAKHYLSLTSGGLGAYSDSRGLSGVRKEVAEFIERRDGYPSDPELIFLTDGAS

SEQ ID NO: 42384 - protein, 353 aa, Photorhabdus luminescens subsp. laumondii TTO1
MKALKFNRVWDVQIQDVEPLRCAEPDDVVVDIAVCGVCGTDVGIITGSYPVAIPGTTLGHETTGVITQIGKSVTRFNVGDRVVINPTYSCGHCRMCQTGSPNHCEKKLGTEAGVSYDGAFAEQYLAKESSLIKLDDHVSMEEASLTEPLSCTLTGVDKLGITHTNIRAAVAGAGPMGMLYIWALHARGVKAFMVEKNESRIQFAKENLPPECELYTDFDEALIQKYGDKSALIDLCVDTTGQLTEYVFEHLAPGGKLLNVALKDKHANLDILKIADKSLSVIGSIDSLNNSFERAYTMIRDGVIPAGRLVSQVFDFNDYLQAFLTVGCDIANKSQKPLFTPNCKVLIRISDLK

SEQ ID NO: 42385 - protein, 475 aa, Buchnera aphidicola str. Bp (Baizongia pistaciae)
MISKKVDTQVVIIGSGPSGYSAAFRCSDLGLNVVLIEQYYSLGGVCLNVGCIPSKYLLHIAKVIKDVKKLSRIGISFEKLDINLKEIQCNQKKIIESFSSGISNLARKRNVRIIFGYAKFLDANSIFVQGEHDSYVVSFNKIVIATGSLSKKLSYIPYDDIRIWNSSFAVSIPSIPKKLLIIGGGIIGLEMATIYSALGSNVDIIDNSHDILPHLDRDVIDIFKRSVNHDYNIFFNSNVIKIVQEKNGLLVHIAENDNKNKRFELYDIILVAIGRVPNTDMLDISKVGLKTDNNGFIKVNEQFCTNIPNIYAIGDVIGQPMLAHKGTHEGHIVAEVISGKKHYFNPFVIPCVSYTEPEIAWVGITENEARKNNINYEVSSVLWNTLGRAVSSQCSEGVTKLIFDKKTNKIIGGCIVGSNAGELLGEISLAIEMGCDAEDLALTIHAHPTLYESINLSAQIFQGTITDLINKKIKK

SEQ ID NO: 42386 - protein, 588 aa, Vibrio cholerae O1 biovar eltor str. N16961
MSIYNPTSKSVSFSRFTSTLPINRPNMNNDKRPLYISYAGPALLSTPLLNKGSAFSAEERASFNLEGLLPEATETIQEQVVRAYQQYRGFESDMDKHIYLRNIQDTNETLFYRLVQNHISEMMPIIYTPTVGAACENFSNIYRRGRGLFISYANRDRIDDLLNNAANHNVKVIVVTDGERILGLGDQGIGGMGIPIGKLSLYTACGGISPAYTLPVVLDVGTNNPQRLADPMYMGWRHPRITGPDYDNFVEEFMQAVQRRWPDALIQFEDFAQKNAMPLLERYKNRVCCFNDDIQGTAAVTVGSLLAACKAAGSQLSQQRITFLGAGSAGCGIAEAIIAQMVSEGISDEQARSQVYMVDRWGLLEEGMPNLLDFQQRLVQKKANTQHWTTENNGYSLHDVIRNAKPTVLVGVSGAPGLFSEEIIKEMHQHCPRPIVFPLSNPTSRVEALPSDIIRWTNGEALVATGSPFDPVLHEGKTYPIVQCNNSYIFPGIGLGVLAANARRVTDEMLMESSRALASCSPLAINGHGPLLPPLESIHSVSKKIAFAVAKKAIEQGVAPEVTDEALEASIEQHFWQPVYRRYKRTAF

SEQ ID NO: 42387 - protein, 449 aa, Gloeobacter violaceus PCC 7421
MESNRVPVTVLTGFLGSGKTTLLNRILTEEHGKRIAVIENEFGEIGIDQALVVNAEEEIFEMNNGCICCTVRGDLIRIIGSLMRRKDKFDHILVETTGLADPSPVAQTFFVDDEMRSQLKLDGIVTVVDARHIWQHIDQSDQCKEQIAFADVILLNKTDLVTPEELDTLEQRVRSMNALARVHRTQNAAVEMDRVLEIGGFDLERALAVKPTFLEPEYPFEWGGIYELAAGTYTLALQDGPDSSMTLALFAAEGTDEAALEAAQQEAVPLFSQQAPPVHPKGALVPQAAPVALNLAKAGAKDFFLEIQMAGTYSLFTQHRPEEFDLTVHAADGATRTPRIGRTFEAGHTHDEEVTSVGIEVQGAVDPKKLSAWLSVLLREQGVDIFRTKGILHLQGDNRRYVFQGVHMLFDSSADRPWGSDEPRTNQLVFIGRNLDRNRLVREFKACLV

SEQ ID NO: 42388 - protein, 665 aa, Pseudomonas syringae pv. tomato str. DC3000
MPSRRERANAIRALSMDAVQKANSGHPGAPMGMADIAEVLWRDYLKHNPTNPSFADRDRFIMSNGHGSMLVYSLLHLTGYDLSIDDLKNFRQLHSRTPGHPEFGYTPGVETTTGPLGQGFANAVGFAAAEKTLAAQFNRPGHSIVDHHTYVFMGDGCMMEGISHEVASLAGTLQLGKLIAFYDDNGISIDGEVEGWFTDDTPKRFEAYGWQVIRNVDGHDADEIKTAIDTARKSDQPTLICCKTTIGFGSPNKQGKEESHGAPLGADEIALTRAALKWNHGPFEIPADIYAEWNAKEKGLAVEAEWDQRFAAYSAAFPELANEFIRRMSGELPADFAEKSAAYVAEVNAKGETIASRKASQNALSALGPLLPEILGGSADLAGSNLTIWKGCKSITGEDPNGNYLHYGVREFGMAAMMNGIALHGGFVPYGATFLIFMEYARNAVRMASLMKKRVIYVFTHDSIGLGEDGPTHQPIEQLTSLRTTPNLDTWRPADAVESAVAWKYSLERNDGPSALIFSRQNLTHQAREQQQIDAIARGGYVLRDCAAEPELILIATGSEVGLAVEAYEKLTAQGRNVRVVSMPCTSVFEAQDAGYKQAVLPLQVSARIAIEAAHADYWYKYVGLEGRVIGMTTFGESAPAPLLFEEFGFTLENVLSIAEELLED

SEQ ID NO: 42389 - protein, 381 aa, Oryza sativa (japonica cultivar-group)
MQIFVKTLTGKTITLEVEFSDTIDNVKAKIQDKEGIPPDQQRLIFAGKQLEDGRTLADYNIQKESTLHLVLRLRGGMQIFVKTLTGKTITLEVESSDTIDNVKAKIQDKEGIPPDQQRLIFAGKQLEDGRTLADYNIQKESTLHLVLRLRGGMQIFVKTLTGKTITLEVESSDTIDNVKAKIQDKEGIPPDQQRLIFAGKQLEDGRTLADYNIQKESTLHLVLRLRGGMQIFVKTLTGKTITLEVESSDTIDNVKAKIQDKEGIPPDQQRLIFAGKQLEDGRTLADYNIQKESTLHLVLRLRGGMQIFVKTLTGKTITLEVESSDTIDNVKAKIQDKEGIPPDQQRLIFAGKQLEDGRTLADYNIQKESTLHLVLRLRGGL

SEQ ID NO: 42390 - protein, 183 aa, Thermobifida fusca YX
MLEWLNPVKGFGVTFHTMFKKVPTVEYPEVKAPTMPRFHGRHQLNRWPDGLEKCIGCELCAWACPADAIYVEAGDNTEEERYSPGERYGRVYQINYLRCILCGLCVEACPTRALTMTNEYELADDSRESLIYTKEQLLAPLQQGMEAPPHPMRLGETEKDYYRLGRDDNAAARADEQNSEAVQ

SEQ ID NO: 42391 - protein, 229 aa, Oryza sativa
MAVSFTNVSSEAGLKKLDEYLLTRSYISGYQASNDDLAVYSAFSTAPSSSYTNVARWFTHIDALLRLSGVTADGQGVKVESTAVPSASTPDVADAKAPAADDDDDDDVDLFGEETEEEKKAAEERAAAVKASGKKKESGKSSVLLDVKPWDDETDMTKLEEAVRNVKMEGLLWGASKLVPVGYGIKKLQIMMTIVDDLVSVDSLIEDYFYTEPANEYIQSCDIVAFNKI

SEQ ID NO: 42392 - protein, 649 aa, Lactobacillus acidophilus NCFM
MCGIVAFYDPKINDKQAVIGKMMATIKHRGPSSDGYYTNDEVALGFRRLSIIDLRGGSQPIYNEDKTRAIIFNGEIYNFKPLREELIKAGHTFTTKADTEVLLHGYEEWGMDGLLKRVRGMFAFLIWDDNNKTLYGARDFFGIKPMYYSNQDGHLLVGSELKSFLEYPKFKRELNVEAVKPYLMNQYNDLEETFFKGVYRFPAGHWFEYKDGEMKTHQYWDAEYKENSLSFEETLKRINDDLKETVDLYRNADVKVGAFLSEGIDSSYLTSLLNPDDVFSVSFDDSTYDEASKAKALADINHWKFFSEKVDADEAMRDFPEMQYHMDEPDANPSIIPLWYLCKLARKHVTVALSGEGADELFAGYVNYGMHTHNDVIKVFTSELKKLPKNKQVKLAHKIKKMPNFPGKVHMYTNLAEPSEFYVGQSVIYDMDYPTIFTSKDANSILQPTYRNKLTVNGIYQKDFKKVKGIDNVKQMQYIDLHHFMLNDIEQKADKISMAHSLEVRVPYLDKKIAELANSIPTKYLVNRHDTKYALRKASEKVLPDEWAKRPKLGFPTPIKQWLKEPRFYKQVRSLFEEEFVNDIFDQKKIIKLLDDNYEGDGSHRRQIWAIYTFLVWYKLFFVDYENTVKKYQHVQPEVANLISQGKLL

SEQ ID NO: 42393 - protein, 681 aa, Arabidopsis thaliana
MSGSVSGCGSGGCSIVWFRRDLRVEDNPALAAAVRAGPVIALFVWAPEEEGHYHPGRVSRWWLKNSLAQLDSSLRSLGTCLITKRSTDSVASLLDVVKSTGASQIFFNHLYDPLSLVRDHRAKDVLTAQGIAVRSFNADLLYEPWEVTDELGRPFSMFAAFWERCLSMPYDPESPLLPPKKIISGDVSKCVADPLVFEDDSEKGSNALLARAWSPGWSNGDKALTTFINGPLLEYSKNRRKADSATTSFLSPHLHFGEVSVRKVFHLVRIKQVAWANEGNEAGEESVNLFLKSIGLREYSRYISFNHPYSHERPLLGHLKFFPWAVDENYFKAWRQGRTGYPLVDAGMRELWATGWLHDRIRVVVSSFFVKVLQLPWRWGMKYFWDTLLDADLESDALGWQYITGTLPDSREFDRIDNPQFEGYKFDPNGEYVRRWLPELSRLPTDWIHHPWNAPESVLQAAGIELGSNYPLPIVGLDEAKARLHEALSQMWQLEAASRAAIENGSEEGLGDSAEVEEAPIEFPRDITMEETEPTRLNPNRRYEDQMVPSITSSLIRPEEDEESSLNLRNSVGDSRAEVPRNMVNTNQAQQRRAEPASNQVTAMIPEFNIRIVAESTEDSTAESSSSGRRERSGGIVPEWSPGYSEQFPSEENGIGGGSTTSSYLQNHHEILNWRRLSQTG

SEQ ID NO: 42394 - protein, 341 aa, Magnolia quinquepeta
MGGKKIKIGINGFGRIGRLVARVALQRDDVELVAVNDPFITTDYMTYMFKYDSVHGQWKHHELKVKDSKTLLFGEKPVTVFGVRNPEEIPWGETGAEFVVESTGVFTDKDKAAAHLKGGAKKVIISAPSKDAPMFVVGVNEHEYKSNIDIVSNASCTTNCLAPLAKVINDKFGIVEGLMTTVHSITATQKTVDGPSSKDWRGGRAAGFNIIPSSTGAAKAVGKVLPALNGKLTGMAFRVPTVDVSVVDLTVRLEKAASYEEIKAVIKAESEGKLKGILGYTEEDVVSTDFIGDNRSSIFDAKAGIALNEHFVKLVSWYDNEWGYSSRVIDLILIVHMASCQ

SEQ ID NO: 42395 - protein, 214 aa, Paenibacillus macerans
NTGIVSSFFTYTGPAHGTQWDEIDIEFLGKDTTKVQFNYYTNGVGGHEKVISLGFDASKGFHTYAFDWQPGYIKWYVDGVLKHTATANIPSTPGKIMMNLWNGTGVDDWLGSYNGANPLYAEYDWVKYTSNQTGGSFFEPFNSYNSGTWEKADGYSNGGVFNCTWRANNVNFTNDGKLKLGLTSSAYNKFDCAEYRSTNIYGYGLYEVSMKPAK

SEQ ID NO: 42396 - protein, 172 aa, Pyrococcus horikoshii OT3
MRGGERMVRRRRWDIWDPFDLIREIQEEIDAMFDEFFSRPRLWTYRRWKEPELYEEGTGEVWREPFVDIFDRGDELVVIAELPGVRKEDIKVRVTEDSVYIEAIVRREKELEEEGAVRVERYYSGYRRVIRLPEEVIPEKAKAKYNNGVLEIRIPKKNPTKKEGEGFEVKIE

SEQ ID NO: 42397 - protein, 296 aa, Pyrococcus horikoshii OT3
MRLDVICMGNLNYDITFILERFPEFHEKVNAKEVYTGLGGSAGNTATWLSLLGLKVGFIGSVGNDDFGRLHLEFFKKIGVDTRGIKVVDEPTGVAVMMVIGEDKRIVKYPGANRFKEVREDYLKLARHLHLSSNPLSLVEKAVTLAKNLGLTVSFDPGEMEVPKNIEEKVDILMMNEDEFKRKYGDLKNITKVKSRIAIATLNGGGALVRDQNGKVYEVRGLSAKAVDTTGGGDSFNAGFIYGFLNGWDVVSSAKLGMLLAYLTVQKVGARSAVIPLEEVKKKANELNLDLPFNSS

SEQ ID NO: 42398 - protein, 255 aa, Bacillus licheniformis ATCC 14580
MDVEVKKENQNTQLKDHEVKELIKNSQNGDQKARDLLIEKNMRLVWSVVQRFLNRGYEPDDLFQIGCIGLLKSVDKFDLSYDVRFSTYAVPMIIGEIQRFIRDDGTVKVSRSLKELGNKIRRAKDELSKSNGRIPTVQEIADYLEISSEEVVMAQEAVRSPSSIHETVYENDGDPITLLDQIADQSEEKWFDKIALKEAIKDLDEREKLIVYLRYYKDKTQSEVADRLGISQVQVSRLEKKILKQIKNQMDHFES

SEQ ID NO: 42399 - protein, 275 aa, Bacillus clausii KSM-K16
MLQLFTKELKTMHVAVFQMEVLAGKPDENRERVKTWVEQLCREQLERPLTIVLPELWTTGYQLEDLGELAEEEGVETIAFLQQLARAHRIHMVAGSIATKKDGGIYNTALVIDAQGKLVYTYDKVHLVPMLNEPAYMQGGSVPPALFELDGVKMAVLICYDLRFPELARRLALEGAEVLFIVAEWPLARAMHWKALQQARAIENQFYLLSCNSVGSHNGTDYAGTSMVIDPWGEIIVEGSSTEEEWLQCKVDFSKAAEVRDRVPVFSSRRPDLYR

SEQ ID NO: 42400 - protein, 543 aa, Arabidopsis thaliana
MRRFVIGQAKNLIDQSRRRQLHHHKNLSFVSLIPPFSAPSDSSSRHLSSSSSSDMSASDSSSSLPVTLDTINPKVIKCEYAVRGEIVNIAQKLQEDLKTNKDAYPFDEIIYCNIGNPQSLGQQPITFFREVLALCSYTALLDESATHGLFSSDSIERAWKILDQIPGRATGAYSHSQGIKGLRDAIADGIEARDGFPADPNDIFMTDGASPGVHMMMQLLITSEKDGILCPIPQYPLYSASIALHGGTLVPYYLDEASGWGLEISELKKQLEDARSKGITVRALAVINPGNPTGQVLSEENQRDVVKFCKQEGLVLLADEVYQENVYVPDKKFHSFKKVARSMGYGEKDLALVSFQSVSKGYYGECGKRGGYMEVTGFTSDVREQIYKMASVNLCSNISGQILASLIMSPPKPGDDSYESYIAEKDGILSSLARRAKTLEEALNKLEGVTCNRAEGAMYLFPCLHLPQKAIAAAEAEKTAPDNFYCKRLLKATGIVVVPGSGFRQVPGTWHFRCTILPQEDKIPAIVDRLTAFHQSFMDEFRD

SEQ ID NO: 42401 - protein, 404 aa, Vibrio parahaemolyticus RIMD 2210633
MQNIGMSSKLDNVCYDIRGPVLKHAKRMEEEGHKILKLNIGNPAPFGFDAPDEILVDVIRNLPTSQGYCDSKGIYSARKAVVQHYQRKGIRSLDVEDVYVGNGVSELIVMAMQALLNNGDEMLIPAPDYPLWTASVALSGGNPVHYLCDEQSDWYPDLDDIKKKITPKTRGIVLINPNNPTGAVYSRDFLLEVIEIARQHKLIIFADEIYDKVLYDGATHTSVATLTEDVLVMTFNGLSKAYRVCGFRGGWMFLTGPKHLAQGYVNGLELLSSMRLCANVPMQHAIQTALGGYQSINELILPGGRLLEQRNRAFELINQIPGVSCVKPKGAMYLFPKIDTKMYNIKNDQQMVLDFLKQEKVLLVQGSGFNWPKPDHFRIVTLPHVEDLETAIGRFERFLSTYSQ

SEQ ID NO: 42402 - protein, 717 aa, Arabidopsis thaliana
MSSAPPPGGTPSPPPQPLPIPPPPQPLPVTPPPPPTALPPALPPPPPPTALPPALPPPPPPTTVPPIPPSTPSPPPPLTPSPLPPSPTTPSPPLTPSPTTPSPPLTPSPPPAITPSPPLTPSPLPPSPTTPSPPPPSPSIPSPPLTPSPPPSSPLRPSSPPPPSPATPSTPPRSPPPPSTPTPPPRVGSLSPPPPASPSGGRSPSTPSTTPGSSPPAQSSKELSKGAMVGIAIGGGFVLLVALALIFFLCKKKRRRDNEAPPAPIDGVPYGGQQQQNASRRSDHVVMSVPPPKSPSSAPPRPPHFMSSGSSGDYDSNYSDQSVLPPPSPGLALGLGIYQGTFNYEELSRATNGFSEANLLGQGGFGYVFKGMLRNGKEVAVKQLKEGSSQGEREFQAEVGIISRVHHRHLVALVGYCIADAQRLLVYEFVPNNTLEFHLHGKGRPTMEWSSRLKIAVGSAKGLSYLHENCNPKIIHRDIKASNILIDFKFEAKVADFGLAKIASDTNTHVSTRVMGTFGYLAPEYASSGKLTEKSDVFSFGVVLLELITGRRPIDVNNVHADNSLVDWARPLLNQVSELGNFEVVVDKKLNNEYDKEEMARMVACAAACVRSTAPRRPRMDQVARVLEGNISPSDLNQGITPGHSNVYGSSGGSTDYDSSQDNEGMNKFRKVGLETQDLYSNPISEYDLYPSWSSTDGQTTQGKATGNIKRPGQGYG

SEQ ID NO: 42403 - protein, 681 aa, Ralstonia metallidurans CH34
MRIQHAFRLITLAMVATIVGFGSYLWTEEWRAYAVAQHSEAMLQAFRATLVAAEKVSAERGPSNAALGAAPGVAAGALLRAREQSDASLTAAIAMLHGANCPECGAAKGSLEHARAQLAAARSQIDRLIARPLSERHDVQRAVSGMFTIVDEILRVADGPLSRLQRSAPVAAQHAVSARFAAELREYAGRAGSEFTSALVSNRPMHSEERERLAGDLGRVQTLGDQIQQRVSFQLASKPGLRDADTALHKRFFGDGLAYLQKVEAIGPAEPRPTTAELASTYVPLMAPIVAMRDAVLDVAQAEVQADTTRAKRRLGGLLAILAIITSFVAATFWLFAKRVLRPLTLATEATVELAEGRYDGPTHVWPKTDEIGAIFVALEQLRAGLLRKVALEHERTTLIARLQAAVTHERAQMMALAQARDAAEASARTKSSFLAMMSHEIRTPLQGILGLLELVEYSPLSAEQRRQVRLASEAGQALRQILDDVLDYAKMDAGRLRLALAPLDLRGLFANVLSLLAPRAQAKGLQLQQWVQPDVPVQLVADGARLRQILLNLVGNAIKFTECGSVDLLASVEPTSAGEDVLVVSVADTGIGIAPEDIARLFTPFVQGESGPARRFDGTGLGLAISRQLAQLMGGELMLDSTLGVGTQVMLRVPMPGCPDAGSPLSNSERREHRAEFRLA

SEQ ID NO: 42404 - protein, 404 aa, Bacillus clausii KSM-K16
MAIEKSDHIIEQTNAYGAHNYHPLPVVIAEAEGVWVKDPEGNKYMDMLSAYSALNQGHRHPKIIQALKEQADKVTLTSRAFHNDQLGPWTKRVAELTGKDKVLPMNTGVEAVETAIKAARRWAYEVKGVEENKAEIIAAKGNFHGRTLNAVSLSNDPGATKHYGPFVPGIKKVAYGNVEVIREAITPNTAAMIIEPIQGEAGIIIPPEGYLQAVRDLCTENDILFIADEVQTGFARTGKMFACEWENVVPDIYVMGKAMGGGVFPVSAIAADKDIMDVFTPGSHGSTFGGNPLACAVSLAAIEVIEEENLVKKSLELGEYFTTALRAIDNDDLTAIRARGLFIGVEFNHPVRKYCEQLKEAGVLCKETHENTIRFAPPLVITKEELDWAIEKINYVLSKEKPVK

SEQ ID NO: 42405 - protein, 412 aa, Bacillus cereus ATCC 10987
MEKKRVVITGLGAVTPVGTDVETAWENIKKGVSGIGRLTRIDPELFPAKVAAEINDFEVEKYIDKKEARRMDRFTQYAVAAAKMAVADAKLEITEENGPRIGVWIGSGIGGMETYEEQFKIFTEKGPRRVSPFFVPMMIPDMAAGQVSIATGAKGINTCSVTACASGANSIGDAFKAIQRGDADAMITGGAEAPLTNMAFAGFSSAKALTFNEDPATACRPFDKNRSGFVMGEGSGILILEELEHALARGAHIYAEIAGYGATGDAFHITMPAPGGEGGVRAMRQALADAGLQPEDIDYINAHGTSTDANEKYETMAIKETFGEHAYKVAISSTKSMTGHLLGAAGAVEAIFSIKSITDGVIPPTINYETPDPECDLDYVPNQARHQEVNAVLSNSLGFGGHNAVLVFKAYK

SEQ ID NO: 42406 - protein, 392 aa, Staphylococcus aureus subsp. aureus MRSA252
MNQQLIEALKSKEDKMVEIRRYLHQHPELSFHEDETAKYIAEFYKGKDVEVETNVGPRGIKVTIDSGKPGKTLAIRADFDALPITEDTGLSFASQNKGVMHACGHDAHTAYMLVLAETLAEMKDSFTGKVVVIHQPAEEVPPGGAKAMIENGVLDGVDHVLGVHVMSTMETGNVYYRPGYVQTGRAFFKLKVQGKGGHGSSPHMANDAIVAGSYFVTALQTVVSRRLSPFETGVVTIGSFDGKGQFNVIKDVVEIEGDVRGLTDATKATIEKEIKRLSKGLEALYGVTCTLEYNDDYPALYNDPEFTEYVAKTLKEADLEFGVEICEPQPPSEDFAYYAKERPSAFIYTGAAVEDGEIYPHHHPKFKISEKSLLISAEAVGTVVLDYLKGDN

SEQ ID NO: 42407 - protein, 294 aa, Brucella melitensis 16M
MWWPAPRKTAQKISGKGYIMTVPTVKLNDGNHIPQLGYGVWQISNDEAVSAVSEALKAGYRHIDTATIYGNEEGVGKAINGSGIARADIFLTTKLWNSDQGYESTLKAFDTSLKKLGTDYVDLYLIHWPMPSKDLFMETWRAFIKLKEEGRVKSIGVSNFRTADLERLIKESGVTPVLNQIELHPQFQQDELRLFHGKHDIATEAWSPLGQGKLLEDPTLKSIAEKHAKSVAQIILRWHIETGNIVIPKSITPARIKENFDIFDFTLNGTDHDAITKLDMADGRIGPNPSVFSA

SEQ ID NO: 42408 - protein, 225 aa, Arabidopsis thaliana
MVSFCELCGAEADLHCAADSAFLCRSCDAKFHASNFLFARHFRRVICPNCKSLTQNFVSGPLLPWPPRTTCCSESSSSSCCSSLDCVSSSELSSTTRDVNRARGRENRVNAKAVAVTVADGIFVNWCGKLGLNRDLTNAVVSYASLALAVETRPRATKRVFLAAAFWFGVKNTTTWQNLKKVEDVTGVSAGMIRAVESKLARAMTQQLRRWRVDSEEGWAENDNV

SEQ ID NO: 42409 - protein, 572 aa, GIBBERELLA ZEAE PH-1
MHSIALYSLLCLALALCSNALPGPVARIQRKGPCSGNTPSTRNQWCGYDIHSDYYSVIPDTGVTREYWLEISEIVFTPDGIPRFAQAINGTVPGPTIFADWGDNVVVHLTSNLKTSTNGSSFHFHGTHQNYTNPQDGVVAITQCPTAPGSSITYRWRATQYGTSWYHSHFGLQTYDGVYGGLIIRGPASANYDEDVGTIMLSDWSHRTVNEILPEVQRKGPYPMDNILINGTNTYNKEGEKNQTGERFRLDFEEGKTYRLRLVNTGIDTLYKFSIDHHTLKVIAVDFVSIEPYETDHVNIAIGERMDILVTANQASKTSSFWLRALPQLDCTKNANPQNALGIVSYSSNSSTPTTKGRKYVDHCEDEPYESIVPIVPHTVGPPDMEVVENANRSWNSDGIIKWSLNSTTMIAEWDHPSLLKLGHNVSFTESNAVIHVPKKDAWVYLAIETELDISHPIHLHGFDYHILAQGVGPYGSNVTLKTDNPPRRDTALLPAKGHLVIAFLTNNPGVWLLHCHIGWHAAEGFSMQFVVREEEIPDLVSDQEYEDMEKGCKAWHDFSHKMEMEQDDSGI

SEQ ID NO: 42410 - protein, 555 aa, Yarrowia lipolytica
MQVSHQTFCPVLTQCPNRQRFNNEVEEIKKWWSSPRWKHTKRVYSPEDIASRRGTIKVPQASSQQADKLFKLLQEHEKNHTASFTYASLDPVQVTQMAKYLDSIYVSGWQCSSTASTSNESSPDLGGYPMDTVPNKVEHLWFAQLFHERKQNEERLSLPESEPIQAPRARVDYLRPIIADAETGHGGLTAVVKLTKMFIERGAAGIHIEDQAPGTKKCGHMAGKVLVPIQEHINRLIAIRASADIFALNLLAIARTDSEAATLITSSIDYRDHYFIAGATNKDAGHLVDVMVAAEARGQAGAPLQAVEDEWNRKAGVKLFHEAFADEVNDGSYSNKAELIAEFNKKVTPLSNTPDIEDRYLAARLLGKDIYFNWEAARVREGYYRYQGGTQCAVNRGYSYAPYADLIWMESKLPDYAQAKEFAEGVKNAVPHQWLAYNLSPSFNWTTAMSPEDQETYISRLAKLGYVWQFITLAGLHTNALISDKSCKAYSERGMKAYGGEIQQPEIDQGCEVVKHQKWSGAEYIDGILRMVTGGITSTAAMGAGVTEDQFKSKL

SEQ ID NO: 42411 - protein, 486 aa, Burkholderia fungorum LB400
MTTLTLKDPSLLKTHAYIAGEWQGADDGSTFEVKNPATGEIIATVPRMGTAETRRAIDTANAAWPAWRATTAKQRAVILRKWHDLMMENADDLAKILTTEQGKPLAEAKGEIQYAASFLEWFAEEGKRVNGDTIPTPANDKRIVVTKEPIGVCAAITPWNFPAAMITRKVGPALAAGCPIIVKPAEATPLSALALAVLAERAGVPRGVFNVVTGEPKAIGAEMTGNPVVRKLSFTGSTPVGRLLMAQCAPTVKKVSLELGGNAPFIVFDDADLDAAVAGAIASKYRNSGQTCVCTNRFYVHDKVYDAFAEKLRVAVEQLKVGRGTEDGVTQGPLINEAAVLKVESHIEDALAKGARIVTGGKRHVLGHGFFEPTVLADVTPAMKVARDETFGPLAPLFRFSSDEEVIRLANDTEFGLASYFYSRDIGRVWRVAEALEYGMVGINTGLISNEVAPFGGVKQSGLGREGSHYGIDDYVVIKYLCVGGI

SEQ ID NO: 42412 - protein, 608 aa, Ipomoea batatas
MATITASHFVSHVCGGATSGESKVGLGQLALRSQAVTHNGLRPVNKIDMLQLRTSAKKPSKNGRENEGGMAAGTIVCKQQGMNLVFVGCEVGPWCKTGGLGDVLGGLPPALAARGHRVMTVCPRYDQYKDAWDTCVVVELQVGDRIEPVRFFHSYKRGVDRVFVDHPMFLEKVWGKTGSMLYGPKAGKDYKDNQLRFSLLCQAALEAPRVLNLNSSNYFSGPYGEDVVFVANDWHTALLPCYLKTMYQSRGIYMNAKVAFCIHNIAYQGRFAFSDFSLLNLPDEYKGSFDFIDGYDKPVKGRKINWMKAGIREADRVFTVSPNYAKELVSCVSKGVELDNHIRDCGITGICNGMDTQEWNPATDKYLAVKYDITTVMQAKPLLKEALQAAVGLPVDRNIPLIGFIGRLEEQKGSDILYAAISKFISMDVQILILGTGKKKFEQQIEQLEVMYPDKARGVAKFNVPLAHMITAGADFMLIPSRFEPCGLIQLHAMRYGTPCICASTGGLVDTVKEGYTGFHMGAFNVDCETVDPEDVLKVITTVGRALAMYGTLAFTEMIKNCMSQELSWKGPAKNWETVLLSLGVAGSEPGVEGDEIAPLAKENVATP

SEQ ID NO: 42413 - protein, 207 aa, Alocasia macrorrhizos
MEFILLLVSSLLLTTAAATNPVLDVDGNELQRGQLYYATSVMRPGGGLTLAAPKGSCPLNVAQAPFDKYSGRPLAFFPENADDDTVQEGSTLYIMFPEPTRCPQSTVWTFDREAGFVTTGGTTSKAIGPHNSRFAIRKAGDASSQPRDYQIEVCPCSTGVERPSCRMGCLGTLGLAEGGKNVLLNINNESPHTIRFVKVKEGLAVSS

SEQ ID NO: 42414 - protein, 264 aa, Nicotiana tabacum
NPILREEMAKESYEQAIAALEKLLSEKGELGPIAAARVDQITAELQSSDGSKPFDPVEHMKAGFIHFKTEKYEKNPALYGELSKGQSPKFMVFACSDSRVCPSHVLNFQPGEAFVVRNIANMIPAYDKTRYSGVGAAIEYAVLHLKVENIVVIGHSACGGIKGLMSLPADGSESTAFIEDWVKIGLPAKAKVQGEHVDKCFGDQCTACEKEAVNVSLGNLLTYPFVREGLVKKTLALKGGHYDFVNGGFELWGLEFGLSPSLSV

SEQ ID NO: 42415 - protein, 221 aa, Zea mays
VPETPLHRPTELSPLLNHSPVNESTDHHSQEQGIPTLITWSQGGDEVFLEGSWDNWTSRRALERSGKDHAVLLVLPSGVYHYRIIVDGELRYIPELPHAADERGRVANVLDVHDYVPESLDSVAEFEAPPSPVHSYDLHCPGDEEFAKEPPTLPPQLLVSVLGGDVDSAGHGNQALKPQHVVLDHLFIEKGWGSQSLLALGVTHRFESKYVSFVLYKPLER

SEQ ID NO: 42416 - protein, 436 aa, Nocardia farcinica IFM 10152
MTAIALFTRDLRVHDNPVLAAARDAGDAVVPLFVIDAHLVPDRCPPNRARFLAAAVRELDAELRTRGGRLIVRRGVVADEVARVVDETGARTVHLADDVSGYSAARADALRERLDRRGVRLEPHPASITTVDGDVLRPATGRDHFAVFTPYFRRWSEVPRRAPLPPPEDLEVPDLPSAALPTPESLNRGEPSPQLSVGGETTGRALLDSWLAGPVDDYVETGDDLAADATSHLSPYLHFGCLSPTELLHRVDVGSAGGQAFARQLAWRDFHHQLLAARPAVARHDYRPRPIRWRDDPQALAAWRSARTGYPIVDAALRQLHTEGWLPNRARLIAAAFLTKTLGLHWRAGAGHFLHWLVDADLANNQLNWQWVAGTGSDTRPNRGFNPLRQADRYDPDGVYVRRWIPELADLDGGRIHRPWRAEVDYPSPIAECPGM

SEQ ID NO: 42417 - protein, 417 aa, Medicago sativa
ARENITPSPTASSDSVFAHLVRAPEDPILGVTVAYNKDPSPIKLNLGVGAYRTEEGKPLVLDVVRRVERQLLNDMSRNKEYIPIVGLADFNKLSAKLIFGADSPAIQENRVTTVQGLSGTGSLRVGGEFLAKHYHQRIIYLPTPTWGNHTKVFNLAGLTVKTYRYYAPATRGLDFQGLLEDLGSAPSGSVVLLHACAHNPTGVDPTLEQWEQIRQLIRSKSLLPFFDSAYQGFASGSLDADAQPVRLFVADGGELLVAQSYAKNMGLYGERVGALSIVSKSADVSSRVESQLKLVIRPMYSSPPIHGASIVAAILKDRDLYNDWTIELKAMADRIINMRQQLFDALRARGTPGDWSHIIKQIGMFTFTGLNPEQVSILTKEYHIYLTSDGRISMAGLSSKTVPHLADAIHAVVTRVA

SEQ ID NO: 42418 - protein, 621 aa, Legionella pneumophila str. Paris
MTMNDQDQQSSQITKVISLGKEQGYLTYSQINDLLPNIVDTEHFDVIISMLEGMNIKVFELPPSEDELALLLNTEEVPDIEEAAMVLASVDKETGRTTDPVRMYMREMGTVELLTREGEIRIAKRIEEGIYQVLKSLAHYPETVQLVLEDYDRFLAEEIRLNEIISGFADVDEEIAPATNIGSMLDEEQQEEILLDVDEEDEDGEGGISDVDDGPNPEQAKIYFDELREAFEKAMKALKEHGRTNKKTVELLDSMSESFLKLKLTSRQVDKLTRHFRQLRNHIREFERSIMRLCIEKARIPRKLFIDTFPGQETDLSWLETIISKHAKKLDLDRIEENREEILRLQSKLASFEIEYGLTISEIKDINRKMSIGEAKARRAKKEMVEANLRLVISIAKKYTNRGLQFLDLIQEGNIGLMKAVDKFEYRRGYKFSTYATWWIRQAITRSIADQARTIRIPVHMIETINKLNRISRQILQETGREATPEELAEKMELSEDKIRKVLKIAKEPISMETPVGDDDDSHLGDFIEDNNIESPIDMATAEGLREATLEILETLTPREAKVLRMRFGIEMNTDHTLEEVGKQFDVTRERIRQIEAKALRKLRHPSRSEKLRSFLEGDEG

SEQ ID NO: 42419 - protein, 313 aa, Glycine max
MGSIGVLLVAQVIPYLEQELDKRYKLFRAYDQPQTAQVLSQHASSIRAVVGNSNAGADAELIEALPKLEIVSSFSVGVDRIDLDRCKEKGIRVTNTPDVLTDEVADLAIGLMLALLRRICECDRYVRSGKWKKGDYKLTTKFSGKTVGIIGLGRIGQAIAKRAEGFNCPICYYSRTQKRDSNYKYYPSVVELASNCDILVVACPLTEETHHIINREVINALGPKGYLINIGRGKHVDEAELVPALLEGRLGGAGLDVFENEPTVPEELFGLENVVLLPHVGSGTIETRTAMADLVLGNLDAHFLGNPLLTPLV

SEQ ID NO: 42420 - protein, 229 aa, Zea mays
MQIFVKTLTGKTITLEVESSDTIDNVKAKIQDKEGIPPDQQRLIFAGKQLEDGRTLADYNIQKESTLHLVLRPRGGMQIFVKTLTGKTITLEVESSDTIDNVKAKIQDKEGIPPDQQRLIFAGKQLEDGRTLADYNIQKESTLHLVLRLRGGMQIFVKTLTGKTITLEVESSDTIDNVKAKIQDKEGIPPDQQRLIFAGKQLEDGRTLADYNIQKESTLHLVLRLRGGQ

SEQ ID NO: 42421 - protein, 236 aa, Zea mays
  misc_feature (226)..(226): Xaa can be any naturally occurring amino acid
  unsure (1)..(236): unsure at all Xaa locations
MRAAALGIVAMACLVAVARGGNFIQDSEMTWGDGRGKVVDGGRGLDLTLDKTSGSGFQSKSEYLFGKIDMQIKLVPGNSAGTVTTFYLSSQGTAHDEIDFEFLGNVTGEPYTLHTNVFAQGQGQREQQFRLWFDPTKAFHTYSIIWNPQHVIFAVDGTAIRDFKNHEARGVSFPKSQPMRLYASLWNADDWATQGGRVKTDWSKAPFVASFRNFNADACVMSGGAXGCPAGTMGAL

SEQ ID NO: 42422 - protein, 338 aa, Streptococcus mutans UA159
MTKILVTGGAGYLGSHTCVELLNQDYRLVVVDNLLHSSFKSLTAIKEITGKDFTFYQADIRDKKSLEAIFEKEAITAVIHFAGLKIVNESTSIPLDYYANNFSGTITLLQVMQQFSCKNFIFSSSASVYGNKAPAPVSEEAPRSVMTPYGRTKMMIEDVLMDVSVSDSAWNIVILRYFNPIGAHSSGELGEDPQGLPTNLLPYISQVALGKLDRVRVFGGDYDTKDGTGIRDYIHVVDLARGHVAALQKLVAGSGLSIYNLGTGKGTSVLELIQEMGEIVGHPIPYKIVGRRAGDIAVSYADVSKAEKELNWHARYDLKRMCQDSWRWQKKYPNGFRE

SEQ ID NO: 42423 - protein, 488 aa, Listeria monocytogenes str. 1/2a F6854
MTDRKNLTTNQGVPVGDNQNSMTAGRKGPTLIEDYVLIEKLAHFDRERVPERVVHARGAGAHGKFVTKKSMKKYTMAKFLQEEGTETEVFARFSTVIHGQHSPETLRDPRGFSVKFYTEEGNYDFVGNNLPVFFIRDAIKFPDVIHSLKPDPRTNIQDGNRYWDFFSLTPEATTMIMYLFSDEGTPASYREIRGSSVHAFKWINEEGKTVYVKLRWVPKAGIVNLSTEQASQIQAKEFNHASRDLYEAIENGDYPEWDLYVQVLDPKDLDSFDFNPLDATKDWFEDVFPYEHVGTMTLDRNPDNIFAETESVGFNPGVLVRGMLPSEDRLLQGRLFSYSDTQRHRVGPNYLQLPINSPKAPVANNQRDGHMPFKQQTSSINYEPNSYDTEPKENPAFIEPEQEIRGDVAGRLIAEKPNNFGHAKEVWDRYSDAERAALVKNIVDDWSAVREDIKIRNLRNFYQVDPEFASRVAARTGINLEEHVTDLK

SEQ ID NO: 42424 - protein, 450 aa, Oryza sativa
MSNRSKFWRLAALVPEVQCPDQPISPRQKFKYTAIVLFIFVTASQVLLYGIQHQPRTIEPDPLHWLHLILASSRSTLLSHGIVAILVPEVLVKIWVYLKIITLDTSAPETGVLMNRAQRLLGILVAILGAVNFYVRSQHFTVNTVLIMLQILCSDIIVIYLDDVLRKGYGLLSGISLFTATNICVNILWKAFSPMSVMYPEQSPEFEGAVIAWVHLLMTRTDKLSAMSKAFYRQNLPNIINFLATCLFVPLAIFFQGFYIVLPVRTRRNFQAYCHIKLSHFLYGPVVLHRLLLPLPYVASKVLYKKYSGNTLVNLLGKWDGLNHFGQSIPVGGIVYYLRTPPILADLHRDPFHAFIYVAFVLISCVFISMGLMMQEERRLRLAQPDSIHANEIRRHVMRAACVGGFCAGVLIIFADLIGVFCSGTGIMLAVTASYPYVDGRASEVGSFGF

SEQ ID NO: 42425 - protein, 516 aa, Oryza sativa
MVIARGLLRSNASSSSSQAINLLKYVTSTGSLQGHTQNLCDASTRHFSSVPSPQYNSTEENGFKGHGMLAPFTAGWQSTDVHPLVIERSEGSYVYDIDGKKYLDSLAGLWCTALGGSEPRLVKAATEQLHKLPFYHSFWNRTTKPSLDLAKELLSMFTAREMGKVFFTNSGSEANDSQVKLVWYYNNALGRPDKKKFIARSKSYHGSTLISASLSGLPALHQKFDLPAPFVLHTDCPHYWRFHLPGETEEEFATRLANNLEELILKEGPETIAAFIAEPVMGAGGVIPPPKTYFEKVQAIVKKYDILFIADEVITAFGRLGTMFGSDMYNIKPDLVSMAKALSSAYVPIGAIMVSPEISDVIHSQSNKLGSFAHGFTYSGHPVACAVAIEALKIYQERNIPDHVKQISPRFQEGVKAFAGSPIVGEIRGVGLILGTEFADNKSPNDPFPAEWGVGAIFGAECQKRGMLVRVAGDNIMMSPPLIMTPDEVEELVSIYGDALKATEERVAELKSKKNN

SEQ ID NO: 42426 - protein, 188 aa, Arabidopsis thaliana
MTNYGAIPTSSHASPLVDVESLSRAKHRIKAGLATRRAWRVMFDFHSMGLPHGVSDAFTRIKTNLAYFRMNYAIVVLIVIFFSLIWHPTSLIVFTVLVVVWIFLYFLRDEPIKLFRFQIDDRTVLIVLSVLTVVLLLLTNATFNIVGALVTGAVLVLIHSVVRKTEDLFLDEEAATTETSGLTSYPST

SEQ ID NO: 42427 - protein, 398 aa, Methanosarcina mazei Go1
MNEQGLSEREIFSYLENAKSEDTDYYRVFSSMCTRPHKIAIEANRLFIEANLGDLGLFAGAHKLEQEVVRMLGNLLHASSIDVPSGGLCQSSVCGYLTTGGTESNIQAVRGMKNLVTAGKKEFKGTPNIVIPASAHFSFDKVADMMGIEVRRASLDSEFRVDMASVEKLINENTIGLVGIAGNTEFGQIDPIDKLSEVALENELFLHVDAAFGGFVIPFLEKPQPFDFKVPGVTSIAIDPHKMGLSTIPSGALLFRSPSFLDSLKVSTPYLTTKSQFTLTGTRSGASAAATCAVMKYLGYEGYRKNVQYCMELTSKIVEEARKLGFEPLIEPVMNVVALKVPNPDLVRERLLKKFGWNVSITRTPRALRLVLMPHNSPEDIELFLEDLKKVTAEIKSP

SEQ ID NO: 42428 - protein, 474 aa, Ralstonia eutropha JMP134
MSKQFDVLVIGAGPGGYIAAIRAGQLGLNVACCEGNAYDDPKNEPRLGGTCLNVGCIPSKALLASSEEFENAQHHLADHGITVGDVKVDVSKMLKRKDDIVGKMTKGIEFLFRKNKVTLLKGYGKFVGKTAEGFQVEVAGEVVTAKQVIIATGSKARHLPGITVDNDLVSDNEGALKFPAVPKKLGVIGAGVIGLELGSVWRRLGAEVTVLEALPAFLGAADEGVAKEAQKQLTKQGLKFSLGVKVDEVTTGKSGVTVKYTDKDGAAQTLEVDRLIVSVGRVPNTDNLGLEAVGLAADQRGFIEVDDHCATKVPGLWAIGDVVRGPMLAHKAEDEGVAVAERIAGQKPHIDYNCIPWVIYTFPEIAWVGKTEAQLKAEGREFKAGQFPFMANGRALGMGHPEGFVKMLADAKTDEILGVHIVAANASDLIAEAVVAMEFKAASEDIGRVCHPHPSMSEVMREAALAVDKRQLNM

SEQ ID NO: 42429 - protein, 599 aa, GIBBERELLA ZEAE PH-1
MADFANFDGTPSSLGSDTNHRKAAILERHLPDGYSAEPDVAFGPANPSGSASASAANADDDSQAEPVESSLLLQGGDMHRDMFKIKARASSLRRAATFSHHAVPRLASEDELSHSEQREPGGFRRYHIQRRARQRRMSGYTIVAKNFVDFLDLYGSFAGEDLEDNDSEDESAIDDREDGDVEQPPELRPLLGRRRSSKRLRKTGDATTTKTFFTLIKAFIGTGIMFLPKAFRNGGILFSSITLIVLSLVNCGCFRLLLDCRQIYGGGYGELGEAIIGPRFRSLVLASIAISQLGFVCAGLIFTAENLYAFLDAVTANHRELMFSVPTLIALQLVALVPLALIRNISKLGPAALLADVFILIGIVYIWYYDIAALSQHGMDSTVKLFNPRDFTLTIGSGIFTFEGIGLILPIQSSMKRPEHFPGLLYLVMFIITIIFTSVGALCYATFGEDTKIQVISNFPQDSPLVNAVQFLYSIAVLAGDPVQLFPAARIIETSIFGERATGKKSIAIKWKKNALRTFIAGVCVGVSILGASDLDKFVALIGSFACVPLVYIYPALLHYKGAAQTTRAKVIDVIVMVVGFIAMVYTTLVTVYQWIDSV

SEQ ID NO: 42430 - protein, 410 aa, Bifidobacterium longum DJO10A
MTPGVAFFYGGMVRAKAVLNMLMLEAAALSVTMIIWTLWGWSIAYAGSDIGGIFGDPASGFLLKDSMVAQDGVFTATGLNGNNYPVSVDVAFQVAFAMITVGLICGAIAERVKYSTWMIFVALWVTFDYAPMAHMVWNGGLLSADGAISKAIGAAAHDFAGGTVVHINAAVAALIIVLIIGKRKGFGTQPFRPHNVPFVMLGAFLLWFGWFGFNAGSAFAANGTAGYAWVSTSAATAAAMLSWGFTEKIRSGHYTAMGAASGMVAGLVAITPAADVVSPLWAIVMGAIAGVLTCLACGLKFKFGYDDSLDVVGVHGVGGFTGTILIGFFGEGTGLLAGGDWRQLVVQLVIALVAILYSAVITAIIAFALEKTIGWRVTEAQEVGGIDLADQGERAYDFAGTASSVLKEVK

SEQ ID NO: 42431 - protein, 78 aa, Arabidopsis thaliana
FSMLFAAISTKVSVENMDMVTSCFEEFKSKKISRVALVKKLRHIVGARMLISTIMRLQNKLPPMSRHEAPKHVGQNNG

SEQ ID NO: 42432 - protein, 265 aa, Triticum aestivum
  misc_feature (232)..(232): Xaa can be any naturally occurring amino acid
  misc_feature (253)..(253): Xaa can be any naturally occurring amino acid
  misc_feature (259)..(259): Xaa can be any naturally occurring amino acid
  unsure (1)..(265): unsure at all Xaa locations
HYRTSLYKKAGWYRSGIPGISSTHASETNMQENWRIVDFFSHHPESLHMVTFLFDDVGIPLNYRHMDGFGVNTYTLISRDGKAHLVKFHWKPTCGVKCLLDDEAVTVGGTCHTHATKDLTDAIAAGNYPEWKLFIQTIDADHEDKFDFDPLDVTKTWPEDIIPLQPVGRMVLNKNIDNFFAENEQLAFCPAVTVPGIHYSDDKLLQTRIFSYADTQRHRLGPNYLMLPVNSXECAHHNNHHDGLMNFMHRDEXVNYFPXRFDPTR

SEQ ID NO: 42433 - protein, 367 aa, Synechocystis sp. PCC 6803
MQNLILQHLQDRISRPAFAMIKSLQSTIQSQQGDSYMARMYYDQDANLDLLAGKTVAIIGYGSQGHAHALNLKDSGVNVVVGLYSGSKSVAKAEGAGLKVLSVAEAAKAADLIMILLPDEVQKTVYEAEIAPNLVAGNVLLFAHGFNINFAQIVPPADVDVVMAAPKGPGHLVRRTYEQGQGVPALFAVYQDASGQARDYAMAYAKGIGGTRAGILETTFREETETDLFGEQVVLCGGLTALIKAGFDTLVEAGYQPELAYFECLHEVKLIVDLIVEGGLAKMRDSISNTAEYGDLTRGPRIVTEETKAEMRQILDEIQSGQFAREFVLENQAGKPGFTAMRRRESEELIEEVGKDLRAMFSWLKDR

SEQ ID NO: 42434 - protein, 54 aa, Brassica napus
MLPSGLKETQLNNNQKVHPQPMEQSINQNPEAMEALISNLFGNISSLKSAYIQL

SEQ ID NO: 42435 - protein, 327 aa, Saccharophagus degradans 2-40
MKTLTAPIRWGIIGCGDVTEVKSGPAFYKTKHSQLAAVMRRDTAKAHDYAKRHGVATVHASAEALIHDPNIDAIYIATPPASHLQYALEVAVAGKPCCVEKPMALNNKQCETMVEAFNEAQLPLFVAYYRRTLPRFLKVKQWLDEQAIGDVRHISWNFRKPPSDTDKAKQTNWRTQPDQAGGGYFVDLASHGLDLFDFLLGPIHKVNGFAANQQQLYQAEDAVTAAWQFKSGVTGSGYWNFGARTRLDEVEIIGSAGEIRFAIFEDKPVTLMNEQGETTETLAHPEHIQTYHVQAMNEHLLGTSTHPSLGESAARANWVMDKILSGK

SEQ ID NO: 42436 - protein, 335 aa, Oryza sativa (japonica cultivar-group)
MIQAMASHAGGSGGGGGGSGRDAGSAQRGPMQGLARQGSLYGLTLNEVQSQLGEPLLSMNLDELLKSVFPDGADLDGGGGGGGIAGQSQPALGLQRQGSITMPPELSKKTVDEVWKGIQDVPKRGAEEGGRWRRERQPTLGEMTLEDFLVKAGVVTDPNDLPGNMDVVGGAAAAAAGTSDLNAGAQWLQQYHQQALEPQHPSIGAPYMATHLAPQPLAVATGAVLDPIYSDGQITSPMLGALSDPQTPGRKRCATGEIADKLVERRQKRMIKNRESAARSRARKQAYTNELENKVLRLEEENERLKKQKELDEILNSAPPPEPKYQLRRTSSAAF

SEQ ID NO: 42437 - protein, 351 aa, Nocardia farcinica IFM 10152
MRAAVYYGPNKVDVVDVPEPEPGPGEVKLRVGFNGICGTDLHEYYAGPIFVPTEPHPLTHRQLPLVLGHEFSGTVTEVGSGVTGIEPGDRVAVEPLYTCGHCGPCRAGTYNICRRIGFHGLMSDGGMAEYTVVPAHMIHRLPDSVPLELGALVEPMSVAYHAATLGDPKPEDTAMVFGAGPIGIGLWFALRAKGLDDIYVVEPSPTRRAAIEALGATTLDPTAVDVPAFIDNATDGAGADATYDAAGVQPAVETALACLGARRPLISVAIYEKPLTTPLQRLVMNESRIQGSLCYTSADYRAVIDLMAQGRYDATGWVETIALEQVIDEGFEALHAGTKMKVLVDPAEVAA

SEQ ID NO: 42438 - protein, 401 aa, Vibrio vulnificus YJ016
MKPSDDKRSAREQSQTEKEFKMPSSLTKKGELGGAGLRGQSAGSTALCTVGKTGTGLTYRGYDITDLANHAQFEEVAHLLLRGHLPTQQELDAYKTRLIGLRGLPAELKQALELIPASAHPMDVMRTGCSVLGNLEQETDFSQQLDATERMLALFPAIICYWYRFSHDGVRINTQDQSQDCIGGYFLKMLTGKEPSELHKQVMHCSLILYAEHEFNASTFAARVCASTLSDIHSCVTAAIGTLRGPLHGGANEAAMEMIENWQTPEEAESNILRMLANKEKIMGFGHAIYRESDPRNALIKRWSKALSEAVGDTHLYAVSERVEAVMKREKDLFCNADFFHASAYHFMDIPTKLFTPIFVMSRLTGWTAHVFEQRANNRIIRPSADYIGPDHQDWVPIEQR

SEQ ID NO: 42439 - protein, 215 aa, Pseudomonas syringae pv. tomato str. DC3000
MTLRSEILVNKNVLPTAEQALPGRETPMTLPETHFVNGNPLLGPFTSNVEFAIFGLGCFWGAERRLWQQEGVVSTVAGYAGGFTPNPTYEEVCSGLTGHTEVVLVVYEPEKISYDSLLKVFWEAHNPTQGMRQGNDIGTQYRSVIYCTTPEQLAAAKASADAFQAELSKAGLGGITTEIEEAPTVYFAETYHQQYLAKNPQGYCGLGGTGVCLPA

SEQ ID NO: 42440 - protein, 267 aa, Brassica napus
  misc_feature (19)..(19): Xaa can be any naturally occurring amino acid
  unsure (1)..(267): unsure at all Xaa locations
SSPRYLPTPSNIHIWKLEXRKMKNSVKKVVDSRLASKQDYGDDLLGIMLKSCESERNETKLSIEEIIDECKTFFFGGYETNSNLLTWTTMLLSLHQDWQEKLRDEIFQECGKDKTPDSDTFSKLKLMNMVFLESLRLYGPVSYFSRDATKDLTLGHLKIPKGTTIVFPLMKMHSDKAVWGSDADKFNPLRFENGVSRAAKHPNALLAFSMGPRVCIGQNFAMIEAKVVLTMILQRFRLSLSSEYKHAPVDHLTLTPQYGLPVMLQPL

SEQ ID NO: 42441 - protein, 477 aa, Corynebacterium glutamicum ATCC 13032
MGVDRRTKIVCTLGPAVASADGILRLVEDGMDVARLNFSHGDHPDHEQNYKWVREAAEKTGRAVGILADLQGPKIRLGRFTDGATVWENGETIRITVDDVEGTHDRVSTTYKNLAKDAKPGDRLLVDDGKVGLVCVSVEGNDVICEVVEGGPVSNNKGVSLPGMDISVPALSEKDIRDLRFALKLGVDFIALSFVRSPADAELVHKIMDEEGRRVPVIAKLEKPEAVTSLEPIVLAFDAVMVARGDLGVEVPLEEVPLVQKRAIQIARENAKPVIVATQMLDSMIENSRPTRAEASDVANAVLDGADAVMLSGETSVGKDPHNVVRTMSRIVRFAETDGRVPDLTHIPRTKRGVISYSARDIAERLNARALVAFTTSGDTAKRVARLHSHLPLLVFTPNEAVRSELALTWGATTFLCPPVSDTDDMMREVDRALLAMPEYNKGDMMVVVAGSPPGVTGNTNMIHVHLLGDDTRIAKL

SEQ ID NO: 42442 - protein, 183 aa, Malus sp.
MASSMISSGTVATVSADRPAPAQARMVAPFTGLKSSSASPVTRKSNDITSIASNGGRVQCMQVWPPLGLKKFETLSYLPPLSTESLAKEVDYLLRKNWVPCLEFELEHGFVYRENHRSPGYYDGRYWTMWKLPMFGCTDSSQVLKELEEAKKAYPQSFIRIIGFDNVRQVQCISFIAYKPAGF

SEQ ID NO: 42443 - protein, 321 aa, Lactobacillus acidophilus NCFM
MKLGIIGSGKIVHDFLTAIDQINNLDVVAISSTKRSENIAQELAKKYSINKTYTDNDELMSDPDVDTVYVAVPNFLHYQVAKAALEHGKNVICEKPFVDSTNEAKKLKQLADEKNLIIVEAITNIYLENFKRIQREIENIAPIHIVSLNYTQYSSRYDDFLKGKIAPVFDPAKDGGTLMDLNIYNIHLVSALFGLPDKVKYYANMQKGVDTSGILHLSYPDKQAALIAAKDSYVTPRSFIEGEKGSIYIDGSTGELNNFTIEMRDQKPKRYNLNKYSHRMASEFNAFVEMIDNHDKVKADEAFVNTLESMQILTTAKNSEE

SEQ ID NO: 42444 - protein, 294 aa, Medicago sativa
MEQYEKVEKIGEGTYGVVYKARDRATNETIALKKIRLEQEDEGVPSTAIREISLLKEMQHRNIVRLQDVVHSEKRLYLVFEYLDLDLKKFMDSSPEFAKDQRQIKMFLYQILCGIAYCHSHRVLHRDLKPQNLLIDRSSNAVKLADFGLARAFGIPVRTFTHEVVTLWYRAPEILLGSRHYSTPVDVWSVGCIFAEMINQRPLFPGDSEIDELFKIFRITGTPNEETWPGVTSLPDFKSAFPKWPAKDLATQVPNLEPAGLDLLSSTCRLDPTRRITARGALEHEYFKDIKFVP

SEQ ID NO: 42445 - protein, 188 aa, Arabidopsis thaliana
MTNYGAIPTSSHASPLVDVESLSRAKHRIKAGLATRRAWRVMFDFHSMGLPHGVSDAFTRIKTNLAYFRMNYAIVVLIVIFFSLIWHPTSLIVFTVLVVVWIFLYFLRDEPIKLFRFQIDDRTVLIVLSVLTVVLLLLTNATFNIVGALVTGAVLVLIHSVVRKTEDLFSFEEAATTETSGLTSYPST

SEQ ID NO: 42446 - protein, 230 aa, Lactobacillus acidophilus NCFM
MSKLVLIRHGQSEWNLSNQFTGWVDVNLSEKGVEEAKKAGRLIKEHGLEFDQAYTSLLTRAIKTLHYALEESDQLWIPETKTWRLNERHYGALQGLNKKATAEKYGDEQVHIWRRSYDVLPPAIDDDNEFSQAHDRRYANLDPHIVPKAENLHVTLDRVMPFWEDNIAPDLLDGKNVIIAAHGNSLRALTKYIENISDDDIMDLEMKTGEPVVYTFDENLDVVNKEKLDD

SEQ ID NO: 42447 - protein, 408 aa, Rickettsia rickettsii
MATKLIKHGSKAREQMLEGIDILADAVKVTLGPKGRNVLIEQSFGSPKITKDGVTVAKSIELKDKIRNAGAQLLKSAATKAAEVAGDGTTTATVLARALAREGNKLVAAGYNPMDLKRGMDLAVNAVVEEIKKSSKKINSQEEIAQVGTISSNGDKEIGEKIAKAMEEVGKEGVITVEEAKNFSFDVEVVKGMMFDRGYLSPYFVTNSEKMVAELENPFILLFEKKLSNLQPMLPILEAVVQSQRPLLIIAEDVEGEALATLVVNRLRGGLKVAAVKAPGFGDRRKAMMEDIAILTKGELITEDLGMKLENVSIKSLGTAKRVTISKENTVIVDGNGDKKNIEDRVLQIKSQIAETTSDYDKEKLQERLAKLSGGVAVLKVGGATEVEVKERKDRVEDALAATRAAVE

SEQ ID NO: 42448 - protein, 623 aa, Yarrowia lipolytica CLIB122
MEKCKQVFHEVFLSTAPVKHYPKKECNTNAKERGWTQKKIIIGWIFVYLYSSSKTIAQHLYPSLAPFATSHFSGLALLSSQSVVESAVFVVTRPAAAKIADHLGRLEGWCVVIIAHALGSILYAAAPNIGCYFAGTVFWEIGIVSGHLMMELYASDTSTTDTRVLWSSFIQTPSIWAPWISAPVLAGFLKVTTWRWGYGAFAIILPVCSIGTVIMMAYMRIRYERKAGGLGDFYSPGGPLRFIKSFDVVGLVTLCAGLILFFLPITLAAGSERWKLHSYIAMLTIGSFLIVFFTVWEYFPKAPFMPWRLFKSRVMCCSAALVFLMSLANKLYVPYFITWLMVVKGQSPKAATNVSSVLVVSSNVFGMFFAAPYMWWSGRPKRVLVFGCCFHLIGIGLTYHYRQPSSGLAIMIVAQCFEGVGRGCIYIPAATMAQAMFDKHKVAAVTALYFSSGGIGQVIGDAICGAIYRELYPRYIHKYAPDIPHKDLNLIINKIKKATKFPMGSLVRTEINHAFNETMRHMLVGPFACVGAMVIVSLMYPSIDLKSAARDGEVEGEDQMDEDDPMAIHGVPEGSGSESEHDQEEQFGEKDSREDTGSESEHANEKMSAERAAAGYINDNVMV

SEQ ID NO: 42449 - protein, 680 aa, Saccharomyces cerevisiae
MTQFTDIDKLAVSTIRILAVDTVSKANSGHPGAPLGMAPAAHVLWSQMRMNPTNPDWINRDRFVLSNGHAVALLYSMLHLTGYDLSIEDLKQFRQLGSRTPGHPEFELPGVEVTTGPLGQGISNAVGMAMAQANLAATYNKPGFTLSDNYTYVFLGDGCLQEGISSEASSLAGHLKLGNLIAIYDDNKITIDGATSISFDEDVAKRYEAYGWEVLYVENGNEDLAGIAKAIAQAKLSKDKPTLIKMTTTIGYGSLHAGSHSVAGAPLKADDVKQLKSKFGFNPDKSFVVPQEVYDHYQKTILKPGVEANNKWNKLFSEYQKKFPELGAELARRLSGQLPANWESKLPTYTAKDSAVATRKLSETVLEDVYNQLPELIGGSADLTPSNLTRWKEALDFQPPSSGSGNYSGRYIRYGIREHAMGAIMNGISAFGANYKPYGGTFLNFVSYAAGAVRLSALSGHPVIWVATHDSIGVGEDGPTHQPIETLAHFRSLPNIQVWRPADGNEVSAAYKNSLESKHTPSIIALSRQNLPQLEGSSIESASKGGYVLQDVANPDIILVATGSEVSLSVEAAKTLAAKNIKARVVSLPDFFTFDKQPLEYRLSVLPDNVPIMSVEVLATTCWGKYAHQSFGIDRFGASGKAPEVFKFFGFTPEGVAERAQKTIAFYKGDKLISPLKKAF

SEQ ID NO: 42450 - protein, 492 aa, GIBBERELLA ZEAE PH-1
MKSWLWGASLVSTWGLVYAQTVQWSIEGRHPQPQLARRTKTTYEEVISNDRSEGGYFTEVTIGSPPQKVTLQLDTGSSDVWVPWNCADVCTDNDNGKGGCPLGSFDPDKSKSFKHVAPGMFGITFVDNSYVKGDYFEDHFELDGAVINNLTMGLAVKTNISYGLIGVGYAKNEASGSTTDVIYPNLPVAMYEAGYVNTIAYSVWLNDLDAKAGTVLFGGVDTAKYVGDMHRIDIQKVDGHYYHFVVALTSLVATSSSGSDNLTSECFPIPAVLDSGTTLSYLPHDLATEIWQEVGAVWSPYYGVAVLPCAYGRNNGNFTFGFAGPDGPVISVGMDELVLTMASDRANMPVFQSGPYKGHTMCSFGIQNDTSDLYLLGNTFLRSAYVVYDLVNNEVGIAATDFNSTATKRVAFKSYGASIPSATAVANQHKATENPSVSGHNFTAADGFQESDWDSDDEDNAAISLTPSGTPLVMAVVTMGFVLLGGGIFHTF

SEQ ID NO: 42451 - protein, 371 aa, Malus x domestica
MGKGGMSDGDHADRCCGEAINGDVQQENMAAWLLGVKNLKIQPYKLPNLGPHDVRVRLKAVGICGSDVHHFKNMRCVDFIVKEPMVIGHECAGIIEEVGSEVEDLVPGDRVALEPGISCKRCNLCKQGRYNLCRKMKFFGSPPNNGCLANQVVHPGDLCFKLPDNVSLEEGAMCEPLSVGIHACRRANVCQETNVLVVGAGPIGLVTLLAARAFGAPRIVIADVNDERLLIAKSLGADAVVKVSTNIEDVAEEVAKIQKVLENGVDVTFDCAGFNKTITTALSATRPGGKVCLVGMGQREMTLPLATREIDVIGIFRYQNTWPLCLEFLRSGKIDVKPLITHRFGFSQKEVEEAFETSARGGNAIKVMFNL

SEQ ID NO: 42452 - protein, 281 aa, Saccharomyces cerevisiae
MSNHSEILERPETPYDITYRVGVAENKNSKFRRTMEDVHTYVKNFASRLDWGGFAVFDGHAGIQASKWCGKHLHTIIEQNILADETRDVRDVLNDSFLAIDEEINTKLVGNSGCTAAVCVLRWQLPDSVSDDSMDLAQHQRKLYTANVGDSRIVLFRNGNSIRLTYDHKASDTLEMQRVEQAGGLIMKSRVNGMLAVTRSLGDKFFDSLVVGSPFTTSVEITSEDKFLILACDGLWDVIDDQDACELIKDITEPNEAAKVLVRYALENGTTDNVTVMVVFL

SEQ ID NO: 42453 - protein, 340 aa, Alkaliphilus metalliredigenes QYMF
MKKVVTLGEIMLRLSTPGYERFVQADGFDACYGGGEANVCVSLANYGLDARFVTKVPKHEIGQSAVNALRKFGVDTSYILRGGDRLGIYFLETGASQRASKVIYDRAHAAIAEANASEFNWKEIFAGVDWFHFTGITPALSDQAAEFTLEACKAAKEMGVTISVDINYRKKLWTPERAGEVMSKLMPYVDVCIGNEEDAEMVFGVHAADTDVTKGEINHAAYEEVAKQLIERFGFKYVASTLRESYSASDNGWSAVLYDGKKSYVSKKYDVRIVDRVGGGDSFASGLIYGLVTEMQLQDALEFAVAASALKHTISGDANLVSIDEVETLTKGDGSGRVQR

SEQ ID NO: 42454 - protein, 368 aa, Malus x domestica
MGKGGQSCNGMVRQAKPVEQENMAAWLVDVNTIKILPFKLPSIGPNDVRIRIKAVGICGSDVHYLKTMKCADFEVKEPMVIGHECAGIVDKVGSEVKHLVPGDRVAVEPGISCARCQQCKGGRYNLCPDMKFFATPPVHGSLANQIVHPADLCFKLPENVSLEEGAMCEPLSVGVHACRRANVGPETTVLIIGAGPIGLVSVLAARAFGAPRIVIVDMDDKRLAMAKSLGADEAVKVSTKMEDLDDEVAEIKEAMISEVDVTFDCVGFNKTMSTGLNATRPGGKVCLVGMGHGVMTVPLTPAAAREVDVVGVFRYQNTWPLCLEFLRSGKIDVKPLITHRFGFTEKEVEEAFATSARGGNAIKVMFKL

SEQ ID NO: 42455 - protein, 381 aa, Volvox carteri f. nagariensis
MQIFVKTLTGKTITLEVESSDTIENVKAKIQDKEGIPPDQQRLIFAGKQLEDGRTLADYNIQKESTLHLVLRLRGGMQIFVKTLTGKTITLEVESSDTIENVKAKIQDKEGIPPDQQRLIFAGKQLEDGRTLADYNIQKESTLHLVLRLRGGMQIFVKTLTGKTITLEVESSDTIENVKAKIQDKEGIPPDQQRLIFAGKQLEDGRTLADYNIQKESTLHLVLRLRGGMQIFVKTLTGKTITLEVESSDTIENVKAKIQDKEGIPPDQQRLIFAGKQLEDGRTLADYNIQKESTLHLVLRLRGGMQIFVKTLTGKTITLEVESSDTIENVKAKIQDKEGIPPDQQRLIFAGKQLEDGRTLADYNIQKESTLHLVLRLRGGL

SEQ ID NO: 42456 - protein, 239 aa, Zea mays
MVVSVAATGPGTDAEPVSSTFFASRYVRDPLPRYRMPERSIPREAAQQIISDELMLDGNPRLNLASFVTTWMEPECDKLIMDSINKNYVDMDEYPVTTELQNRCVNMIAHLFNAPIKEDETAIGVGTVGSSEAIMLAGLAFKRKWQNKRKEQGKPCERPNIVTGANVQVCWEKFARYFEVELKEVKLSEGYYVMDPVRAVEMVDENTICVAAILGSTLTGEFGDVKQLNDLSTDKNKET

SEQ ID NO: 42457 - protein, 216 aa, Nostoc sp. PCC 7120; identical to SEQ ID NO: 1460

SEQ ID NO: 42458 - protein, 425 aa, Synechocystis sp. PCC 6803
MTQTKEPLTKAESAELEQEIELSQYINTDDIDDDDIDVEDLEQEVAATEGKEKKVRKIRKDAVKKKPYTEDSIRIYLQEIGRIRLLRAEEEIELARQIADLLELELIRDNLTLQLERQPSELEWGKQVWKLETAKQRLVGDKKKEPKKKDIDSYLANPDNELSLENEWSQQPNKNFAAFRRRLFLDRRAKDKMVQSNLRLVVSIAKKYMNRGLSFQDLIQEGSLGLIRAAEKFDHEKGYKFSTYATWWIRQAITRAIADQSRTIRLPVHLYETISRIKKTTKLLSQEMRRKPTEEEIAEKMEMTIEKLRFIAKSAQLPISLETPIGKEEDSRLGDFIEADGETPEDEVSKNLLREDLENVLDTLSPRERDVLRLRYGLDDGRMKTLEEIGQIFNVTRERIRQIEAKALRKLRHPNRNSILKEYIR

SEQ ID NO: 42459 - protein, 965 aa, Nostoc sp. PCC 7120
MNHYVPCTVLLIDKCSEERANMTRHLQQDSLYNYQIIEFSIAKEALNWCLEKTPEIILLDFASVNENASIFLEKLRSRLSNSQFTVILLIKPGDEDLAVRAMKSGAQDYLIKNQITPEILQRVIRHGMEKMYLMQQLAQTKAALQQSEHRYATLAEVVPVAIFRLDADGNCIYVNDRWSQITGEPIQAALGRGCLDTIHPEDSDRLFHQWTEVLTQEKMYCYEGKFLRKDGTTIWFYMQILPETDQNVTTIGYVGTLTDISEQQAALDDGLRPTIGDLIEAEAKLRKISERLTLAISSGRFGIWEFDCVQEKVIWDERMYELYGVHPEDFPGNFDAWLSFVHPDDQDYLLVTIQQVLHQNQEYDAEFQIIQPSGEIRVIKAYGVLNCDEQGKPILMVGINIDITERKQAEQELIHNRDLREVIFNESADALFLVDPVTLLTLDCNRRTVELFEATNKGELLGIEGRTLQRRPFTSNEIDTIVTQMQTKGFWSQEIEYVTLKGKLFWGNIAAKPITIAGRTLNLVRVTDINERKQAEEKLLRTNEQLAKANAELARATRLKDEFLANMSHELRTPLNAILGMSEGFIEGVFGAINQKQAKAIATIKRSGKHLLELINDILDLSKIESGKLELQISDVSVRSICDGSLTFIQQMALKKNICLSTHIGSNLDTIQVDDRRLRQVLINLLSNAVKFTPEGGNVKLTVWLEEVGTNETLGAEKLISQSSIPSPHICFRVTDTGIGIASEDISKLFQPFTQLDSSLNRNYTGTGLGLALVKRITTLHGGTILVNSEVGQGSCFTVRIPYLSGDNSLKKLQDPERVDLPATLIPKTLTIPVILLAEDNQANIDTISSYLESRGYEMVLAENGQQALDFAREKCPDLIIMDIQMPGMNGLEAIRQIRNEQKFIDIPIIALTALAMPSDRTTCLAAGANEYLTKPIKLKQLVLTIQQLLKNHQELHTSKYRKSD

SEQ ID NO: 42460 - protein, 718 aa, ASPERGILLUS NIDULANS FGSC A4
MSLEHTKKVYTLNTGDKIPAIGLGTWQSKPNEVREAVKNALLKGYRHIDTALAYGNEAEVGQGIKDSGVPREEIWITTKLDNTWHHRVTDGINSSLKDLGVDYVDLYLMHWPSSTDPNDLKKHLPDWDFIKTWQEMQKLPATGKVRNIGVSNFGIRNLEKLLNDPSCKIVPAVNQIELHPNNPSPKLVAYNSSKGIHSTGYSCLGSTNSPLYKDPTLLKLAEKKGKTPQQVLLVWGIQKGWSVIPKSVSKSRIDANFEIDGWSLTDEEINELDNLKDRFKSILRFAYAKAYKAVRAKIPEPAQQVSLRVQPVYARITPQQPVNRAAAIRQARSRYFSTRASGPFASYFKAAVQGDKTAYRSSRIAGNISRLTSRAPFASTLRPNLTGGTLGRTAGGYVIGAGRIGGARYFSHGPAAPAQVIHNVSVGVRAFFLSGQKARFDGIDPITGNKKFKVVSALQDEAERKMTAISRAAPGSFIDFKISPTITAFGLQKQFAPAGDESDTLNTEGLLDFLSADFARAVKDFAAILNDLKRLAALGDLPISLQDRSTIRVRFPGCDAETVERLCDEVGVQRGKVGQDADFDINTGAELALLFPFAPSVAPSSDTDIFFFHKEAQPQQPEEVDWQAMLSSEDVTQTSLGYAKLSNHDLSFDDMTMFGSNPWARSPSGYSSIGVSELGDRAFFPDTVSYSIPESLSGCEGSDGIRRFIAECDQAAAH

SEQ ID NO: 42461 - protein, 451 aa, Colwellia psychrerythraea 34H
MKSEFQQKNTAHHFQPFSDNKELAEKGIKLISKAEGVYIYEDNGKKYLDGMAGLWCVNIGYGRKELVEAASQQMTELPYYNLFFKTTTAPATNLAAKIASLAPAHMNKVFFTGSGSDANDTNFRMVRRYWDLKGKPTKKTFISRKNAYHGSTVAAASLGGMGYMHEQGDLPIDGIVHVDQPYWFAEGGDLSQDEFGLKAAQSLEAKILEVGEENVAAFIAEPFQGAGGVITPPDSYWPEIKRILAKYDILFILDEVISGFGRTGEWFASEYFDLKPDMITIAKGMSSGYLPIGGVIISDKVADVVIGEGADFNHGYTYSGHPVAAAVALKNIEILESEGIVDQVKSEISPYLQQRWQELADHPIVGEARGLGMVAAIELVKDKATKERLAPNAAGGGVCRDYSMDNGLIMRSCGDIMVISPPLVITKAEIDELIEKAKKTLDDTARFYNLI

SEQ ID NO: 42462 - protein, 148 aa, Listeria monocytogenes
IMYLFSDEGTPASYREVRGSSVHAFKWINEEGKTVYVKLRWVPKAGIVNLSTEQASQIQAKEFNHASRDLYEAIENGDYPEWDLYVQVLDPKDLDSFDFNPLDATKDWFEDVFPYEHVGTMTLDRNPDNIFAETESVGFNPGVLVRGM

SEQ ID NO: 42463 - protein, 148 aa, Listeria monocytogenes
IMYLFSDEGTPASYREIRGSSVHAFKWINEEGKTVYVKLRWVPKAGIVNLSTEQASQIQAKEFNHASRDLYEAIENGDYPEWDLYVQVLDPKDLDSFDFNPLDATKDWFEDVFPYEHVGTMTLDRNPDNIFAETESVGFNPGVLVRGM

SEQ ID NO: 42464 - protein, 97 aa, Chlamydia trachomatis
MSDQATTLKIKPLGDRILVKREEEASTARGGIILPDTAKKKQDRAEVLALGTGKKDDKGQQLPFEVQVGDIVLIDKYSGQELTVEGEEYVIVQMSEV

SEQ ID NO: 42465 - protein, 232 aa, Candidatus Blochmannia floridanus
MHIIKTVLIRHGESQWNKDNRFTGWIDVDLSNQGYSEAKRAGQLLKKYKFIFDYGYTSVLKRTIHTLWVILDQLNQTWLPIQKVWQLNERHYGALQGLNKNEAIKTYGYDTIQKWRRSFKDIPPKNNKNDLFLGTNDIRYKNIETNTLPNGESLELTANRVIPYWQKYIEPKIYNNNCIIIVAHGNSIRAILKFLNQLDDSEIFNIEIPTGIPLIYEFDNNIKPIRYYYLSE

SEQ ID NO: 42466 - protein, 203 aa, Hyacinthus orientalis
MVALKLQKRLSASVLKCGKGKVWLDPNEVNEISMANSRQNIRKLVKDGFIIRKPQKIHSRSRARRAMEAKRKGRHSGYGKRKGTREARLPTKVLWMRRMRVLRRLLRKYRESKKIDKHMYHDMYMKVKGNVFKNKRVLMESIHKSKAEKAREKTISDQFEAKRAKSKASRERKIARREERFAQGPVEKAPGTSTSYTNHTGTC

SEQ ID NO: 42467 - protein, 519 aa, Zea mays
METANVVILSFFFIFAIHRLFNRLHSRSTKMKPLPPGPLAIPVLGHLYLLLEKNIHHMFTRLAARYGPVLYLRLGSRNAVIVSSVDCARECFTEHDVTFANRPTFPTLHLMTYGGTTVGTCAYGPYWRHIRRVITVHLLSALRVRSMVPAIEAEVRAMARSMYRAAAAAPCGTGAAKVELRGRLFEVALSALMETVAQSKTSRSSMGGAADTGMSPEAQEFKESMDVMVPLLGTANMWDFLPVLQRFDVFGVKNKMAAAVSGRDAFFRRLIDEERRRLDDGVESENKSMMAVLLTLQKSEPENYSDDMIMSLCFSMFSAGTETTATTAEWAMSLLLNNPDVLKKAQGEIDAHVGNSRLLGADDMPHLPYLQCVLTETLRLYPVFPMLIAHESTADCKVGGHHVPSGTMLLTNAYAIHRDPAAWTEPDAFRPERFEDGSAEGKLLIPFGMGRRKCPGETMALRTLGLVLGTLIQCFDWATVGGVPKVDMTEASGLTLPRAVPLEAMCKPRQAMLDVLQKL

SEQ ID NO: 42468 - protein, 299 aa, Zea mays
MMRETYMDVLPPVDHIAARSNWFPAAARLWTAAENKQFERALAGLDLCRPDWEEVARAIPGRTVREVVSHFKHLEVDVQQIESGQVPLPAYGGGASSFTLQWDGYGPGPGDFRHGYRFAGGCGRRHHGRTPEQERKKGVPWTEEEHRLFLLGLKKYGKGDWRNISRNFVQTRTPTQVASHAQKYFIRLNSGGKDKRRSSIHDITTVNLTDDQPPSPSQSSLITSQSNAPAPSPAPAPAAGICQVPLAADVKRHGAGTLPFSSPNRTSAVPAYRMEFHDQQGLQCGPLHDQLLASQSVLF

SEQ ID NO: 42469 - protein, 383 aa, Daucus carota
VFLFSILVAHSHVSASSQTCDFPAIFNFGDANSDTGAFAAWFFGNPPFFGQSYFNGSAGRVSDGRLLIDFMATDLGLPFLHPYMDSLGANFSHGANFANILSTIALPTSNIIPGVRPPRGLNPVNLDIQVAQFAQFVNRSQTQGEAFDNFMPKQDYFSQALYTLDIGQIDITQEFLTNKTDDEIKAVVPGLISSLSSNIQILYSLGGRSFWIHNLGPNGCLPILWTLAPVPDDQIDSAGCAKRYNDLTQYFNSELKKGVDQLRTDLPLAAVTYVDVYTAKYSLYQEPAKYGFTHPLETCCGFGGRYNYGEFSLCGSTITVNGTQLAVGPCENPAEYINYEGQTYTQAADQITFNKISTGELSDPPNSLKTACPKLSLPRVSDI

SEQ ID NO: 42470 - protein, 202 aa, Hyacinthus orientalis
VSDRGLFGFGGKKEEEKSQEEVLVTGVEKLHVEEKKEEEKELRRSHSSSSSSSSDEEVVGPDGEKMKKKKWLKEEIKEKLAGGLQETATVVTQDVVVVAEAEDTAVVVDKVDETVAVEAAPGGEKKGFLEKIKEKLPGGHKKEAADSGGEAVKEAAPPHPHHEAAGEGHDVKEKKGFLGKMMDKLPGHHKEEADKSSPTAGH

SEQ ID NO: 42471 - protein, 155 aa, Parasponia andersonii
VNKVFTEEQEALVVKAWAVMKKNSAELGLQFLKIFEIAPSAKNLFSYLKDSPVPLEQNPKLKPHATTFVMTTESAVQLRKAGKVTVKESDLKRIGAIHFKTGVVNEHFEVTRFALLETIKEAVPEMWSPEMKNAWGVAYDQLVAAIKFEMKPSST

SEQ ID NO: 42472 - protein, 244 aa, Daucus carota
MGRFSVFSVFLVSILVAHCTSQVSAAAADTCKFPAIFNFGDANSDTGAFAAWFFGNPPFFGQSFFGGSAGRVSDGRLLIDFMATKLGLPFLHPYMDSLGADFAHGANFAEILSTIALPPANNIIPGVRPPRGLNPINLDIQVAQFAQFINRSQTIRQRGGVFKKFMPKAKYFSQALYTIDMGQIDITQLFLNNKTDEEIKAAVPALIASLSSNIKIIYSLGARSFWIHNLGPNGCLPILLTLAP

SEQ ID NO: 42473 - protein, 358 aa, Medicago sativa
MGSIEAAERTTVGLAAKDPSGILTPYTYTLRNTGPDDVYIKIHYCGVCHSDLHQIKNDLGMSNYPMVPGHEVVGEVLEVGSNVTRFKVGEIVGVGLLVGCCKSCRACDSEIEQYCNKKIWSYNDVYTDGKITQGGFAESTVVEQKFVVKIPEGLAPEQVAPLLCAGVTVYSPLSHFGLKTPGLRGGILGLGGVGHMGVKVAKALGHHVTVISSSDKKKKEALEDLGADNYLVSSDTVGMQEAADSLDYIIDTVPVGHPLEPYLSLLKIDGKLILMGVINTPLQFVTPMVMLGRKSITGSFVGSVKETEEMLEFWKEKGLTSMIEIVTMDYINKAFERLEKNDVRYRFVVDVKGSKFEE

SEQ ID NO: 42474 - protein, 595 aa, Capsicum chinense
MAVDSVLSSPLGPPACEKDAKALQFIEEMTRNADAVQQRVLDEILTRNSQTEYLKRFKLDGVSDRETFKSRIPVVTYEDLQPEIQRIANGDRSPILSAHPISEFLTSSGTSAGERKLMPTIKEELDRRQLLYSLLMPVMNLYVPGLDKGKGLYFLFIKSETKTPGGLLARPVLTSYYKSEHFKSRPHDPYNVYTSPNEAILCADSFQSMYTQMLCGLYEREQVLRLGAVFASGLVRAIRFLQLHWPQLAHDIRTGNLNPQITNLSLCERMGKIMRPNPELADFVAGECCKENWEGIITRIWPKTKYLDVIVTGAMAQYIPTLDYYSGGLPKACTMYAASECYFGLNLNPMCKPSEVSYTIMPNMGYFEFLPHDSTTTNSSPTNLVDLVDVEVGKEYELVITTYAGLYRYRVGDILRVTGFHNSAPQFHFVRRKNVLLSIDADKTDEAELQKAVENASKLLREFNTSVVEYTSYADTKTIPGHYVIYWELLMKDLKNSPSDEVLNKCCLAMEESLNTVYRQGRVACNSIGPLEIRVVKNGTFEELMDYAISRGASINQYKVPRCVNFAPILELLDSRVMSSHFSPSLPQWTPERRR

SEQ ID NO: 42475 - protein, 684 aa, Desulfitobacterium hafniense DCB-2
MENQQTNQKSLDLDAARVSHNKGYLTTNQGVGVSNTDDSLKAGKRGPTLMEDFIFREKVTHFDHERIPERVVHARGSGAHGYFQVYENLSHLTKAHFLSDPNLITPVFVRFSTVAGFRGSSDTVRDVRGFAVKFYTQEGNYDIVGNNMPVFFIQDAIKFPDLIHSLKPEPNNEMPQAASAHDTFWDFVVNTPETMHNVMWLMSPRAVPKSFRMMEGFGINTFRLVNAKGEFKFVKFHWKPVLGVHSLVWDEAQKVAGKDPDFNRRDLWETIEHGQAVEFELGIQVLKPEDEFRFDFDILDPTKLWPEELIPVQKIGKMTLNQNPDNFFAETEQVAFCPANVVPGIDFSNDPLLQGRLFSYLDTQLSRLGGPNFHQLPINRPLPKVNNNQRDGMHRMTIDEGQTSYYPNSLNKGEPHAARAGESHFEHYQEKVDGHVIRERSESFRDHYTQPAMFWNSMSDWERQHIIDAFRFELGKCKHKHTHQKLVDMLGNVDPELAQKVAEGLGATPPANGANPTTASSPALSMANTAKSPKTRKVAVLLESGFDKAQFDALTATLIAAGACFDVVSCKLGPVTAGDNGRVEGNQTYATTASVFYDAVYIPGGSHTEALKGSADVKGFLLDTFNHYKTIGLSGEASALLGLLPSGQKPAPGIVCESAGNMEIYANNFLAALTTGRHFERNVH

SEQ ID NO: 42476 - protein, 328 aa, Medicago sativa
NSNEFGNFIAIDDELKLPEDQPEPMTLEHTEPMHSDPLEMEEVEMEDIEGEMILDIDSCDANNSLAVVEYIEDLHAYYRKIEYLGCVSPTYMDEQLDLNERMRAILVDWLIEVHDKFDLMQETLFLTVNLIDRFLAKQNVVRKKLQLVGLVAMLLACKYEEVSVPVVSDLIHIADRAYTRKDILEMEKLMLNTLQYNMSLPTAYVFMRRFLKAAQADKKLELVAFFLVDLSLVEYEMLKFPPSLVAAAAVYTAQCTVSGFKHWNKTCEWHTNYSEDQLLECSMLMVGFHQKAGAGKLTGVHRKYGSAKFSFTAKCEPACFLLENKNQP

SEQ ID NO: 42477 - protein, 451 aa, Neurospora crassa
MSLQVPFHTKANGAAAGGATKAVILVGGASRGTRFRPLSLDVPKPLFDVAGHPIIWHCLTAIAKVPSIHEVYLIGYYDESVFRDFIKDAVHEFPQLTIKYLREYQALGTAGGLYHFRDIILKGRPERLFVLNSDVCCSFPLGEMLRLFEEKDAEAVILGTRVAEDAATNFGCIVSDAHTRRVLHYVEKPESHISNLINCGVYLFATEAIFPSIRTAIKRRTDRPNRLIRYPSAENLESSFFAQQAADDDDEESEKRSEVIRLEQDILSDMADSKQFFVYETQDFWRQIKTAGSAIPANALYLQNAWQSGSSELAQPQPNHIIAPVFIHPTARVDPTAKLGPNVSIGPRAVVGAGARVKESIVLEDSEIKHDACVLYSIIGWNSRVGAWARVEGTPTPVTSHTTSIIKNGVKVQAITILGKECAVGDEVRVQNCVCLPFKELKRDVANEVIM

SEQ ID NO: 42478 - protein, 229 aa, Methylobacillus flagellatus KT
MNRYGAEFLGTFWLVLGGCGSAVLAAAFPEVGIGLHGVSLAFGLTVLTMAFAIGHISGCHLNPAVSIGLWAGGRFAGSQLLPYIVAQVLGAIAAGGVLYLIASGQAGFDVTAGFASNGYGEHSPGGYTMTAALVAEVVLTAFFLFIIMGATDQRAPAGFAPIAIGLTLTLIHLISIPVTNTSVNPARSTGVAVYAGGWAVDQLWLFWIAPIVGGVIGAWVYRAVAGSKA

SEQ ID NO: 42479 - protein, 498 aa, Nicotiana tabacum
METPTWTAYAAACLATLSLFLLSKFLRQRKLNLPPGPKPWPIVGNFNLIAPLAHRSVHELSLKYGPIMQLRFGSFPVVVGSSVEMAKVFLKSMDINFVDRPKMAAGKYTTYNYSNITWSAYGPYWRQARKMCLMELFTAKRLESLEYIRTEELQSLLHDLYNLTGKPILLKDYLMTLSLNVISRMVLGKRYLDESKNSIVTPEEFKKMLDELFLLNGVLNIGDYIPWIDFMDLQGYVKRMKVLSNKFDRFLEYVLDEHNARRNAEENYVAKDMVDVLLQFADDPTLEVKLERHGVKAFTQDLLAGGTESTAVIVEWAISELLKKPEIFNKATEELDRVIGQNRWVQEKDIPNFPYIEAIVKETMRLHPVAPMLTPRLCGEDCKVAGYDILKGTRVLVSVWTIARDPTLWDEPEAFKPERFLGNSIDVKGHNFELLPFGAGRRMCPGYNLGLKVIQASLANLLHGFKWSLPDNMTPEDLNMEEIFCLSIPKKIPLAACD

SEQ ID NO: 42480 - protein, 598 aa, Ralstonia metallidurans CH34
MAAIEVKVPQLSESVSEATLMQWKKQAGEAVKRDEILVELETDKVTLEVPSPADGVLAKIVQPDGATVHTDDVIAVVDTEGKAVAAASPVAAAAPASAPAPAPAPAPVAAVASGGAGAPASAKADFDVIVIGSGPGGYIAAIRAAQLGKTVACIEEWKDDAGKPRLGGTCLNVGCIPSKALLASSEYFEQAKHGLAEHGVQVKGVTLDLAQMIQRKAAIVDKFTGGVEFLFRKNKVTWIKGHGKFKGRAADGVITVEASNGGETTSHTARNVIIATGSKARHLSGVPVDNKIVSDNEGALSFDSVPKKLAVIGAGVIGLELGSVWRRLGSEVTLLEALPTFLGALDEAVAREAAKQFGKQGLTIHLGVDIGNIEATAKGVSIAYKDKDGAEQKLVADRLIVSIGRVPNTDNLGLDAVGLAADARGFIPVDDQCRTPVAGIYAIGDVVRGPMLAHKAEDEGVMAAEVIDGQKPHIDYNCIPWVIYTEPEIAWVGKSEAQLKAEGREFRSGQFPMMANGRALGIGHPDGFIKMIADAKTDEILGVHIISANASDLIAEAVVAMEFKAASEDIGMICHPHPSLSEVMREAALAVRKRALNM

SEQ ID NO: 42481 - protein, 286 aa, Zea mays
  misc_feature (236)..(236): Xaa can be any naturally occurring amino acid
  unsure (1)..(286): unsure at all Xaa locations
MERAAPVRSSHTSTADLLAWPQPQGPAPATPSPPRRPGQPSEAIRKVVFGGQVTEEEADSLTKRKPCSAPKWKEMTGSGIFAAGSNGDAGEAAAAAKPARTSSRQASSTVSHISFAEDGTDPPKKPTSVAEVAKQRELSGTLQSEADSKTKKQISNAKSKELSGHDIFADTLDSRSNRARNPSNGSTASHAPAKNTNASTFSFGDANTDSTPKTARKITGKKVNDLTGNDIFKGDXPPASAEKHLSTAKLKEITGSNIFADGKEPIRERVGGNRKPPGGESSIALI

SEQ ID NO: 42482 - protein, 553 aa, Ralstonia eutropha JMP134
MTCDSCAAHVKEALEKVPGVQSALVSYPKGTAQLAIVPGTSPDALTAAVAGLGYKATLADAPLADNRVGLLDKVRGWMAAAEKHSGNEPPVQVAVIGSGGAAMAAALKAVEQGAQVTLIERGTIGGTCVNVGCVPSKIMIRAAHIAHLRRESPFDGGIAATVPTIDRSKLLAQQQARVDELRHAKYEGILGGNPAITVVHGEARFKDDQSLTVRLNEGGERVVMFDRCLVATGASPAVPPIPGLKESPYWTSTEALASDTIPERLAVIGSSVVALELAQAFARLGSKVTVLARNTLFFREDPAIGEAVTAAFRAEGIEVLEHTQASQVAHMDGEFVLTTTHGELRADKLLVATGRTPNTRSLALDAAGVTVNAQGAIAIDQGMRTSNPNIYAAGDCTDQPQFVYVAAAAGTRAAINMTGGDAALDLTAMPAVVFTDPQVATVGYSEAEAHHDGIETDSRTLTLDNVPRALANFDTRGFIKLVIEEGSHRLIGVQAVAPEAGELIQTAALAIRNRMTVQELADQLFPYLTMVEGLKLAAQTFNKDVKQLSCCAG

SEQ ID NO: 42483 - protein, 498 aa, Triticum aestivum
MAMATAMAATYGAPITAPAPAAFSPRRAAGGRRVRAVTARPRPLFSPRAVSDSRNSQTCLDPDASTSVLGIILGGGAGTRLYPLTKKRAKPAVPLGANYRLIDIPVSNCLNSNVSKIYVLTQFNSASLNRHLSRAYGNNIGGYKNDGFVEVLAAQQSPESPDWFQGTADAVRQYLWLFEEHNVMEFLILAGDHLYRMDYQKFIQAHRETDADITVAALPMDEERATASGLMKIDDEGRIVEFSEKPKGEKLKAMMVDTTILGLDSERAKELPYIASMGIYVFSKDAMLRLLRDNFPSANDFGSEVIPGATEIGMRVQAYLYDGYWEDIGTIEAFYNANLGITKKPVPDFSFYDRSAPIYTQSRYLPPSKVLNADVTDSVIGEGCVINHCTINHSVVGLRSCISEGAVIEDSLLMGADYYETENDKKVLSESGGIPIGIGKNAHIRKAIIDKNARIGENVKIINVDDIQEASRESDGYFIKSGIVTVIKDALIPSGTVI

SEQ ID NO: 42484 - protein, 536 aa, Gossypium arboreum
MLQIAFSSYSWLLTASNQKDGMLFPVALSFLVAILGISLWHVWTIRKPKKDIAPLPPGPRGLPIVGYLPYLGTDNLHLVFTDLAAAYGPIYKLWLGNKLCVVISSAPLAKEVVRDNDITFSERDPPVCAKIITFGLNDIVFDSYSSPDWRMKRKVLVREMLSHSSIKACYGLRREQVLKGVQNVAQSAGKPIDFGETAFLTSINAMMSMLWGGKQGGERKGADVWGQFRDLITELMVILGKPNVSDIFPVLARFDIQGLEKEMTKIVNSFDKLFNSMIEERENFSNKLSKEDGNTETKDFLQLLLDLKQKNDSGISITMNQVKALLMDIVVGGTDTTSTMMEWTMAELIANPEAMKKVKQEIDDVVGSDGAVDETHLPKLRYLDAAVKETFRLHPPMPLLVPRCPGDSSNVGGYSVPKGTRVFLNIWCIQRDPQLWENPLEFKPERFLTDHEKLDYLGNDSRYMPFGSGRRMCAGVSLGEKMLYSSLAAMIHAYDWNLADGEENDLIGLFGIIMKKKKPLILVPTPRPSNLQHYMK

SEQ ID NO: 42485 - protein, 234 aa, Listeria innocua Clip11262
MSAYLAEFIGTMVLIMFGNGLLAGLTLNKSLSQGANWVVVTFGWGFAVMIGIYVAGAYSGAHLNPAVTIALAVGGSFSWAAVVPYIIAQIAGAFVGASIIILHYYPHFKATPQEIDTHGIFSTGPAIRNTPFNLISEIIATFAFIFGLLMIGENSFTNGLNPLILGFLVVAIGMSFGPTTGYAINPARDLGPRLAYFLLPVPNKSGSDWRYAWIPIVGPIIGGLLAIGLFNILL

SEQ ID NO: 42486 - protein, 695 aa, Synechocystis sp. PCC 6803
MEGQSIELELSVMAMPELIDSTEAGHTAGVKTDSNPQAIAQDRRWTIDDSENLYRITGWGEPYFSINAAGHVTVSPQADHGGALDLYELVKGLRQRNIGLPLLLRFSDILADRINRLNAAFARGIARYRYPNTYRGVYPIKCNQHRHIVESLVRYGTPYNFGLEAGSKPELMIALAMLQPQENPEPDQQNQPLLICNGYKDREYIETALLARRLGHRPIIVVEQVAEVALAIEISSNLGIKPILGVRAKLSTQGMGRWGISTGDRAKFGLTIPEMLTAIEQLRRADMLDSLQLLHFHIGSQISSISVIKEAMTEASQIFVQLAKLGANMRYLDVGGGLGVDYDGSKTNFYASKNYNIQNYVNDVISAVQDACVAAEVPCPVLISESGRAIASHQSVLIFDVVATNDINPPLPKVKGKDHAILRNLMETWETITVDNYQEAYHDVEQFKTEAISLFNFGYLGLKERAKAEELYWACCRKILQICRQQEYVPDDLENLEVNLASIYYANMSVFQSAPDSWAIDQLFPIMPIHRLDEEPTQRGILADITCDSDGKIDQFIDLRDVKSVLELHPLIEVHQPGTPPRVEPYYLGMFLVGAYQEIMGNLHNLFGDINVVHIQMNPKGYQIEHLVRGDTIAEVLGYVQYDPEDLLENMRRYCEQAMEDKRMSLEEAQLLLENYERSLLQYTYLKPTSGIHTS

SEQ ID NO: 42487 - protein, 341 aa, Ralstonia eutropha JMP134
MPQRRRESAAFPPPHDDCNDLPIMNQLEQLKQFTTVVADTGDFQLMKQYTPQDATTNPSLILKAVQKPEYRGLLEQAVRDYHNEGGVDAVMDGVLIAFGCEILAIVPGRVSTEVDARLSFDTEATVEKARHLIRLYEQRGVARERVLIKIASTWEGIRAAEILQREGIRCNMTLLFSLVQAVACAEAGAQLISPFVGRILDWYKKQAGDQWDAAANAGDNDPGVRSVRQIYDYYKKFGYNTEVMGASFRSTAQIVALAGSDLLTISPDLLEQLARTEGTVERKLSVDLAQAGNIARIPADEPAFRWQLNEDAMATEKLAEGIRLFAADAIKLEKLVAEIAG

SEQ ID NO: 42488 - protein, 238 aa, Kalanchoe fedtschenkoi
YRSIVSHEPRFVEYFRLATPELEYGRMNIGSRPSKRKPSGGIESLRAIPWIFAWTQTRFHLPVWLGFGAAFKRVIDKDIKNLLTLQEMYTRWPFFRVTIDLVEMVFAKGDPGIAALYDKLLVSEDLWPFGEQLRNNYNETKNLLLQVAGHKDLLEGNPYLRQRLRLRDSYITTLNACQAYTLKRIRDPNYHVTVRPRLSKEIMESNNAAAELVKLNPTSEYAPGLEDTLILTMKGIAA

SEQ ID NO: 42489 - protein, 148 aa, Listeria monocytogenes
IMYLFSDEGTPASYREIRGSSVHAFKWINEEGKTVYVKLRWIPKAGIVNLSTEQASQIQAKEFNHASRDLYEAIENGDYPEWDLYVQVLDPKDLDNFDFNPLDATKDWFEDVFPYEHVGTMTLDRNPDNIFAETESVGFNPGVLVRGM

SEQ ID NO: 42490 - protein, 365 aa, Kalanchoe fedtschenkoi
SDSGKDAGRLSAAWQLYKAQEELIEVAKKHGVKLTMFHGRGGTVGRGGGPTHLAILSQPADTIQGSLRVTIQGEVIERSFGEAQLCFKTLQRYTAATLEHGMIPPLTPKPEWRALMDDMAVVATERYRSIVFREPRFVEYFRPATPELEYGRMNIGSRPSKRKPSGGIESLRAIPWIFAWTQTRFHLPVWLGFGEAFKHVIDKDNKNLLMLQQMYNEWPFFRVTIDLVEMVFAKGNPGIAALYDKLLVSEELLPLGEQLRTAYNDTKSYLLKITGHNEILGGDPFLKQRLKLRNAYITTLNVCQAYTLKRIRDPSYQVPVRPPIAKEILEGSVTSANQLVKLNPTSEYAPGLEDTLILTMKGIAA

SEQ ID NO: 42491 - protein, 360 aa, Debaryomyces hansenii CBS767
MSTAAFKRQSVPLSKLFQSYGKNNSQSKYGGYFLATLIGSGILATSYFNNNKNGNTPSNNHKKLLAGSGIVNTAAIPKGKSIKDYQSLYNEIAEKVRDQDDADDGAGRYGLLTRLAWHTSGTYKKEDNTGGSYGGTMIYKPESTDGENSGLNHGRDFLQEFKDKYSWLSHGDLWTLGGVVAVQECGGPKIKWRPGRQDISDKTRVPENGRLPDASKDADYVKGVFGRMGFNERETVCLIGAHCLGKCHKENTNYDGPWGPSFNMFTNDFFVRLLQNWHVKKWDGKKQYEDDETNSFMMLPTDMALKEDSSFLKYVKMYADDEKLFFSDFAKNFSTLLELGVTFPDSIKPTEFKTLDEQDK

SEQ ID NO: 42492 - protein, 364 aa, Kalanchoe fedtschenkoi
SDSGKDAGRLSAAWQLYKAQEGLVKVAKEFGVKLTMFHGRGGTVGRGGGPTHLAILSQPPDTIHGSLRVTVQGEAIEQSFGEEHLCFRTLQRYTAATLEHSMCPPASPEPEWRELLDEMAVAATKEYRSIVFHEPRFVEYFRLATPELEYGRMNIGSRPSKRKPSGGIESLRAIPWIFAWTQTRFHLPVWLGFGAAFKHVIDKDIKNLLTLQEMYTRWPFFRVTIDLVEMVFAKGNPGIAALYDKLLVSEDLWPFGEQLRNNYNETKNLLLQVAGHKDLLEGNPYLRQRLRLRDSYITTLNACQAYTLKRIRDPNYHVTVRPRLSKEIMESNNAAAELVKLNPTSEYAPGLEDTLILTMKGIAA

SEQ ID NO: 42493 - protein, 148 aa, Listeria monocytogenes
ITYLFSDEGTPASYREIRGSSVHAFKWINEEGKTVYVKLRWVPKAGIVNLSTEQASQIQAKEFNHASRDLYEAIENGDYPEWDLYVQVLDPKDLDNFDFNPLDATKDWFEDVFPYEHVGTMTLDRNPDNIFAETESVGFNPGVLVRGM

SEQ ID NO: 42494 - protein, 203 aa, Shigella boydii
MIESNLRLVVKIARRYGNRGLALLALIEEGNLGLIRAVEKFDPERGFRFSTYATWWIRQTIERAIMNQTRTIRLPIHIVKELNVYLRTARELSHKLDHEPSAEEIAEQLDKPVDDVSRMLRLNERITSVDTPLGGDSEKALLDILADEKENGPEDTTQDDDMKQSIVKWLFELNAKQREVLARRFGLLGYEAATLEDVGREIG

SEQ ID NO: 42495 - protein, 226 aa, Oryza sativa (japonica cultivar-group)
MAITLSNVNSEAGLQKLDEYLLTRSYISGYQASKDDMTVFTSLPSAPAASYVNVTRWYDHISALLRSSGVTAEGEGVKVESTACSVSPTADQKAPAADEEDDDDVDLFGEETEEEKKAAEERAAAVKASGKKKESGKSSVLLDVKPWDDETDMAKLEEAVRNVKMEGLLWGASKLVPVGYGIKKLQIMMTIVDDLVSVDSLIEDYFYTEPANEFIQSCDIVAFNKI

SEQ ID NO: 42496 - protein, 964 aa, Lycopersicon esculentum
MATRNLEKFASIDAQMRLLVPTKVSEDDMLVEYDALLLDRFLDILEDLHGEGIKTTVQECYELSAEYENTHDKKKLEELGSVLTTLDPGDSIVVAKSISHMLNMANLAEEVQIANSGRAKSKKGELSDESNLMTESDIEETLKRLVVNLNKSPREVFNALKNQTVDLVFTAHPTQAIRRSLLQKHARIRNCLSQLYAKDITPDDKEELDEALEREIQAAFRTDEIRRTPPTPQDEMRAGMSYFHETIWNGVPKFLRRVDTALKNIGIDERVPYNAPLIQFSSWMGGDRDGNPRVTPEVTRDVCLLARMMAANLYYSQIDDLMFELSMWRCNDELRDRADELHRSLKRDEKHYIEFWKQVPPSEPYRVIIGDVRDKLYHTRERTRQLLSHGFSEIPEEATYTNIKQFLEPLELCYRSLCACGDRPIADGSLLDFLRQVSTFGLSLVRLDIRQESDRHTDVLDAITHDLEIGSYREWSEERKQEWLLSELSGKRPLFGPDLPKTEEIDDVLNTFHVISELPSDCFGAYIISMATAPSDVLAVELLQRECHVKQPLRVVPLFEKLDDLDAAPAAIARLFSIEWYKNRINGKQEVMIGYSDSGKDAGRLSAAWQLYKAQEELIKVAKQYDVKLIMFHGRGGTVGRGGGPSHLAILSQPPDTIQGSLRVTVQGEVIEQSFGEEHLCFRTLQRFTSATLEHGMYPPFPPKPEWRALLDEISVVATEKYRSIVFKEPRFVEYFRLATPELEYGRMNIGSRPSKRKRNGGIETLRAIPWIFAWTQTRFHLPVWLGFGAAFKYALNKDKKNLNMLRDMHKKWPFFRVTADLIEMVFAKGDPGIAALYDKLLVSEDLWSFGELLRSDYEETKSLLLKVAGHKELLENDPSLKQRLRLRDSYITTLNVCQAYTLKRIRDPTYKVTPRPHITKEYIESKPAAELVSLNPQSEYAPGLEDTLILTMKGIAAGMQNTG

SEQ ID NO: 42497 - protein, 484 aa, Saccharophagus degradans 2-40
MEQSMFRRTKIVSTLGPATDEPGILEKLILAGVNVVRLNFSHGSPEDHKRRADEVRSLAAKHGKFVAVLGDLQGPKIRIARFADGPISLAVGDKFLLDASLERDAGNQHQVGIDYKELPNDVNPGDSLLLDDGRVVLKVLSVEGTKVHTEVTVAGKLSNNKGINRQGGGLTAPALTDKDRADIKTAVAIDVDYLAVSFPRSAEDMNLARQLVVEAGGNIHLVAKIERAESVENQEVLDDLIRASDAVMVARGDLGVEIGDAALIGMQKLIIERARALNRCVITATQMMESMISSPLPTRAEVFDVANAVLDGTDAVMLSAETAAGQFPVQTVEAMVRVILGAEKHPRAETRPVRADGDYSAIDESIALAAMYTAHQLKGVKCIASMTESGSTPMLMSRFGARLPIFAFSRDIRTLRRAALFRGVQTILFDNNAIPPGEMYDRALEIMREQKIIEDGDLVILSKGDTSEHGGTNTMKILQVGSTN

SEQ ID NO: 42498 - protein, 222 aa, Pisum sativum
KLQEKIDYVFKVVVIGDSAVGKTQILSRFTKNEFCFDSKSTIGVEFQTKTVTINGKLIKAQIWDTAGQERYRAVTSAYYRGALGAMLVYDITKRQTFDHVARWVEELRSHADGSIVIMLIGNKGDLVDQRGVQTEDAVEFAEDQGLFFSETSAFSGENVNSAFLKLLQEINKVVSKRSLECNNGIKGNGNHDVAALKGEKIDIISGSELEISEIKKLHSCSC

SEQ ID NO: 42499 - protein, 141 aa, Lactobacillus acidophilus NCFM
MANDMMNRRNDMMDAMNDWFGFPRNFFDDSEIENIMQSDVAETDKDYVVKIDMPGMNKDDIKLNYKDGVLSVAGTRKAFKDTNDKERNIIHKERSEGSISRSYRLPNVVANEIHAKYDNGVLTITLPKQTAGDDDNSIQID

SEQ ID NO: 42500 - protein, 225 aa, Pisum sativum
MANSGGYGDANQRIDYVFKVVLIGDSAVGKSQILARFSRNEFSLDSKSTIGVEFQTRTLVIDHKTVKAQIWDTAGQERYRAVTSAYYRGAVGAMLVYDITKRQTFDHIPRWLEELRNHADKNIVIILVGNKSDLENQRDVPTEDAKEFAEKEGLFFLETSALQATNVEASFMTVLTEIYNILNKKNLAADESQGNGNSASLLGQKIVIPGPGQEVPAKSSMCCQS

SEQ ID NO: 42501 - protein, 84 aa, Hyacinthus orientalis
PRAAAGRCLPCPRCKSKETKFCYFNNYNVNQPRHFCRNCHRYWTAGGTLRRVPVGAGRRKNRTPPPCGADGVGEADQAVWPAGS

SEQ ID NO: 42502 - protein, 270 aa, Nicotiana alata
MAKKDGNQEEEISQMEEGNIHSASNSDSNVGFCSSVSVVVILQKLIAEAIGTYFVIFAGCGSVAVNKIYGSVTFPGICVTWGLIVMVMVYTVGYISGAHFNPAVTITFSIFGRFPWKQVPLYIIAQLMGSILASGTLALLFDVTPQAYFGTVPVGSNGQSLAIEIIISFLLMFVISGVATDDRAIGQVAGIAVGMTITLNVFVAGPISGASMNPARSIGPAIVKHVYTGLWVYVVGPIIGTLAGAFVYNLIRSTDKPLRELAKSASSLRS

SEQ ID NO: 42503 - protein, 432 aa, Legionella pneumophila str. Paris
MEECMYLDALSRLDKAASFCRIDSEALEKLKHPKSCLEVSLPVRMDNGELKIFPAYRVHHNDSRGPMKGGIRYHPKLDLDEIKTLALWMTIKCAVADIPFGGAKGGVIVDPKQLSRMELERLSRSYIELIADFIGPDKDIPAPDMYTNEMIMGWMMDEYATIVRKNSPAVITGKPISLGGCLGREGATGLGAYYCIKILEKKKKWQSSELRVAVQGFGNAGQSIAKLLYDNGYKIVAISDSKGGIYNTKGIDIPRMIEIKNSSKDVQSIYCKESVCKLAKEATITNEELLELDVDLLIPAAAQNQITQENAARIKAPIIIEIANGPITLEADALLQKKGLLIVPDILANTGGVIVSYFEWVQNKSGYYWSLEKVQEELQTIISREFGNIWQLMEQYQTDMRQAAYVHALNRYDKAVTAQGTRGYFSNLSLSL

SEQ ID NO: 42504 - protein, 535 aa, Streptococcus pneumoniae TIGR4
MQEKWWHNAVVYQVYPKSFMDSNGDGVGDLPGITSKLDYLAKLGITAIWLSPVYDSPMDDNGYDIADYQAIAAIFGTMEDMDQLIAEAKKRDIRIIMDLVVNHTSDEHAWFVEACENTDSPERDYYIWRDEPNDLDSIFSGSAWEYDEKSGQYYLHFFSKKQPDLNWENEKLRQKIYEMMNFWIDKGIGGFRMDVIDMIGKIPDEKVVNNGPMLHPYLKEMNQATFGDKDLLTVGETWGATPEIAKFYSDPKGQELSMVFQFEHIGLQYQEGQPKWHYQKELNIAKLKEIFNKWQTELGVEDGWNSLFWNNHDLPRIVSIWGNDQEYREKSAKAFAILLHLMRGTPYIYQGEEIGMTNYPFETLDQVEDIESLNYAREALEKGVPIEEIMDSIRVIGRDNARTPMQWDESKNAGFSTGQPWLAVNPNYEMINVQEALANPDSIFYTYQKLVQIRKENSWLVRADFELLDTADKVFAYIRKDGDRRFLVVANLSNEEQDLTVEGKVKSVLIENTAAKEVLEKQVLAPWDAFCVELL

SEQ ID NO: 42505 - protein, 1064 aa, Legionella pneumophila str. Paris
MVWSGISLSAWVWCSACHSRKDGITALIRFLWKDGNMLQKDLRCSIRNYCFIFSFLLLGSSAVFAQHEQHGASTPPLTSSKTTPSQSKPAQYKMEQPTTKKQSPKAVTPLTITGGAKRTVNLVVAYKTVNFAGKPRRAIAVNGQIPAPTLHFKEGDDVTINVYNHLDEGTSIHWHGLLVPWQMDGVDEVSQKPIPPGGVFHYRFKLYQRGTYWYHAHAKVQEQEGLYGTFIIDPPNPPSYHYTKDYVVVLSDWSNTPAEQVLANLKKDGDYYGPRFPLQPSLMKFLHDYRKASPEERKKLIADYKMMQQMRMSIYDLSDVAYDAYLLNGHPKSHPWTAPVKVGDRVRLRFIGAGASTIYRVKIPDAKVEMVHIQGNDVTPYPIEDFWIAPGETYDILVTIQKNKPYIIYAESIDTLGKAYGALVTHPNQAVNYQHVTPFPEPLPVTREMMANMMQSMNSGGMSGNQQHALMNKKTSSTAMKPSMTMPSHSQAMSSQSANHSMSSKTIQKKMDNASNHSAHTSSMKSKSSSTSMNKSMDMPGMNHGAMSQSKTSHSAQMKSDSSSTSMNKSMAMPGMNHSAMGQSKKSHSAQMKSDSSSTAMNNSMAMPDMNHSAMSQSKTSNSANDMSMNRNMKSDRPMEQGMSMNDSMNMQMPIEPTIIGDKIEPPDSAKATTLGTKYQELKGAVKTNNPNKPVDGIIKMELFGYMDRYIWFINGLPEYKAKPILIEPGKRYRIIFTNNSMMRHPMHIHGHWFILRNGHGSYDPLLHTIEVPPGATAVADFDTEASGQWFFHCHHLLHMTAGMARVFQYTTIIEIANGTRKPDNYAFQQAYINRPIVREDEVMPLDASLIKHPAGHHQGFYRANYIELGEDPFHNAQEMTFRGYYGPDYNKLQLYTEDAEIYKGIVENADIDVFYWHLISQFWAVKGGVNYFYRPGGPYWQPGIGIEGLMPWYIDTNIRTYYRDGSVKFDIQLARANQLTNNFFFLTGIRSILATHTVVKNEIGNGLNQMRYILRPYYRLKPGLNIFSEYEHDVEYGALKRILRSQGEPTTQDTITLGVAVLF

SEQ ID NO: 42506 - protein, 415 aa, Staphylococcus aureus
CTVILGFFIARTITKPITDMRNQTVEMSRGNYTQRVKIYGNDEIGELALAFNNLSKRVQEAQANTESEKRRLDSVITHMSDGIIATDRRGRIRIVNDMALKMLGMAKEDIIGYYMLSVLSLEDEFKLEEIQENNDSFLLDLNEEEGLIARVNFSTIVQETGFVTGYIAVLHDVTEQQQVERERREFVANVSHELRTPLTSMNSYIEALEEGAWKDEELAPQFLSVTREETERMIRLVNDLLQLSKMDNESDQINKEIIDFNMFINKIINRHEMSAKDTTFIRDIPKKTIFTEFDPDKMTQVFDNVITNAMKYSRGDKRVEFHVKQNPLYNRMTIRIKDNGIGIPINKVDKIFDRFYRVDKARTRKMGGTGLGLAISKEIVEAHNGRIWANSVEGQGTSIFITLPCEVIEDGDWDE

SEQ ID NO: 42507 - protein, 504 aa, Zea mays
  misc_feature (46)..(46): Xaa can be any naturally occurring amino acid
  unsure (1)..(504): unsure at all Xaa locations
MDRADPARGRLAVLSSHLRGAGAEEAAGLERSPVSAPAPGPRAGAXLAVVDGRTGKRHEVKVSEDGTVRATDFKKITTGKDDKGLKIYDPGYLNTAPVRSSICYIDGDEGILRYRGYPIEELAESSSFVEVAYLLMYGNLPTQSQLAGWEFAISQHSAVPQGLLDIIQSMPHDAHPMGVLASAMSTLSVFHPDANPALQGQDLYKSKQVRDKQIVRVLGKAPTIAAAAYLRLAGRPPVLPLNTLSYSENFLYMLDSLGDRTYKPNPRLARALDILFILHAEHEMNCSTAAVRHLASSGVDVFTALSGGVGALYGPLHGGANEAVLKMLNEIGSMENIPDFIVGVKNRKRKMSGFGHRVYKNYDPRAKVIRKLADEVFSIVGRDPLIEVAIALEKAALSDEYFIKRKLYPNVDFYSGLIYRAMGFPTEFFPVLFAIPRMGGWLAHWKESLDDPDTKIIRPQQVYTGFWLRHYTPVRERVLSSQSEELGQVATSNATRRRRAGSAL

SEQ ID NO: 42508 - protein, 265 aa, Triticum aestivum
  misc_feature (106)..(106): Xaa can be any naturally occurring amino acid
  misc_feature (234)..(234): Xaa can be any naturally occurring amino acid
  unsure (1)..(265): unsure at all Xaa locations
HYRTSLYKKAGWYRSGIPGISSTHASAENSIPKETAYQMITDELMLDGNPRLDLASFVTTWMEPECNKLIMDSINKNYVDMDEYPVTTELQNRCVNMIAHLFNAPXNEDEKAIGVSTVGSSEAIMLAGLAFKRKWANKRKEEGKPYDKPNIVTGANVQVCWEKFARYFEVELKEVKLTEGYYVMDPLKAVEMVDENTICVAAILGSTLTGEYEDVKLLNDPSVGKNRETGWNVXIHVDAASGGLSLLSTSELEWDSGYIGEDIKG

SEQ ID NO: 42509 - protein, 679 aa, Arabidopsis thaliana
MATAFAPTKLTATVPLHGSHENRLLLPIRLAPPSSFLGSTRSLSLRRLNHSNATRRSPVVSVQEVVKEKQSTNNTSLLITKEEGLELYEDMILGRSFEDMCAQMYYRGKMFGFVHLYNGQEAVSTGFIKLLTKSDSVVSTYRDHVHALSKGVSARAVMSELFGKVTGCCRGQGGSMHMFSKEHNMLGGFAFIGEGIPVATGAAFSSKYRREVLKQDCDDVTVAFFGDGTCNNGQFFECLNMAALYKLPIIFVVENNLWAIGMSHLRATSDPEIWKKGPAFGMPGVHVDGMDVLKVREVAKEAVTRARRGEGPTLVECETYRFRGHSLADPDELRDAAEKAKYAARDPIAALKKYLIENKLAKEAELKSIEKKIDELVEEAVEFADASPQPGRSQLLENVFADPKGFGIGPDGRYRSQPLQIKVSSSELSVLDEEKEEEVVKGEAEPNKDSVVSKAEPVKKPRPCELYVCNIPRSYDIAQLLDMFQPFGTVISVEVVSRNPQTGESRGSGYVTMGSINSAKIAIASLDGTVRARETKKQEVGGREMRVRYSVDMNPGTRRNPEVLNSTPKKILMYESQHKVYVGNLPWFTQPDGLRNHFSKFGTIVSTRVLHDRKTGRNRVFAFLSFTSGEERDAALSFNGTVNNMKVAESSSEKVSRRVSRKPTVLLLLQRHLLDTNNV

SEQ ID NO: 42510 - protein, 438 aa, Geobacter metallireducens GS-15
MGLKETLKQKIEEFRPRTTRLVKEFGKVKIDEVTIEQCIGGARDIRSLVTDISYLDPQEGIRFRGKTIPETFAALPKAPGSDYPTVESFWYFLLTGEVPTQAQVDEVLTEWKVRQEVPQYVFDTIRTLPRDSHPMAMLSVGITAMQRDSKFAALYNAGKFNKLSAWESVYEDACDIVARIPVIAAFIYNLKYKGDKQIAIDPALDMGANFAHMIDQGDAYKDVARMYFILHSDHESGNVSAHTTHLVHSALSDPYYAYAAGLNGLAGPLHGRANQEVLDWTIKFQEKYCKDQEPTKELITRALWDTLNSGQVIPGYGHAVLRKTDPRYISQREFCQKHLPEDPLFKLVSMIFEVAPGVLTEHGKTKNPWPNVDAQSGVIQWHYGVKEWDFYTVLFGVGRALGCMANITWDRGLGYAIERPKSVTTPMLEEWAAKGGRL

SEQ ID NO: 42511 - protein, 318 aa, Schizosaccharomyces pombe
MINIVVLGSMNTDLVMRTKICPSGGETIHGEPDGFSTGNGGKGANQAVAVARLSNPADTKVSMLGCVGDDAFGVEMLSGLKKDGVNVDNVKKIENKSTGVAMIIVEETGENRILLSEGANGNVDTAFVKAMEQRISTCNLLIMQLEIPLEAVEIALQIAHKHGVDVLMNPAPAIPLSHDMISYCAYLVPNEHEAAILLNQADSPATLENVDAYASKLLSFGVRKAVIITLGSQGAYYKSANGESALVSACKVKAVDTTAAGDTFIGAFSNSIAHGQPLKDSLEFAAKCSAITVQRKGAASSIPSLLEVDGSFNLKKNT

SEQ ID NO: 42512 - protein, 656 aa, Arabidopsis thaliana
MDTNTSGEELLAKARKPYTITKQRERWTEDEHERFLEALRLYGRAWQRIEEHIGTKTAVQIRSHAQKFFTKFGKAHSFWFTFQLEKEAEVKGIPVCQALDIEIPPPRPKRKPNTPYPRKPGNNGTSSSQVSSAKDAKLVSSASSSQLNQAFLDLEKMPFSEKTSTGKENQDENCSGVSTVNKYPLPTKVSGDIETSKTSTVDNAVQDVPKKNKDKDGNDGTTVHSMQNYPWHFHADIVNGNIAKCPQNHPSGMVSQDFMFHPMREETHGHANLQATTASATTTASHQAFPACHSQDDYRSFLQISSTFSNLIMSTLLQNPAAHAAATFAASVWPYASVGNSGDSSTPMSSSPPSITAIAAATVAAATAWWASHGLLPVCAPAPITCVPFSTVAVPTPAMTEMDTVENTQPFEKQNTALQDQNLASKSPASSSDDSDETGVTKLNADSKTNDDKIEEVVVTAAVHDSNTAQKKNLVDRSSCGSNTPSGSDAETDALDKMEKDKEDVKETDENQPDVIELNNRKIKMRDNNSNNNATTDSWKEVSEEGRIAFQALFARERLPQSFSPPQVAENVNRKQSDTSMPLAPNFKSQDSCAADQEGVVMIGVGTCKSLKTRQTGFKPYKRCSMEVKESQVGNINNQSDEKVCKRLRLEGEAST

SEQ ID NO: 42513 - protein, 660 aa, Alkaliphilus metalliredigenes QYMF
MKQIEQKAINTIRLLAVDGVEKANSGHPGLPMGAAPMAYTLWSQFLNHSPNDPQWTNRDRFVLSAGHGSMLIYSLLHLFNYGLTIEDLQNFRQWGSKTPGHPEFGHTVGIETTTGPLGQGLTNAVGMAMAERRLAAEFNRDQYDVVDHYTYVIAGDGDMMEGITSEAASLAGHLGLHKLICLYDDNNISIDGNTSLTFTEDVAKRYEAYGWQVVIVKDGNDVAEITKAIKAAKENKEQPTLIKVKTTIGFGSPNKQGTAGVHGAPLGKDEIQLTRKTLEWAHDEDFFVPEDVKGHFDGLVKDSNEKAKVWEEMFKGYSEAHPELAKAWKQWHSRELPQELLKDASLWEFSEKPMATRSTSGEVMNRLKKHLPNLMGGSADLNPSTKTYLKEMGDFQKGEWKGNNIYFGVREHAMAGITNGMALHGGLRVFCSTFFVFSDYMKPAIRLSALMKQPVVYVFTHDSIGVGEDGPTHQPIEHLLMLRSIPNVQVLRPADGKETTAAWIQALKHQEGPTVLVLSRQNLAQLEGSGQDAAKGAYVVSKGKKETPDMILMASGSEVPLAIEAQKALQDKGIEANVVSMMSWELFKNQSKEYQEEILPKQVTKRISIETGVTLGWSQFIGDAGIAIGIDDFGASAPGEVLMDKYGFTVENIVEKAMTL

SEQ ID NO: 42514 - protein, 328 aa, Arabidopsis thaliana
MATATSHQSVVSFASLRSSPSSTISQCGFKIDSSLSFTSKKTNFCKIKAMASSVSYDNTLLSPSKTIPDNSQKKSNEAALILIRHGESLWNEKNLFTGCVDVPLTEKGVEEAIEAGKRISNIPVDVIFTSSLIRAQMTAMLAMIQHRRKKVPIILHDESEQAKTWSQVFSDETKNQSIPVIPAWYGELQGLNKQETAERYGKEQVHEWRRSYDIPPPKGESLEMCAERAVAYFQDNIEPKLAAGKNVMIAAHGNSLRSIIMYLDKLTCQEVISLELSTGIPLLYIFKEGKFMKRGSPVGPTEAGVYAYTKRLAQYRQKLEDDSEVLCA

SEQ ID NO: 42515 - protein, 411 aa, Xanthomonas axonopodis pv. citri str. 306
MSRRVVVTGMGMVSPLGNDLATSWDGIVHGRSGIGPITQIDASQFTTKIAGEIKNFDPTLFVSAKDVKKMDSFIHYGVGASFMALDDSGLEIDESNAERVGAILGSGIGGLLGIEEQTIKFHEGGARKISPFYVPSTIINMLPGQVSLIKGLKGPTFSAVSACATSNHSIGTAMRMIQHGDADVMLAGGAERGSSPSSVGGFCAMKAMSTRNDDPAGASRPWDKQRDGFVLGDGAGVLVLEEYEHAKARGARIYAELVGFGASSDAFHMTAPSEDGEGAARSMAAAMRDAKLNPEQIGYLNAHGTSTPLGDLAETMAMKRALGDHAYKTMVSSTKSMTGHLLGAAGGVEAIFSVMALHTGIIPPTINLEEPSEGCDLDYVPNVARQVQVDAVMSNGFGFGGTNGTLVFKRV

SEQ ID NO: 42516 - protein, 254 aa, Enterococcus faecalis V583
MPKEFETKRVLVTGAASGIGQAQAIAFAEQGAEVIGIDLDETGLKQTAALVDPDSAKSFTYFVGDVSSPSFVQATMKQIVKNNGQIDILLNTAGILDDYRPSLETSEALWDQILATNLKSVFLVTNAILPYFLQQKKGVIVNMASIAGLVAGGGGAAYTASKHAIIGYTKQLSYDYAKLGIRANAIAPGAIQTPMNAADFAGEGEMAAWVARETPAGRWAQPQEVAKLSLFLASDDADYIHGTVMTIDGGWTMK

SEQ ID NO: 42517 - protein, 438 aa, Thermobifida fusca YX
MSRTAQAASPVTAEIEAASATLDELIARGRARGHVSLSELRTAFSEAGITPAEGRSLLRELSDTGVRIANNEDTPVDPGDDDTLEAVLETTSKGSGRRRSAKKRSRKKQPAQAGAETTDAPEADLDDHSPALGDSVHTYLKAIGRRELLTAEQEVELAKRIEAGLYAEYKLGWLEESPGPQEMSETEREELEWIAEDGRRAKAHMLEANLRLVVSVAKKYSDRGMPLLDVVQEGNLGLIRAVEKFDYAKGYKFSTYAMWWIRQAIQRGFADSARTIRLPVHVLELLSKLSRLERDMHQTLGREPTPDELAQELGKTPAQIEELLRITRQPISLDSTIGEDGETRIGDLIEDVDASEASEVVDRQLMADQLRRALDDLEPREATIMSLRFGLFDGRPRTLDEIGKHLGLTRERIRQLEKQSLSKLRHPSRARQLLDFAS

SEQ ID NO: 42518 - protein, 607 aa, ASPERGILLUS NIDULANS FGSC A4
MTIGSKFSLLAGTRKTDGPTEISASSPPDVETPSAEKTATASAGNKEVGINDNSSDEALPSQHVQTGVQKIQAVTLVWSKWSLVAVFCLLWLVTLANGFRQSILYSLTPYATSSFQSHSLLTVINIVSSAMVSALYIPVAKVVDVWGRAEGWLVMVGLSTLGLIMMAASKNLETYCAADVFYSVGFAGMNYILCVLAADITNLRNRGIAFAFTSSPYMITAFAGSKAAEKFLVNVNWRWGFGAFAIIFPFVASPVYFVLKVGLNRAEKQGIIQPRLRMSFQFNSRSQQTHISDWITAVPGVILLAGGLTVFLLPFTLATRAPNGWKSDYIIAMIVTGFVVMVLFVLYQAYWAPQPFLKYEFLTNRTVLGACLIDATYQMSYYCWNSYFNSFLQVVCNLPVAEAGYVGSTFQVVSGVLLFMVGFAIRKTGYFRWLLFIGVPLYIFAQGLMIHFRQPNQYIGYIVMCEIFISIGGSIFVLLQQLAVLVAVDHQYVAAALAVLFISGGIGGAVGNAISGAIWTNTFLPALMRNLPESAKANAVAIYGDLRVQLSYPVNSPERIAIQESYGYAQARMLAAGTGLMALMFIWMFMVKNYNVKNMSQTKGMVF

SEQ ID NO: 42519 - protein, 843 aa, Synechocystis sp. PCC 6803
MRAVLMAGGAGTRLRPLTCDLPKPMVPIVNQPIAAHIIHLLRRHNITEVVATLHYLPDAMRDYFLDGSEFGVQMTYAVEDEHPLGTAGCVKNIEELLDDTFLVISGDSITDFNLTQAIAFHKQKQAKATLILTKVPNPLEFGVVITDENQRVQRFLEKPSTSEVFSDTVNTGTYILEPEVLAYLPPKEEMDFSKDLFPLLLENDEPMYGFVADGYWCDVGNLDAYREAQYDALEKKVTLELGNLPRHSDIWIGENTTIDPTAILTPPLAIGDNCNIGSGTKLEAGTIIGDNVTIGAGAELKRAIVWNGVLIGDEAYLAACVVGRGCRIERRVQVLEGAVIGPLSIIGEEAQINSNVKVWPSKRVEPGAILNINLIWGSTGHRNLFGQRGVSGIVNIDMTPEFAVKLGAAYGSSLRPGAEIVVSRDQRNVSRMVTRSLIAGLMSVGVNIQNLEATAIPIARTMTPKLKVAGGIHVRIHPDRPDYLLIEFLDSQGINISKKTEKKIEGAYFKEDLRRVSIPQIGDMSYPAQVLETYCHTFEKLLDMDIINNDGAKIVIDYAYGVSGAILPLLLTKFGCDAVVLNASLRQTAVSNEEKEVLLSQLGQVVSALQANLGVQVSANGEQLTLVDEGGLPIRGELLTALMVHMVLTASPRGTIVVPVQASSAVEHLARRHGGKVLRTKANPTALMAAAQSSHNVVLGGSGETGFIFPRLHPGFDAMFCIAKVMEMLTVQKRTLGEIRSELPTVYHNSCSVRCSWKIKGALMRHLVEIHRDQHIELVDGVKMTFPHGDNWVLILPDAGEPLVHIYANSEDRHWVDEKLRYYQAQVLNFISDAQEESYQHFS

SEQ ID NO: 42520 - protein, 392 aa, Debaryomyces hansenii CBS767
MKLSCAIITSFLVILVHGSGVLQVNDQKFKDVVITSGKYTLVKFYADWCRHCKNMLPAYEEVSRLFENEPNVQIVKINGDKDGRKMSKKYNIEGFPTVMLFHENDEPIEFNGARDADAMSNFVQHIANIRLDKSKDLGKPDGEKSQVLELNDLNFQEKVLDNDKATTIVAFTALWCGHCKTLLPIWEKLANDVYVNDDKIVIGKVVTDDSPADKLMSQFGVTSFPTILYFDSSKVDEDGLRRPVLFYGDRSLEQLVSFINEKAGLHRDTNGELLETAGKISKLDELIRDKLPKLDGSGVGMELLRELNKIIALSTSLVVNKQEAVSIGDDLSMAKYYKKLINNVINGETEFFDREINRLTRMIQNNKQSLQKQTIDSIQKRLNVLSIFTNHL

SEQ ID NO: 42521 - protein, 191 aa, Pneumocystis carinii
MQTIKCVVVGDGAVGKTCLLISYTTNKFPSEYVPTVFDNYAVTVMIGEEPYTLGLFDTAGQEDYDRLRPLSYPQTDVFLICFSVTSPASFENVREKWHPEVRHHCPGTPCLIVGTQIDLRDDPMIVEKLSRQRQTPITKELGEKLSKELGAVKYVECSALTQKGLKNVFDEAIVCALEPPVTKKKTKCLIL

SEQ ID NO: 42522 - protein, 499 aa, ASPERGILLUS NIDULANS FGSC A4
MAQQYKLPFELDNPDLLHFDSYVGNAWVTAKSGARFEVVDPGTDLPWASCPTNSAEDVDSAVQIAHDAFEKFKKVNPRQRAQWLLKWDSLIREARSDLAKILTHETGKPIAESYGEIDYATGFTWWFAGEAERIQGSIAVPAAPNRRVFTVKQPIGVAAALVPWNFPIAMVLRKAGAALAAGCTMIVKPSPETPLTALVLAHLAEKAGFPAGVFNVLTTDLENTPPLSEALCKHPLVKKVTFTGSTRVGKLIASHCAHGLKKVTLELGGNCPFLVFDDADLDQALDQLMALKWRHAGQACITANRIYVQAGIYDKFAQLLKERTAKLVIGHGAKEGTTLGPLTTPRSIDKAISQVEDARRLGADVILGGSRVQGTQGYFFEPTILKNMTKDMLVSREESFAPIAALYRFETEEEAVKLANDTSMGLASYAFSKNIDRMWRLLENLEAGMIGMNTGNSSAAESPFGGIKESGYGKESGKEVAVNEYLITKTGTLTIDGQY

SEQ ID NO: 42523 - protein, 505 aa, Thermus thermophilus
AASSLDELVALCKRRGFIFQSSEIYGGLQGVYDYGPLGVELKNNLKQAWWRRNVYERDDMEGLDASVLTHRLVLHYSGHEATFADPMVDNRITKKRYRLDHLLKEQPEEVLKRLYRAMEVEEENLHALVQAMMQAPERAGGAMTAAGVLDPASGEPGDWTPPRYFNMMFQDLRGPRGGRGLLAYLRPETAQGIFVNFKNVLDATSRKLGFGIAQIGKAFRNEITPRNFIFRVREFEQMEIEYFVRPGEDEYWHRYWVEERLKWWQEMGLSRENLVPYQQPPESSAHYAKATVDILYRFPHGSLELEGIAQRTDFDLGSHTKDQEALGITARVLRNEHSTQRLAYRDPETGKWFVPYVIEPSAGVDRGVLALLAEAFTREELPNGEERIVLKLKPQLAPIKVAVIPLVKNRPEITEYAKRLKARLLALGLGRVLYEDTGNIGKAYRRHDEVGTPFAVTVDYDTIGQSKDGTTRLKDTVTVRDRDTMEQIRLHVDELEGFLRERLRW

SEQ ID NO: 42524 - protein, 253 aa, Nicotiana benthamiana
MALEALNSPTTTTPPTFQFENNGPLRYLENWTKGKRSKRPRSMERQPTEEEYLALCLIMLARSDGSANREQSLPPPPVPVMKIHAPPEEKMVYKCSVCGKGFGSYQALGGHKASHRKLVAGGGGGDDQSTTSTTTNATGTTSSANGNGNGSGKTHECSICHKRFPTGQALGGHKRCHYDGGNSNGGVSVSASVGLTSSEGVGSTVSHRDFDLNIPALPEFWPGFGSGEDEVESPHPTKKSRLSLPPKFELFRE

SEQ ID NO: 42525 - protein, 466 aa, Glycine max
MTIGSLAPKAEKKKSRKNKTVVVNENAPLLPKSHVQESDAGFDDFNGASFSGAVFNLSTTIIGAGIMALPATLKQLGMIPGLLAIIIMALLTEKSIELLIRFTRAGKSASYAGLMGDSFGNYGKALVQICVIINNIGVLIVYMIIIGDVLSGTSSSGDHHYGILEGWFGVQWWTGRTFVVLFTTLAIFVPLASFKRIDSLRFTSALSVALAVVFLVIAVGIAVVKIFSGGIVMPRLFPVTTDVASFFRLFTVVPVFVTAYICHYNVHSIDNELEDSSQMQGVVQTALVLCSSVYVMISFFGFLLFGEGTLDDVLANFDTDLGIPFGSVLNDAVRISYAAHLMLVFPVVFFPLRLNIDGLLFSKSRPLVLDNVRFASLTVALIGVIFLGANFIPSIWDAFQFTGATAAVCIGFIFPAAITLKDRYNIATKSDKILSVIMIVLAVFSNVVAIYSDAYALIKQNKTSRE

SEQ ID NO: 42526 - protein, 373 aa, Bacteroides thetaiotaomicron VPI-5482
MKIERKILLNPGPATTTDSVKMAQVVPDICPREKEFAGMMKQLRDDLVRVAHGNLEKHTAVLFCGSGTINIDICLNSLLPEDKRVLIVNNGAYSTRAVEVCQYYGLPHINLEFSVYERPDLSVVENVLQENPDIAMVYTTHHETGTGILNPIREMGAIAHKYQAKFVVDTTSSLGMIPFDIEKDNVDFCMASAQKGLQAMTGLSFIIGNEEQIKFSKKYPKRSYYCNLYLQYENFERTGEMHFTPPVQTIYATRQALNEYFEVGEEAKFARHKRVFEAIHSGINEIGLKSVIKREWQSGLVVSVQYPEDPNWDFEKIHDYCYERGFTIYPGKISTEDTFRICALGEIEVDDIENFFKVLKAALNHYNVTLPMS

SEQ ID NO: 42527 - protein, 606 aa, Arabidopsis thaliana
MAETLEPSLVGEIDTSAPFESVREAATHFGGFGFWKPSSLNISEASQNEVGMVLKASELEKELIEKEGETLKVLKSLESTKAIVEELKSKIQNKEDKENCDMNVFKELNQAKMNLCKTTKDLAAIRVSVGLLNKRLEEERAALEKTRERLNSENAAEMSMEIQRLSYEAKEFSRTGENVRYAVNKAVAEIEQTRNKIEAAEMRLIAARKMKEAARAAEAVAIAEIKAVTRRGRRRRRGGNGEETMQEEILETIDETAREIRSSRRTLEEGLAKMEAEEGNWWWTEQRRRSSCSAKFKNPPYMMDVKGLNMMMNGDGTSSSVAVLKPTMSIGQILSRKLLLADESAMMMNGRVSLGQILGKTNFGDREKEKRFNGKRKRFGFANLSVMLNKERIMGLKAGTFVLLLLGLILVSDARSFVDSTISEKVSNKEDVCTLCEEYVTDALSYLEKNVTQAEIIEDLHDRCSQLRGYSQQCISLVDYYVPLFFLQLESFQPHYFCKRMNLCGKVVALVEEARQDSCGVCHRTVSEILIKLQDPDTQLDIVELLIKGCKSLKNYEKKCKTLVFEYGPLILVNAEEFLVKNDVCTLLRACPPEKSVLRQPELADS

SEQ ID NO: 42528 - protein, 582 aa, Vibrio parahaemolyticus RIMD 2210633
MSINTDETTWQTFKRLWQFIRLYKSGLIVAVIALVINAISDTYMISLLKPLLDEGFGNADSDFLRTLPLIIFVMMFIRGTSGFVSTYCLSWVSGNVVMLVRRMVFNHFMHMPVSYFDKEKTGNLLSRITYDSEQVSAATSQALVSIVREGASIIGLLVLMFYNSWQLSLVLFAVAPVVAWGIGVVSKRFRKISKNMQTMMGNVTASAEQMLKGHKVVLSYGGQDIERQRFDKVSNQMRQQSMKLVTAQAAANPIIQMIASFAIVAVLYLASIDSIKEQLTPGTFTVVFSAMFGLMRPLKALTNVTSQFQRGMAASQTLFALIDLEPEKNEGKYTVERAKGDVSVKDVSFTYVGSEKPALEHVSFDIPRGKTVALVGRSGSGKSTIANLFNRFYDVDSGSITLDGRDIRDYELKNLREQFALVSQNVHLFNDTIANNIAYATEDKYERSDIEHAAKLAHAMEFINKMENGLDTMIGENGASLSGGQRQRVAIARALLRDAPVLILDEATSALDTESERAIQAALDELQKDKTVLVIAHRLSTIEKADEILVVDDGAIIERGNHADLIAKNGAYAQLHRIQFGE

SEQ ID NO: 42529 - protein, 384 aa, Xanthomonas axonopodis pv. citri str. 306
MNDTATPGFKPKKSVALSGTAAGNTALCTVGRSGNDLHYRGYDILDLATTSEFEEIAYLLVHGKLPNRGELRGYKAKLRSLRGVPAAVKTALEQLPPSAHPMDVMRTGVSVLGCLQPEKDDHNHPGARDIADKLMASLGSMLLYWYHYSHNGKRIEVETEDDSIGGHFLHLLHGFAPKDSWVRAMHTSLILYAEHEFNASTFASRVIAGTGSDMYSAIAGGIGALRGPKHGGANEVAFEVQKRYDTPDEAEADIKARVERKEVVIGFGHPVYTVSDPRNKVIKVVARELSDEQGSRKMYDIAERLESVMWDIKKMFPNLDWFSAVSYHMMGVPTAMFTPLFVLARTAGWSAHIIEQRVDGKIIRPSANYTGPEDQVFVPLDQRS

SEQ ID NO: 42530 - protein, 414 aa, GIBBERELLA ZEAE PH-1
MAAAGHIRLGTASPGTASSTPETIALIDTLAQRAASSHIDILLLPEAFIGGYPRGSSFGCKIGDRSAAGRDEFARYFDQAIDLGDTVGPAGGGAGIKWVKRQIGEEDEVRGDGSREELERIARDSGVFVVVGCIEKAGGSLYCSVVYVCPKEGMLGKRRKVLPTGTERLIWAQGSPSTLRAVTTVIRGIRINLAAAICWESYMPLLRQSLYSQNINLYLAPTADFRDAWLSLARTIGVEGRCFVVCSNMCVPKDASAETNGNGGGPAVRERRGSCLTDEGFEIALPKSPTRSRRRRKSVFDEDGNEIVLGCEDDGEAPPPPPPAARPQVAALKTSGSTFDKADYISPGGSSIVSPFGDVIAGPQWGDPDGIVFADVDFRDCIRGRLDLDTAGSYSRNDSFQFSVEGLNLDPLPY

SEQ ID NO: 42531 - protein, 302 aa, Ipomoea batatas
MDYERFIQAHRETDADITVAALPMDEKRATAFGLMKIDEEGRIIEFAEKPKREQLKAMKVDTTILGLDDQRAKELPFIASMGIYVISKNVMLNLLREKFPGANDFGSEVIPGATSIGMRVQAYLFDGYWEDIGTIEAFYNANLGITKKPVPDFSFYDRSAPISTTPRYLPPSKMLDADVTDSVIGEGCVIKNCKIHHSVVGLRSCISEGAIIEDSLLMGADYYETDADRRLLAAKGSVPIGIGRNSHIKRAIIHNIARIGNDVKIINNDNVQEAARETEGYFIKSGIVTIIKDALIPSGTII

SEQ ID NO: 42532 - protein, 347 aa, Colwellia psychrerythraea 34H
MKTNILKALLPTSTAGSLPKPAWLAEPETLWSPWKLQGEELTEGKHDALRLSLQDQQQAGIDIVSDGEQTRQHFVTTFIEHLNGVDFEKRKTVKIRDRYDASVPTVVGPVSRQKSVFVEDAKFLRQQTKQPIKWALPGPMTMIDTLYDDHYKSREKLAWEFAKILNQEAKELEAAGVDIIQFDEPAFNVFFDEVNDWGIACLERAIEGLNCETAVHICYGYGIKANTDWKKTLGSEWRQYEEAFPKLQKSNIDIISLECHNSHVPMELLELIRGKKVMVGAIDVASNTIETPEEVANTLRKALKFVDADKLYPCTNCGMAPLSHQVARGKLNALSAGAEIVRRELST

SEQ ID NO: 42533 - protein, 547 aa, Haemophilus ducreyi
MAIKDVKFGNDARVKMLKGVNILADAVKVTLGPKGRNVVLDKAYGAPTITKDGVSVAREIELEDKFENMGAQMVKEVASKANDVAGDGTTTATVLAQSIVSEGLRAVAAGMNPMDLKRGIDKAVAAVVEELKAISKPCETSKEIEQVGTISANSDETVGKLIAQAMEKVGKEGVITVEDGTGLDDALDVVEGMQFDRGYLSPYFINKPEAGTVELDNPYIILVDKKISNIREILPVLEAVAKAGKPLLIIAEDVEGEALATLVVNTMRGIVKVAAVKAPGFGDRRKAMLQDIAILTAGTVISEEIGMELEKATLEELGQAKRVVITKDNTTIIDGIGDEAQIKARVVQIRQQIEDSTSDYDKEKLQERVAKLAGGVAVIKVGAATEVAMKEKKDRVDDALHATRAAVEEGIVPGGGVALVRAANKVSATLTGDNEEQNVGIKLALRAMEAPLRQIVENSGEDASVVARDVKDGSGNFGYNATTEEYGDMLEMGILDPTKVTRSALQFAASIAGLMITTECMITDLPKEDKLDAQAAMGGMGGMGGMM

SEQ ID NO: 42534 - protein, 274 aa, Polaromonas sp. JS666
MNTPMPGSSSAISFGLADRVCIVTGGAQGIGEACIRRFAREQAKVVIADIDDARGAALAREVGGLYVHCDVGDKAQVDALVAQTIAAHGRIDVLVNNAGIFRAADFLEITEADFDAVLRINLKGSFLVGQAVAREMARAEARPGIGGSASRGSIVNMSSVNSVLTIPTIASYNVSKGGINQLTRVMALALADKGIRVNAVAPGTIATDLAAKAVLTSEEAKARIMSRTPMKRLGEPSEIADTVAYLASDAASYITGEIVMVDGGRMTLNYTVSV

SEQ ID NO: 42535 - protein, 384 aa, Synechococcus sp.
MTQATELLDPALKPAETKAKRSSRKKATTAVVEPATTIAPTADVDAIDDEDSVGEDEDAAAKAKAKVRKTYTEDSIRLYLQEIGRIRLLRADEEIELARQIADLLALERIRDELLEQLDRLPSDAEWAAAVDSPLDEFRRRLFRGRRAKDKMVQSNLRLVVSIAKKYMNRGLSFQDLIQEGSLGLIRAAEKFDHEKGYKFSTYATWWIRQAITRAIADQSRTIRLPVHLYETISRIKKTTKLLSQEMGRKPTEEEIATRMEMTIEKLRFIAKSAQLPISLETPIGKEEDSRLGDFIEADGETPEDEVAKNLLREDLEGVLSTLSPRERDVLRLRYGLDDGRMKTLEEIGQLFNVTRERIRQIEAKALRKLRHPNRNSILKEYIR

SEQ ID NO: 42536 - protein, 358 aa, Magnetospirillum magnetotacticum MS-1
MESGEEWQLTERVWAGARSGKGNPFAAAVRATRMAMIITDPNRLDNPIVYANDAFLRLTGYTRLEVTGRNCRFLQGPDTDLDAVARIRAAIASERDVQVELLNYRKDGSTFHNAVYISPVHDEDGTLLFFFASQLDVSERHALVEERDRSRATLETNALLLREIGHRARNDLQMISAMLSLQSSSTADPAVRAALSEAMGRVEALGALYREPEEESAGQGSAYDFGQLIRTVAGALIEASGRDDIAVDLHLMPLRLRPKAAGPLALILNELVAGVIKHAFPERAGRLTLRITRDADAVLVTVEDDGAEVGAGASAEGCFEATLIDALCRQIGGTRERRSRPSGGTKVTLRFPAGRIEA

SEQ ID NO: 42537 - protein, 141 aa, Ralstonia eutropha JMP134
MAIERTLSIIKPDAVAKNVIGQIYARFEAAGLKIVAAKMVHLSRGEAEQFYAVHKERPFFKDLVDFMVSGPVMIQALEGEGAIAKNRDLMGATDPKKADKGTIRADFADSIDANAVHGSDAAETAAVEIAFFFPGMNVYTR

SEQ ID NO: 42538 - protein, 315 aa, Polaromonas sp. JS666
MSKPEILAVAKLPPYLIEPLREIFVVHEQIHQTDPAAFAAAAGRIRAIVGSGESKVPRSLMAQLPALEMISIMGVGYDGVDVTAALERNIRVTHTPGVLNDDVADLAIGLMLSVARRIPQADQYVRSGRWPEGPMPLARKVSGERLGIVGLGRIGQAIATRAEAFGMSVAYTARSRKAELPYAYYPSAQALAAEVDFLVLITPGGAGTRKLINADVLKALGPQGYLINVARGSVVDEAALVEALQQGVIAGAALDVFENEPVVPSALWTLDNVVLAPHIGSATRQTRGAMADLAASNLRAHFAGEPLLTPVPECQ

SEQ ID NO: 42539 - protein, 289 aa, Saccharomyces cerevisiae
GAMPPIFLPPPNYLFVRDVWKSNLYSEFAVIRQLVSQYNHVSISTEFVGTLARPIGTFRSKVDYHYQTMRANVDFLNPIQLGLSLSDANGNKPDNGPSTWQFNFEFDPKKEIMSTESLELLRKSGINFEKHENLGIDVFEFSQLLMDSGLMMDDSVTWITYHAAYDLGFLINILMNDSMPNNKEDFEWWVHQYMPNFYDLNLVYKIIQEFKNPQLQQSSQQQQQQQYSLTTLADELGLPRFSIFTTTGGQSLLMLLSFCQLSKLSMHKFPNGTDFAKYQGVIYGIDGDQ

SEQ ID NO: 42540 - protein, 348 aa, Synechocystis sp. PCC 6803
MNNYFPRLKQFSAPATFFLTVACLVYPGENAHANASTPNPYTVAQTTASPSVAVENLSGFQGIITALNITPDGKYLAVATADNQITLIDLANQEVVYSQRSPVNNFADLAISADGQWLAIAADNNVDVRRVRDGMRVETLVGHTDKVSGVAFSPDGETIVSVSGGDRTIRIWERASGNLIQTLADNLGPTTSVVFTPDGSQFITGAIGQDRTIKFWDANTFELLGTSPQQPGFINGLAVTPDGRKLVGAVRNFVKAWNLADAKELFSVRGPSLEINTIAVSPNNRWVATANKEGTIMIFDLANGKQVTTLRGHQGWVLSLAFSPDGNTLYSGAEDKTVKIWDLSALAR

SEQ ID NO: 42541 - protein, 291 aa, Enterococcus faecalis V583
MRYLSKDILEEVITQRPSDSYKSNFGRVVLIGGNRQYGGAIIMSTEACINSGAGLTTVITDVKNHGPLHARCPEAMVVGFEETVLLTNVVEQADVILIGPGLGLDATAQQILKMVLAQHQKQQWLIIDGSAITLFSQGNFSLTYPEKVVFTPHQMEWQRLSHLPIEQQTLANNQRQQAKLGSTIVLKSHRTTIFHAGEPFQNTGGNPGMATGGTGDTLAGIIAGFLAQFKPTIETIAGAVYLHSLIGDDLAKTDYVVLPTKISQALPTYMKKYAQPHTAPDSELLEQKRSR

SEQ ID NO: 42542 - protein, 616 aa, Bacteroides fragilis NCTC 9343
MKKLLLLLGSFLLSLTTYAAMNISKIDPPFWFTGMNNPELQLMVYGEGIGQASVSVNYPGVSLSSVVKLESNNYLLVYLHLDKEVKPGKMPITFTVGKKKLVKEYELKARSKAGVDHKGFDASDALYLLMPDRFANGNPDNDRIEGMAEYKVDRNDPNARHGGDLAGIEQNLDYFTDLGVTALWFTPVLENNMKGGSYHGYATTDYYKVDPRFGTNEEYRSLIAKAHNRGIKVVMDMIFNHCGVEHPWIKDMPSKDWFNHADFKNNFVQTSYKLTPHVDPYASEYDFDQMNNGWFVEAMPDLNQKNPHVYKYLLQNSLWWIEYADIDGIRMDTYPYADYDAMSNWMKELNEEYPNYNTVGETWVTEPAYTAWWQKDSKLSAPRNSHLKTVMDFSFFDKVNTAKNEQTDTWFKGLDRVYNNFVYDYLYPNPASVLAFIENHDTDRFLGEGENLDMLKQASTLLLTTRRIPQLYYGTEVMMNGVKSKSDGYVRKDFPGGWTDDKENALTPEGRTRLQNESYNFYRNLLNWRKGNDVIAKGSMKQFMVQHGVYAYARQYKGKTVFVLLNGTDKEVKLPLKYYAEVLKDKTQGKDVISGKVTALNEELTMAPRQSMVIEL

SEQ ID NO: 42543 - protein, 510 aa, Allium cepa
MPIPVLLLLTIFLALLLYLFFFVAKKHEGKRVPGPKGWPILGNLPQLGAKPHQSLCELSRTYGPLFGLRFGYVDVVVAASADVAEQFLRVHDVNFSNRPPNSGAEHIAYNYQDLVFAPYGPRWRMLRKLCALHLFSPKALEDLSPVRSLEVATLANTLYLRAQSDQPTVNLAQMLTTCTTNALSKAMMGRRVFVNETTDTETSKFKDMVLEIMSLAGVFNVGDFVPWLRPFDLQRVVRKMKDVHARFDSFLDKVIAEHRMVDNAHDLLSLLIRSKDDVDNDGVKLTNTDIKALLLNLFTAGTDTSSSTVEWALSEMIRHPDALKRAQRELDEVVGRDRLVSETDIRSLPYIQAIVKETFRLHPSTPLSLPRISSEACTVNGYLIPKNTTLLVNVWAISRDPGVWKEPLEFRPERFLGGGGYETVDLKGNDFELIPFGAGRRVCAGLSLGLRMVQFLTATLVHGFDWKLVDGQSAEKLDMEEAYGLPLQRAVPLMVRPVPRLDEKAYHVVV

SEQ ID NO: 42544 - protein, 362 aa, Zea mays
VRRLWRGGMGGILDYGIEGAEDGHACDRNAAGFVSAVDVAASLPPGSASVCIKITALCPIALLEKASDLLRWQKKHPSFSLPWKTHSFPVLSDSSPLHLTASEPAALTAEEERELQLAHSRLLAVCARCAEHGIPLLVDAEYATVQPAIDYFTLVGALAFNDAGAADGGRPIVHGTIQAYLRDARDRLEAMVRGAERERVRLGLKVVRGAYLTREARLATALGVPSPVHGSIQETHDCYNGCAAFLLDRVRRGSASVVLATHNVESGQLAAARAEELGIPRGDRNLQFAQLMGMADGLSLGLRNAGFQVSKYLPYGPVEQIVPYLIRRAEENRGLLSASSFDRQLLREELVRRFKAAVLGRE

SEQ ID NO: 42545 - protein, 238 aa, Glycine max
MKIQCDVCEKAPATVICCADEAALCAKCDVEVHAANKLASKHQRLLLQSVSNKLPRCDICQDKPAFIFCVEDRALFCKDCDEPIHLASSLSANHQRFLATGIRVALGSNCTKGNEKGHVEPSKPKAQEVPAKIPSQQVPSFTSSWAVDDLLELTDFESPDKVQKQSLEFGELEWLADVGLFGEQFPHEALAAAEVPQLPMTSSVGSHKAPKSLLSYKKPRIEVLDEDDDEHFTVPDLG

SEQ ID NO: 42546 - protein, 337 aa, Shewanella oneidensis MR-1
MTILVTGGAGYIGTHTVVELLNAGSEVIVLDNLSNSSIEALDRVERITGKSVTFYQGDILNKALLQKVFSDHSIDAVIHFAGLKAVGESVAKPLKYYENNVTGTLILCQVMAEFKVKNLVFSSSATVYGDPASLPITEDFPTGATNPYGQSKLMVEHILADLHHSDPSWNIARLRYFNPVGAHASGLIGEDPNDIPNNLMPFIAQVAVGKREALSVFGNDYPTHDGTGVRDYIHVVDLAIGHLKALEKLATKPGLVTYNLGTGQGYSVLDMVKAFEKACGKSIAYLIAPRRPGDIAACYADPDHAKTDLDWQATHSLEDMANSSWHWQSTNPNGYKG

SEQ ID NO: 42547 - protein, 326 aa, ASPERGILLUS NIDULANS FGSC A4
MALKRTFKLNTGYEIPAVGLGTWQSKPSEVEEAVTAALNIGYRHIDAAAVYGNERDVGNGIKASGVPRGEIFLTSKLWNTHHDPENVEAAVDRSLSDLQTDYLDLYLIHWPVAFRYSTTTIQPVDEKTGLIDVIDVPIKDTWAAMEALVAKGKVRSIGVSNFNRRRIEELLKTAKIPPAVNQIEAHPYLQQRELLEWSKEKGILITGYSPLGNNIYNIPRTVDDPLVIEVAKFLNRTPAQVLISWAVQRGTAVLPKSVTPERIKSNFRDFILPEDAFQAIQSLERHQRMNFPARLGVDIFDEVGEESARRSALEWAEGQRLSKSQA

SEQ ID NO: 42548 - protein, 248 aa, Neurospora crassa
MGESRQELLQWINSLLQLNLTKVEQCGTGAALCQVYDSIFGDVPMSRVKFNVNSEYAYIQNFKILQNTFTKHQIEKSIPIEALVKCKMQDNLDFLQWTKRFWDQYYPGGDYDAAARRKGGALPATMSGASRASAGSAAARRPGGATPTGGPRVAARAPAANSAATQALQQEVATLKEAVGGLERERDFYFHKLRDIEVLVQSAVEEDPELEKQEDGLIKAIQAILYSTEEGFEIPEADAEAADDQETF

SEQ ID NO: 42549 - protein, 570 aa, Ustilago maydis 521
MRSRRSSLDADRSRRSSFATELPKPTAADVAVPIEINIPHRASTSASAKTSQIDLTGHHIYLPDHTTAGSSTQGGMFELTQIGPSEKVTGEVIKDVKTGKHYKKMAVSKPAYSLGHTTGAPVVTGVPNRTTGRIGLGHAFPTQEQTRQYKEDKAARKSNTGSGTRSPSLAGGSVTSHRASMDVNTAEGRTQLFAQLRELIHEEFEKVNRGQTEELKNHVRQAHLEQRQHLKDHMEDVKEIVNADLPSHSEKGGYSNDTILKTTTDTVVATADDDKQPYDRKGSEGTLTLDPNGNEVKDPRPVERGYTDNDVDSNQDEYEFPNKWAAIRYKLREPFAEFLGCFMLMVFGNGINCQVVISQLYNSSDPKGSYLSISFGWGVGVAMGVWVAGGISGGMINPAVTIALACFRKFPWKKVPIYIVAQILGCLMGSLCIYGLYINPIRLVDPNQTETTAALFTTYPAEFLRQPSTRMSAFYNEFFASAILLIVILAIGDSSNTPPPDGLAPLVLLWLIWGLGACLGWQTAYAVNPARDLDFVDLQRVVLALDAHHRHLLRCHHGMYHIRHALLYRW

SEQ ID NO: 42550 - protein, 79 aa, Prunus persica
MERSMRLFSTAFVFFLLLAAAGMMMGPMVAEARTCESQSNRFKGTCVSTSNCASVCQTEGFPGGHCRGFRRRCFCTKHC

SEQ ID NO: 42551 - protein, 318 aa, Arabidopsis thaliana
MELLTTVASFFTPTTLFLLLNLMIGTIVVTSRLGSGSRKHYQHHDGFGSGHAPAPLARAPSIIDRVKSINFHLYKFPHPETELFYLHPDPAPAPLQRAPSLLDRVKSINMSYFKFQQYNPEENDYAHHTEPTRFESIPTRMGRVDPIDISKFRIPEEDQPTGTGVNSQINPPGLTRAPSILERVKSIKLSSFYRSDPDLDQKQNPDPVLHEEHKHVRSKSESKKPVKKKKKALTKMTKSASEKSGFGFAGSHAEAPETVESLERRRPDTTRVERSTSFGDGEDGVDAKASDFINKFKQQLKLQRLDSILRYKEMLKAH

SEQ ID NO: 42552 - protein, 262 aa, Zea mays
  misc_feature (34)..(34): Xaa can be any naturally occurring amino acid
  misc_feature (59)..(59): Xaa can be any naturally occurring amino acid
  unsure (1)..(262): unsure at all Xaa locations
VCLTPTHLAIVMEYAAGGELFEKICSAGRFSEDXRYFFQQLISGVSYCHSMVRFCFQKXKSMNSGVNLPFRYQLVSWLVFTENACIEDKQEYGAVYPSSAAFRLLNFTSVADVWSCGVTLYVMLVGSYPFEDPEDPRNFRKTISRILGVQYSIPDYVRVSSDCRRLLSQIFVADPSKRITIPEIKHHPWFLKNLPREISEREKANYKDADAAEPAQAVDEIMRIVEEAKTPGDMSKVVDPALLAEMAELESDEEEADADDTY

SEQ ID NO: 42553 - protein, 740 aa, Cucumis sativus
METCYCIEPQWPADELLMKYQYISDFFIALAYFSIPLELIYFVKKSAVFPYRWVLVQFGAFIVLCGATHLINLWTFTMHSRTVAVVMTTAKVLTAVVSCATALMLVHIIPDLLSVKTRELFLKNKAAELDREMGLIRTQEETGRHVRMLTHEIRSTLDRHTILKTTLVELGRTLALEECALWMPTRTGLELQLSYTLHQQNPVGYTVPINLPVISQVFSSNRAVKISPNSPVASLRPRAGRYVAGEVVAVRVPLLHLSNFQINDWPELSTKRYALMVLMLPSDSARQWRVHELELVEVVADQVAVALSHAAILEESMRARDPLMEQNVALDLARREAETANHARNDFLAVMNHEMRTPMHAIIALSSLLQETELTPEQRLMVETILKSSNLLATLINDVLDLSRLEDGSLQLDIGTFNLHAVFKEVLNLIKPVTLVKKLSLTLHLGLDLPVFAVGDEKRLMQAILNVVGNAVKFSKEGSISISAIVAKAETFREIRVPDFHPVPSDSHFYLRVQVKDTGSGISPQDIPKLFTKFAQTTVGPRNSCGSGLGLAICKRFVNLMEGHIWLESEGLGKGCTATFIVKLGIAEQSNESKLPFTSKIHENSIHTSFPGLKVLVMDDNGVSRSVTKGLLVHLGCEVTTAGSIEEFLRVVSQEHKVVFMDICTPGVDGYELAIRIREKFAKCHERPFMVVLTGNSDKVTKESCLRAGMDGLILKPVSIDKMRSVLSELIERRVLFETS

SEQ ID NO: 42554 - protein, 776 aa, Bradyrhizobium japonicum USDA 110
MSRADAANACVQSDSIKGLAQSIAKPAYHRLLIAEPALRRAVPTLIIAFLITICLGAFVQVVDQTRQKRLVIRHDISALADLLAERIDRLTSSRQERLKNIESLPALLPDLIPSWGTATGRHVIVTSAGVDRRILARIPVDSDPSGNDRLLDSITTAQLLAAPPRDGNISDMTLPNGNAAMAISRQIKSLPGFVTVIQERNEPIWGSDAALSVTLSATTGFVVLILGFAFHWQSTRAREGDLINDAVRGRIDTALNRGRCGLWDWDLSRGRIFWSQSMFSMLGLDGRNELLTFGEVNALVKSDDIDLFEIADQLISEKIDHIDQTFRMQHVDGHWIWLRVRCEKTSGATDSSVHLIGIAVDITEQKSLAERTVEADLRLRDAIETIPEAFVLWDASDRLVLCNSHFQRLHKLPDSAVIPGTSYETVLEVGRMPEVRTRHNETAAQGPGARTFEAQLDDGSWLHISERRTKDGGYVSVGTDITRIKEHEQKLVDNDLRLRATVIDLKRSQAALERQTNELADLAEKYQREKTRAEEANQTKSKFLANMSHELRTPLNAIIGFSEIMGSGLFGELGSEKYQEYCQDILTSGHYLLEVINDILDMSKIEAGRMKLDMEELDLARTLAESLRVVSGRAQDKHLTLDADIEKSISVVADRRATKQIIVNLLSNAVKFTPDGGRIVVRSRQLDDRIVLMIADTGIGIAPHSLARLGRPFEQVESQLTKTYHGSGLGLAIARSLAQLHGGSMRLRSKIDVGTVVRVTLPRDAVKAASGISAAA

SEQ ID NO: 42555 - protein, 618 aa, Bifidobacterium longum DJO10A
MTENIADKAINDTRIVKQFTNPVKEPIDSDINLFDLLDNRAKRDPEGAMIEYKGDDGTWHPYSAQVFRDMVIDLAKGLVGLGVNKGDSVAIVSRTRWEWTALDMAIMSIGALTVPVYETNSASQVSWIFNDSKVTLAIAEDDGQRDKIESVRDEVPTLRNVFVIEAGGLNAIKTYGESVTDAEFWEYKEASHGDDRATIVYTSGSTGTPKGVELTHRNFAFLVLSALQYMPRAGAWPNRRLLLFLPLSHVFARFLEFFSFGGTISLALSSNMKTMVKDFETFGPTLLLAVPRVYEKVYNAASQRAGTGFAGKMFMRAAENAREWSKAEQKGEQLPITGRIAHAFYEQVVYKKIRTIFGPNADFAITGGAPMDSELSHFFNGIGMPVLEGYGMTETCGPVCVSLPEDNRIGTIGMPMCGITAGIAEDGELVVKGPLVCKGYHNNPGVTAQQITDGWLHTGDLGDISEDGFISITGRKKDLIITAGGKNVSPGLLEASVMTSPVVNQCLVIGDKKPFVAALVTLDLADANNWLESQGAKPEPDLASLAKNAIVHAEVERAVNAANEGVSRAESIRKFEILPDEFTEANGMLTPSLKTRRAQIVEHYRELIDDVIYVPLKK

SEQ ID NO: 42556 - protein, 767 aa, Cucumis sativus
MLKALPSGFLILLLLASVSAADNGFPRCNCDDEGSLWSIDSILECQRVSDFLIAVAYFSIPIELLYFVSCSNVPFKWVLFQFIAFIVLCGLTHLLNGWTYGPHSFQLMLALTVFKILTALVSCATAITLITLIPLLLKVKVREFMLKEKTWDLGREVGMILKQKEAGLHVRMLTQEIRKSLDRHTILYTTMFELSETLGLHYCAVWMPNESKTLMNLTHELKDRSFSNGYNVFIPISDSDVIKIKGSDGVNVLGPNSALVVANCGESDERGPAAAIRMPMLRVSNFKGGTPEIVPTYYAILVLVLPGGQPRSWNNQELEIIKVVADQVAVALSHAALLEESQLMRDKLAEQNRDLQQAKENALMASQARNSFQKVMSDGMRRPMHSIMGLLSMLQNENMNDDQRIILDAMVRTGNVVSTQIDDVMEHPIKDSARFPLELEMRSFRLHSMIKEAACLAKCLCAYKGFGFAFEVQRSLPDHVMGDERRVFQVLLHMVGSLLNDINQGGGYALFRVVAESGSQGRNDQRWGNWRQNSSDGDAFIRFEVGINKSNSQSEGSIPNMVSGDRRYASDGAEERLSFTICKKLVKLMQGNIWVIPNPQGFTRSMALVLRFQLRPSIAVAMPEPGESSEHPHSNSIFRGLQVILADADDMNRAVTRKMLEKLGCNVTAVSSGFECLTVMAPAGSSIQVVLLDLHMPELDGFEVTTRIRKFRSQNYRPVIIALTASAGEDWERCVQIGMNGVIRKPVQLQGIAHELRRALLQASKVV

SEQ ID NO: 42557 - protein, 391 aa, Ralstonia eutropha JMP134
MPRQKTVSSGTVSRARRPKQPEVKAGVAQTDDRVELDAFDKDVGADLIPPTDEPISTTTTVGLREADLLSDDNDRQLRDDDEDEAEEEEESESENVAEAAPEHDDFRTVLHTELAADTVQHYLNRISIKPLLSAPEELHFSTLAKDGDFSARQVMIERNLRLVVSIAKGYLNRGVPLLDLIEEGNLGLMHAIEKFDPSRGFRFSTYATWWIRQSIERAIMNQARTVRLPVHVIRELNQVLRAKRHLEKGGTDGRDASLEDIAHLLGKTPDEVQDVLALNEHTTSLDTPFDLDPGSSLLDFLSDEHNAAPDQEVAHRELEGLMKLWLARLSEKHRYVVERRFGLNHIEPATLEELAEEMGLTRERVRQIQQEALVKLKRHFASQGVRKDAVL

SEQ ID NO: 42558 - protein, 430 aa, Bifidobacterium longum DJO10A
MATAQLDVDSNKFNLPVVKASAGPDGIVVSKLRNDGWVTLDPGFLTTAQCESKITYIDGKHSILRYCGYPIEQLCENSDFLEVAWLLRHGELPSRAEYEQFCADINHKTMVGEDFRTFMGSFPRSAHPMSVLASAINALATFYPDTTDISDTDQLDEAAKIIMAKARTIVSYIFRRRRDEPMLYPDYARGYVDDFLRMCFAVPYEPFESDPLYVHALGRLLIIHADHEQNCSTSVVRIAGSAHANLYSAVAAGVNALSGPLHGGANEAVLRQLKAIRDSGKSVAEFVRDAKENGQKISGLGHRVYKSYDPRAAIARKYLEKIMEREDTQKLPSDERALFAVATELEDIALNDEYFVSRNLYPNVDFYTGLIYRAIGFDPAMFTTLFALGRIPGWIAQYREMLADPNTKIGRPRQVYTGPVERDFVPMDER

SEQ ID NO: 42559 - protein, 689 aa, Hordeum vulgare
MANLRLLAQVNNISSETKTKKKKTSADWAIVPYQNAAQADASCSALVSLGDLGPHGNRSNQVRPKVLGLDDDTLRVYGALTKWEEIDSESFEGVDIGSGPKWDDIRRKYENLVDWFIATVKDLFGPREYSRWGGSVIDSVVGTFLTQNVADHLSRNAFMILAAKFPMNKRKGNAEECSYVPPSTVDIKENLNLTKAPDASDSTNSVFTNPIECEEVDYGEEATDKSGKPICKEKTLRKFIATLRLEDTAHWDKLREEAYRKGYDNGSKTRITDKVNWEAVQQASFVDVAKCIAGRGQHYVLALRIQAFLTRIKKDHGSFDLDWLRYLPRESAKKYLISINGLGAKSVDCIRLLSLEHKAFPVDVNVPRIVTRLQWVELQCCSEEFHSVDLYQLMPGCGKITLWPRLCTIDKEKLYELHCLMITFGKVICTKVDPNCNACPFRGDCRYYKSKLTRPLLPPAEEHVRGGEEKKSMVTSERLLSNGSCMPSLQVWQHQIEESRAAGRQPSRSCEPIIEVPPSPEYEYEALDEQEYPNEDDLVDIEDIMSKRVHYDVEINLCSNKPMVSNCSWTPNHGKDWALSNSQHTSRNLKHIGRLRTEHLAYVLPDGHALLEEVEERVPEDPSPYLLVLHPCPDDVHPCPDDVRPNKIPMMRGTILVTTCSECTILLEVIGNGMTCISVPIGKEMSFGS

SEQ ID NO: 42560 - protein, 619 aa, Campylobacter upsaliensis RM3195
MDTKTQNLELEELFKENKEDYITYEKLVKYLNKQPNLTAIKKIRSLMKKYKVELYSAAQIAQMQNVADAKRLEEEKQKLQDTGLENEFNLANENELLEWSRSDSPVRMYLREMGQIALLNKDEEVEISKKIELGEDIIIDAFCSVPYLIDFILDYQEPLINRERRVKELFKSFDEEEDKENDKLDEEENDEESEEDKKTKKPNKREDERTLKVIEKFKALEKAKKEWLKVSKETKAKESDDELLDKLSIAFKKNILKEKLMDLGPTSKLISEIVKSMETALKSDDEFDKELKRLEYRLPMFSDELKARHADILKEITKLSKDEIAEKAMETTMVSTYMEIKKLFQTKEASKKSFDLEKSRLKEILEQIKRGKKISDEAKGRMAKSNLRLVVSIAKRYTNRGLPFLDLIQEGNIGLMKAVDKFEYKRGYKFSTYATWWIRQAISRAIADQARTIRIPIHMIETINQINKIIREHLQKNGKEPDVNDIAKEVGLSVDKVKQVIKITKEPISLEAPIGSEEDGKFGDFVEDKNSLSPMDNILKDDLKEQIDEVLDQLNDREKAVIRMRFGLLEDESDRTLEEIGKELNVTRERVRQIESSAIKKLKHPKVGRKLKNYIEGWK

SEQ ID NO: 42561 - protein, 272 aa, Polaromonas sp. JS666
MSIFMSTPTSTPTSTPMSTSNPFRLDGRLALITGSSAGIGFALARALGQAGATLVLNGRDAGRLEQAAGVLRSEGLQVHTRMFDVTQAEAVEAAVQDIESTLGAIEILVNNAGMQRRMPLHEFSTEQWHELMRTNVDSVFFMGRAVARKMIERRRGRIINVCSVQSELGRPNIAPYTASKGAVKMLTKGMAIDWGPHGINVNGLGPGYFRTELNEKLVADEQFNAWLIGRTPSRRWGNVEDLGGAAVFLASDASSFVNGHILYVDGGVTATL

SEQ ID NO: 42562 - protein, 349 aa, Polaromonas sp. JS666
MRALVCHAPLDLRFDTFVSDQPGPTELGVRIAYGGICGSDLHYFQHGGFGTVRIREPMVLGHEVSGAIESVGSAVTQFQVGQRIAVSPSRPCGTCRYCNLGLQNHCMEMRFYGSAMRFPHVQGAFREHLVIDASQAHLVADELPLAEAALAEPLSVGLHAITRAGSVFGKRVLVTGCGPIGLLLIAGLRRAGAAHIIAADIADVPLVCAATLGADETINLARHPGGLAPYALNKGMIEVMFEASGSDKALRGGLDVMAPRGVVVIVGLGGDISVPMNLLVAKELDVRGTFRFHQEFAVAVRFLNQRLIDGRPVITHTLKFDQAADAFKLAGDKGRALKVLIDFNAPAAA

SEQ ID NO: 42563 - protein, 190 aa, Candida rugosa
SIQTGIARTGKMLCFEHSGIKPDVVLLGKAISGGVMPVSAVLSSKEIMLTLEPGSHGSTYGGNPLACAVAIAALEVVREEGLVERAEKLGATLRAELEKLKAESNGVISEVRGVGLLSAVVIDDTKTNGRSAWDLCLLMRDHGVLAKPTHDHIIRLAPPLVISEEDLLKGVESIRASLKDLPNAPKGNGH

SEQ ID NO: 42564 - protein, 573 aa, Cucurbita pepo
MGNTCVGPSISKNGFFESVSAAMWRSKTPENSVSNHTNGENVREVVASEPESPLPVQNQPPEKVTMPESVAKPEPPMEPKVRPVMKRVGSAGLRGGSVLQTKTGNFKEYYSLGKKLGQGQFGTTYMCVEKATGKEYACKSIAKRKLVNEDDVEDVRREIQIMHHLSGHPNVISIKGAYEDAVAVQVVMELCAGGELFDRIIQRGHYTERKAAELTRTIVGVLEACHALGVMHRDLKPENFLFVSKEEESLLKTIDFGLSMFFKPGEKFNDVVGSPYYVAPEVLRKRYGPEADVWSAGVIVYILLSGVPPFWAESEEGIFEEVLHGDLDFSSDPWPSISDSAKDLVRRMLVRDPRKRLTAYEVLCHPWVQVDGVAPDKPLDSAVLTRLKQFSAMNKLKKMAIKVIAESLSEEEIAGLKEMFKMIDTDNSGQITFEELKAGLKKFGANLKESEIYDLMQAADIDNNGTIDYGEFVAATLHLNKIEKEDHLLAAFSYFDKDGSGFITHDELQQACKEFGIEDLQMEEMMREVDQNNDGSIDYNEFVAMMQKGNVVNTGKKGLQSSFSIGFREALKL

SEQ ID NO: 42565 - protein, 550 aa, Thermus thermophilus HB27
MNGSADAGPRPRKYVFITGGVVSSLGKGILTSSLGALLRARGYRVTAIKIDPYVNVDAGTMRPYEHGEVFVTADGAETDLDIGHYERFLDMDLSRGNNLTTGQVYLSVIQKERRGEYLSQTVQVIPHITDEIKERIRKVAEEQKAEIVVVEVGGTVGDIESLPFLEAIRQFRFDEGEGNTLYLHLTLVPYLETSEEFKTKPTQHSVATLRGVGIQPDILVLRSARPVPEEVRRKVALFTNVRPGHVFSSPTVEHLYEVPLLLEEQGLGRAVERALGLEAVIPNLAFWQEAVRVLKHPERTVKIAIAGKYVKMPDAYLSLLEALRHAGIKNRARVEVKWVDAESLEAADLDEAFRDVSGILVPGGFGVRGIEGKVRAAQYARERKIPYLGICLGLQIAVIEFARNVAGLKGANSTEFDPYTPHPVIDLMPEQLEVEGLGGTMRLGDWPMRIKPGTLLHRLYGKEEVLERHRHRYEVNPLYVDGLERAGLVVSATTPGMRGRGAGLVEAIELKDHPFFLGLQSHPEFKSRPMRPSPPFVGFVEAALAYQERA

SEQ ID NO: 42566 - protein, 253 aa, Arabidopsis thaliana
VNEIWGRKKETDDNRGWVFPDSDTELPGAEPDYLNGAKSVRELYEIASPNYEGKYTVPVLWDKKLKTVVNNESSEIIRMFNTEFNGIAKTPSLDLYPSHLRDVINETNGWVFNGINNGVYKCGFARKQEPYNEAVNQLYEAVDRCEEVLGKQRYICGNTFTEADIRLFVTLIRFDEVYAVNFKCNKRLLREYPNIFNYIKDIYQIHGMSSTVNMEHIKQHYYGSHPTINPFGIIPHGPNIDYSSPHDRDRFSS

SEQ ID NO: 42567 - protein, 696 aa, ASPERGILLUS NIDULANS FGSC A4
MAGSLVNGSSSKHDIVLKTFRLLIADLCQQFGGGHPGGAIGMAAIGVALWRYVMRYAPHTPNFFNRDRFVLSNGHTCLFQYTFLHLTGYKAMTFEQLKSYHSEREDALCPGHPEIEHEGIEVTTGPLGQGVANAVGLAMATKNLAATYNRPGYEVVNNHTWCMIGDACLQEGVALEAISLAGHWKLNNLTIMYDNNQITCDGSVDLTNTEDINAKMRACGWDVINVEDGCYDVEGIVEALSKARASTEKPTFINIRTVIGLDSKVAGQAAAHGAAFGVEDVAAMKRKLGFNPEEHFVIGETVREFFADLPARGEGYVKEWKDLIQRYSEAHPELADEFQRRVRGELPTDWQKLIPSELPDKPTATRVSSGLVFNPIAQYIKSFMVGTADLSPSVNMIWKGKVDFQHPDLRTTCGINGNYSGRYIHYGVREHAMAAISNGLAAFNPNTFIPVTSSFFMFYLYAAPAVRMGALQHLQVIHAATHDSIGMGEDGPTHQPIELASLYRAMPNLLFIRPGDSEETAGAWIAAINAKKSSTIISTSRHALPQLKQTRREGVIKGAYVLEEASNADVTIIGVGAELSFALDVAARLKEEKGATARVVSFPCQRLFEQQSLEYRRSVLQRHKGIPAVVIEPYAPNGWERYADAGISVRRFGHSLPGKAAYKFFGFDIGVMTEKVGHYLQQLKEDEALRGEFVDL

SEQ ID NO: 42568 - protein, 170 aa, Mesembryanthemum crystallinum
MASQSTDQPKSIHDFIVKDARGNDVDLSIYKGKVLLIVNVASQCGLTNSNYPELTKLYEQYKDKGLEILAFPCNQFGNQEPGDNEQIMEFACTRFKAEFPIFDKVDVNGSNAAPVYKYLKSSKGGLFGDGIKWNFTKFLVDRDGKVVDRYAPTTSPASIEKDIKKLIGTS

SEQ ID NO: 42569 - protein, 502 aa, Mycobacterium tuberculosis H37Rv
MTTLWQPHRNDYSPIPGRGVHARRGARRPRPRGGRAERPGTGQLTRSGRRALLVGLTAASVGVLYGYDLSAIAGALLSLSEEFELTTREQELLTTTAVLGQIAGALGGGILANAIGRKKSVVLIVAGYAVFALLGATSVSVPMLVVARLLLGVTIGLSVVVVPVYVAESAPAAVRGSLVTAYQLATLSGIVVGYLVGYLLAGSHGWRAMFGLAAAPATLLLPLLWRMPDTARWYLLKGRIADARSALRRIQPEADIDAELADMAAAVDERGGGIGEMVRRPYLRATLFVIALGFLVQITGINAIIYYSPRLFAAMGFAGYFAMLALPAMVQVAGLAAVCASLFLVDRLGRRPILLSGIATMITADAVLITVFANDSDGGTGLVLGFAGVLLFIIGFNFGFGSLVWVYAAESFPSRLRSMGSSPMLTSTLTANAIVAAFSLTMLRVLGGAGVFAVFGTFAVVAFVVVYRFAPETKGRKLEEIRHFWENGGRWPAERSPAADEP

SEQ ID NO: 42570 - protein, 968 aa, Oryza sativa
MAAAAGKAAMERHQSIDAQLRLLAPGKVSEDDKLVEYDALLVDRFLDILQDLHGPHLREFVQECYELSAEYENDRDEARLDELGRKLTSLPPGDSIVVSSSFSHMLNLANLAEEVQIAHRRRIKLKRGDFADEASAPTESDIEETLKRLVTQLGKSREEVFDALKNQTVDLVFTAHPTQSVRRSLLQKHGRIRNCLRQLYAKDITADDKQELDEALQREIQAAFRTDEIRRTPPTPQDEMRAGMSYFHETIWKGVPKFLRRIDTALKNIGINERLPYNAPLIQFSSWMGGDRDGNPRVTPEVTRDVCLLARMMAANLYFSQIEDLMFELSMWRCSDELRIRADDLHCSSRKAAKHYIEFWKQIPPNEPYRVILGGVRDKLYYTRERTRHLLTTGVSEIPEEATFTNVEEFLEPLELCYRSLCACGDKPIADGSLLDFLRQVSTFGLALVKLDIRQESDRHTDVLDAITTYLGIGSYAEWSEEKRQDWLLSELRGKRPLFGPDLPQTEEIADVLGTFHVLAELPADCFGAYIISMATAPSDVLAVELLQRECHIKQPLRVVPLFEKLADLEAAPAAVARLFSIDWYMNRINGKQEVMIGYSDSGKDAGRLSAAWQMYKAQEELVKVAKHYGVKLTMFHGRGGTVGRGGGPSHLAILSQPPDTIHGSLRVTVQGEVIEHSFGEEHLCFRTLQRFTAATLEHGMHPPISPKPEWRALMDEMAVVATKEYRSIVFKEPRFVEYFRSATPETEYGRMNIGSRPSKRKPSGGIESLRAIPWIFAWTQTRFHLPVWLGFGGAFKHIMQKDIRNIHTLKEMYNEWPFFRVTLDLLEMVFAKGDPGIAALYDKLLVAGDLQSFGEQLRNNFEETKQLLLQVAGHKDILEGDPYLKQRLRLRESYITTLNVCQAYTLKRIRDPSFEVMSQPALSKEFVDSNQPAELVQLNAASEYAPGLEDTLILTMKGIAAGMQNTG

SEQ ID NO: 42571 - protein, 253 aa, Wolbachia endosymbiont of Drosophila mojavensis
MNPTQHGEVFVTEDGAETDLDLGHYERFTGIKATKDDNITTGKIYHELLKKERRGDYLGKTVQVIPHVTDLIKSFIFNGTEGLDFVICEIGGTVGDIESQPFLEAIRQVNYTLGKQRVILIHLTLIPYLTAAQELKTKPTQHSVLELNSAGLQPDIILCRSEKEIFDNQREKIAKLCNVSLSNVIPAPDVSHIYELPVLYSQCGLDTQILEHFDLSKPKPSLTEWESILHSIRHPTQEITVSIVGKKSEFPEA

SEQ ID NO: 42572 - protein, 85 aa, Hyacinthus orientalis
YKGKMSSCGACSSGCKCGSSCGCNGCGCCKRNPVLAEGSITTTQTMILGVAPVKGQVEGFESGMGAENGGCKCGSNCTCDPCTCK

SEQ ID NO: 42573 - protein, 427 aa, Mycoplasma penetrans HF-2
MKLKLGRKDKTEKKEVKGTLNQDFISSGILEGNLQKNINRDDLVTAKKKFIKELSSKKRKKNKVVAEEILIYFDRFDLTNDDYLEIFDWLKQEGIEIDRNPFTSNNSDDIKELKSNVASKIDYIVHDVTTPMSSTRDKVDDGIKSFLNVLGSSKMLTSQEEQEIGKMLDSEDKTIREYAINQLMTSNLRLVTSIAKKYLNRGLDLEDLLQEGSLGLMKAITKFDYKLGNKFSTYATWWIRQAITRAIADQARTIRIPVHMVETINKLSKAERQLMQEYGRDPTPEELADAMDGTAAGFTAKKILNIKKLNIDPVSLDKPVGKDEESKFVDFVKDDDNLNPEQFTEKELMGEHIDDILKKFLQEKEEDIIRMRYGLPPYSHPMTLEEVGEKYGITRERVRQIEAKALRKIKHPSKSGILKGFNENNDF

SEQ ID NO: 42574 - protein, 218 aa, Schizosaccharomyces pombe
MQTEQPPKESQTENTVSEPQEKALRTVFDDKINFNLKHPLARPWTLWFLMPPTPGLEWNELQKNIITFNSVEEFWGIHNNINPASSLPIKSDYSFFREGVRPEWEDVHNKTGGKWAFQNKGRGGNALDEMWLTTVLAAIGETLDPTGQEVMGVVINMRKGFYRLAVWTKSCNNREVLMEIGTRFKQVLNLPRSETIEFSAHEDSSKSGSTRAKTRMSV

SEQ ID NO: 42575 - protein, 539 aa, Lactobacillus acidophilus NCFM
MTKYIFVTGGVVSSLGKGITASSLGRLLKNRGLKVTMQKFDPYINIDPGTMNPYQHGEVYVTDDGTEADLDLGHYERIVDVRTSKYSNVTTGKIYQEVLEKERRGDYHGATVQVIPHITNMIKKKIMRAALTTDSDVIISEIGGTVGDIESTPFMEAIRQMRREVGEDNVMYIHCTLVPLLHAAHEMKTKPTQHSVAELRSIGIQPNMLVLRAEQPIDQEHKDKISDFTDVPVDRIIESIDAPSLFDVPLEFQKQGMDQKVCDFLHLESPKPEADMEAWKKLDERAKNLEHKTKITLVGKYVELEDAYISVTDALQHAGYLYNTKIEVDKVQAEDITEDNIAEIMKDSDGLIVPGGFGTRGLEGMITAIKYARENDIPFLGICLGMQMASVEFARNVLNLEDANSAEAEPNCKNNIIDIMADKRDEENIGGTLRLGLYPATLKEGTKTREAYDNQDVIQERHRHRFEFNNKYREAFEKAGMVFSGVSPDNRLVEIIELPKKKFFIAAQYHPEFLSRPQRPEGLFKSFIGAASGLPAQKF

SEQ ID NO: 42576 - protein, 459 aa, Pichia angusta
MGKEKTHVNVVVIGHVDSGKSTTTGHLIYKCGGIDKRTIEKFEKEAAELGKGSFKYAWVLDKLKAERERGITIDIALWKFETPKYHVTVIDAPGHRDFIKNMITGTSQADCAILIIAGGTGEFEAGISKDGQTREHALLAFTLGVRQLIVAVNKMDSVQWSEARFEEIVKETSNFIKKVGYNPKTVPFVPISGWNGDNMIEPSSNCPWYKGWQKETKSGVVKGKTLLEAIDAIEPPARPSDKPLRLPLQDVYKIGGIGTVPVGRVETGVIKAGMVVTFAPAGVTTEVKSVEMHHEQLAEGLPGDNVGFNVKNVSVKEIRRGNVCGDSKNDPPQGCASFNAQVIILNHPGQISAGYSPVLDCHTAHIACRFDQLLEKIDRRTGKKIEENPKFVKSGDAAIVKMIPSKPMCVETFTEYPPLGRFAVRDMRQTVAVGVIKSVEKTAAGAGKVTKAAQKAAKK

SEQ ID NO: 42577 - protein, 405 aa, Zea mays
TGDPPLGDIGNLVSVRPATGNPQEQVNRPITRSFGAQLVKKAQAKAAIKNAAILPARHAPRQERKAPVKQHPPPEDIIVLSSDSEQSRAQSESSASSVRSRRKAINTLSSVLSARSKAACGIAGKPRQVVDDIDKLDVNNELAVVEYIEDIYTFYKIAQHERRPCDYIDAQLEINSKMRAILADWIIEVHHKFELMPETLYLTMYIIDQYLSLQPVLRKELQLVGVSSMLIACKYEEIWAPEVNDFILISDSAYSREQILSMEKGILNRLEWNLTVPTVYMFLVRFLKAATLGGKVEKEMENMVFFFAELALMQYDLVTRLPSLVAASAVYAARLTLKRAPLWTDTLKHHTGFRESEAELIECTKMLVIAHSTAPESKLRVVYKKYSSEQFGGVALRPPAEEICK

SEQ ID NO: 42578 - protein, 362 aa, Streptomyces coelicolor A3(2)
MDTSRTRLRRLLAPVAVPACVLLLATGCSDAGAGTDRGSGSAREGDTAQAAAPRAASELEADYERVIKDVLPSVVQIQAGDSLGSGVVYDDKGHVVTNAHVVGDAKSFRVTTARTEGALTAKLVSSYPEQDLAVIKLDKVPEGMRAARFADSAKVEVGQIVLAMGSPLGLSSSVTQGIVSATGRTVTEGSSGGGTGATIANMVQTSAAINPGNSGGALVNLDGQVIGIPTLAATDPGLGDSAAPGIGFAIPASMVTTVAGQIVRDGKVTDSGRAALGITARTVVDDSYRPAGAAVVEVSDGGAADDAGLRPGDVLVKLGDTDITTITSLSEALASMRPGDRTKVTYTRDGKEHTAEVTLGEQ

SEQ ID NO: 42579 - protein, 432 aa, Nicotiana sp.
MAQILAPSGEWQMRMTKSSTDANPLTSKMWSSVVIKIIKELAVKSSAKFRVFALESDSGTVNQSEQLLNLDVTPYTDLIIAEYIWIGGSGIDMRSKSRTISKPVKHASELPKWNYDGSSTGQAPGEDSEVILYPQAIFKDPFRGGNNILVICDAYWPAGEPIPSNLRHKAAQIFSDSLVVSEVPWFEIEQEYTLLQQNVKWPLGWPVGGYPGTQGPYYLCAGADKSFGLDISDAHYKACLYAGINISGTNGEVMPGQWEFQVGPSVGIEAGDHIWCARYILERITGQAGVVLSLDPLPIEGDTNGAGCHTNYSTLSMREDGGFEVIKKANLNLSLRHLEHINAYGEGILEKLTGNHETASIDYFSWGVAFRGASIRVGADTEKQGKGYLEDRRPASNMDPYVVTGLLAQTTILWEPTLEAEALAAQKLALKV

SEQ ID NO: 42580 - protein, 216 aa, Arabidopsis thaliana
MVHNCPPTSLYEHLFSPHTPNIHHNSLNPTIFLFFHHLRVNPTLRPKSPPIMQPSTNIFSLHGCLPSYLSHIPTSSPFCGQNPNPFFSFETGVNTSQFMSLISSNNSTSDEAEENHKEIINERKQKRKISNRESARRSRMRKQRQVDELWSQVMWLRDENHQLLRKLNCVLESQEKVIEENVQLKEETTELKQMISDMQLQNQSPFSCIRDDDDVV

SEQ ID NO: 42581 - protein, 460 aa, Elaeis guineensis
MLVPSALPRVSRSVSAARFSVSGVGSSPALSSRSCTSLDSSVRSSLRRCPCGIYTSRTKAVVEAVESKASAREWRSAVKRAVLASDTGAEEEVGHSRSFLRARSEEELLSYIRKEVETGRLSSDIANGLEELYYNYRNAVLQSGDPRANKIILSNMAVAFDRILLDVEDPFTFSPHHQAIREPFDYYMFGQNYIRPLIDFRRSYIGNISIFSDMEEKLQQGHNIVLMSNHQTEADPAIIALLLERTNSHIAETMVFVAGDRVLTDPLCKPFSMGRNLLCVYSKKHMDDVPELIEMKRRANTRSLKEMALLLRGGSQIIWIAPSGGRDRPDPSTGEWHPAPFDVSSVDNMRRLVEHSSVPGHIYPLSLLCYEVMPPPQQVEKQIGERRTISFHGVGLSVAPELNFNELTAGCETPEEAKEAFSQALYNSVGEQYNVLKSAIHEHRGLNASNSIISLSQPWQ

SEQ ID NO: 42582 - protein, 327 aa, Bordetella bronchiseptica RB50
MSAQIRLMPSQLEALRRHTVVVADTGDFEAMRALRPTDATTNPSLILKAVQQEAYRPLLVQTARAHQGASPAEITDRLLVAFGRQILDIVPGRVSTEVDARLSFDTRATVERARGLIALYQAAGVPRERVLIKIASTWEGIQAARVLQAEGIRCNLTLLFCLPQAAACADAGVQLISPFVGRIYDWHKKNAGAEWVEDARRGANDPGVQSVSRIYRYYKRFGIETEIMGASFRNVDQILALAGCDLLTISPELLTRLSQTEGEVPAALSPQAGHDDADAVRLDGGEVAFRTQLNEDAMASEKLSEGIRLFVADARKLDALIESHGAA

SEQ ID NO: 42583 - protein, 210 aa, Zea mays
  misc_feature (9)..(9): Xaa can be any naturally occurring amino acid
  misc_feature (57)..(57): Xaa can be any naturally occurring amino acid
  unsure (1)..(210): unsure at all Xaa locations
EGDGIDRLXKLSIGGRSRRSFENRCFGGRVAATTQCILTSDACPETLHSQTQSSRKXYADANRVSAIILGGGTGSQLFPLTSTRATPAVPVGGCYRLIDIPMSNCFNSGINKIFVMSQFNSTSLNRHIHRTYLEGGINFADGSVQVLAATQMPEEPAGWFQGTADSIRKFIWVLEDVGTIKSFFDANLALTEQPSKFDFYDPKTPFFTAP

SEQ ID NO: 42584 - protein, 463 aa, Zea mays
  misc_feature (39)..(39): Xaa can be any naturally occurring amino acid
  misc_feature (58)..(58): Xaa can be any naturally occurring amino acid
  unsure (1)..(463): unsure at all Xaa locations
MQSLLLPTAAVAPVAPPCGRRNLPGRLSVRASATVVAAXPRRETDPKKRVVITGDGAXVPVFGNDVDAYYDRLLVGESGIGPIDRFDASKFPTRFAGQIRGFSSEGYIDGKNDRRLDDCLRYCIVSGKKALEASGIAHGSKPMEKIDKTRAGVLVGTGMGGLTVFSDGVQNLIEKGYRKITPFFIPYAITNMGSALLGMDIGFMGPNYSISTACATSNYCFYAAANHIRRGEADIMIAGGTEAAIIPIGVGGFVACRALSQRNDDPKTASRPWDKDRDGFVMGEGAGVLVMESLEHAIKRDAPIIAEYLGGAVNCDAYHMTDPRSDGLGVSSCIKQSLKDAGVAPEEVNYINAHATSTLAGDLAEVNAIKQVFKDPSGIKINATKSMIGHCLGAAGGLEAIATIKAITTGWVHPSINQFNPEEAVEFDTVPNVKKQHEVNVGISNSFGFGGHNSVVVFAPFKP

SEQ ID NO: 42585 - protein, 490 aa, Hordeum vulgare
MVVTVAATGPDTAETLHSTTFASRYVRDQLPRYRMPENSIPKEAAYQIISDELMLDGNPRLNLASFVTTWMEPECGKLIMDSVNKNYVDMDEYPVTTELQDRCVNMIAHLFNAPIGEDETAIGVSTVGSSEAIMLAGLAFKRKWANKMKEQGKPCDKPNIVTGANVQVCWEKFARYFEVELKEVKLTEGYYVMDPKKAVEMVDENTICVAAILGSTLTGEYEDVKLLNDLLVEKNKETGWNVPIHVDAASGGFIAPFLQPELEWDFRLPLVKSINVSGHKYGLVYPGVGWVIWRSKDDLPEELIFHINYLGADQPTFTLNFSKGQQIIAQYYQLIRLGFEGYKHIMENCKLNAAVLKEGIDATGRFDVLSKADGVPLVAIRLKDSTNFSVFDISENLRRFGWIVPAYTMPADAEHVAVLRIVIREDFNRSLAQRLLADINKIIGELDAHAVHAIKLSTAAAGGDGASKSAVDAATEAFKDLAGKKKAGVC

SEQ ID NO: 42586 - protein, 390 aa, Cynodon dactylon
FTAHPTQSLRRSLLQKHTKIRNCLTQLYAKDITEDEKKELDEALQAEIQAAFRTDEIRRSQPTPQDEMRYGMSYFHETIWKGVPKFLRRVDTALKSIGINERLPYNAPVIKFSSWMGGDRDGNPRVTPEVTRDVCLLARMIAANLYISQIEDVMFELSMWRCNDELRALAEQHLASRETKKHYIEFWRAIPATEPYRVLLGYVRDKLYNTRERALQLLTKGYSDIQEEATIGTVEEFMEPLEVCYKSLVDCGDKTIADGVLLDFIRQVNTFGLSLAKLDIRQESERHTDAIDAITTHLGIGSYKEWPEEKRQEWLLSELQGKRPLLVPDMPVTEEVEAVLGCFRVLAELPRDSFGPYIISMATAPSDVLAVELLQRECGIRQPLPVVPLS

SEQ ID NO: 42587 - protein, 296 aa, Triticum aestivum
  misc_feature (177)..(177): Xaa can be any naturally occurring amino acid
  misc_feature (201)..(201): Xaa can be any naturally occurring amino acid
  misc_feature (246)..(246): Xaa can be any naturally occurring amino acid
  unsure (1)..(296): unsure at all Xaa locations
MSFSSVSAASQTRVGVVQMTSVGDLDANYATCSRLTKEAAAAGVKFLCFPEVFSFIGSKDGESVKLAEPLDGPIMQRYCSLANESSIWLSLGGFQERGPDDSHQYNTHVLIDESGKVRSSYRKIHLFDVDVPGNMVYKESRFTTAGDTVVAVDSPFGRLGLTVCYDLRFPELYQCLXGFKHQAQGLLGPSAFPKGTGGAHXGEILLRARGPWRHNGYGFCCGLNLGKPNGQMRKPSAVSFSYLAPXGGTVIARLPDRLSTGFAVADIDLSKVEAVRTKMPISEHRKFESIWKSSSL

SEQ ID NO: 42588 - protein, 548 aa, Lactobacillus sakei subsp. sakei 23K
MQTNWWQNAVFYQVYPRSFQDSNGDGIGDIQGIIQRLDYLADLGVNAIWLSPVYQSPNVDNGYDISDYQAINPEYGSMVDMEQLIEAAKIRKIKIVMDLVVNHTSDQHPWFLEARKSKDNPYRDFYIWRDPATDGSVPNDLQSNFKGSAWAFDAVTGQYYLHFYAKEQPDLNWQNPKVREAVYQMMTWWLQKGIGGFRMDVIDLIGKEPDRKIKENGPQLHAYLQEMNARVLSQYDVVTVGETWGATPEIGQMYSNPNRHELSMIFQFEQINLDKQSGMTRWDLKPLIPAELHAVFSKWQLALDGVGWNSLFWSNHDLPRIVSRWGDDSQYREKSAQALAIYLHMLKGTPYIYQGEEIGMTNYPITSYHEIEDIESRRVYQQRQQQGYAISDILNGINAKGRDNARHPMQWNGKNQSGFTDGTPWLPVNPNYLEINVELAKQDERSIYATYQQLIKLRKRNAIIRQGRFENVPTGNQNVISYKRMLGEQSWLVIINLSKNRESYTLPIQHFGPNQKIISNNLLLNKIAISGVLQPYDALVVAIGNEEK

SEQ ID NO: 42589 - protein, 358 aa, Ralstonia metallidurans CH34
MLHRNPAVGGLLRGRRACRAGSIVRGFEINNCILVTGASGFLGSSVMRQALDRGFQVRVLVRSTSPRANLAGLPVEIVEGDMRDAASMTRAMAGVRYLFHVAADYRLWAPDPEEIVRSNVEGTVTVMNAARAAGVERVIYTSSVATLRVAGATAPVDETAAMAGHEAIGAYKRSKVLAEREVERLVAEGLPAVIVNPSTPIGPRDVRPTPTGRIIVEAATGKIPAFVDTGLNLVHVDDVANGHFLALDKGRIGERYILGGQDVLLRQMLADIADMAGRKAPTIELPRWPLYPVARVAETIARFTGKEPFVTVDGLKMSQYRMFFTSAKAQRELGYAPRPYQEGLRDALTWFREAGYLK

SEQ ID NO: 42590 - protein, 659 aa, Symbiobacterium thermophilum IAM 14863
MLALIVAGLLAAKIRGQDPGTPRMQEIAAAIHDGAMAFLNREYRTLVVFVLALAIIILIAGFTTDAMQWQTAIAFVAGALCSVLAGNFGMRVATMANVRTANAAQHGLNRALDIAFSGGAVMGLSVVGLGMLGVGVVYLIFRDPDIVNGFALGASSIALFARVGGGIYTKAADVGADLVGKVEAGIPEDDPRNPAVIADNVGDNVGDVAGMGADLFESYVGAVIAAMAIAVVDKDIDPNLAALPLLIAAGGIVASVIGTQFVRGKEGGNPAKALNAGTYAAGILTLIVAAVISFLGYGTHIYFTAVVAGLIAGIAIGQLTEYYTSGDYGPVKSIADASRTGPATNIISGLGVGMMSTALPILVIGAATLVGYLVGAPHGQGLFTIALAAVGMLSTTGMTVAVDAYGPIADNAGGIAEMSHLDPKVRKTTDTLDSVGNTTAAIGKGFAIGSAALTALSLFGAFATAAGLGNVSMTDPKLIVGLFVGGMLPFLFGALTMNAVGRAAMQMVEEVRRQFREIPGIMEEKAKPDYARCVDISTGAALKEMIVPGLMAVAAPLLTGWLLGVTALAGLLAGALVTGVMMAIMMANAGGAWDNAKKYIEAGAHGGKGSEPHKAAVVGDTVGDPFKDTSGPSMNILIKLMTIVSLVFAATFGNGLLPF

SEQ ID NO: 42591 - protein, 528 aa, ASPERGILLUS NIDULANS FGSC A4
MVTTAQSQCRHATEVRPPEACLWPQTRFFFRNSSTSTGRSCWSAWFILANSSGGSGAFGHFEVTKDVSDLTKAHFLRSPGIKTPVFIRFSTVTLGREYPDLARNPRGFAVKFYTGEGNYDIVGLNFPVFFCRDPIQGPDVIRSQYRNPQNFLLDHNSLFDLLANTPEGNHAGMMFFSDHGTPAGWQNIHGYGCHTFKWVNAEGKFVYIKYHFLADHGQKQFNADEALRYGGEDPDYSKRELWRTIENGKELSWTAYVQVMKPEDADPEKLGFDPFDVTKVWPKKQFPLQEFGKLTLNKNPENFHRDVEQAAFSPGSMVPGIEDSPDPLLQFRMFFYRDAQYHRIGVNLHQVPVNCPFMASSYSSLNFDGQLRVDANHAMNPQYAPNSFVHKFRTDTAEAPYQLADGTVSRKSHFFHEGKASEYDQPRELYERVMDEKARQHLHTNTARLLKLVEYPKIQAKYLGQLLRISEKYARGVYDLLPEKKFGFDEVQSFAKGAEVAGKEAKFRPNMPTDKLLGLCPAMAVYGP

SEQ ID NO: 42592 - protein, 493 aa, Vicia faba
MSNSNNPPPPKPTWVLPYITENIRELYTLGRKLGQGQFGTTYLCTHNPTGKTYACKSIPKKKLLCKEDYDDVWREIQIMHHLSEHPNVVRIHGTYEDSVSVHLVMELCEGGELFDRIVNKGHYSEREAAKLIRTIVEVVENCHSLGVMHRDLKPENFLFDTVEEDAVLKTTDFGLSAFYKPGEIFSDVVGSPYYVAPEVLHKHYGPEADVWSAGVILYILLSGVPPFWAETEIGIFKQILQGRLDFQSEPWPGISDSAKDLIRKMLDRNPKTRFTAHQVLCHPWIVDDSIAPDKPLDSAVLSRLKQFSAMNKLKKMALRVIAERLSEEEIGGLKELFKMLDADSSGTITLDELKEGLKRVGSELMESEIKDLMDAADIDNNGTLDYGEFIAATVHLNKLEREENLLSAFSYFDKDGSGYITIDEIHVACKEFGLDDIHIDEMVKEIDQDNDGQIDYGEFAAMMRKGNGGMGRRTMTSRLNFRNALGIIGNESN

SEQ ID NO: 42593 - protein, 438 aa, Bacteroides fragilis NCTC 9343
MKVKPDLSFWKLWNISFGFFGVQIAYALQSANISRIFATLGADPHSLSYFWILPPLAGIIVQPIIGAASDKTWTRFGRRIPYLFAGSLLAVWVMCLLPNAGSFGMAVGTAMIFGLVALMFLDTSINMAMQPFKMLVGDMVNEKQKGLAYSIQSFLCNAGSLMGYLFPFIFTFIGISNTADKGTVPDSVIYSFYIGAAILILCVIYTTVKVKEMPPKEFEEFHGITADEKKEKADFISLLKHAPKVFWTVGLVQFFCWAAFMYMWTYTNGAIAATVWGTTDVQSAGYQEAGNWVGVLFAVQAIGSVIWAVILPLFKARKQAYALSLVLGGIGFISTLFFHNEYLLFISYLLIGCAWAAMLAMPFTILTNSVSGKNMGAYLGLFNGTICVPQIAAALVGGGLLHLVGGHQVNMLVLAGVLLIAGAICVYFIKETMAHHEA

SEQ ID NO: 42594 - protein, 571 aa, Chlamydia muridarum
MRMDTLDSQAADAAQEEEIQRKLEELVTLAKDQGFITYEEINEILPPSFDSPEQIDQVLIFLAGMDVQVLNQADVERQKERKKEAKELEGLAKRSEGTPDDPVRMYLKEMGTVPLLTREEEVEISKRIEKAQVQIERIILRFRYSTKEAVSIAQYLINGKERFDKIVSEKEVEDKTHFLNLLPKLISLLKEEDSYLEERLLALKDPALSKQDQAKLNDELEKCRIRTQAYLRCFHCRHNVTEDFGEVVFKAYDSFLQLEQQINDLKVRAERNKFAAAKLAAARRKLYKREVAAGRTLEEFKKDVRMLQRWMDKSQEAKKEMVESNLRLVISIAKKYTNRGLSFLDLIQEGNMGLMKAVEKFEYRRGYKFSTYATWWIRQAVTRAIADQARTIRIPVHMIETINKVLRGAKKLMMETGKEPTPEELGEELGFTPDRVREIYKIAQHPISLQAEVGDSGESSFGDFLEDTAVESPAEATGYSMLKDKMKEVLKTLTDRERFVLIHRFGLLDGRPKTLEEVGSAFNVTRERIRQIEAKALRKMRHPIRSKQLRAFLDLLEEEKTGSGKIKSYKN

SEQ ID NO: 42595 - protein, 605 aa, Caulobacter crescentus CB15
MAPSKGEDSRLVRIALTEAYVPIARGYLLAAAIYNSLIAIAHPFYEKGLAFVMLTSLTGATAIYAFSAWFLLRRRRIVGGHLEWLVLGMNALFLGHVTAFHLFHLEPQKLIYFVLLALVFATSAPSRRVANVSVGAALVSLVFIARGAPGDMVNQYLFVGLAGAFAAVGMSTLMRGVVGREVRARLASQALNDELERELTENRRLRTEAQALALAAEKANRAKSEFLATMSHEIRTPLNGVLGMAQIMASGKLQVDQRRRLETITASGQSLLGLINTILDVSRIEDGKMEIVEGPFDLTAQMHTLSLLYGGLARDKHLDFSLEVSPTVAGCRQGDGERLRQVLSNLISNAIKFTDSGAVRVTLDGDDQGLVARVLDTGVGIPEAQRERLFTKFAQLDSSSTRRVGGSGLGLAICKSLAELMGGEIRFLAPAEGGACFELTLPMARIDPPPAVAAPPAPALAPASADEDAAPRILVVDDNQTNRAVLLTLLGHLGADAHFAVDGRDAVAMWEQDRWDVILMDIHMPEMDGLQACQVIREGERQGGRLRTPVVAVTASVLPHERSLYVEAGMDAVVPKPVEVPKLLEVLANVLADADEAAVETRGAA

SEQ ID NO: 42596 - protein, 294 aa, Vigna unguiculata
  misc_feature (266)..(266): Xaa can be any naturally occurring amino acid
  unsure (1)..(294): unsure at all Xaa locations
MEQYEKVEKIGEGTYGVVYKARDRVTDETIALKKIRLEQEDEGVPSTAIREISLLKEMQHRNIVRLQDVVHSEKRLYLVFEYLDLDLKKHMDSSPEFVKDPRQVKMFLYQILCGIAYCHSHRVLHRDLKPQNLLIDRRTNSLKLADFGLARAFGIPVRTFTHEVVTLWYRAPEILLGSRHYSTPVDVWSVGCLFAEMVNRRPLFPGDSEIDELFKIFRILGTPNEETWPGVTALPDFKSTFPKWPPKDLATMVPNLDAAGLNLLSXMLSLDPSKRITARIAVEHEYFKDIKFVP

SEQ ID NO: 42597 - protein, 254 aa, Synechocystis sp. PCC 6803
MEGKNKIIHSPEVSMAPQVDVLINKQILIERALVCVTTRITKAIAERGQGTIALSGGNTPKPLYEALARQALPWEKIHVFWGDERYVSVDHPDSNQRMARLAWLDQVDIPEANIHPMPTAAADPEQDAQTYENELATFFQVEAGHFPAFDLILLGLGDDGHTASLFPHTPALTVGDRLITVGNKDGQPRLTFTIPLINRARSVVFLVAGASKQHALGEIFAPEADPQQYPARFIQPQGELIWLLDQQAGENLRP

SEQ ID NO: 42598 - protein, 482 aa, Escherichia coli
MSRLVVVSNRIAPPDEHAASAGGLAVGILGALKAAGGLWFGWSGETGNEDQPLKKVKKGNITWASFNLSEQDLDEYYNQFSNAVLWPAFHYRLDLVQFQRPAWDGYLRVNALLADKLLPLLQDDDIIWIHDYHLLPFAHELRKRGVNNRIGFFLHIPFPTPEIFNALPTYDTLLEQLCDYDLLGFQTENDRLAFLDCLSNLTRVTTRSAKSHTAWGKAFRTEVYPIGIEPKEIAKQAAGPLPPKLAQLKAELKNVQNIFSVERLDYSKGLPERFLAYEALLEKYPQHHGKIRYTQIAPTSRGDVQAYQDIRHQLENEAGRINGKYGQLGWTPLYYLNQHFDRKLLMKIFRYSDVGLVTPLRDGMNLVAKEYVAAQDPANPGVLVLSQFAGAANELTSALIVNPYDRDEVAAALDRALTMSLAERISRHAEMLDVIVKNDINHWQECFISDLKQIVPRSAESQQRDKVATFPKLALEHHHHHH

SEQ ID NO: 42599 - protein, 453 aa, Novosphingobium aromaticivorans DSM 12444
MPRPEWLRQGRNPPFLSRLEPNGPSDRRNLMRAKPNDVDLRERAAKVIPNGMFGHEATHLLPASFPQFFSRAKGAYIWDVDGNRYLDFMCAYGPNLLGYGDELIDAAATRQLALGDTMTGPGPVLVDLCETLVDMISHADWVMVCKNGTDATTMALTAARAQTGKRRVLVAEGAYHGAAPWCTPMPGGIVPEERAFISKYKYNDVASLEAAVAAAGDDLAAIFASPFKHDAFEDQALPDPAYARRARELCDQTGAMLIVDDVRAGFRLVRDCSWELVGVRPDLSSWGKSFANGHPISALLGSNSCRAGAEAIYATGSFWFSAVPMAAAIETLRILRESDYLERTIRLGERLREGLAAAAARHGFSLRQTGPVQMPQILFNDDPDFRIGFAWAEAMLERGVYVHPWHNMFLNGAMSETDIDFAIEAADGAFAQVREHVGELEPHATLMSLLGAH

SEQ ID NO: 42600 - protein, 196 aa, Hyacinthus orientalis
PTPGSTRCSTRGCATTPTVVTKKILDTYKGFGDLATLVDVGGGVGGTINMIVKKHPHIKGTNFDLPHVISEAELIAGVEHVGGDMFESVPGGDAIFMKWILHDWSDEHCLKLLKNCWRALPDNGKVILMESILPVYPEPTAAAQGVIHVDMIMLAHNPGGKERTEQEFESLAKDAGFAGSKVVCGYANSWVIEFHK

SEQ ID NO: 42601 - protein, 426 aa, Lactobacillus acidophilus NCFM
MAQKEVSHKKAAVLGLQHLLAMYSGAVAVPLLIGTALKFNSQQMTYLVSIDIFMCGFATLIQLFRNKYFGIGLPVVLGCAIQAVAPLEMIGQKFSINTMYGAIIVAGIFVFLIAGWFSKIKKLFPPVVTGTLITVIGLTLIPVAVQNMGGGNAQAKDFGDAKNLIAAFLTIIIIVAIEVWTKGFLRSISVLIGLIAGTVIAGFMGLVSLKPVAEASWFHLPQLFYFGVPEFEWSSCLTMIIIALVSMVESTGVFFAIGDLLHKDITEDDLKKGYRAEGIAQIFGGLFNTFPYTTFSQNVGLLQLSGIKTKRPIYWAAGLLMAMGLLPKIGALVTIIPDSVLGGAMLVMFTMIAVQGIRMLTKVDFDNNRNILVVAISIGLGLGVTVYPQLFQTLPQTIQLFLGNGIVVASISATLLNLLFNGRRDA

SEQ ID NO: 42602 - protein, 250 aa, Arabidopsis thaliana
  misc_feature (13)..(13): Xaa can be any naturally occurring amino acid
  misc_feature (95)..(95): Xaa can be any naturally occurring amino acid
  misc_feature (123)..(123): Xaa can be any naturally occurring amino acid
  unsure (1)..(250): unsure at all Xaa locations
MKKIELGHHSEGXKPDCIKALIVEFITTFLFVFAGVGSAMATDSLVGNTLVGLFAVAVAHAFVVAVMISAGHISGGHLNPAVTLGLLLGGHISVXFRAFLYWIDQLLASSAACFLLSYLTGGXGTPVHTLASGVSYTEGIIWGRGATLTLLITVYATIVDPKKGSLDGFGPLLTGFVVGANILAGGAFSGASMNPARSFGPALVSGNWTDHWVYWVGPLIGGGLAGFIYENVLIDRPHVPVADDEQPLLN

SEQ ID NO: 42603 - protein, 483 aa, Vibrio vulnificus YJ016
MNLNYPELFQQRCYIDGQWVAESGQTQAVTNPSTGKVIGEIPVFGEQQAKECITAAQAAFELWKKTTADYRADVLRRWYELMMVNIDDLAAILTLEQGKPFTEAKGEITYAASFVQWYSEEARRAYGEIIPSHRENGKIVVTKEPIGVVAAITPWNFPAAMITRKAAPAFAAGCSMVLKPAQETPFTALALAKLAEDAGLPKGLFNVITGDSRSIGGVFTSDKRVRKVSFTGSTNVGKILMNKSASTIKKLALELGGNAPFIVFEDADIDAAVEGAMIAKFRNAGQTCVCANRLFVHHAVYDEFAEKLANRVKQLKVGDGFADGVAIGPLINSSSVAKVQEHVDDAVAKGAKVLCGGLLNDEQLFVAPYVLTDMSDDMLVAEEETFGPVAPLFRFKDEAEVLERANDTESGLAGYFYTRSLGRAWRVADALEVGMVGINEGLISTAAAPFGGIKESGLGREGSRHGMDEYMEMKYMLMGGLDS

SEQ ID NO: 42604 - protein, 216 aa, Cytophaga hutchinsonii
MLEYNQIFENNRKWLAEKNRTNSEFFDQLSEGQNPDYLFIGCSDSRVTAEAIMGAKPGEVFVHRNIANLVPNNDNSSASVIEYAVKHLGVKHIVVCGHYLCGGVKAAMQSVDLGILNPWLRNIRDVYRLHKNELNAIADETARYNRLVELNVQEQCINIIKMAVWQKRYLNEGFPEVHGWVFDIHTGKLIDLEIDFNNALKSIREIYDLGTSTENL

SEQ ID NO: 42605 - protein, 106 aa, Coix lacryma-jobi
VETLQLLLQIAGHKDILEADPYLKQGLRLRNPYITTLNVLQAYTLKRIRDPNFKTTPLPPLSKEFADANKPAELVKLNPASDYPPGLEDTLILTMKGIAAGMQNTG

SEQ ID NO: 42606 - protein, 120 aa, Glycine max
MAKSSFKMEHPLERRQAEASRIREKYPDRIPVIVERAEKSDVPEIDKKKYLVPADLTVGQFVYVVRKRIKLSPEKAIFIFVKNILPPTAAMMSAIYEENKDEDGFLYMTYSGENTFGLVF

SEQ ID NO: 42607 - protein, 655 aa, Magnaporthe grisea 70-15
MDARPQRPSRAGALQPSGNENIAPVKQVLHQRHKSAGNLKTIYNPATAFPAGGLNVAPKRAVFGEMNTNAKSAAQDLPSKKASMAPVVSHVGKENSGKPAALQKPAQRSSKSYAMLHQQPSAADTHGAALRKATADVLTKPQVTKKTTFVYQDTTAAQLLPEPNQHMIADHPVILPKPDIIKNPRHYKSQPQLKPNQPVLRRTLSRQFAEVASLISSALAEEAQDPPYEDALEEIADINGSRGVPINILGDYMEEPNIEIISHDAIDDYPLEEHVPAPPTAFESEDGWEEEDGDMDDEQGYTTAHSYRSHGENTTGGLTELLAPKATARVQQELEQAKAIVEESRTIEEIEEEQWDVSMVAEYGEEIFEYMRELETRMTPDPHYMDIQTEIQWSMRSVLIDWVVQVHHRFTLLPETLFLCVNYIDRFLSQKVVSVAKLQLVGATAIFIAAKYEEINCPSVNEIIFMVDNGFSADEILKAERFMLSMLQFELGWPGPMSFLRRISKADDYDLETRTLAKYFLEVTIMDERFVGCPPSFLAAGAHCLSRMILEKGDWAHTYWSGYTWSQLRPLVALLFDCCQYPEKHHQAVFEKYCDRRYKGASTFVQRAIARGWTPPFPIQQPFVLDANCFAETIASCRNFSSMEVGRMMATATQA

SEQ ID NO: 42608 - protein, 486 aa, Streptomyces coelicolor A3(2)
MSGRTPAADRSLETGVAHMHGGRDVANDASTVFDLVILGGGSGGYAAALRGAQLGLDVALIEKNKLGGTCLHNGCIPTKALLHAGEVADQSRESEQFGVKTSFEGVDMAGVHKYKDEVIAGLYKGLQGLVASRKITYIEGEGRLSSPTSVDVNGQRVQGRHVLLATGSVPKTLPGLEIDGNRIISSDHALTLDRVPKSAIVLGGGVIGVEFASAWKSFGSEVTVIEGLKHLVPVEDENSSKLLERAFRKRGIKFNLGTFFQKAEYTQDGVKVTLADGKEFEAEVLLVAIGRGPVSQGLGYEENGVATDRGFVLVDEYMRTNVPTISAVGDLVPTLQLAHVGFAEGILVAERLAGLKTVPVDYDGVPRVTYCHPEVASVGLTEARAKEVYGADKVVSIKFPLGGNGKSRILKTAGEIKLVQVKDGAVVGVHMVGDRMGEQVGEAQLIYNWEALPAEVAQLIHAHPTQNEALGEAHLALAGKPLHMHD

SEQ ID NO: 42609 - protein, 47 aa, Marasmius alliaceus
HWHGFFQRRTAWADGPSFITQCPISPGHSFEYKFDVPDQAGIFWYHS

SEQ ID NO: 42610 - protein, 355 aa, Cucumis sativus
MSPPLLDVGEVEESRSNVTLLASSNSMESVSPNNLEFEERNYMGLSDSSSEDSCMTATKSDGNKPSLNLKATELRLGLPGSESPERDPDNCLRSSSQLDEKPLFPLHPSSDGLYSSPQKTVVSGNKRGFSDAMNEFSEEKYHANIGLKAGSLLENLGSQMGKVKEPTTQKAVQERPQENSESRPSHNETANNNTSTPVSKAQVVGWPPIRSFRKNTLATTSKNNDEVDGKAMAGALFIKVSMDGAPYLRKVDLRNYSAYQELSSALEKMFSCFTIGQYGAHGALGMEKMSESKLKDLLHGSEYVLTYEDKDGDWMLVGDVPWEMFIDSCKRLRIMKSSDAIGLAPRAVEKCRNRS

SEQ ID NO: 42611 - protein, 278 aa, Streptococcus agalactiae NEM316
MIVGEQEARALIKPRPKSSHKGDYGSVLLIGGFYPYGGAIIMAALACVKTGAGLVTVATQSCNIPSLHSQLPEVMAFDSDDYKWLEKSIVQSDVIVIGPGLGVSESSRKILNQTMEKIQSHQSVIIDGSALTLLSEGAFPQTKAKNLVLTPHQKEWERLSGIAVSQQTKENTQTALKSFPKGTILVAKSSHTRIFQDLDEKEIIVGGPYQATGGMGDTLCGMIAGMLAQFKEASPLDKVSVGVYLHSAIAQELSKEAYVVLPTTISDEIPKEMARLSK

SEQ ID NO: 42612 - protein, 403 aa, Colwellia psychrerythraea 34H
MKRVVITGLGIVSSIGNNADEVLASLKAGKSGISHSESFAEQGLRSQVWGKPDIETKDHIDRKAIRFMGDAAGYAYIAMDQAVKDAKLTEDQVSNFRTGIVAGSGGASSENIVASTDTLRNRGIRRVGPYAVPKTMGSTVSACLATPFKIKGVNYSISSACATSAHCIGNAMELIQLGKQDIVFAGGGEEVHWSLAMMFDGMGALSAGRNDTPELASRTYDADRDGFVISGGGGMVVVEELEHALARGAHIYAELVGYGATSDGYDMVAPSGEGAVRCMQQAMQGVEGKLDYLNTHGTSTPVGDVKELGAIQELFGEDSPAISATKAMTGHALGAAGVHEAIYSILMMENNFVAPSINIDNLDEKAQGLDIVTEKRDVELNLVMSNSFGFGGTNATLVMKKYK

SEQ ID NO: 42613 - protein, 432 aa, ASPERGILLUS NIDULANS FGSC A4
MAQTQRVIVSKDIYHGLPTFPEDLNGLTAIVTGANGISGDYMVGLFLLRDLSSSKSTTNRWKKIYALSRRPPNGEWPKHVEHVSMDFLQPPDALAAQLTERRVKADYVFFYAYIQPAPKDGGGIWSAAEELVRVNTKLLHNFLSALAISNTLPKTFLLQLGAKYYGVHLGPAQVPQEETDPRVLLEPNFYYNQEDSLIAFAKSNSFNWITTRPSWIPGAVPDAAMNLCLPLAIYAVVQKHLGKPLEYPSDIVAWETQQTISSAQMNGYLSEWAVLTRDAQNQSFNATDDCAFTWSKFWPKLAARFSLPWLGPATDPAGLQEVETPYNPPPRGIGPPAKLRYKFTLVEWARRPEVKDAWKAIAKEHQLRNAELWDTDRVFGFTDAAISSSYPIHFSTTKTKKLGFFGFVDSTESIFKVFDQFVDMRMIPQIPG

SEQ ID NO: 42614 - protein, 202 aa, Petunia x hybrida
MSNEYDYLFKLLLIGDSSVGKSCLLLRFADDSYVDSYISTIGVDFKIRTVELDGKTIKLQIWDTAGQERFRTITSSYYRGAHGIIIVYDVTEMESFNNVKQWLSEIDRYANESVCKLLVGNKCDLVENKVVDTQTGKALADELGIPFLETSAKDSINVEQAFLTMAGEIKKKMGNQPAGAKKTGSTVQIKGQPIEQKSNCCG

SEQ ID NO: 42615 - protein, 137 aa, Thermus thermophilus HB27
MMRFDPFKELEELQERLVRAFGAPQQGPRVYAPPVDVWEDEEGLHLLVYLPGVEPEKVEVVAEEGVLSVKAERPFERKENAAYHRLEGTYGTFVRSFNVPSTYDLSKVQARFRHGVLHLLVPRAEATKPKKIQVQVE

SEQ ID NO: 42616 - protein, 449 aa, Saccharophagus degradans 2-40
MTFDYDFFVIGAGSGGVRASRIAAGLGAKVAVAEDTFMGGTCVNVGCVPKKLFVYASEFAEHFEAAKGFGWQQVDGSFDWPTLRDNKTKEIERLNGIYERMLGGANVEVIHGRATLLGNNKVGIGDKVVTAKHILIATGGTPKWPTFEGAEHCITSDQIFYLETLPKRVLVQGGGYIAVEFAGILNGLGCATELAYRGPLFLRGFDSEVREFVATQMAEKGVQLSFNTDIESIAKNDDGSLTVRLNNGEVREVDAVLSAIGREPRINGLGLENTQVKTAKNGFIEVDNNFLTADPSIYAVGDVVGRMPLTPVALAEGMALARYLFDNKPIELNYSNIPTAVFCQPNIATVGLTQQQAEEQFGEVLVFKSDFKALKHTLSGLAERTLMKLIVDKTTDKVVGCHMVGPDAAEIMQGIAVAIVAGATKQDFDNTIGIHPSAAEEFVTMRSPV

SEQ ID NO: 42617 - protein, 402 aa, Schizosaccharomyces pombe
MSPKSKSTNKTYTIVIKLGTSSICDEKTHEPLISNLSLIVETVVKLRKLGHNVVLVSSGGIAMGLRRLDLPKRPSKLSAVQAIAAVGQGRLISLWDTLFTQLRQPIAQVLITRNDIAERSQYVNAANTISELLHFGVVPIVNENDTLSVQEIRFGDNDTLSAITAGMINADYLFLLTDVDCLYTDNPRTNPDAKPILKIHDTSMVNANVSTPGSGVGTGGMKTKLIAADLGTSSGVNVIICRGSKPSSIFDIIRQESSDNKNESVELPLHTHFVAKKQGRIRDRHFWLLHGLKSHGSLEIDRGAFEAITRTNRAGLLPVGVTKVHGHFSAHQAVTVIYNGEEIGRALVNYSSTEIDLIKGKRSKEIASILGYNETEYVAYRDYLVVHGLNSHHDSQVSSDEH

SEQ ID NO: 42618 - protein, 455 aa, Clostridium acetobutylicum ATCC 824
MDQTKSKNQNLSRGLKNRHVQLLAIGGAIGTGLFLGSGRSIHLAGPSILFAYMITGAICFLVMRALGELLVSNLNYHSFVDFVQDYLGNGAAFITGWTYWFCWISLAMADVTATGLYVQYWIPSLPRWVPSLVILLILLIMNLTAVRLFGEMEFWFALIKVVAILALIIVGIFMIIKGFSTSAGAASFTNLWKHGGWFPNGSNGFILSFQMVVFAFTGIELVGLTAGETEDPEHVIPKAINNIPVRIIIFYIGALAVIMSIYPWNSINPDKSPFVQVFAAVGVAAAATIVNFVVLTSAASACNSGIFSTSRMVFSLANENNAPESMKKLTSHKIPSNATIFSAAVILIAVILNYIMPEGVFVLITSISTFCFIFIWAIIVICHIKYRKANPELASKNNFKMPLYPIANYIILAFFAFVIVTLALNSETRVALFVTPVWFIVLGIIYFISKSKKKN

SEQ ID NO: 42619 - protein, 359 aa, Schizosaccharomyces pombe
MRLPLLSFVIFALFALVFASGVVELQSLNELENTIRASKKGALIEFYATWCGHCKSLAPVYEELGALFEDHNDVLIGKIDADTHSDVADKYHITGFPTLIWFPPDGSEPVQYSNARDVDSLTQFVSEKTGIKKRKIVLPSNVVELDSLNFDKVVMDDKKDVLVEFYADWCGYCKRLAPTYETLGKVFKNEPNVEIVKINADVFADIGRLHEVASFPTIKFFPKDDKDKPELYEGDRSLESLIEYINKKSGTQRSPDGTLLSTAGRIPTFDEFAAEFLDMSNAAKEVVLEKVKQLALEDSSRWTKYYKKVFEKILNDENWVHKEAKRLSKLLRQKSIALASADDFKTRLNILNSFLPGNH

SEQ ID NO: 42620 - protein, 995 aa, Synechococcus sp. PCC 7002
MNQVMHPPSAEAELLSTSQSLLRQRLTLVEDIWQAVLQKECGQKLVERLNHLRATRTADGQSLNFSPSSISELIETLDLEDAIRAARAFALYFQLINSVEQHYEQREQQQFRRNLASANASEANGNSVHTEIAPTQAGTFDWLFPHLKHQNMPPQTIQRLLNQLDIRLVFTAHPTEIVRHTIRNKQRRIAGILRQLDQTEEGLKSLGTSDSWEIENIQQQLTEEIRLWWRTDELHQFKPQVLDEVDYALHYFEEVLFDTLPELSVRLQQALKASFPTLKVPTTNFCNFGSWVGGDRDGNPSVTPDVTWKTACYQRGLVLERYIASVESLSDVLSLSLHWSNVLPDLLHSSYQDQNIFPDVYQSLASRHRQEPYRLKSAYIKRRLENTLERNRRLANMPAWENKVEAADDKVYICGQEFLADLKLIRESLVQTEINCAALDKLICQVEIFSFVLTRLDFRQESTRHSDAIAEIVDYLSIAQILQRPKRRRKNHLGLVQELKTRRPLIPKEMHFSERTVETIQTLQVLRRLQQEFGIGICQTYIISMTNEVSDVLEVLLLAQEAGLYDPLTGMTTIRIAPLFETVDDLRNAPEIMQALFEIPLYRACLAGGYEPPADGRCDETFGDRLVPNLQEIMLGYSDSNKDSGFLSSNWEIHKAQKNLQQVADPYGIDLRIFHGRGGSVGRGGGPAYAAILAQPPNTINGRIKITEQGEVLASKYSLPDLALYHLESVSTAVIQSSLLASGFDDIQPWNRIMEDLSQRSRAAYRALIYEEPDFLDFFMSVTPIPEISQLQISSRPARRKKGNKDLSSLRAIPWVFSWTQSRFLVPAWYGVGTALQGFFEEDPVENLKLMRYFYSKWPFFRMVISKVEMTLSKVDLQMASHYVHELAEKEDIPRFEKLLEQISQEYNLTKRLILEITENEALLDGDRPLQRSVQLRNGTIVPLGFLQVSLLKRLRQYTRETQASIVHFRYSKEELLRGALLTINGIAAGMRNTG

SEQ ID NO: 42621 - protein, 472 aa, Triticum aestivum
MAFFRGLAAVSRLRSRMGQDATTLGGVRWLQMQSASDLDLRSQLQEMIPEQQDRLKKLKSEHGKVQLGNITVDMVLGGMRGMTGMLWETSLLDPEEGIRFRGLSIPECQKVLPAAVKDGEPLPEGLLWLLLTGKVPTKEQVDALSKELLSRSTVPGYVYKAIDALPVTAHPMTQFTTGVMALQVESEFQKAYDKGMPKTKFWEPTYEDCLNLISRLPQVASYVYRRIFKDGKAIAADNTLDYAANFSHMLGFDDPKMLELMRLYITIHTDHEGGNVSAHTGHLVGSALSDPYLSFAAALNGLAGPLHGLANQEVLLWIKSVMEETGSNITTDQLKEYVWKTLKSGKVVPGYGHGVLRNTDPRYSCQREFALKYLPEDPLFQLVSKLYEVVPPILTELGKVKNPWPNVDAHSGVLLNHFGLTEARYYTVLFGVSRSIGIGSQLIWDRALGLPLERPKSVTMEWLENHCKKAAA

SEQ ID NO: 42622 - protein, 412 aa, Bacillus licheniformis ATCC 14580
MNSKRVVITGLGALSPLGNDVKTSWNNAINGVSGVGPITRVNADEYPAKVAAELKDFKIEDYMDKKEARKMDRFTQYAVVSAKMAVEDAGLDINESNADRIGVWVGSGIGGLETLEQQFETFLTKGPRRVSPFFVPMMIPDMATGQISISLGAKGVNSCTVTACATGTNSIGDAFKVIQRGDADVMISGGTEAPLTRMSFAGFSANKALSTNPDPKTASRPFDKNRDGFVMGEGAGIVVLEELEHALNRGATIYAEVVGYGSTGDAYHITAPAPNGEGGVRAMKEAIKDAGLSPVDIDYINAHGTSTPYNDKFETIAIKEVFGEHAYKLAVSSTKSMTGHLLGAAGGIEAIFSVLAIKEGIIPPTINIETPDEDCDLDYVPDQARRQDVNVVLSNSLGFGGHNATLIFKKYE

SEQ ID NO: 42623 - protein, 591 aa, ASPERGILLUS NIDULANS FGSC A4
MSYAHVKPPSEIHRAWWKESSVYQIWPASFKDSNDDGIGDIPGIISKLDYIRDLGVDIVWLCPSYKSPQVDMGYDIADYYSIADEYGTVADVEKLIKGCHDRGMKLLMDLVVNHTSDKHEWFKKSRSSKDNEFRDWYVWKPPRYDENGNRQPPNNWVSHFQGSAWEFDEATGEYYLHLYAVEQPDLNWENPAVRKAVHDIVRFWLDKGADGFRMDVINFISKDQAFPDAPEQDKDAVWQWGDKYYANGPRLHEYLQGIGKILKEYDTFSVGEMPFVKDTNEVLKAVRYDRNEINMIFNFEHVDIDHGPWGNKFKPGGWKLTDLKAFFERWQVFMYDNGGWNALYWENHDQPRSIDRYVNPPQALRPAAGKMLATILALHAGSPFIYQGQEIGMGNVPIEWGMEEYKDIDCLNHWKGLLETRPTDTEVQKIARQEYRKKSRDNARTPVQWSSEPNAGFTGPNVKPWMSVNPEYTRVNAADQVKDPNSLYHYWASVLHLRKTYLDIFVYGNYELVDRDSQEVYAYTRACHTSKALVLANWTDRGLTWNAAAHKADQFEQVLLDTYESANAAQGRFSGGQWTLRPYEAVVILLK

SEQ ID NO: 42624 - protein, 220 aa, Hyacinthus orientalis
ADLNIAIGTHHEVSHPGALKAALAEFISTLIFVFAGQGSGIAFSKLSGGGPATPAGLISAALSHAFALFVAVSVGANISGGHVNPAVTFGAFLGGNITLFRGLLYWVAQLLGSTAACLLLRFSTGEETGSFGLSGVSVWNALVLEIVMTFGLVYTVYATAIDPKKGSLGTIAPIAIGFIVGANILAGGAFDGASMNPAVSFGPPLVSWEWPNHWVYWAGP

SEQ ID NO: 42625 - protein, 295 aa, Bacteroides thetaiotaomicron VPI-5482
MNNIIVGMGEALWDVLPEGKKIGGAPANFAYHVSQFGFDSRVVSAVGNDELGDEIMEVFKEKQLKNQIERVDYPTGTVQVTLDDEGVPCYEIKEGVAWDNIPFTDELKRLALNTRAVCFGSLAQRNEVSRATINRFLDTMPDIDGQLKIFDINLRQDFYTKEVLRESFKRCNILKINDEELVTISRMFGYPGIDLQDKCWILLAKYNLKMLILTCGINGSYVFTPGVVSFQETPKVPVADTVGAGDSFTAAFCASILNGKSVPEAHKLAVEVSAYVCTQSGAMPELPVILKDRLL

SEQ ID NO: 42626 - protein, 652 aa, Methanosarcina mazei Go1
MIPFIHLLFLTNQKFTITLYPPINIKRTYKMDKYEKVFELAKRRGFLWNSFELYGGSRGFYDYGPLGSTLKRRIEQIWREFYVIQEGHMEIECPTIGIEDVFVASGHVGGFSDPLCECKKCGEAFRADHLVENVMDAAGTLSAEQLTEVIKEKGITCPECGGELNDAYEFNLMFKTTIGPGTGRQGYLRPETAQGMFVDFQRLSRFYRDKLPFGAVQIGKSYRNEIAPRQGVIRLREFTQAECELFVDPRNKKHSNFERFAEKELVLYSQAAQQTGEPIRMTVREAVETGVIAHEVLGYNIALTNEFLTKVGIEPAKLRFRQHLKDEMAHYAIDCWDAEIETDRFGWVEIVGIADRTDYDLKAHARVSKTDLYVYVEYDEPKMVTRFVVKPNMGKLGPLFKGKAKAVADALKQLSEEELSKDQITVTVDGEELSVSSDVVDFAEETVKVSGENVIPHVIEPSYGIDRIFYGTMEHAFDEENVAKKAAESGLKGAEEAEGAEKTEGAEKAEKAEKGPEATKDETEGEGEEETRLVMHFSSSVAPVQVAVLPLLTRKELADPAKEIVAKLREKNLLVNYDDSGTIGRRYRRNDEIGTPYSVTVDYDTLQDGTVTIRDRDSMRQIRAPISGIENVLYELIYRGRNFESAGKPFNF

SEQ ID NO: 42627 - protein, 458 aa, Ehrlichia canis str. Jake
MTAKVLIVDDLPANIKLLQAKLMSEYYNVLTATNGMDAIKIAEEKHPDIILLDVMMPEMDGYETCKRLKSNPATTYIPIVMVTALDNTSDNRVSGLSYGADDFLTKPINDTALFARIRSLTRFKMVIDELRLRGKTNADMSVLNNNMMDYANKIDNASILIVDEDVIRSEHINNILQKSFQQTVVSHDIDQALNLSNIQNYDLIITDLEFSGDGLRLCSQLRNKIETRYTPILVLLDENEDPKLLSKAFDIGIHDYITTPVDSNELIARVNVQVKRKRYQDALRINVDTSMTMAITDPLTGCYNRRYFDMHFHNIINESLQKEKNLSLMILDIDHFKEVNDTFGHTVGDELLQQFKKRVSDNIRITDLLARFGGEEFVVILPDTTISTAEQIARRILTVIKDTPFKTSIGDINKTVSIGVVEVQKSDVDNIKQLIDRADKCLYEAKNTGRNKVVIYLQ

SEQ ID NO: 42628 - protein, 558 aa, Picrophilus torridus DSM 9790
MLDNNGLWYRDAVFYEVPVKSFYDSNNDGIGDFNGLTMKLDYLKKLGVDALWLLPFYKSPLKDDGYDISDYYSILPEYGTIDDFKNFIDTAHSMNIRVIADLVLNHVSDQHPWFIESRSSIDNPKRDWFIWSDTPEKFKEARIIFIDTEKSNWTYDPETKQYYFHRFYSSQPDLNYDNPDVRNEVKKVIRYWLDLGLDGFRADAVPYLFKRENTNCENLPETHNFFKEIRKMMDEDYPGTILLAEANQWPTETKAYFGNGDEFHMAFNFPLMPRIFIALARSDYYPIMDIIKQTLPIPDNCDWCIFLRNHDELTLEMVTDSERDIMYREYAKIPKMRLNLGIRRRLAPLADNDINTIELLNALIFSLPGTPIIYYGDEIGMGDNIYLGDRNGVRTPMQWSYDRNAGFSMADSEQLYSPVITNPNYHYESVNVEAELRLSSSLLNWMIKIIHVRKDYKELLGRGSIKFIEQGNKRVLSYIREYENQRMLCLFNLSRNPTYVELNLSDYIGLKPIEAITKAAFPRIKDDRYFITMTPRSFFWFNLIVPERDDSYDLIGED

SEQ ID NO: 42629 - protein, 302 aa, Pinus pinaster
MERFANDVDEHSLKETELRLGLPGVCESDTGPGQTRNGKRGFSEVMDSTKASSFNDNKWIFPSVKCQPATSAITETAEACKGSQPGLFSATPSQKIMMQGGCGAPQSWAGDNGLSRSTAPKDELHPKTPRDGPTEKTNGASQSQAATDPAMAPAPKAQVVGWPPIRSFRKNTLAANSKPNDEGSSSNALYVKVSMDGAPYLRKVDLKMYSTYHELSSALEKMFSCFNMGQCGAPGLSESKLIDLLNGSEYVPTYEDKDGDWMLVGDVPWEMFVDSCKRLRITKASEAIGLAPRAMEKSRSKN

SEQ ID NO: 42630 - protein, 405 aa, Vibrio parahaemolyticus RIMD 2210633
MAGVLGMILAGGEGSRLRPLTESRSKPSVPFGGSYRLIDFALNNFVNADLMRIYVLTQFKSQSLFHHLKKGWNINGITDRFIDPIPAQMRTGKRWYEGTADAIYQNLRFMELEEPDQVCIFGSDHIYKMDIKQMLNFHTEKKASLTVSALRMPLKEASQFGVIEVDAEGRMIGFEEKPANPKSIPGEPDFALVSMGNYVFEAQVLFSELVEDADNEASSHDFGKDIIPKMFPRGDVFVYDFSTNRISGEKEEVYWRDVGTIDAYWQAHMDLLEKDAPFSLYNRKWPLHTYYPPLPPATFTDSDNGRVQIIDSLVCNGSYVRGSRIEKSVLGFRSNIASACDISECILLGDVKIGEGCVLRRVIVDKDADIAPGTQIGVNLQEDKKHFHVSEEGIVVIPKGARVGY

SEQ ID NO: 42631 - protein, 404 aa, Arabidopsis thaliana
MNPKGRTNLNRSIIGGHDHGSILQLLLFLLLLSSHGGFKFVAGQATHGGSDVSGDSSRFDPTMAILMIVLVSVFFFLGFFSVYIRRCLERVMGMDYGNPNDAGNWLATNRQQARGLDASIIETFPTFQYSTVKTLRIGKEALECSVCLNEFEDDETLRLIPKCCHVFHPGCIDAWLRSHTTCPLCRADLIPVPGESIVSIQIPGLVNDPPGSDPNGDRIRSLGSPDARLIESVALTCNQSMPRRSMSTGWNLAGMFTNSDRTGQHSENLDRFTLRLPQDIHNKLVNPNLSKVHVALPQVMSSTRGYRTGSLGSERNYFYYERFGQDGRLDRRPFSITPPYRTSSINHMSPGGSGGDKVRASSPKSLLLAMRSPFDRLFLGKNNNVGENSSDHLRSCDATPSNTV

SEQ ID NO: 42632 - protein, 496 aa, GIBBERELLA ZEAE PH-1
MVLSQKQGRRETLTVVDNRTNQSYEIPITHNSIPATEFKKIKAEAGNDRPEDETNQGLRVYDPAYMNTAVVQSKITYINGLDGVLRYRGYPIEQLVEKSDFLESAYLLIYGELPTKSEYDLWHGEVMHHTYIHSDIENMFKSFRYDSHPMSMLTAAFATLGAFAPEANPSLAGQKLYTNAASGNLEALQMLDKQILRILGKAPTLAAASYRMRQGRPFNRPAQDLGYTGNFLYLLDHLSETDYKPHPVLARALDKLFIIHADHEVNCSTATVMQVGSSLVDPYSVVAAGCAALYGPSHGGASESAIRMLIEIGSPENVPAFMQAVEKRERVLVGFGHRVYKNVDPRSTAIRKLAEEVFEVTGRNKLLDTALTLADYARKSEFMRSRNLYPNVDFYSGLIYQAMGFPLDFYPVLFAVPRCVGWLAHWRQMMLNSAGVKIWRPRQLYIGEGEREYVEAKDRKAKADATVFDAPVKVGHGGNSQRTLLATSSKELKTIQ

SEQ ID NO: 42633 - protein, 220 aa, Zea mays
GYPSEAGHEEYIVRGGRDLFPLLPEAFKGIKQIGVIGWGSQIGLRKGSKSFEEARAAGFTEESGTLGDIWETVSNSDLVLLLISDSAQADNYEKIFSHMKPNSILGLSHGFLLGHLQSLGFDFPKSISVIAVCPKGMGPSVRRLYVQGKEINGAGINASFAVHQDVDGRATDVALGWSVALGSPFTFATTLEQEYRSDIFGERGILLGAVHGMVEALFRR

SEQ ID NO: 42634 - protein, 236 aa, Enterococcus faecalis V583
MFHHILSEFMGTALMIVFGVGVHCDDVLKRTKYAGSGHMFAITTWAFGISVVLFVFGGVCINPAMALAQAILGMIPWSYFIPYVIAEMLGGICGAVIVYIMYADHFKLSADSVDPIAIRNIFSTNPNQRNLPRNYFVETFATFIFLTSILAIAHSYETQLPIAVGLLVWAIGMGLGGTTGFAMNQARDLGPRIAYQLLPIKNKTNNDWQYGLIVPGTAPFLGAIFATLFVKFFLKF

SEQ ID NO: 42635 - protein, 362 aa, Bacillus coagulans
DPEGNSYMDMLSAYSAVNQGHRHPKIIEALKNQADKVTLTSRAFHNELLGPWTKRMAKLTKKDKVLPMNTGVEAVETAIKAARRWAYQVKGVTENQAEIIAADGNFHGRTLNAISLSNDPDATKNYGPFVPGINKVSYGDINAIEKAITENTAAIILEPIQGEAGIIIPPEGYLKKVRELCSERNILFIADEVQTGFARTGKMFACEWENVEPDIYVMGKALGGGVFPISAIAANNEIMDVFTPGSHGSTFGGNPLACAVSMAAIDVIEEENLVNKSLESGKYFADKLRAINFEGIKEVRARGLFIGMEFHQPVRAICEKLKDKGILCKETHVNTIRFAPPLLITKNEMDWAIQRIEEVLTN

SEQ ID NO: 42636 - protein, 520 aa, Zea mays
SDLSPWISTSAWLLRSASLAMASSTGSLEHGGFTFTPPPFITSFTELLSGAAADMVGAAGADHQERSPRGLFHRGATRGGGVGVPKFKSAQPPSLPISPPPMSPSSYFSIPPGLSPAELLDSPVLLHSSSNFFASPTTGAIPAQRFDWKQAADLIASQSQQDDSRAAVGSAFNDFSFHAPTMPAQTTSFPSFKEQQQQQVEAATKSAVPSSNKASGGSGGSTKLEDGYNWRKYGQKQVKGSENPRSYYKCTYHSCSMKKKVERSLADGRVTQIVYKGAHNHPKPLSTRRNSSGGVAAAEEQAANNSSLSGCGGPEHSGGATAENSSVTFGDDEAENGSQRSGGDEPDAKRWKAEDGENEGSSGAGGGKPVREPRLVVQTLSDIDILDDGFRWRKYGQKVVKGNPNPRSYYKCTTAGCPVRKHVERACHDARAVITTYEGKHNHDVPVGRGAASRAAAAAAAAGSGALMATGGGQLGYHHQQQQQPYTLEMLSSGSYGGGGGYAAAKDEPRDDLFVDSLLC

SEQ ID NO: 42637 - protein, 303 aa, Caulobacter crescentus CB15
MTVFVLGSINLDAVARVDDLPRPGETVAGLSLELFLGGKGANQAVAAARMGVATRLMGAVGGDDSGAGLKAKLAGYGVQVGDVVELPGVPTGQAHVWVANSAENMIVVTAGANAMVTPQQVAATTIEGQRVLLCQLETPATAIETLFRAGSAKGALRILNAAPALPQGAALFPLTDILIVNQTELATYAKLDREPVKLEEVSVAARKLMSRPDQTIIVTLGAAGAAVVRRDEAFLVEGKKVKAVDTVGAGDCFCGALAATLAAGMDLAEAVETANAAAALSVQKAGAAPSMPNRREVEAFLEG

SEQ ID NO: 42638 - protein, 128 aa, Triticum aestivum
  misc_feature (37)..(37): Xaa can be any naturally occurring amino acid
  misc_feature (60)..(60): Xaa can be any naturally occurring amino acid
  unsure (1)..(128): unsure at all Xaa locations
IDQFDRVGGKALIHCCRRTRHQRRVQNLRYSMLTKGXLSLAKACTLLKSVHPPAKPYDGXAKALITLSKKLNGKASMDCQQKRPQMNVCPICGKIVGLSTSSLKLHLQKAHRRLSHCRMYSAMTMEIQ

SEQ ID NO: 42639 - protein, 471 aa, Polaromonas sp. JS666
MTNRRNFLTGAGALTSAVAAAAVSRVAMAALPEPVLQTKPDTMPPLVPATGRPYNPVVTLNGWTLPWRMNNGVKEFHLVAEPVVREMSPGFKAHLWGYNGQSPGPTIEVVEGDRVRIFVTNKLPEHTSIHWHGQRLPNGMDGVAGLTQPAIPVGKTFVYEFVARRPGTFMYHPHADEMTQMAMGMMGFWITHPKAKHPLIDEVNRDFVFLLNAYDIDPGAYTPKIMTMLDFNLWSWNSRVFPGIDPLVVRKNDKVRIRIGNLTMTNHPMHLHGHEFLVTGTDGGPTPKSTRWPEVTTDVAVGQMRQIEFLADEEGDWAFHCHKSHHTMNAMGHDVPTLIGVDHRKVVKDITNVIPDYMVMGERGMADMAEMEMPLPDNTERMMTGAGPFGSVEMGGMFSMVKVRKDQKPGDYKDPGWYKHPVGEVAYEWTGSLPNPARFAAEGGQSMKAQNMPLKEVEVQVRKPSMGNMKH

SEQ ID NO: 42640 - protein, 576 aa, Neurospora crassa
MPGTSRMPVSLRQSIDSVKRSRPRNPMQVLNLNVDLIRNIVFFLFLLRWTRRALWKLKGRGLFGTLFELFTDARRILYGYFLRLPGVRTKVRAQIDDALTKMQAKMIPAGQTRYLSLPKEGWTEEAVRKELEALATMDHTRWEDGYVSGAVYSGEDELLKLQTEAYGKFTVANPIHPDVFPGVRKMEAEVVAMVLSLFNAPPGAAGVSTSGGTESILMAILSARQKAYHERGVTEPEMIIPETAHTAFRKAAEYFNIKLHLVACPAPTYQVDTKRVARLINRNTIMLVGSAPNFPHGIIDDISALSKLALRKKIPLHVDCCLGSFLVPFLDKAGFDSQPFDFRLKGVTSISCDTHKYGFAPKGNSTVLYRTAELRSYQYFVDPSWSGGVYASPGIAGSRPGALIAACWASLMSVGEEGYLKSCTQIVGATKKLAEHIRSHPTLQQELEILGNPLVSVLAFQARGDLNIYDIADGMSSRGWHLNALQNPPAIHVAVTAPVAKNWERLAQDLEGVVEEEREKERVRQVEALKMGISGKTGKQKAAGDTAALYGVAGSLPNKSVVVDLARGFLDLLYKA

SEQ ID NO: 42641 - protein, 203 aa, Burkholderia fungorum LB400
MKLYYHPLSGHSHRAHLFLSLLGVEHELVEVDLMKAEHKSAEFLALNRFGQVPVLVDGDTVVADSNAILVYLARKLNRTDWLPQTPAGEAAVQRWLSVAAGEIACGPAAARLITVFGAARNAEEVIGRAHATLRVIDQELAGREFIVGAHPSIADVALYSYIARAPEGNVDLSGYPNVNDWLRRIEALPGFVEFRKTPVGLAA

SEQ ID NO: 42642 - protein, 260 aa, Vibrio vulnificus YJ016
MAFPMQKPNRYGLLRTMINHKIYQTAEQVVESLANDMKAFSEMGRPVHISLSGGSTPKMLFKLLASETYATSIQWQNLHFWWGDERCVAPDDAESNYGEANALLFSKLRELSQVSIPAENIHRIRGEEQPEVEAARFAKEMADVIPTDNGTPVFDWILLGVGADGHTASLFPGQTNYDDENLSVLASHPESGQIRVSKTARVLEAAKRISYLVLGAGKADIVEEINSNPAEELPYPAAKIHAKAGLTEWYLDLDAAAKIA

SEQ ID NO: 42643 - protein, 215 aa, Saccharophagus degradans 2-40
MSLFYAKPEKAKMPTEKTALKGRNVPIETAAEHFVSGMPLAPPYPSNMQQCVFGLGCFWGAERKFWQLPGVYVTAVGYSAGFTPNPTYEEVCSGSTGHNEVVLVVYNPSQVSFKKLLAVFWESHNPTQGMRQGNDLGTQYRSGVYVYSDEQAEQAEHSKQVVQAMLTEKGYGEITTEIIKAKEFYFAEAYHQQYLAKNPNGYCGLGGTGIVVPCD

SEQ ID NO: 42644 - protein, 296 aa, Bacteroides fragilis NCTC 9343
MNSIIVGMGEALWDVLPEGKKIGGAPANFAYHVSQFGFDSRVVSAVGNDELGDEILEIFREKQLKHQLERVNYPTGTVQVTLDNGGVPCYDIKEGVAWDNIPFTDDLKRLALSTRAVCFGSLAQRDEVSRATINRFLDTMPDMEGQLKIFDINLRQNFYTKEVLRESFRKCNVLKINDEELIIISRMFGYPGIDLQDKCWILLAKYNLKMLILTCGTNGSYVFTPGTVSFQETPKVPVADTVGAGDSFTAAFCSSVLKGKSIPEAHRLAVEVSAYVCTQSGAMPVLPEALRNRLND

SEQ ID NO: 42645 - protein, 259 aa, Zea mays
MLNMMTDLSCGPSSKVKEQVAAAPTGSGDRQGQGRGKIEIKRIENTTNRQVTFCKRRNGLLKKAYELSVLCDAEVALVVFSSRGRLYEYANNSVKSTIERYKKANSDSSNSGTVAEVNAQYYQQESSKLRQMIHSLQNANTRNIVGDSIHTMGLRDLKQMEGKLEKAIIKIRARKNELLYAEVDYMQKREMDLQTDNMYLRSKIAESNETGQPAMHMTMGAPPTSEYDHMAPFDSRNFLQVSMPQHYSHQLQPTTLQLG

SEQ ID NO: 42646 - protein, 741 aa, Spinacia oleracea
MAASSSLSTLSHHQTLLSHPKTHLPTTPASSLLVPTTSSKVNGVLLKSTSSSRRLRVGSASAVVRAAAVEALESTDIDQLVEKSVNTIRFLAIDAVEKANSGHPGLPMGCAPMGHILYDEIMRYNPKNPYWFNRDRFVLSAGHGCMLQYALLHLAGYDSVLEEDLKTFRQWGSRIPGHPENFETPGVEVTTGPLGQGIANAVGLALAEKHLAARFNKPDAEIVDHYTYVILGDGCQMEGIAQEACSLAGHWGLGKLIAFYDDNHISIDGDTAIAFTESVDLRFEALGWHVIWVKNGNTGYDEIRAAIKEAKTVTDKPTLIKVTTTIGFGSPNKSNSYSVHGSALGSKEVEATRQNLGWPYEPFHVPEEVKKHWSRHTPEGASLEAEWNTKFAEYEKKYPEDATEFKSITTGEFPAGWEKALPTYTPETPGDATRNLSQQCLNALAKVIPGLLGGSADLASSNMTLLKMFGDFRRTHRKKETFRFGVREHGMGAICNGICLHSPGFVPYCATFFVFTDYMRGAMRISALSEAGVIYVMTHDSIGLGEDGPTHQPIEALSKFPAMPNILMLRPADGNETAGSYKVAVENRKTPSILALSRKKLPNLPGTSIEGVEKGGYTITDNSSGNKPDVILIGTGSELEIAAKAGDELRKEGKAVRVVSFVSWELFEKQSDEYKESVLPSDVTARVSIEAGSTFGWHKIVGSKGKAIGIDKFGASAPAGKIYQEYGITVEAVVEAAKSVC

SEQ ID NO: 42647 - protein, 215 aa, Hyacinthus orientalis
DGLRGKQFSKHNYKAADALVQQISVLAASQGGAMRKVAGFFAEALALRIYRPHPQQDCSLDSAFSDILQMHFYESCPYLKFAHFTANQAILEAFEGCRRVHVIDFGMKQGMQWPALMQALALRPGGPPLFRLTGIGPPQPDNTDALQQVGWKLAQLADQIHVEFEYRGFVANSLADLEPYLLESAPNPRNGPHEIEAVAANSIFELHTLLAREGA

SEQ ID NO: 42648 - protein, 406 aa, Candidatus Blochmannia floridanus
MFKSMIMAPPDPILGLSKIYHSDTKKNKINLGIGVYIEKFHAAPILESVKQAEDLLLKKEISKNYLAIEGSNDFNNANQTLLFGPNDSIISKNRIRTVQAPGGTGALRIAAECIAKYDNTINKKRRIWISEPSWVNHKNIFFAAGLEVCTYPYYQKSTHSIEFDKLIDTFNNIVKPGDIVLLHGCCHNPTGMDPTIEQWKMLSECAEKNRWIPLFDLAYQGFDNGLQEDLIGLHMFCKNNPELIVCNSYSKNFGLYNERVGACTIITENNNHADCVLSQLRATIRAIYSNPPAHGAAIVSTILQNKTLRFIWEKELKNMRDHIKNMRKLLFNTLNKYKNSKVINQDFSFINNQKGMFAYIGLNSNQVIKLREELGIYLVDSGRLNLAGLSHKNIDYICNAICNLYI

SEQ ID NO: 42649 - protein, 402 aa, Streptococcus mutans UA159
MNNTKSHPFLKWFIPFLVIFLTFILGVISTLTFNWITGNKSFSNNGKTTVSNVIYDTKSNTTKAVKNVKNTVVSVINYQKTDNSYYNYDSGSQEKNKSEDGLGVYGEGSGVIYKKDGDSAYLVTNNHVVKDAEKLEIMMANGKKVVGKLVGSDTYSDLAVIKISSKYVTTVAEFANSDKIKVGEPAIAIGSPLGSDYANSVTEGIVSSLSRTVTSQNENGETISTNAIQTDAAINPGNSGGALINIKGQVIGINSSKIASSNNSNSGVAVEGMGFAIPSNDVVSIINQLEENGEVVRPALGISMANLSEASTSGRDTLKIPSDVTSGIVVLSTQSGMPADGKLKKYDVITEIDGKKVASISDLQSILYKHKKGDKIKLTFYREKDKQTVEIQLTKTSQDLNH

SEQ ID NO: 42650 - protein, 511 aa, Schizosaccharomyces pombe
MLNSVIKRSALCRFKFTCLQVSECRPAQIEISKRLYSAKASGNGEYDLCVIGGGPGGYVAAIRGAQLGLKTICVEKRGTLGGTCLNVGCIPSKALLNNSHIYHTVKHDTKRRGIDVSGVSVNLSQMMKAKDDSVKSLTSGIEYLFKKNKVEYAKGTGSFIDPQTLSVKGIDGAADQTIKAKNFIIATGSEVKPFPGVTIDEKKIVSSTGALSLSEVPKKMTVLGGGIIGLEMGSVWSRLGAEVTVVEFLPAVGGPMDADISKALSRIISKQGIKFKTSTKLLSAKVNGDSVEVEIENMKNNKRETYQTDVLLVAIGRVPYTEGLGLDKLGISMDKSNRVIMDSEYRTNIPHIRVIGDATLGPMLAHKAEDEGIAAVEYIAKGQGHVNYNCIPAVMYTHPEVAWVGITEQKAKESGIKYRIGTFPFSANSRAKTNMDADGLVKVIVDAETDRLLGVHMIGPMAGELIGEATLALEYGASAEDVARVCHAHPTLSEATKEAMMAAWCGKSIHF

SEQ ID NO: 42651 - protein, 498 aa, Schizosaccharomyces pombe
MSTSSKLSTNIKDLSLFDLEEFPARSYIGGKWVTAASGKTFDVENPGLNETLAPVTDMSVEETRKAIKVAHEAFLSYRNSDIKERYAILRRWYDLIMENADDLATMMTLENGKALGDAKGEVVYAAKFIDWFAGEALRISGDSSMSSNPQNRIITIKQPVGVVGIITPWNFPAAMITRKVGAALAAGCTVVIRPAAETPFTALALAKLAERAGVPAGVLNMVTANSPSEHGIELTTNPLIRKVSFTGSTNVGKILAKQSSSTLKKLSLELGGNAPFIVFEDADLEKAADALMACKFRGSGQTCVCANRIYVHSSVYDAFVDLVTERVSKFKLGYGLDAGVTHGPLISEKAISKVKQHVEDAVQKGGVVVTGGKVASNLGPMYFEPTVIINAKQGMLISEEETFGPVGALFKFDTEDEVVAWANDSPVGLAGYLFSKDISRVFRVGEALQVGMVGCNTGLVSDVLSPFGGVKESGFGREGSKYGISEYLDIKSLTISTL

SEQ ID NO: 42652 - protein, 622 aa, Ehrlichia canis str. Jake
MKDLQTDKELLKTLVSKGLKQGFVTFNDINDVFSDYVLSADNIDETISMLQDSGINVLEQSDEDEANSIVEENRIKEDLDEDDVSDGGIKSWDFGQTDDPIRMYLCEMSSVELLSREGEIEIAKKIKSEKVNMLRSLVESPVVLRTFMSWRDDLVNEQIMLRDLIDLDANYRYEFPEKFADADEASVLDYDKDLIDESDEDTDISEDDDEENVSINASILEMENALLPKVVSILDSVIASAEKILELKKQYQGKINQDIEKQYNDLHDSIWEMIYQIKLSNSAVLSITQQIYSLSKSIAAEEAKIISLAESYGIQRKDFLDAYNTNSVLQKKGTSPQWNNLLANEESNIVSMYSKIKLLSGENNLTEFKALVTKIQKHERAANQAKQEMIKANLRLVVSIAKKYSNRGLQFLDLVQEGNIGLMKAVDKFDYKRGYKFSTYATWWVRQAITRAIADQARTIRIPVHMIETVNKINRTLRQMLHEMGREPTLEELSAKLNINVDKIRKVMKIVKDPVSLESPIGDDDSSTFGDCIEDKRAVKPEDAAVLADLREITTKVLSTLTPKEERILRMRFGIGKGGKDHTLEEVGKLFNVTRERIRQIEAKALRKLRHPSRARKLRGFF

SEQ ID NO: 42653 - protein, 476 aa, Lactobacillus sakei subsp. sakei 23K
MAENEMKRELKTRHLSMIALGGSIGTGLFVTSGSAIAKAGPGGALLAYCGIGIMVFFLMTSLGEMATYLPVSGSFSTYATRFVDPALGFALGWNYWFNWAITLAVDVSTAALVMQFWLPDMPGWIFSLVALLLIFLINITSVKSFGETEYWFALIKVITVIIFLGVGVLTIFGIMGGHRTGLSNFTIKKAPFVGGLPMMLSVFVVAGFSFQGTELIGITAGESKTPEKSIPKAIKQVFWRILLFYILSIFVIACLIPYTSPSLLGASETNIAVSPFTLVFKRAGLASAASIMNAVILTSVLSAANSGMYASSRMLWSMAEDGYAAKIFAKTNKRGIPVMALIGTTIIGALTFMTSVFGTRIYLFLVAASGLTGFIAWLGIAISHYRFRRAFKVQGHQLSELKYHARWFPFGPIFAFLLCVIVIIGQDIQAFAHFDWTAIGISYMSIPLFIILYSYYKIRYKTKVIPLEKVDLSKHR

SEQ ID NO: 42654 - protein, 210 aa, Phalaenopsis hybrid cultivar
MGRGKIEIKRIENSTNRQVTFSKRRNGIMKKAKEISVLCDAQVSLVIFSSLGKMFEYCSPSTTLSKMLEKYQQNSGKKLWDAKHENLSAEIDRIKKENDNMQIELRHLKGEDLNSLNPKELIPIEEALQNGLTSVRDKQMDYLKMLKKNERMLEDENKRLTYLLHQQQMAMEGSMRELDIGYHHKDREYAAQMPMTFRVQPIQPNLQGNK

SEQ ID NO: 42655 - protein, 364 aa, Neurospora crassa
MQIKTLTALAFASLVSAQTYTDCDPTKKTCPNDKAVGKEIINIDFTKGADSFFKNMVGTTLQYDNKLGAVYTIKKETDAPTVASSRYIFFGQVDVTVRAAFGKGVVTSFVLQSDDLDEIDWEWIGSDTTQVQTNYFSKGCTETYDRGGFSTVANPQNEFHTYTIKWTPTQLDWIIDGAVVRTLKAADAKGCAGFPQTPMQIKLGTWVAGRKDAAQGTIEWAGGITDFNEGPFMGYYQSIKIQDFMGGDGTTGAKDATEYQYGDKSGTWQSIKVLTGTSTTEDVGTKSGSSTATTLSAVPSASSTSGSSSLPIDSTLNNNNNGSSSTSDATEATKSGNVVTGGAGKLAMSIASLGAALFAGAMLL

SEQ ID NO: 42656 - protein, 219 aa, Ehrlichia canis str. Jake
MRDKILNKKSQYIHDLFSITDEDVVATHQLITRDISLMQLNLAEGQILQLLIKMNNIKSIIEIGTFVGSSAMCMVKALPENGYIYTIEKDTTNAELAKSNFEKYNLSHKVTVINDTAISALNKLTDLSPFDMVFIDASKAEYCNYLDWAELNIKKNGLIVADNTLLFGNVYSSDNITKKVPKTTIDKMLSFNKRLSDKNKYLTTLLPTEEGMTIALKLF

SEQ ID NO: 42657 - protein, 183 aa, Fagus sylvatica
DGHGGSHVAMRCRDRLHDIVKEEVESVTEGMEWKDTMEKSFDRMDKEVQEWLVPIKTTNCRCDVQTPQCDAVGFTAVVAIVTPEKIIVSNCGDSRAVLCRNGVAFPLSSDHKPDRPDELVRIQDAGGRVIYWDGARVLGVLAMSRAIGDNYLKPYVISEPEVTITDRTAEDECLILASDGLWD

SEQ ID NO: 42658 - protein, 531 aa, Pseudomonas aeruginosa UCBPP-PA14
MSAYQNEIKAVAALKEKNGSSWSAINPEYAARMRIQNRFKTGLDIAKYTAAIMRKDMAEYDADSSVYTQSLGCWHGFIGQQKLISIKKHLKTTNKRYLYLSGWMVAALRSDFGPLPDQSMHEKTAVSGLIEELYTFLRQADARELDLLFTGLDAARAAGDKAKEAELLAQIDNFETHVVPIIADIDAGFGNAEATYLLAKKMIEAGACCIQIENQVSDEKQCGHQDGKVTVPHIDFLAKINAVRYAFLELGVDDGVIVARTDSLGAGLTKQIAVTNEPGDLGDLYNSFLDCEEISEAELGNGDVVIKREGKLLRPKRLASNLFQFRKGTGEDRCVLDCITSLQNGADLLWIETEKPHVGQIKAMVDRIREVIPNAKLVYNNSPSFNWTLNFRQQVFDAFVAEGKDVSAYDRNKLMSVEYDDTELAKVADEKIRTFQRDGSAHAGIFHHLITLPTYHTAALSTDNLAKGYFADEGMLAYVKGVQRQELRQGIACVKHQNMAGSDIGDNHKEYFAGEAALKASGKDNTMNQFH

SEQ ID NO: 42659 - protein, 473 aa, Arabidopsis thaliana
MVFFRSVSAFTRLRSRVGQQSSLSNSVRWIQMQSSTDLDLKSQLQELIPEQQDRLKKLKSEHGKVQLGNITVDMVIGGMRGMTGLLWETSLLDPEEGIRFRGLSIPECQKVLPTAQSGAEPLPEGLLWLLLTGKVPSKEQVEALSKDLANRAAVPDYVYNAIDALPSTAHPMTQFASGVMALQVQSEFQKAYENGIHKSKFWEPTYEDCLNLIARVPVVAAYVYRRMYKNGDSIPSDKSLDYGANFSHMLGFDDEKVKELMRLYITIHSDHEGGNVSAHTGHLVGSALSDPYLSFAAALNGLAGPLHGLANQEVLLWIKSVVEECGEDISKEQLKEYVWKTLNSGKVIPGYGHGVLRNTDPRYVCQREFALKHLPDDPLFQLVSKLYEVVPPVLTELGKVKNPWPNVDAHSGVLLNHYGLTEARYYTVLFGVSRSLGICSQLIWDRALGLALERPKSVTMDWLEAHCKKASSA

SEQ ID NO: 42660 - protein, 510 aa, Pseudomonas syringae pv. syringae
MPLLNWSRHMVCLTAAGLITVPTVYATDTLTRDNGAVVGDNQNSQTAGAQGPVLLQDVQLLQKLQRFDRERIPERVVHARGTGVKGEFTASADISDLSKATVFKSGEKTPVFVRFSSVVHGNHSPETLRDPHGFATKFYTADGNWDLVGNNFPTFFIRDAIKFPDMVHAFKPDPRTNLDNDSRRFDFFSHVPEATRTLTLLYSNEGTPAGYRFMDGNGVHAYKLVNAKGEVHYVKFHWKSLQGIKNLDPKEVAQVQSKDYSHLTNDLVGAIKKGDFPKWDLYVQVLKPEELAKFDFDPLDATKIWPDVPEKKIGQMVLNKNVDNFFQETEQVAMAPANLVPGIEPSEDRLLQGRVFSYADTQMYRLGAIGLSLPVNQPKVAVNNGNQDGALNTGHTTSGVNYEPSRLEPRPADDKARYSELPLSGTTQQAKITREQNFKQAGDLFRSYSAKEKTDLVQRFGESLADTHTESKNIMLSVLYKEDRHYGTRVAEVAKGDLSKVKSLAASLKD

SEQ ID NO: 42661 - protein, 196 aa, Arabidopsis thaliana
  misc_feature (28)..(28): Xaa can be any naturally occurring amino acid
  misc_feature (50)..(50): Xaa can be any naturally occurring amino acid
  misc_feature (115)..(115): Xaa can be any naturally occurring amino acid
  misc_feature (133)..(133): Xaa can be any naturally occurring amino acid
  unsure (1)..(196): unsure at all Xaa locations
LCSEEIKNVPEQEVPKVTTEESSAEVTXDRGLLHFLGKKKDPTKPEDHSXIASEFDQKVHISQPDTEVKHERLLEKLHRSDSSSNSSSEEKGSDGDNHQKKKDNNNPSTEVEVQXEDNKGFMENLKENLPGHXRPEDGSADPAAPVVVPPPVEKAHPVENTGILEKIKEKLPGYHPKTTVEEEKKDTEQEDYPYRY

SEQ ID NO: 42662 - protein, 503 aa, Glycine max
MVLSKTASESDVSVHSTFASRYVRTSLPRFKMAEESIPKEAAYQIINDELMLDGNPRLNLASFVTTWMEPECDKLIMAAINKNYVDMDEYPVTTELQNRCVNMIAHLFNAPLEETEAAVGVGTVGSSEAIMLAGLAFKRKWQNRRKQEGKPYDKPNIVTGANVQVCWEKFARYFEVELKEVKLRDDYYVMDPEKAVELVDENTICVAAILGSTLNGEFEDVKRLNDLLIEKNKITGWDTPIHVDAASGGFIAPFIYPELEWDFRLQLVKSINVSGHKYGLVYAGIGWVIWRSKQDLPEELIFHINYLGADQPTFTLNFSKGSSQVIAQYYQLIRLGFEGYRNVMENCRDNMLVLKEGLEKTGRFSIVSKDNGVPLVAFTLKDHTHFDEFQISDFLRRFGWIVPAYTMPPDAQHVTVLRVVIREDFSRTLAERLVSDVEKVLHELDSLPARVISSTTVTLSAEENGKVVVAKKNPMETQREITAIWKKFVLERKKNNDKMNGVC

SEQ ID NO: 42663 - protein, 816 aa, Zea mays
MGEGAGDRVLSRLHSVRERIGDSLSAHPNELVAVFTRLKNLGKGMLQPHQIIAEYNNAIPEAEREKLKDGAFEDVLRAAQEAIVIPPWVALAIRPRPGVWEYVRVNVSELAVEELRVPEYLQFKEQLVEEGPNNNFVLELDFEPFNASFPRPSLSKSIGNGVQFLNRHLSSKLFHDKESMYPLLNFLRAHNYKGMTMMLNDRIRSLSALQGALRKAEEHLSTLQADTPYSEFHHRFQELGLEKGWGDCAKRAQETIHLLLDLLEAPDPSTLEKFLGTIPMVFNVVILSPHGYFAQANVLGYPDTGGQVVYILDQVRAMENEMLLRIKQCGLDITPKILIVTRLLPDATGTTCGQRLEKVLGTEHCHILRVPFRTENGIVRKWISRFEVWPYLETYTDDVAHEIAGELQANPDLIIGNYSDGNLVACLLAHKMGVTHCTIAHALEKTKYPNSDLYWKKFEDHYHFSCQFTTDLIAMNHADFIITSTFQEIAGNKDTVGQYESHMAFTMPGLYRVVHGIDVFDPKFNIVSPGADLSIYFPYTESHKRLTSLHPEIEELLYSQTENTEHKFVLNDRNKPIIFSMARLDRVKNLTGLVELYGRNKRLQELVNLVVVCGDHGNPSKDKEEQAEFKKMFDLIEQYNLNGHIRWISAQMNRVRNGELYRYICDTKGAFVQPAFYEAFGLTVVEAMTCGLPTFATAYGGPAEIIVHGVSGYHIDPYQGDKASALLVDFFDKCQADPSHWSKISQGGLQRIEEKYTWKLYSERLMTLTGVYGFWKYVSNLERRETRRYLEMLYALKYRTMASTVPLAVEGEPSSK

SEQ ID NO: 42664 - protein, 146 aa, Escherichia coli
MRVLVTGGSGYIGSHTCVQLLQNGHDVIILDNLCNSKRSVLPVIERLGGKHPTFVEGDIRNEALMTEILHDHAIDTVIHFAGLKAVGESVQKPLEYYDNNVNGTLRLISAMRAANVKNFIFSSSATVYGDQPKIPYVESLLPIPGQ

SEQ ID NO: 42665 - protein, 282 aa, Thermobifida fusca YX
MTQRLRGRVAAITGGASGIGEATVRRFHTEGASVVIADIQAEAGRRLADELGDRAVFVRTDVSEEADVAALVDTAVDRFGQLDIMVNNAGIMGALGPIDATRMSDADLTIAVNLRGVICGMKHAARVMKPRRSGVIISTSSPAGVLGGIGPHIYSAVKVGIIGLSNSVAAELRQHGIRVNTIIPGSVVSPMTAGIVVDDAHNLAGAQEVLGRTALLGRPIQPADVAAGILYLASDDAAFVTGAVLPVDAGLTGASWPSPYTSGRYAKPVALLEAGRRIGGEE

SEQ ID NO: 42666 - protein, 727 aa, Arabidopsis thaliana
MNANEEGEGSRYPITDRKTGETKFDRVESRTEKHSEEEKTNGITMDVRNGSSGGLQIPLSQQTAATVCWERFLHVRTIRVLLVENDDCTRYIVTALLRNCSYEVVEASNGIQAWKVLEDLNNHIDIVLTEVIMPYLSGIGLLCKILNHKSRRNIPVIMMSSHDSMGLVFKCLSKGAVDFLVKPIRKNELKILWQHVWRRCQSSSGSGSESGTHQTQKSVKSKSIKKSDQDSGSSDENENGSIGLNASDGSSDGSGAQSSWTKKAVDVDDSPRAVSLWDRVDSTCAQVVHSNPEFPSNQLVAPPAEKETQEHDDKFEDVTMGRDLEISIRRNCDLALEPKDEPLSKTTGIMRQDNSFEKSSSKWKMKVGKGPLDLSSESPSSKQMHEDGGSSFKAMSSHLQDNREPEAPNTHLKTLDTNEASVKISEELMHVEHSSKRHRGTKDDGTLVRDDRNVLRRSEGSAFSRYNPASNANKISGGNLGSTSLQDNNSQDLIKKTEAAYDCHSNMNESLPHNHRSHVGSNNFDMSSTTENNAFTKPGAPKVSSAGSSSVKHSSFQPLPCDHHNNHASYNLVHVAERKKLPPQCGSSNVYNETIEGNNNTVNYSVNGSVSGSGHGSNGPYGSSNGMNAGGMNMGSDNGAGKNGNGDGSGSGSGSGSGNLADENKISQREAALTKFRQKRKERCFRKKVRYQSRKKLAEQRPRVRGQFVRKTAAATDDNDIKNIEDS

SEQ ID NO: 42667 - protein, 163 aa, Novosphingobium aromaticivorans DSM 12444
MMPDADRRRFLALLGAGAVMPLASACSARPAAKGTFPIMHSDAEWRRLLTPEQYYILREAGTERPFTSPLLKEKRKGAFVCAADGNALFASGTKFESGTGWPSFWRPLPRAVGTSSDRTLGMVRTEVHCSQCGGHLGHVFDDGPPPTGLRYCINGDALKFRPA

SEQ ID NO: 42668 - protein, 225 aa, Thermus thermophilus HB27
MLLTRGKDRALLARLAALGIEAAEVALLEQVDLPARALLSEKLKEGWDYVAVTSKEGAKRLLLAWEEAGRPFLRVAAVGEGTAGVLRAGGLPPAFLPPRATAKDLAQSFPQAQRVLFVAGDLAGRDLEEGLRARGVEVVRLPVYATRERALAPEEVALLERAEVVAFFSPSGVRAFARWTAKRPKAAAIGPSTGEEARRLGFPVVEAESPGLEGLFAALLRALGR

SEQ ID NO: 42669 - protein, 182 aa, Pseudomonas aeruginosa UCBPP-PA14
MIKEIINVVHGTFTQLRSLVMIFGHAFRKRDTLQYPEEPVYLPPRYRGRIVLTRDPDGEERCVACNLCAVACPVGCISLQKAETEDGRWYPEFFRINFSRCIFCGLCEEACPTTAIQLTPDFEMGEFKRQDLVYEKHDLLISGPGKNPDYNYYRVAGMAIAGKPKGAAQNEAEPINVKSLLP

SEQ ID NO: 42670 - protein, 219 aa, Thermus thermophilus HB27
MVRALTFDVGNTLILASPRFWLLPLLEARGLRPRGDVRKAALEAFRFYEENHLKARDLETALGLWREFHRRLLVGMGLEDHAEALSRELVARWKDPATWPLVPGAEATLKALKAKGYPLAVVSNWDATLPEILEVVGLGRYFDHLSVSALSGYAKPDPRLFREALEALGVSPEEAVHVGDAEADLLGAEAVGMRALLFDPLGENPKALPRLERVLDYLP

SEQ ID NO: 42671 - protein, 339 aa, Saccharophagus degradans 2-40
MNSALKPEWSAVRAIVIAWPYEDSDWQDNYAQAEQCYWAMLIAFSTYSDVWVLLHSSISKAQWLEDLDKEFGRSAANARRCAVSVIDSIDYDDTWIRDYGPLTTHSDYVSFCFNGWGGKYPAALDTLVGKKLQPWLGDVVRESEYFFEGGALEINDSGVLLANKDCVIDTHRNPGLNQAAVEAILAKELGVKAFAWLEGIQLTGDDTDGHIDTIARYVANDSVVYSGPNPSHPDAAALLALKSQISALAAVHNWQLAELPTPIVYSQVEEGQLLPATYANFLICNDVAFVPVYGVSEDQIAVDVLTTAMPNKTIVTVRCEALLEQHGSLHCATMQIGAI

SEQ ID NO: 42672 - protein, 156 aa, Nicotiana benthamiana
GEHKKHPYLSLNPFGQVPALEDGDLKLLESRAITQYIAHVYADNGYQLILQDSKKMPIMSIWMEVEGQKFEPPASGLTWELGIKPIIGMTTDDAAVKESEAQLSKVLDVYETRLAESKYLGETPFTLVDLHHIPNIYYLMSSKVKEVFDSAVVLSA

SEQ ID NO: 42673 - protein, 3567 aa, Saccharopolyspora erythraea
MTDSEKVAEYLRRATLDLRAARQRIRELESDPIAIVSMACRLPGGVNTPQRLWELLREGGETLSGFPTDRGWDLARLHHPDPDNPGTSYVDKGGFLDDAAGFDAEFFGVSPREAAAMDPQQRLLLETSWELVENAGIDPHSLRGTATGVFLGVAKFGYGEDTAAAEDVEGYSVTGVAPAVASGRISYTMGLEGPSISVDTACSSSLVALHLAVESLRKGESSMAVVGGAAVMATPGVFVDFSRQRALAADGRSKAFGAGADGFGFSEGVTLVLLERLSEARRNGHEVLAVVRGSALNQDGASNGLSAPSGPAQRRVIRQALESCGLEPGDVDAVEAHGTGTALGDPIEANALLDTYGRDRDADRPLWLGSVKSNIGHTQAAAGVTGLLKVVLALRNGELPATLHVEEPTPHVDWSSGGVALLAGNQPWRRGERTRRAAVSAFGISGTNAHVIVEEAPEREHRETTAHDGRPVPLVVSARSTAALRAQAAQIAELLERPDADLAGVGLGLATTRARHEHRAAVVASTREEAVRGLREIAAGAATADAVVEGVTEVDGRNVVFLFPGQGSQWAGMGAELLSSSPVFAGKIRACDESMAPMQDWKVSDVLRQAPGAPGLDRVDVVQPVLFAVMVSLAELWRSYGVEPAAVVGHSQGEIAAAHVAGALTLEDAAKLVVGRSRLMRSLSGEGGMAAVALGEAAVRERLRPWQDRLSVAAVNGPRSVVVSGEPGALRAFSEDCAAEGIRVRDIDVDYASHSPQIERVREELLETTGDIAPRPARVTFHSTVESRSMDGTELDARYWYRNLRETVRFADAVTRLAESGYDAFIEVSPHPVVVQAVEEAVEEADGAEDAVVVGSLHRDGGDLSAFLRSMATAHVSGVDIRWDVALPGAAPFALPTYPFQRKRYWLQPAAPAAASDELAYRVSWTPIEKPESGNLDGDWLVVTPLISPEWTEMLCEAINANGGRALRCEVDTSASRTEMAQAVAQAGTGFRGVLSLLSSDESACRPGVPAGAVGLLTLVQALGDAGVDAPVWCLTQGAVRTPADDDLARPAQTTAHGFAQVAGLELPGRWGGVVDLPESVDDAALRLLVAVLRGGGRAEDHLAVRDGRLHGRRVVRASLPQSGSRSWTPHGTVLVTGAASPVGDQLVRWLADRGAERLVLAGACPGDDLLAAVEEAGASAVVCAQDAAALREALGDEPVTALVHAGTLTNFGSISEVAPEEFAETIAAKTALLAVLDEVLGDRAVEREVYCSSVAGIWGGAGMAAYAAGSAYLDALAEHHRARGRSCTSVAWTPWALPGGAVDDGYLRERGLRSLSADRAMRTWERVLAAGPVSVAVADVDWPVLSEGFAATRPTALFAELAGRGGQAEAEPDSGPTGEPAQRLAGLSPDEQQENLLELVANAVAEVLGHESAAEINVRRAFSELGLDSLNAMALRKRLSASTGLRLPASLVFDHPTVTALAQHLRARLVGDADQAAVRVVGAADESEPIAIVGIGCRFPGGIGSPEQLWRVLAEGANLTTGFPADRGWDIGRLYHPDPDNPGTSYVDKGGFLTDAADFDPGFFGITPREALAMDPQQRLMLETAWEAVERAGIDPDALRGTDTGVFVGMNGQSYMQLLAGEAERVDGYQGLGNSASVLSGRIAYTFGWEGPALTVDTACSSSLVGIHLAMQALRRGECSLALAGGVTVMSDPYTFVDFSTQRGLASDGRCKAFSARADGFALSEGVAALVLEPLSRARANGHQVLAVLRGSAVNQDGASNGLAAPNGPSQERVIRQALAASGVPAADVDVVEAHGTGTELGDPIEAGALIATYGQDRDRPLRLGSVKTNIGHTQAAAGAAGVIKVVLAMRHGMLPRSLHADELSPHIDWESGAVEVLREEVPWPAGERPRRAGVSSFGVSGTNAHVIVEEAPAEQEAARTERGPLPFVLSGRSEAVVAAQARALAEHLRDTPELGLTDAAWTLATGRARFDVRAAVLGDDRAGVCAELDALAEGRPSADAVAPVTSAPRKPVLVFPGQGAQWVGMARDLLESSEVFAESMSRCAEALSPHTDWKLLDVVRGDGGPDPHERVDVLQPVLFSIMVSLAELWRAHGVTPAAVVGHSQGEIAAAHVAGALSLEAAAKVVALRSQVLRELDDQGGMVSVGASRDELETVLARWDGRVAVAAVNGPGTSVVAGPTAELDEFFAEAEAREMKPRRIAVRYASHSPEVARIEDRLAAELGTITAVRGSVPLHSTVTGEVIDTSAMDASYWYRNLRRPVLFEQAVRGLVEQGFDTFVEVSPHPVLLMAVEETAEHAGAEVTCVPTLRREQSGPHEFLRNLLRAHVHGVGADLRPAVAGGRPAELPTYPFEHQRFWPRPHRPADVSALGVRGAEHPLLLAAVDVPGHGGAVFTGRLSTDEQPWLAEHVVGGRTLVPGSVLVDLALAAGEDVGLPVLEELVLQRPLVLAGAGALLRMSVGAPDESGRRTIDVHAAEDVADLADAQWSQHATGTLAQGVAAGPRDTEQWPPEDAVRIPLDDHYDGLAEQGYEYGPSFQALRAAWRKDDSVYAEVSIAADEEGYAFHPVLLDAVAQTLSLGALGEPGGGKLPFAWNTVTLHASGATSVRVVATPAGADAMALRVTDPAGHLVATVDSLVVRSTGEKWEQPEPRGGEGELHALDWVRLAEPGSTGRVVAADASDLDAVLRSGEPEPDAVLVRYEPEGDDPRAAARHGVLWAAALVRRWLEQEELPGATLVIATSGAVTVSDDDSVPEPGAAAMWGVIRCAQAESPDRFVLLDTDAEPGMLPAVPDNPQLALRGDDVFVPRLSPLAPSALTLPAGTQRLVPGDGAIDSVAFEPAPDVEQPLRAGEVRVDVRATGVNFRDVLLALGMYPQKADMGTEAAGVVTAVGPDVDAFAPGDRVLGLFQGAFAPIAVTDHRLLARVPDGWSDADAAAVPIAYTTAHYALHDLAGLRAGQSVLIHAAAGGVGMAAVALARRAGAEVLATAGPAKHGTLRALGLDDEHIASSRETGFARKFRERTGGRGVDVVLNSLTGELLDESADLLAEDGVFVEMGKTDLRDAGDFRGRYAPFDLGEAGDDRLGEILREVVGLLGAGELDRLPVSAWELGSAPAALQHMSRGRHVGKLVLTQPAPVDPDGTVLITGGTGTLGRLLARHLVTEHGVRHLLLVSRRGADAPGSDELRAEIEDLGASAEIAACDTADRDALSALLDGLPRPLTGVVHAAGVLADGLVTSIDEPAVEQVLRAKVDAAWNLHELTANTGLSFFVLFSSAASVLAGPGQGVYAAANESLNALAALRRTRGLPAKALGWGLWAQASEMTSGLGDRIARTGVAALPTERALALFDSALRRGGEVVFPLSINRSALRRAEFVPEVLRGMVRAKLRAAGQAEAAGPNVVDRLAGRSESDQVAGLAELVRSHAAAVSGYGSADQLPERKAFKDLGFDSLAAVELRNRLGTATGVRLPSTLVFDHPTPLAVAEHLRDRLFAASPAVDIGDRLDELEKALEALSAEDGHDDVGQRLESLLRRWNSRRADAPSTSAISEDASDDELFSMLDQRFGGGEDL

SEQ ID NO: 42674 - protein, 199 aa, Hyacinthus orientalis
DARAQVSATLLRPLSCRLGSRTMTPSKDKRFSGSVKLPHIPRPKMKVCMLGDAQHVEEAERIAIDWLDVEALKKMNKNKKLVKKLAKKYHAFLASEAVIKQIPRLLGPGLNKAGKFPTLVTHQESLEAKVNETKAMVKFQLKKVLCMGVAVGNCGMEEKQIFQNVQLSVNFLVSLLKKNWQNVRCLHLKSTMGKPYRLF

SEQ ID NO: 42675 - protein, 271 aa, Candidatus Blochmannia floridanus
MNRYQTMFKSLNQNKLGAFVPFITIGDPDPTTFIHIIDTLIQSGADALELGIPFSDPVSDGPSIQKSMERSFKSGANISSCLQLIKKIRNKYPTLPIGLLIYANLIFKNGIKNFYAHCSTLSIDSILIPDLPIEESSLFYNSAMYYQIAHIFICPTNASLDLIKKITDKGIGYIYLLSRSGITGINNTEFNKIKLNTLIYNIKQCNQKLPILQGFGIYSSEQARSSLLSGTSGIISGSCIANIIEENHPNIDLLLEKIRKFTHLMKIAMKL

SEQ ID NO: 42676 - protein, 140 aa, Hordeum vulgare subsp. vulgare
VTEPPCEVKDRCASKLLVLAPGRAALTTPAPNLNSGIDPLSASPSSLGQGEVNAAASSQSNASLSQMDERELKRERRKQSNRESARRSRLRKQQECEELAQKVSELTAANGTLRSELDQLKEDCKTMEVENKQLMGKILG

SEQ ID NO: 42677 - protein, 230 aa, Streptococcus pneumoniae
MVKLVFARHGESEWNKANLFTGWADVDLSEKGTQQAIDAGKLIKEAGIKFDQAYTSVLKRAIKTTNLALEASDQLWVPVEKSWRLNERHYGGLTGKNKAEAAEQFGDEQVHIWRRSYDVLPPNMDRDDEHSAHTDRRYASLDDSVIPDAENLKVTLERALPFWEDKIAPALKDGKNVFVGAHGNSIRALVKHIKGLSDDEIMDVEIPNFPPLVFEFDEKLNVVSEYYLGK

SEQ ID NO: 42678 - protein, 670 aa, Photobacterium profundum SS9
MSSRNANSRKELANAIRALSMDGVQQANSGHPGAPMGMADIAEVLWRSHMNHNPQNPQWADRDRFILSNGHGSMLIYSLLHLTGYDLSISDLKNFRQLHSKTPGHPEYGYAPGIETTTGPLGQGLTNAVGMAIAEKAMADQFNRDGHKVVDHHTYTFLGDGCMMEGISHEASSLAGTLGLGKLVAFWDDNGISIDGKVEGWFTDDTPKRFEAYGWHVIPAVDGHDADAINAAIEAAKAETGKPTLICAKTIIGFGSPNKAGTHDCHGAPLGAEEIAAAREFLGWNHGPFEIPTDIAAEWDAKEAGSAKESAWDEKFAAYAAAHPALAAEFKRRTVGDLPANWEAETSKIIADLQANPANIASRKASQNALEAFGKLVPEFMGGSADLAPSNLTMWSGSKALEAGDFSGNYIHYGVREFAMTAIINGMALHGGFVPYGATFLMFMEYARNAMRMAALMKIQNIQVYTHDSIGLGEDGPTHQPVEQIASLRLTPNMSTWRPCDQVESAVAWKLAIERKDGPTALIFSRQNLAQQPRTDAQVANIAKGGYILKDCEGKPELILIATGSEVELVTEAYAQLTAEGRKVRVVSMPATDTYDKQDAAYRESVLPSDVTARIAVEAGIADFWYKYVGFDGRIIGMTTFGESAPAGELFKMFGFTVENVVDTAKELLA

SEQ ID NO: 42679 - protein, 159 aa, Hyacinthus orientalis
TKQTAPLQQKKMEQTFIMIKPDGVQRGLVGEIISRFEKKGFYLKAMKLITVERSFAEKHYEDLSSKPFFGGLVEYIISGPVVAMVWEGKNVVLTGRKIIGATNPADSAPGTIRGDYAIMVGRNIIHGSDAVESARKEIGLWFPEGISNWQSSLNPWIYE

SEQ ID NO: 42680 - protein, 247 aa, Zea mays
MRVAATRTAAAAAAHPPSAFLLLLVLLCCASLAIGGAAMAGHVLGGVKENPAAANSADSDGLGRFAVDEHNRRENALLEFVRVVEAKEQVVAGTLHHLTLEAVEAGRKKLYEAKVWVKPWLDFKELQEFSHKGDATAFTNADLGAKEGGHEPGWREVPVEDPVVKDAAHHAVKSIQERSNSLFPYELLEILRAHAQVVEDFAKFDILMKLKRGSKEEKIKAEVHKSLEGAFVLNQHQPAEHAESSSQ

SEQ ID NO: 42681 - protein, 134 aa, Castanea sativa
MFIGEGFLFSWEASSLITPTTFQWHPPPPTEWLRPEVYPLFATVGVAVGICAMQLVRNICTNPEVRVTKENNSCRKCLHNFEEGEKYSQHAVRKFVLNRSPHIMPSLKSFFSEPKYFKLQSNVVNLQDCQIFEF

SEQ ID NO: 42682 - protein, 238 aa, Pseudomonas aeruginosa PAO1
MAISELKLPAGVGLQVWGSAAEQARGLAAEVAGRLRSALAEQGQALLVVSGGRSPVAFLEALSEEPLDWSRITVSLADERWVPESHADSNAGLVRRHLLRGEAAKARFIGLYQPAASLEEAAELADHHLHELPLPIDVLVLGMGDDGHTASLFPNSPGLDLAMDPQGTRRCLPMWAPSVPHQRLTLPRAVLAAAKVQLLAIQGQSKLATLNAALAVEDERRMPVRAFLRAPLTIHWYP

SEQ ID NO: 42683 - protein, 55 aa, Brassica napus
  misc_feature (10)..(10): Xaa can be any naturally occurring amino acid
  misc_feature (42)..(42): Xaa can be any naturally occurring amino acid
  unsure (1)..(55): unsure at all Xaa locations
MSTATFVEIXLAILLPPLGVFLKFGLKVEFWICLILTLFGYXPGILYALYIITKD

SEQ ID NO: 42684 - protein, 305 aa, Brassica napus
MQIFVKTLTGKTITLEVESSDTIDNVKAKIQDKEGIPPDQQRLIFAGKQLEDGRTLADYNIQKESTLHLVLRLRGGMQIFVKTLTGKTITLEVESSDTIDNVKAKIQDKEGIPPDQQRLIFAGKQLEDGRTLADYNIQKESTLHLVLRLRGGMQIFVKTLTGKTITLEVESSDTIDNVKAKIQDKEGIPPDQQRLIFAGKQLEDGRTLADYNIQKESTLHLVLRLRGGMQIFVKTLTGKTITLEVESSDTIDNVKAKIQDKEGIPPDQQRLIFAGKQLEDGRTLADYNIQKESPLHLVLRLRGGF

SEQ ID NO: 42685 - protein, 429 aa, Bacillus subtilis subsp. subtilis str. 168
MHTKSIELHNEALQHIVGGVNSPSRSYKAVGGGSPVAMEKASGAYFWDVDGNKYIDYLAAYGPIITGHAHPHITEAIKKAAENGVLYGTPTKHEVTFAKMLKEAIPAMDKVRFVNSGTEAVMTTIRVARAYTGRTKIIKFAGCYHGHSDLVLVAAGSGPSTLGTPDSAGVPKSIANEVITVPFNDIDSYKAALEKWGSEIAAVLVEPIVGNFGIVEPKEGFLEQVNELTHNAGALVIYDEVITAFRFMYGGAQDLLQVKPDLTALGKIIGGGLPIGAYGGKQEIMEQVAPLGPAYQAGTMAGNPASILSGIACLEVLKEKGVYEKLDHLGAMLEEGIMKHAETHGITITVNRLKGALTVYFSDEKVENYEQAERSDGETFSTFFKLMLERGINLAPSKYEAWFITTAHTEQDIKDTLTAVEDAFKHLKN

SEQ ID NO: 42686 - protein, 344 aa, Arabidopsis thaliana
MGPSVRRLYVQGKEINGAGINASFAVHQDVDGRAADVALGWSVALGSPFTFATTLEQEYRSDIFGERGILLGAVHGIVESLFRRYTENGMSEDLAYKNTVECITGTISRTISTQGMLAVYNSLSEEGKKDFETAYSASFYPCMEILYECYEDVQSGSEIRSVVLAGRRFYEKEGLPAFPMGNIDQTRMWKVGERVRKSRPAGDLGPLYPFTAGVYVALMMAQIEILRKKGHSYSEIINESVIESVDSLNPFMHARGVSFMVDNCSTTARLGSRKWAPRFDYILTQQALVAVDSGAAINRDLISNFFSDPVHGAIEVCAQLRPTVDISVPADADFVRPELRQSSN

SEQ ID NO: 42687 - protein, 240 aa, Clostridium perfringens
MRIEKLSRVISDICNMGKEVVLVSSGAIGVGVGKLRLEKKPETIREKQAVAAVGQCALMHIYNKFFGEYSHVVAQVLLTRDVLENERMKNNVCNTFDTLLEKGIIPIVNENDAISIDEIQNILNFGDNDNLSAIVSTLVNADTLIILSDIDGFYDSDPRTNEDSKMLKEVYEITPEIEECAGGAGSNRGTGGMVTKLSAAKVATSNGIDMILANGENPEILIDILNGEDIGTMFVAKKGE

SEQ ID NO: 42688 - protein, 567 aa, Oryza sativa
EEEARGRKAGSFDEALLAGKQSREEKEVVVVGHPLPRPASLPAPSAASSSAAGSASASSAGSSSLGSSAASDEPPDLGTYRVPDASYVLPGRTLAIDSRRQNLAVEEGRFFANNQGLEHPRLSETSVSPRKESYLHNLDLSNDRTAYCHGRKSTEIVFSTRVPISPPGSKGQIPCPTSPVQSRAFGQCPGSPTARQDDSRSSSSPHPLPRPPGSPCSSSRVVSSQWKKGKLLGSGTFGQVYQGFNSEGGQMCAIKEVKVISDDSNSKECLRQLHQEIVLLSQLSHPNIVQYYGSDLSSETLSVYLEYVSGGSIHKLLQEYGAFGEAVLRNYTAQILSGLAYLHGRNTVHRDIKGANILVDPNGDIKLADFGMAKHISAHTSIKSFKGSPYWMAPEVIMNTNGYSLSVDIWSLGCTIIEMATARPPWIQYEGVAAIFKIGNSKDIPDIPDHLSFEAKNFLKLCLQRDPAARPTAAQLMEHPFVKDLVANRSFRSGMTRDTFPTSFDGKGAMVQTSNRSLSPLRDPDLTMRNLQVPTSAIPSISTRRISAMMQLHRHCTNAQNEFSEKK

SEQ ID NO: 42689 - protein, 2160 aa, Magnaporthe grisea
MTRNDALSRFSSITSSSTDSAHSTATVKPLPSTPIASDTRRHSSGSRPAIPSRLRIDDDLNRITASPLRDDTQVSPTNTFGTRVALSPSSPTSNVFPREQRLSDFGNYRRDLAVLDPGGSRVPQIQQPPPNTGPSLSSQVAPWMTSNGTGGAPAAINTSFYNDSSDNLSVASQLSPGFRIPGGRPSISQPSGVGADNNEASYFGDERRPSIASITTTASSQGSKASGNRGGFRKLQGFFGEEFPGRDSSDTSLPPAVPGKEHRSHSYSHGRPYRDRNYSNATDHTRDGSPSSSRPRTPVPAPEVVPFLYQEADDIAKYGEAPVRDILSGPDRERYVTGDSLQNPPKTSSSSRSGHSLAHLSGQHRHQKSNDDPRTLRPTMSRDDSAVPTYKDRSGSATTMMTTSRDRAHSPAPSGHSIGGYFSSKNGTYDGQTSPPGHQKKSLLGRFKRNKDKEDTGSLKKTSPSSTSLNLKPSRSEFGGDGASTMGQDWPSRLAEPSQYNSNSNSASARPPQARHGTFKSPFAKRGRTHHRHDDRDEAIGPTDKHDGMQAGGTMFHLDTDLNDMSGILSRPLPLTPMDADFVGTIKGEKSTVTSNGRNGAWDAPDSWAVKRTGDDLAYHGPENDEAGPSPRPEEKMTSYCIRVFKSDGTFATLQMSIDSSVQDLIGQLSKKSYVSGGLEYHIALRKHGLIRVLGSAEKPLFIQKRLLRQVGFEERDRIEDIGREDNSYLCRFLFMSSRELEQQARTQDLGLGRTQKFNHVDLSARNIIRIPIYLYSKVQDIISLNLSKNLSLDLPRDFISSCQNLRDIKFNNNEARKLPASLGRASRLTYLDVSNNRIDHLENAELNGLVGLLKLNLANNRLKHLPPYFGAYRSLRTLNVSSNFLDKFPSFLCELESLVDLDLSFNLIGAFPPAIENLRNLEKLVITNNRLAGTLPDSFSRLQSLRELDIKYNAISGIDVISLLPKLEILAADHNAISQFVGSFERVRSLKLKDNPITRFELTSTVPTLKLLNLSNAKLASIAESFNHMLNLERLVLDRNHFVSLPSQIGRLRRLEHFSIAHNALAELPPEVGCLQELKFLDVRGNNLKKLPLEIWWANKLETLNASSNVMTDFPKPASRPPQPPESSPGSMQGSNGKVAMVGSLSTPPSIEDLDPDDSRRPSQASSSTLLSVGPSPVPAGPDRKSSVVSVYGKGGRKTSIISRSANSSGNAPAPPNTRKDSGLSARITNTFSGSLRNLFLADNLLDDDVFDQIMLLCELRVLNLSFNQISDMPQRCIKSWPQLSELYLSGNELTTIPVDDLEEYSLLQVLHINCNKFTNLPADISRAKKLAVLDCGSNFLKYNISNVPYDWNWNLNPNLRYLNLSGNRRLEIKQPAYGSGAGNREQYTDFSRLQNLRVLGLMDVTLTQPSIPEQSEDCRVRTSGSSAGYLPYAMADTLGKNEHLSTVDLVVPRFNASETETLLGLFDGQALSSGGSKIAKYLHENFGQILATELRALKTGLKETPEDALRRAFLALNKELVTIAIQHSEDRPSVPHRSGSQAHVILNKEDLNSGGVATVVYLQGQDLYVANVGDAQAMIIQSDQTHKMLTRKHDPAEPTERSRIREAGGWVSRNGKLNDQLGVSRAFGYVDLMPAVQAAPHVSHVAIREQDEMILLATSELWEHLAPELIVDIARQERGDLMRATQKLRDLAIAYGSTNKIMIMMISVADLKRRTERTRINRGQSMSIHNLSLHGEQYKFPTRGRRKKDQVMDSTLQRLEAEVPAPTGMIAIVFTDIKNSTNLWETYPAAMRSAIRLHNEMMRRQLRRIGGFEVKTEGDAFMVSFPTATSALLWCFAVQLQLLEVNWPSEMLNSLSCKPTVDKNNQVIFKGLSVRMGIHWGEPLCEPDPITRRMDYYGPMVNKASRISAVADGGQITVSSDFISEIQRCLETYQGANAAALVNESFDEDPFSMAIRKELRSLSSQGFEVKELGERKLKGLENPEVVYSLYPHQLAGRIETHQAHDKGVTAAAPELIENTPAVLKEGSELDFDPEIIWGLWKLSLRLEMLCSSLEYVGGRGLQAPETELLERMKQRGGEVTESFLVNFMEHQISRIETCVSTLSIRHLNMGGGTIKELDDLRGPISSVLANFSKQMAELQRYKALYGPLDAIEDGQQAS

SEQ ID NO: 42690 - protein, 247 aa, Clostridium perfringens
MKKIRIIKNKEFLIKRCDEILEENKKDLEKAIEKGTSNAMLDRLKLDEERVKSIANAVADVVKLDDPIGEVTSMFKRPNGLRIGVQRVPLGVVGIIYEARPNVTADAAALCLKTGNAVILRGGSEAINSNLKIVEIISDALKEAGLPEGSVQILEDTSRETATDFMRLNDYLDVLIPRGGAGLIKAVVNNATVPVIETGVGNCHIYIDDEADINMGVDIIVNAKTSKPAVCNAAEKLLVNEKIAEEF

SEQ ID NO: 42691 - protein, 570 aa, Caulobacter crescentus CB15
MVRVLEYGSVMTAFDRRTLLQGALSLGAAGLLPGWATAAGGERSPPALSGEEIKLTVGHTMAKIDGKAGHAVTVNGAIPGPLIRLKEGQNVRLSVTNTLDEDTSIHWHGLLVPFQMDGVPGVSFPGIKPGETFTYEFPIRQSGTYWWHSHSGLQEQMGHYGPMIIDPAGEDPVAYDREHVVVLSDWSFLHPHELFRKLKVSAGHFNRQKQTVAGLLKGQDQSLKDRVAWGQMRMDPTDIADVTGSVYTYLMNGHGPGDNWTGLFAPGERVRLRFINAGAMTIFNVRIPGLSLEVVGTDGQLVSPVAVDEFQIAPAETFDVIVRPTEDKAFTLVAEASDRSGMARGTLAPRLGMTAAVPPLRRRPLANMKDMGMGNMHHGMDMPGMDMSMRAQSNAPNVPLTPGVQTISPMPMDRMVEPPQGLEDAGHRVLTYADLASLYPPKDSRAPGRTIEIHLTGNMERFMWAFDGEAFGPLKKPIAFQRDERARVVLINDTMMAHPIHLHGHFFELVNGQERQPLKHTVNVAPGGKVAFDLTADEPGDWAFHCHMLLHMHAGMFNVVTVRPLDGAAA

SEQ ID NO: 42692 - protein, 343 aa, Polaromonas sp. JS666
MTSPLFSTTIAGSLPKPGWLSETNKLWPQWKAEGEELKQAKADATLLWIKAQEDAGLDVIGDGEQSRQHFVHGFLEQVAGIDFDHKVRMGIRDNRYDAMVPKVVAELKLKGRVHATEARLLRAHTAKKIKFTLPGPMTIVDTVADQFYGDKVKMAMAFAELLNQEALALQADGVDIIQFDEPAFNVYMKEAADWGVKALERAAQGLTCTTAVHICYGYGIKANTDWKASLGEEWRQYETVFPALAKSSIQQVSLECYHSHVPAHLMALLEGKDVMVGVIDVASDEIETPEQVADTIGKALQYVPKNRLLPCTNCGLAPMDRDVALKKLQALAQGAALARERYK

SEQ ID NO: 42693 - protein, 323 aa, Debaryomyces hansenii CBS767
MANALEQLKSTGTVIVTDTGEFESIAKYTPQDATTNPSLILAASKKAEYAKLIDIAIDYAQDKGSNPKEKASIALDRLLVEFGKEILKIVPGRVSTEVDARLSFNKDATIKKAIEIIKLYESVGISKDRILIKIASTWEGIQAARELESKHGIHCNLTLLFSFVQAVACAEAKVTLISPFVGRILDWFKASTGKEYDGETDPGVISVRKIFNYYKKYGYDTIVMGASFRNTGEIKALAGCDFLTIAPKLLEELYNSNEDVPKKLDSSSANATDEEKVSYIDNEAEFRYLFNEDAMATEKLSEGIRNFAKDCVTLLDQLEARFK

SEQ ID NO: 42694 - protein, 250 aa, Ipomoea batatas
MGKCYPTVSEEYKKAIEKLRRKLRGFIADKNCAPLMLPLAWHSAGTYDVSSKTGGPFGTMRLKAEQAHGANNGLDIAVRLLEPFKEQFPIVSYADFYQLAGVVAVEITGGPDVPFHPGREDKTEPPVEGRLPDATQGNDHLRDVFVKQMGLSDKDIVALSGGHTLGRCHKERSGFEGPWTTNPLIFDNSYFTELLSGEKEGLLQLPTDKALLNDSVFRPLVEKYAADEDAFFADYPEAHLKLSELGYAEA

SEQ ID NO: 42695 - protein, 281 aa, Mesorhizobium sp. BNC1
MNQHANLHNSALADHAYRVRRNALVMAETQGQGYIAQALGVADVLTVTYFHAMKHRPDQPDWEGRDRFLLSVGHYGIAHYAVLVAAGYLPEEELPTYALDDSRLPMSGMTSYTPGAEMSGGSIGLGLPMAVGMGMGLKRKKSKSFIYTLMGDGELAEGPTWEAAISASNYRLDNIIAIVDFNQVQADGPSMKVMNTEPVVDKFEAFGFYVQRIDGNNLSALVAAFDRAREYAEPKPRIIICDTKMGCGVDFLEGREKSHFIRLGEEDWKRAYEALDKGRSK

SEQ ID NO: 42696 - protein, 333 aa, Candidatus Blochmannia floridanus
MITKIGINGFGRIGRVIFREAQERTDIEIVAINDLLNIEHIAYLLKYDSTHGKFQGNIKTYSDHLIINDKTIHYTSKKKPIDLNWKNLGVDVVIESTGMFLTQEYAQGHILSGAKKVILTAPPKDDNIPMFVMGVNHDSYQGSKIISNASCTTNCLAPIAKIIHDHFGIIEGFMTTIHAVTSTQKTVDSPIHKDWRSGRSAYQNIIPSSTGAAQALGKVITDLHGKLTGMAFRVPILNVSVIDFTVRLKKSVSYKNICDVIKDASEHTFKDIIGYTEEKLVSSDLNGEKLISIFDAKSSMLLNNHFVKLISWYDNETGYSNKVIDLSNYIMKN

SEQ ID NO: 42697 - protein, 237 aa, Oryza sativa
  misc_feature (77)..(77): Xaa can be any naturally occurring amino acid
  unsure (1)..(237): unsure at all Xaa locations
MAALAAASTAFAAKPRLARAPSSPAARFSVSCSASGNNGGAGEMAQSLAASAKTFSAALALSSVLLSSAATSPSPAXAADIAGLTPCKESKAFAKREKQSIKKLQSSLKKYAPDSAPALAINATIEKTKRRFENYGKFGLLCGADGLPHLIVSGDQRHWGEFITPGLLFLYIAGWIGWVGRSYLIAISGEKKPAMREIIIDVELAVKLLPRGFIWPVAAYRELITGNLVVDDADIGY

SEQ ID NO: 42698 - protein, 487 aa, Glycine max
MASWLLGRSSRILIHQHHHLHKKYLPFLLGPFLNHNNSSCSSFPSTEPFRCRDAFPGKNSSPTLFRFSRHESTKAEAQLELEQDVATEDEPNQVIDFPGGKVGFTSEMRFISESPEKRVPCYRVLDDNGEIVKYSNYVQVSKEMGVKMYSDMVTLQTMDNIFYEVQRQGRISFYLTQMGEEAVNIASAAALAPDDIILPQYREPGVLLWRGFTLQQFVHQCFGNTHDFGKGRQMPIHYGSNQHNYFTVSSPIATQLPQAVGAAYSLKMDGKSACAVTFCGDGATSEGDFHAAMNFAAVMEAPVVFICRNNGWAISTPVEDQFRSDGIVVKGKAYGIWSIRVDGNDALAVYSAVHTAREIAIKEKRPVLIEALTYRVGHHSTSDDSTKYRGTDEIEYWKMARNPVNRFKRWVERNGWWSDKDELELRSSVRKQLMHAIQVAEKAQKPPLQDLFNDVYDQIPSNLQEQERLIRKTIEKHPKDYPSDVPL

SEQ ID NO: 42699 - protein, 751 aa, ASPERGILLUS NIDULANS FGSC A4
MRFILSLLLLLPFTTAGFSPTCIRVVTALAARPNDLFNKFQREICDQGCQPTVPHWDLWTRNNTFVPAVRSLMQTLNAPKQEEALLKLGDDAADIIKRQCGPKLEGRDICADGHTLAAFGNCFKTNFLKAAIANLPTLLPMVSEPVCRKPVPARTYRRTRKWLRRFFYLSLATGIVYVFDNQFYASSITRTARTFSLGVLVALDYKINFRPNPPLAGSIADVHARNAERLSDLLRHNGGLYLKIGQAIAMQSAILPPEFQKMFARMFDDAPQNSWKDVEKVIREDFGKSAEEVFGVSFSGDPTKGVMERVARASASVAQVHWARLADGREVAIKIQKREIAQQIQWDLWAFKVVTWIYSRIFDLPFYSLVPYVSERLFLETDFENEADNSEMMAKLVAGESRLRDRVYVPKVWRELSSKRVMTAEWIEGVRLWDKDAITRTWRGGWREGSPGCGGTPLDSPRANRSAPARSSFKIKPERNDWRGRNGRGGLGLSLKEVMTTMVDLFSAQMFLWGLVHCDPHPGNIFIRRKPNGHSELVLIDHGLYIHMDPEFRHQYARFWKALLTFDNATINEIVKGWGVNNPDIFASATLMKPYRGGNLSTQQGIERLSKAERAQRHYDMQQASRKAVREILGDETKWPQQLIFIGRNLRIVQGNNQFLGSPVNRIKITGLWASRALVESPDLRLTEKIRNYGRHLLFRVVLFSSDLFFWFTKVRQFLHLGGGMEDDLEAQMQSVAKDMGVELNHSIFEG

SEQ ID NO: 42700 - protein, 634 aa, Lactobacillus sakei subsp. sakei 23K
MCGIVGFAGGLFDLPKKKEVLNQQMDVIKHRGPSGAGDFIDDKVALGFRRLSIIDLTKGGQPIYNEDHTKLIFFNGEVYNYREIRKELEPLGHEFKTDSDTETILHAYEQWGKDVLKKIRGMFVFVIYDLQTKTLFGARDFFGIKPLYYTTLDDGTFMFSSEIKTFMRHPEFKRTLNKKALKSFMMNQYNDLQETFFEGVFRFPAGHYFTYKDGQLDIEKYWDMQFDPSNLSFEEEVKKIDASVEESIKMHNVADVPVGAFLSEGVDSSYVTSILQPQEVFSVGFDDQTYNEVTAAHALADELGLNFNETKVKADDAFAEFDKIQYYLDEPDGNPSCVPLWFLSRFAREKVTVALSGEGADELFAGYVNYGMHSHNTTIKAFTSSLKKLPKGARAKLAKTVKKMPAFPGRVHLYTNLANPKEFYAGQSVIYDIENPSIFGSDEANQYLKPAYQNDTTIQENYQADFDRVKDADPVSQMQYIDMHHFMLNDILQKADKLSMAHSLELRVPFLDPEVAKTAGQVPTEYLINSKDTKYAYRQASAKHLPAAWANRPKLGFPVPIKQWLETDKYYEQVKALFSEDFVSEFFDQGQLLALLDANKEQRINGRRKIWTIYTFLTWYKVYFINIEDYLVLG

SEQ ID NO: 42701 - protein, 400 aa, Staphylococcus aureus subsp. aureus Mu50
MAKIPVTVLSGYLGSGKTTLLNHILQNREGRRIAVIVNDMSEVNIDKDLVADGGGLSRTDEKLVELSNGCICCTLRDDLLKEVERLVKKGGIDQIVIESTGISEPVPVAQTFSYIDDELGIDLTAICRLDTMVTVVDANRFVHDINSEDLLMDRDQSVDETDERSIADLLIDQVEFCDVLIINKIDLISEEELAKLEKVLSALQPIAKIIKTTNSEVDLKEVLNTQRFDFEKASESAGWIKELESGGHASHTPETEEYGISSFVYKRRLPFHAKRFNDWLESMSNNVVRSKGIVWLAQYNHVACLLSQAGSSCNIHPVTYWVASMSEAQQTQILAERQDVAAEWDPEYGDRHTQFVIIGTELDEEKLTKELDACLVNAQEIDADWQQFEDPYQWQIRPAR

SEQ ID NO: 42702 - protein, 614 aa, Bacillus subtilis subsp. subtilis str. 168
MCGITGWVDFKKQLVQEKQTMDRMTDTLSKRGPDDSNVWGEHHVLFGHKRLAVVDIEGGRQPMACTYKGDTYTIIYNGELYNTEDLRKELRARGHQFERTSDTEVLLHSYIEWQEDCVDHLNGIFAFAVWDEKRNLLFAARDRLGVKPFFYTKEGSSFLFGSEIKAILAHPDIKARVDRTGLSEIFGLGPSRTPGTGIFKGIKEIRPAHALTFSKDGLNIWRYWNVESEKHTDSFDDTVANVRSLFQDAVTRQLVSDVPVCTFLSGGLDSSAITAIAAGHFEKEGKAPLHTYSIDYEENDKYFQASAFQPNDDGPWIEKMTEAFGTTHHKCVISQKDLVDHLEEAVLVKDLPGMADVDSSLLWFCREIKKDFVVSLSGECADEIFGGYPWFHTADVESGFPWMRSTEERIKLLSDSWQKKLNLKEYVNAKYEETLAETPLLDGETGVDKARRQLFYLNMLWFMTNLLDRKDRMSMGASLEVRVPFADHRLVEYVWNIPWEMKMHDNREKGILRKALEGILPDDILYRKKSPYPKTHHPEYTKGVSEWLKTIRSQKDSVLHTLLDRKQLDQLLETEGSSFKVPWFGQLMKGPQLIAHLAQIHTWFEAYRIDIDER

SEQ ID NO: 42703 - protein, 686 aa, Triticum aestivum
  misc_feature (398)..(398): Xaa can be any naturally occurring amino acid
  misc_feature (404)..(404): Xaa can be any naturally occurring amino acid
  misc_feature (488)..(488): Xaa can be any naturally occurring amino acid
  misc_feature (505)..(505): Xaa can be any naturally occurring amino acid
  misc_feature (530)..(530): Xaa can be any naturally occurring amino acid
  unsure (1)..(686): unsure at all Xaa locations
AYLGDTTEQVCTKKQAGTGPEFPGYRRPTRLLSSASRAIAAKPHPPQTLAAAAVGATSTTRKLAAMAGNREAFRVAVGNTLERRLFYVPSFKIYGGVAGLYDYGPPGCAVKANVLAFWRQHFVLEEGMLEVDCPCVTPEVVLKASGHVEKFTDLMVKDEKTGSCYRADHLLKDFCKEKLENDNTLSPEKVEELNHILAVLDDLSAEQLGAKIKEYGIVAPDTKNLLSDPYPFNLMFQTSIGPSGLSAGYMRPETAQGIFVNFKDLYYYNGNKLPFAAAQIGQAFRNEISPRQGLLRVREFTLAEIEHFVDPEDKSHPKFSDVSDLEFLMFPREDQLTGRSATRLRLGEAVSEGTVNNETLGFFMGRVYLFLTQLGDDKDRQRFRQHLPNEMAHYAATXWDVSIXYHGSINVKRHDYSSLAMGDLSPPMRDSTRRHDHQAGVRVYTPSRRSWFCGQGDQKMVLEALEAMGETEALGMKPALESKGDVDXKACTLGKDVTIKRNMVXSINMEKKQEHQRKFTPSVIEPSFGXIGRIIYCLFEHCFYQRTGKTDDEQLNVFRFPPLVAPIKCTVFPLVKVEKFDVVAKKISKALTTAGISHIIDITGTSIGKRYARTDEIGVPLAITVDSTTSVTVRDRDSKDQIRVEVEEVASVVKEVTDGQSTWADIMWRYPAHTALATDEEEASET

SEQ ID NO: 42704 - protein, 484 aa, Bacillus subtilis subsp. subtilis str. 168
MTLSQWQPSRKSDVPLHRQIEQYMKDKILHGEWAVGTKIPSQRTLADMFQVNRSTVTAAIDELTSQGLLEGRKGGGTKVVNSTWSVLTAEPPLDWSDYVRSGIHRANSSIIQAINQNEPRADIIRLGTGELSPDLVPADTIGRMFQQINPGVLSLGYEQPKGNRQLREAVADHLKGKKIHVSPSAILIVSGALQALQLISIGLLKRDSVILTEKPSYLQSLHVFQSAGMRLRGLPMDDEGVKAGLVSSNRKQYGGQLLYTIPSFHNPTGTVMSEQRRKEIISLSKKEQMPIIEDDAYGDLWFEEKPPQPLKAMDHEGNILYLGAFSKTVSPGLRIGWLAGPEPVIERLADIKMQTDYGSSGLSQWAAAEWLSQGYYEEHLTWVRRKLKERRDAAVHFLERYAGDIATWRIPAGGFYIWVTFHKNLPVSRFFYELLKRQVLVNPGYIYDGEDRNSIRLSYSYASLGDLETGIKAAAETARRLMMS

SEQ ID NO: 42705 - protein, 207 aa, Zea mays
MVSLKLQKRLAASVLKCGKGKVWLDPNEVSEISMANSRQNIRKLVKDGFIIRKPQKVHSRSRARRAHEAKQKGRHSGYGKRRGTREARLPTKILWMRRMRVLRRLLRKYREAKKIAKHMYHDMYMKVKGNMFKNKRVLMESIHKSKAEKAREKTLFDQFEAKRAKSKATRERKISRREERLAQGPKEPTAPVAAPAPFIGVPKKAKK

SEQ ID NO: 42706 - protein, 366 aa, Sorghum bicolor
RPLEYAWNKAANILFAESPAGVGFSYSNTSSDLSMGDDKMAQDTYTFLVKWFERFPHYKYREFYIAGESGHFIPQLSQVVYRNRNNSPFINFQGLLVSSGLTNDHEDMIGMFESWWHHGLISDETRDSGLKVCPGTSFMHPTPECTEVWNKALAEQGNINPYTIYTPTCDREPSPYQRRFWAPHGRAAPPPLMLPPYDPCAVFNSINYLNLPEVQTALHANVSGIVEYPWTVCSNTIFDQWGQAADDLLPVYRELIQAGLRVWVYSGDTDSVVPVSSTRRSLAALELPVKTSWYPWYMAPTEREVGGWSVQYEGLTYVSPSGAGHLVPVHRPAQAFLLFKQFLKGEPMPAEEKNDILLPSQKAPFY

SEQ ID NO: 42707 - protein, 661 aa, Oryza sativa
  misc_feature (243)..(243): Xaa can be any naturally occurring amino acid
  unsure (1)..(661): unsure at all Xaa locations
MEETYTVKVGEATPAAGGKPSAGPVYRSIYSKDGLMKLPEDILSPWDFFSGAVKQYPKNKMLGQRKVSDGKAGDYVWLTYEEVYQKVIKIGSAIRSLGVKPGGHCGIYGSNCPEWVMAMQACNSQGICYVPLYDTLGANAVEFIMDHAEISIAFVQESKIQSVLSVVKKCRAHIKAIVSFGDVTSELKREAEQLGVSCFSWEEFSSMGKQNYELPKKQKDDICTIMYTSGTTGDPKGVIITKXALIAGVMTTEHLLKVTDKVVAEDDSYFSYLPLAHIFDQVIGNYCISKGASIGFWQADIRYLMEDVQMMKPTVFCGVPRVYDRIYTGINQKIQSGGMIAKSLFQYAYNYKLGNLRKGLKQDEASPFFDKIVFSKIKEGLGGRIRLLLSGAAPLPRHVEEFMRVTSCSVLVQGYGLTESCSGCFTSIANVFSMIGSVGPPVTTIEARLESIPEMGYDALSNVPRGEICLRGHTLFSGYYKRPDLTEEVFSDGWFHTGDIGEWQPDGTMKIMDRKKNIFKLSQGEYVAVEVVESAYVQSPLVTSVWVYGNSFESFLVAVVVPEKQAIEDWAAQNNKTGNLAELCNDPKARMYIEDELNKTGKRLGLRGFEMLKAIHLETTPFSIEKDLVTPTFKLKRPQLLKYYKDCIDQLYKDAKVGNKQ

SEQ ID NO: 42708 - protein, 316 aa, uncultured bacterium
TIAGTFPYHLELEEALARFKGTETALVFQSGFTANQGVLGALLKEGDLVFSDELNHASIIDGLRLTKATRFVYRHADVDHLEELLKAHDTEGLKLIVTDGVFSMDGDIAPLDRIVPLAKKYGAVVYVDDAHGSGVLGERGEGTVHHFGFQKDPDVVQVATLSKAWAVMGGYAAGAMELKELLINKARPLLFSTTHPPAVVGALLGALELIEKEPERIARLWENTRYFKAELARLGYDTLGSQTPITPVLFGEAPLAFEASQMLLEEGVFAVGIGFPTVPRGKARIRNIVTAAHTKEMLDKALEAYAKVGRRLGIIR

SEQ ID NO: 42709 - protein, 1221 aa, Lotus corniculatus var. japonicus
MLTKFETKSNRVKGLSFHTKRPWILASLHSGVIQLWDYRMGTLIDRFDEHDGPVRGVHFHNSQPLFVSGGDDYKIKVWNYKMHRCLFTLLGHLDYIRTVQFHHENPWIVSASDDQTIRIWNWQSRTCISVLTGHNHYVMCASFHPKEDIVVSASLDQTVRVWDIGSLKRKAGPPADDILRLSQMNTDLFGGVDAVVKYVLEGHDRGVNWAAFHPTLPLIVSGADDRQVKLWRMNDTKAWEVDTLRGHMNNVSCVMFHAKQDIIVSNSEDKSIRVWDATKRTGIQTFRREHDRFWILATHPEMNLLAAGHDSGMIVFKLERERPAFAVSGDSLFYAKDRFLRFYEFSTQRETQVLTIRRPGSLSLNQSPKTLSYSPSENAVLLCSDVDGGSYEFYCISKDGIKDSFGRGDTQDPKKGLGGSAVFVARNRFAVLDKGSNQVFVKNLKNELVKKSVLPIATDAIFYAGTGNLLCRSEDRVFIFDLQQRLVLGDLQTPFIKYVIWSNDMESVALLSKHAIVIASKKLVHQCTLHETIRVKSGAWDENGVFIYTTLNHIKYCLPNGDSGIIKTLDVPIYITKVVGNTIFCLGRDGKNRAITIDATEYVFKLSLLKKRYDHVMNMIRNSQLCGQAMIAYLQQKGFPEVALHFVKDERIRFNLAIESGNIQIAVASATAIDEKDHWYRLGIEALRQGNAGIVEYAYQRTKNFERLSFLYLITGNVEKLSKMLKIAEVKNDVMGQFHNALYMGDIRERVKILENVGHLPLAYITASVHGLHDVAERLATELGDNVPSLPEGKVPSLLIPPSPVLSGGDWPLLRVMRGIFDGGFNQTDRDADEEEYEAADGDWGEELDMVDVDGLQNGDVAAILDDGEVGEEGDEEGGWEMEDLELPPEAETPKASVSSRSSVFVTPTPGMAVSQIWIQRSSLAADHAAAGNFDTAMRLLNRQLGIKNFAPLKSLFLDLHSGSHSYLRAFSSAPVVSLAVERGWNESSSPNVRGPPALPFKLPQLDEKLKAGYKATTAGKFTEALRTFVNILNTIPLIVVESRREVDDVKELIIIVKEYVLGLKMELKRREIKDDPARQQELAAYFTHCNLQTPHLRLALLNAMTVCYKAKNLATAANFARRLLETNPNIENQAKTARQVLAAAEKNMTDATELNYDFRNPFVICGSTYVPIYRGQKDVSCPYCTSRFVPSQEGQLCAVCDLSVVGADASGLLCSPSQVR

SEQ ID NO: 42710 - protein, 217 aa, Lactobacillus sakei subsp. sakei 23K
MRRYAAEFIGTFMLVFLGTGAVVIAKADTLTIGLAFGLTVTVMAYAFGGVSGGHFNPAVSIAMMINKRLEAKDGVFYIVAQFLGAIVASGLLSVLINALDLSRTGFGQTDFPKIGAGVAFLVEVIVTFSFILVILMTTSDRFGNSQMAPLAIGITLSLLIIVALNLTGGSLNPARSFGPAIFAGGSALAHYWVYLAAPIVGAILAAFTGRLLGSEER

SEQ ID NO: 42711 - protein, 266 aa, Nocardia farcinica IFM 10152
MSQQSRLANTFATARAEHRAALIGYLPAGYPDLAGSIATCRAMVESGCDIVEVGVAYSDPVMDGPTIQAAAEQALRGGVRVRDVFSVVEAITAAGGQAVVMSYWNPVLRYGVERFARDLAAAGGAGIITPNLIPEEADDWFIASATHNLDRIFLVAPSSTEERLVKTLEASRGFIYAASTMGVTGARDAVSSAAPALCARIRAHSDIPIGVGLGVRNGAQAAEIASYADGVIVGSALVSAAGEGLDAVRALTSELAEGVRSATVAS

SEQ ID NO: 42712 - protein, 359 aa, Lotus corniculatus var. japonicus
MVDHRILFLLFVFFLFFSNVSSSDGVDPMICQVVDDEGLGAEHHFLEFKRRFGKVYATEEEHGYRFNVFKSNMHRARRHQLLDPSAVHGVTQFSDLTPMEFQHSVLGLRGVGLPSDADSAPILPTDNLPKDFDWREHGAVTPVKNQGSCGSCWSFSATGALEGAHFLSTGELVSLSEQQLVDCDHQQCDPEEAGSCDSGCNGGLMNSAFEYILNNGGVMREEDYPYSGTNGGTCKFDKAKIAASVANFSVVSRDEDQIAANLVKNGPLAVAINAVYMQTYVGGVSCPYVCSKKLNHGVLLVGYGSESYAPIRMKQKPYWIIKNSWGENWGENGYYKICRGRNICGVDSMVSTVAALHTT

SEQ ID NO: 42713 - protein, 361 aa, Lotus corniculatus var. japonicus
MVDHRILFLLFVFFLFFSNVSSSDGVDPMICQVVDDEGLGAEHHFLEFKRRFGKVYATEEEHGYRFNVFKSNMHRARRHQLLDPSAVHGVTRFSDLTPMEFRHSVLGLRGVGLPSDADSAPILPTDNLPKDFDWREHGAVTPVKNQGSCGSCWSFSATGALEGAHFLSTGKLVSLSEQQLVDCDHEQCDPEEAGSCDSGCKGGLMNSAFEYILNNGGVMREEDYPYSGTAGGTCKFDQTKIAASVANFSVVSRDEDQIAANLVKNGPLAVAINAVYMQTYVGGVSCPYVCSKKLNHGVLLVGYGSESYAPIRMKQKPYWIIKNSWGENWGENGYYKICRGRNVCGVDSMVSTVAALHTTGN

SEQ ID NO: 42714 - protein, 548 aa, Listeria innocua Clip11262
MTKFAQKTIYQVYPKSFFDTTGDGTGDIPGITAKLDYLQELGIEMIWINPFYPSPQNDNGYDISDYTAVDPLFGTMNDVTTLISEAKKRNIGIMIDLVLNHTSTEHPWFKKALAGDPFYRDFYYFRPAKADGSPPTNWESKFGGSAWQKLPNSSEYYLHLYDVTQADLDWANKNVREALFDVVNFWIDKGVEGFRLDVLNVIAKPKFLEDDFEGDGRRFYTDGPGIHAYLKELNERTFGDKPIVTVGEMSSTDIDNCIRYSDPKEKELSMVFHFHHLKVDYPDGEKWRLADVNFANLKSIFHTWQVAMSEENGWDALFWNNHDQPRALGRFASDRPEHYYHSATLLGATIHFMRGTPFVYMGEEIGMMNPKFPTIDDYVDIETLNHFDILHKNGLSEQEVMTIIKERSRDNSRTPMQWDSSNNAGFTTGTPWLKVADNANEINVQKALSDKTSIFYFYQKLIALRKEYPVIQTGDYTPYLTEEDSIIAYKRSNETASLLAIHYFGATKKKIQLPKEFSDGKILLSNYDRKEISAEIELSPYETLTLIQ

SEQ ID NO: 42715 - protein, 111 aa, Coriolopsis gallica
AIGPVADLTISNANISPDGFTRAAVVANNQLPGPLITGNKGDTFQLNVIDNLTNDTMLTATTIHWHGFFQKGTNWADGPAFVNQCPISEGNSFLYDFAAPGQAGTFWYHSH

SEQ ID NO: 42716 - protein, 673 aa, ASPERGILLUS NIDULANS FGSC A4
MHRMLFVCGLFLLSVQGLLIRHDGSFQPDHILRVNSKNYMQACSPRYSVLVNGSFPGPEIRVQEGQTSWIRVYNDMENLNVTMHWHGLTAITAPFSDGTPMASQWPIPPGHFFDYEVKVEPGYAGTYFYHSHVGFQAVTAAGPLIVESTKPPPYFYDEERIIALSDFFSKTDKEIEHGLMSSQFQWSGETEAVLVNGHSLSPSPMNGTGSCRREVLQVEPGKTYRLRIIGATALSFISFVIESHDVEIIEADGHYTQKLKTHNLQIAGGQRYSVLLKAKDNAALEQLSQRHFIIQITTLARPTTLTTYAILQYPSNAPASLTNVSATPLMPVPSIAYGWLDYQLQPLERDPDFLTSDSVTRRIVIDVHQNFSDHVLWLQSGYDWVETFPETPYLVQIQRGELNVTESLQKAISAGNNFDKDYRIFPAQLGEVLEIVWQNRGAVGNSTVRNRGVETHPFHGHGRHFYDIGGGDGEYNAAENEKRLQETQPVLRDTTVLYGYSREVAPGAPSGWRAWRIRVTNPGVWMMHCHTLQHMIMGMQTVFVFGDQDDMKENMGTYNSGYLTYGGSAYGNETFFPETFCMILHNGVQDAVIVFQRPEEDGDNLAMSEVLDGPLLEKYIELIKQQYGVRFFRKALSGFWTLSAIASGVNVLQVPGLSMKSIMEVFCVDYHHN

SEQ ID NO: 42717 - protein, 151 aa, Glycine max
  misc_feature (139)..(139): Xaa can be any naturally occurring amino acid
  unsure (1)..(151): unsure at all Xaa locations
MAMVDQPLYPIAVLIDELKNEDIQLRLNSIRRLSTIARALGEDRTRKELIPFLSENNDDDDEVLLAMAEELGVFIPYVGGVDHANVLLPPLETLCTVEETCVRDKSVESLCRIGAQMREQDLVEHFIPLVKRLAAGEWXTARVSSCGLVHI

SEQ ID NO: 42718 - protein, 218 aa, Bradyrhizobium sp. BTAi1
MFFMRKSPVLPTAADALPGRTQPIPTAPTHFVNGRRLLPPYPAGLEQAVFGLGCFWGAERKFWQLGDGVHVTAVGYAGGHTPNPTYEEVCSGLTAHTEVVLVVFDPKVISYERLLKTFWESHDPTQGMRQGNDVGTQYRSAIYTFSDAQRETADASKAAYETALRAKGLGAITTEIAPAGPFYFAEDYHQQYLAKNPAGYCGLGGTGVACPIGVGVTA

SEQ ID NO: 42719 - protein, 415 aa, Listeria innocua Clip11262 [sequence omitted]

SEQ ID NO: 42720 - protein, 276 aa, Listeria innocua Clip11262
MRESLKNSKRLVIKVGTSTLMYGNGHINLRTIEKLAMVLSDLRNEGKEVILVSSGAIGVGCHKLQLPVRPTSIPEQQAVASVGQSELMHIYSKFFGEYGQVVGQVLLTRDVTDFPISRENVMNTLESLLERGIIPIVNENDTVAVEELEHVTKYGDNDLLSAIVAKLVQADLLIMLSDIDGFYGSNPSTDPDAVMFSEINQITPEIEALAGGKGSKFGTGGMLTKLSAASYCMNANQKMILTNGKNPTIIFDIMQGEQVGTLFASKKEEFSHDGTH

SEQ ID NO: 42721 - protein, 355 aa, Methanosarcina barkeri str. fusaro
MSKNICFIDGLEGILKYREIDINQLVDLPYDAVSYLLILGDLPGDQELAEYSACLHGEREVNREVIDVIHMCNFNIDSIEALRTIVSFISQFDPDINDSSPEGNMRKATRLIAKIPTIVAAYYRIANGKEPVPPDPSLSHGANFLYMLRGNKPTQLEAEVMEKDFILSAEHELNASTFSSRVTASTLSDLYSAVVSGLCTLKGPLHGGARAEVTAMIEEIACPENAENYVLDKLSKKEKIMGFGHRVYKTYDPRGMIFKQLAKQLAEAKGDMHWYNIAEVVENTVIRELVEKKGKPIYPNVDFYSGVIYKYMDIPPQLATSIFAIGRVSGWIAHCFDQYEKKKIIRPRAFMLDEC

SEQ ID NO: 42722 - protein, 627 aa, Kineococcus radiotolerans SRS30216
MVQHGERVVVAQPPGDGVAHPRHRHVVRHVVRPVVRHVLTSRGAVPHTRTTSFIQAPDQIAITGDPTVSDLLDHATTPSSPPATTPDPWWRQAVVYQVYPRSFADSNGDGTGDLPGITARVPHLVSLGVDAVWLSPFYPSALADGGYDVDDHRDVDPAIGTLEQFDEMVATLHAAGIKVVVDIVPNHSSNRHRWFRDALAAGPGSPERERYVFARGRGEHGELPPSDWTAVFGGPAWEPVGDGEWYLHTFAPEQPDWNWDHPEVREDFLTTLRFWADRGVDGFRVDVAHALVKDMSSPLPSAAELAADDLPDGAHRFWDRDEVHEVYRAWRAVFDEYDPPRTAVAEAWVATHRRARYASPEGLGQAFNFDLLRSDFDAASFRRIVEENLRLAAESGTSSTWVLSNHDVVRHVSRYGLPDGMDEADRARWLLSGGTDPAPDLERGARRARAATAFLLALPGSAYLYQGEELGLPEVADLDAAVLQDPTWLRSGHVDKGRDGCRVPLPWTAEGPSHGFGPGPSHLPQPSWFAAHAADVQDRDPRSTLSAYREALAWRRRLRTGEELVFEDAPEGVVRFRRPGGWTCVTNFTTRAVPLPPGRVVLSSGAPADELDGELPGETTVWLLPAD

SEQ ID NO: 42723 - protein, 180 aa, Spinacia oleracea
MASSVLSSARVATVSRTPAQASMVAPFTGLKSTVGFPATKKNDDITSLASNGGRVQCMKVWPTQNMKRYETLSYLPPLTTDQLARQVDYLLNNKWVPCLEFETDHGFVYREHHNSPGYYDGRYWTMWKLPMFGCTDPAQVLNELEECKKEYPNAFIRIIGFDSNRQVQCVSFIAYKPAGY

SEQ ID NO: 42724 - protein, 238 aa, Oryza sativa (japonica cultivar-group)
MLGVFSGDVVEVPAELVAAGSRTPSPKTRASELVSRFLGGAEPAVSVQLGDLGHLAYSHANQALLRPRSFAAKDDIFCLFEGVLDNLGNLNQQYGLSKGANEVLLVIEAYKTLRDRAPYPASFMLSQLAGSYAFVLFDKSTSTLLVASDPEGKVSLYWGITADGSVAFSDNIDLLKGSCGKSLAPFPQGCFYSNALGVGGLKCYENPKHKVTAVPAKEEEICGATFKVEGSTILTALH

SEQ ID NO: 42725 - protein, 126 aa, Campanula carpatica
ECAFWMPARSGSILQLSHSLHNLIPFGSTVPMNLPIVHEVFNSAEAIRIPHTCLLARIRPPVGRYNPPEVVAVRVPLLHLSNFQINDWPDLSAKDYAVMVLILPLNGVRNWRDHELELVEVVADQV

SEQ ID NO: 42726 - protein, 2864 aa, GIBBERELLA ZEAE PH-1
MCASPCSSPRPISPLTLHSAAVDNTSTARLLQLFFGTYAFYTDRQSRLSVQKCLVALISAGVDSKTIAPLIAAVRKESQKQGIAPTNAFVLVEWCSLFMQHFDASLWDQFASDIILTDADALDKCHQSSARKSVAHSAIIVTRRGLRKLFSSSDSSENRLSSSVDILASKSAQSTPRNAVLLGVIAGVSARKDHLRPVLDTLKPKYYEFFTREIIGSRIAVPEHVVLGLGDFFTSFAIPEELSKELIPALEKGLLRAPEVILGGVVTPLVRSLPESFDLSKVLEQSLLKPLLSNAKSTNPAIRAGALDAFRALVRRSNDTTSLEKVINEIATTLKGGKLASPDHRILHAQMLEATPLSTSSAEQVASAVATVAAKEGNEGALAAETSALANAITFLLVQDGEVPKPVLDSVTKGLAEKKIPSRKYWLLRVGVILQSLAEAQSVSPGMVTFVEAVVPKMVTTLTEVTANAASAAQSGLVVGAYILTAVSPHIYRLLPGSTAESCLTKASVTKQSLSLDPKSSFLLSHRIYSKLTANEDLAWFARALSSVFQSLDQNVDKHVALAWSEAFIHLVTAHSVPAAIQQESSKLLSDLYVRNPRLVSSFIINGLWDHLEHSGSGDKEHSATAHNLIQVVKSICLTPNEISKSGKSVAKEDLESQANSLLVLARSELIPRANWIDLCLRMELDPGNLVTKYQDELMAEIEARTSFDQKVRVVKTAAYNAAADLAFVAPETIIPLLLETLRRDLNAEQLQDIGPVEAAIYRTAEGTAFVDVLAKKSQQVLDKNKKDYDILKWEEELRSQLDKKKGQQKKLTPEENAKVNAQLKKESQIRQSITATVARLLRGIGIIRSLATGPPTDATQWIGTAVSLLVGIMDAGATLITGDEAPLAYLTCAEKVTERLGPMRPFVGIAALRLRGVSLSENYQEEAVEDLITRVLYRLRFAGEQRPFDSVSLIYALPLVLDLLRKGGVGSSADDADAQLVLAIEFLSYHTDVCADEAVPRAELLSVLISSMQAYAQHYKLLKDCFADMCRCIAPNMDQEEMVVLAKGTLVPETRVRSTVLQSISAEVDMSDLGYSDEIWVAAHDDEEENQDLGREIWEESGFEVTADMPLRMLPFLESKDGQLRRSAARSLAEAVSLYHEALEDVLEQLKSTYIELAKPRVQQLDEFGMPKKMDLSDPWEGRQGIATAFRELASVITADQLDPLFDFLINAGPLGDKNGAVRSEMLDASIKAIEIHGKTILDKLMSKFEQTLEQPDTNSDAADRVNEAVIIMYGALARHLSPGDPKIPIVIDRLVATLSTPSETVQYAIAECLPPLIQACPDQSSKYFGQILEQLLSSKKYAVQRGSAYGLAGLVMGRGIASLREYRILPTLNDAVENKKEANQREAALLAYELLATMLGRIFEPYVIQIVPQLLTGFGDANANVRDACLAAAKACFARLSSYGVKKIMPTLLNGLEEQQWRSKKGACDLLGAMAYLDPQQLANSLPDIIPPLTGVLNDSHKEVRAAANRSLKRFGEVINNPEIKSLVDIILKALSDPTKYTDEALDSLIKVQFVHYLDAPSLALVTRILQRGLADRSNTKRKAAQVIGSLAHLTEKKDVIMHLPVLVAGLKLAVVDPVPTTRATASRALGSLVEKLGEDTLPDLIPGLMQTLKSDTGAGDRLGSAQALSEVLAGLGTTRLEETLPTILQNVESSKPAVREGFMSLFIFLPVCFGNSFSNYLGRIVPPILAGLADDIESIRETALRAGRLLVKNFAARAVDLLLPELERGLADDSYRIRLSSVELVGDLLFNLTGIKAGTEAEDIEEDENIKEAGASLKETLGEDKRNKILSALYVCRCDTAGAVRSAAIAVWKVLVHSPRTLKELVPTLTQLLIRRLGSSNMEHKVIASNALGELIRKAGDGVLSSLLPTLEEGLQTSVDVDAKQGICLALRELISSASPEALEDHEKTLISVVRTALTDSDEDVREAAAEAFDSLQQIFGKRAVDQVLPFLLNLLRSEDEADNALQALLTLLTETTRSNIILPNLIPTLTTPPISSFDAKALASLSKVAGPAMNRRLPNIINSLMDNEINCKEDGLREELATSFDTVIQSIDEYDGLNTVMNVLLQLLKHEDHRRRAATAYHMANFFAAASVDYSRYSQDIIRSLLNSFDDRDDGVVKAAWAALSAFTKKLRKEEMESLVISTRQTLQRVGVAGANLRGFELPKGINAVLPIFLQGLMNGTADQRVQAALGISDIVDRTSEASLKPFVTQITGPLIRVVSERATEVKSAILLTLNNLLDKMPTALKPFLPQLQRTFAKSLADPSSETLRTRAAKALGTLIKYTPRIDPLIAELVTGSKTADPGVKTAMLKALYEVISKAGANMGEASRASVLSLIDMDTDERDEAMTITNAKLLGALIKNVPEEAALGLLKNRVVTPHFTHSSVLALNSVLAESPDALLQSSLVDDLPDLLCQGVINKNVFVADNCILATGKYLLSDSAKTFETTKGIFEALASVIQPGNATDSRRLALVVVRTVSRNDMEMVRPHVALLAQPIFASVRDPVIPVKLAAEAAFVELFNVADEESRIFDKFMAGAGADLAPNTKRSMGDYFKRVAMRLGSQARERREAEGGQGGLGLSNDEAEDEKEIWSVGKVDVGSEAFTCNAEKFWPCKPLSVFIQHPSRTRPSPLTTIKMVNLRTQKRLASAVIGCGERKIWLDPNEQSEISNANSRQTIRKLISDGLIIRKPVTQHSRSRARELNLARREGRHRGYGKRKGTADARMPSQVLWMRRLRVLRRLLVKYRASGKIDKHLYHELYHSSKGNAFKHKRALVEHIHRAKAEKARETALQEEMDAKRAKNKAARERKQERAAAKRNALLAEE

SEQ ID NO: 42727 - protein, 172 aa, Campanula carpatica
ECALWMPARSGSILQLSHSLHNLIPFGSTVPMNLPIVHEVFNSAEAIRIPHTCPLARIRPPVGRYNPPEVVAVRVPLLHLSNFQINDWPDLSAKDYAVMVLILPLNGVRNWRDHELELVEVVADQVAVALSHAAILEESMRARDQLMEQNIALDLARQEAELAIRARNDFLA

SEQ ID NO: 42728 - protein, 178 aa, Campanula carpatica
ECALWMPARSGSDLQLSHSLHNLIPFGSTVPINLPIVNEVFNSAEAIRIPHTCPLARIRPPVGRYNPPEVVAVRVPLLHLSNFQINDWPEMSAKDYAVMVLILPLKGVRNWRDHELELVEVVADQVAVALSHAAILEESMQARDQLMEQNIALDLARQEAEMAICARNDFLAVMNHEM

SEQ ID NO: 42729 - protein, 164 aa, Lotus corniculatus var. japonicus
MNREKLMKMAGSVRTGGKGTVRRKKKAVHKTTTTDDKRLQSTLKRIGVNAIPAIEEVNIFKDDVVIQFLNPKVQASIAANTWVVSGAPQTKELQDILPSIIHQLGGPDNLENLKKLAEQFQKQAPEAGAADSTAAQEENDDDVPELVPGETFETVAEEETKATS

SEQ ID NO: 42730 - protein, 111 aa, Coriolopsis gallica
AIGPVADLTISNANISPDGFTRAAVVANNQFPGPLITGNKGDTFQLNVIDNLTNDTMLTATTIHWHGFFQKGTNWADGPAFVNQSPISEGNSFLYDFAAPGQAGTFWYHSH

SEQ ID NO: 42731 - protein, 465 aa, Burkholderia sp. 383
MNAVDVNLDADLQAIGKRHLLMHFTHADAYRDHALTVFDRGEGCWLVDRNGKRYFDGLAGLYCVQVGYSHGAEIGDAIREQMVRLPFATNWGVGHEPAIKLAHKLAALAPEGLNRVFFTSSGSESNESAIKLVRQYHQSRGEPQRRKFIARRVAYHGTSFGALALNGMTNFRKHFEPLMSGVRHVGNTKRYGRPVGETEAQFTRHLLDEIESLIVQEGPDTVAALVVEPLQNAGGSLTPPAGYAAGLRDICDRHGVLLVADEVICGFGRLGEYFGSARYGLKPDIITFAKGIASGYVPLGGVIASDTVVDTVLNGPQQMFLHGATYGGHPVACTAALANLAIMEREGVLENVRSNEAVFRQTLDGLLELPCVGDVRGDGYHYSLELVTDKAARRWAAGVSAQAFVSTLLAPAIFDAGLLCRAGVDHEGTPIVQFSPPLVMSRDEIVWFVAKIRDILVDTYARATR

SEQ ID NO: 42732 - protein, 111 aa, Coriolopsis gallica
AIGPVADLTISNGAVSPDGFSRQAILVNDVFPSPLITGNKGDRFQLNVIDNMTNHTMLKSTSIHWHGFFQHGTNWADGPAFVNQCPISTGHAFLYDFQVPDQAGTFWYHSH

SEQ ID NO: 42733 - protein, 75 aa, Glycine max
MLEFNCMQHILYRQREQLGEGIGYGWIDGLKTHAEKHATDLMLLIAAYMFPFNTPTSREAYYYRMKLERNFRQVH

SEQ ID NO: 42734 - protein, 341 aa, ASPERGILLUS NIDULANS FGSC A4
MNSSLYVIPVGATILVTGANGYIASHVCNILLSMGYRVRGTLRSPKPWLTAFFDAKYGTGRFESFILPDLTQRGAWQVAVEGVQGIAHVASDMSMKPNPEQVVPQMVQGVQNALKAAMQQPQVKRVVYTSSSTAAYISVPNKEGVRITRETWHDACIDAAWDKDTPENERGYLVYSASKTSAEKEAWNWVQQNQPHFGFNSIVPNTNYGRILCPEIPATSMTETANLLHGNDSVIRRFPPQWFVDVEDTARLHVVALLSPSAVGKRIFAFAQAFNWTDILTILHELRPDNIHLPPCPKNEGRDLSEIEDAPEAEALMNEFFGTKGWVSLKESLAAGLEGYW

SEQ ID NO: 42735 - protein, 525 aa, Glycine max
MVDPYVLGWIICAVLSLVALRNFAFARKNRCHSSETDATRRAENVTTAAGECRSSSRDGDVDVIIVGAGVAGSALAHTLGKDGRRVLVIERDLSEQDRIVGELLQPGGYLKLIELGLEDCVEKIDAQLVFGYALFKDGKHTRLSYPLEKFHSDVAGRSFHNGRFIQRMREKAASLSNVRLEQGTVTSLLEEKGVIKGVHYKTKDSQELSACAPLTVVCDGCFSNLRRSLCNPKVDVPSHFVGLILESCELPYANHGHVILGDPSPVLFYRISSSEIRCLVDVPGQKVPSISNGEMTNYLKTVVAPQIPPELHDSFVAAVDKGNIRTMPNRSMPAAPYPTPGALLMGDAFNMRHPLTGGGMTVALSDIVVLRNLLRPLRDLNDAPGLCKYLESFYTLRKPVASTINTLAGALYKVFCASPDPARKEMRQACFDYLSLGGLFSEGPVSLLSGLNPRPLSLVLHFFAVAIYGVGRLLLPFPSPKRMWIGVRLISSASGIILPIIKAEGVRQMFFPATVPAYYRNPPAQ

SEQ ID NO: 42736 - protein, 496 aa, Coriolopsis gallica
AIGPVADLTISNGAVSPYGFSRQAILVNDVFPSPLITGNKGDRFQLNVIDNMTNHTMLKSTSIHWHGFFQHGTNWADGPAFVNQCPISTGHAFLYDFQVPDQAGTFWYHSHLSTQYCDGLRGSIVVYDPQDPHKSLYDVDDDSTVITLADWYHLAARVGPAIPTADATLINGLGRSINTLNTDLAVITVTKGKRYRFRLVSLSCDPNHTFSIDGHSLTVIEAERVNLKPHTVDSIQIFAAQRYSFVLNADQDVDNYWIRALPNSGNTNFDGGVNSAILRYDGAAPVEPTTSQAPSTNPLVESALTTLEGTAAPGSPTPGGVDLALNMAFGFAGGRFSINGASFTPPTVPVLLQILSGAQSAQDLLPTGSVYSLPANADIEISLPATTAAPGFPHPFHLHGHAFAVVRSAGSSTYNYENPVYRDAVSTGTPGDNVTIRFRTDNPGPWFLHCHIDFHLEAGFAVVMAEDIPDVAATNPVPQAWSDLCPTYDALLPDDQ

SEQ ID NO: 42737 - protein, 127 aa, Triticum aestivum
LCQCVTGELTTAWSACSQHLYVYAVLVFEAMATFVGQVSVLSLIALFGAATTAMVTTARKAVTLLLSYLIFTKPMTEQHVTGLLLITMGIMLRLLPEDKEKKGTAKRQQVKAQRRGDGVEEETSPLV

SEQ ID NO: 42738 - protein, 278 aa, Schizosaccharomyces pombe
MSQKLPPLKIYTSQLPLVSHKNMLENEEEASHSQLFTPCPVPPSFPKASKPNSNQPYPNGPVCIYPPNIYLYAKPTMPIIQSFDVVINVAKEVLHPFRTDGRHYRDSKHNLDIQVFDHIEYVHIHWDHDTQFALELDKLVSFVAYNAMQLNKKVLINCQMGISRSACLMIAFIMKTLNLNVSDAYEYVKERSPWIGPNMSLIFQLSEYQQIIRKNSSQGPYQSSSLKQSKRKSEGNLLFPEKPHSAQLPLVSPSTSESSMFTNLRRTRSSGSISNDAS

SEQ ID NO: 42739 - protein, 431 aa, Ipomoea batatas
MASEKFKISIKESTMVKPAKPTPAKRLWNSNLDLIVGRIHLLTVYFYRPNGSPNFFDSKVMKEALSNVLVSFYPMAGRLARDGEGRIEIDCNEEGVLFVEAESDACVDDFGDFTPSLELRKFIPTVDTSGDISSFPLIIFQVTRFKCGGVCLGTGVFHTLSDGVSSLHFINTWSDMARGLSVAIPPFIDRTLLRARDPPTPAFEHSEYDQPPKLKSVPESKRGSSASTTMLKITPEQLALLKTKSKHEGSTYEILAAHIWRCACKARGLTDDQATKLYVATDGRSRLCPPLPPGYLGNVVFTATPMAESGELQSEPLTNSAKRIHSALSRMDDEYLRSALDFLECQPDLSKLIRGSNYFASPNLNINSWTRLPVHESDFGWGRPIHMGPACILYEGTVYILPSPNKDRTLSLAVCLDAEHMPLFKEFLYDF

SEQ ID NO: 42740 - protein, 148 aa, Schizosaccharomyces pombe
MSTEGDHVPQAEEVIETVEVVEEETGSSPLSVEDSLKEVLKRALVHDGLARGIREASKALDRRQAHLCVLCESCDQEAYVKLVEALCAESQTPLVKVADPKILGEWAGLCVLDRDGNARKVVGCSCVAVTDYGEDSVALQTLLSSFAA

SEQ ID NO: 42741 - protein, 142 aa, Propionibacterium acnes KPA171202
MLGLMSDEERTLVLLKPDAVKRRLMGEIIGRYEAKGLTVRAMELSTIDTKIARKHYAEHVGRDYYAALEEFITSGPLVAMVLEGRRAISVVRAMNGTTDCAEALPGTIRGDFGTEKNHNLVHASDCLESAEREIGLWFPHLV

SEQ ID NO: 42742 - protein, 605 aa, Novosphingobium aromaticivorans DSM 12444
MQLSDFAAYPNLVAMFLDRAGTRGDSPFLWAKHDGQWRPISWAETVRQVCLLAEALRGLGLNPGDRVALVSENRPEWCVADLAIMAAGLVTVPTYITNTERDHLHILENSGARAVIVSTAKLSQPLLPAALSAPCVEHVIGMEPLRQMQAGKLSFHDWDTMMTGDAAAARRAVDERLRTVDRADLACIIYTSGTGGSPRGVRLHHGSILQNVEGAAHILAEDFGWDEEVFLSFLPLSHAYEHTGGQFLPIGMGAQIFYSEGLEKLASNIEEVRPTIMVVVPRLFEVLRTRIMKQVEKQGRVANYLMDRALSIGGRKAAGKGRLIDAPMNLVLDRTLRPKIRARFGGRMKAMVSGGAPLNPDVGVFFQSMGLTMLQGYGQTEAGPVISCNRPRVGLKMDTVGPPMKGVEVKIAEDGEILVRGELVMHGYWQNEAETARAVPQNGPNAGWLHTGDIGHLDKKGRIVITDRKKDMIVNDKGDNVSPQKIEGMLTLQPEIAQAMVSGDKRPYIVGLIVPDPEWALDWSRAQGEHFDFKKLQDLPAFRNAIRAAVDRVNKDLSVIEKVRQFTFTDEAFSIDNGEMTPSLKIRRHKIRERYGARIDGLYKA

SEQ ID NO: 42743 - protein, 398 aa, Nocardioides sp. JS614
MSPTPSSARALDRGTPPERFARGWHCLGLKSTFADGKPHGVEAFGGKLVVWQDSKGEINALDGYCRHMGGDLTQGSVKGDEVACPFHDWRWGGDGRCKAIPYARRVPLRARTERYPVVVRNGQVLVWHDVEGSEPDLDILPPELPGIGTDEYTDWTWEVLDVANAHCREIIDNVVDMAHFFYIHFAFPTSFRNVFEGQVATQFMESTGRPDVDGAGYGDEGLMLKSEASYYGPSYMINWINVDYKGFETEVILINCHVPTSQNSFKLQYGLCVKKPDGIDDATAEYIGKRYSETFKEGFEQDVAIWLNKAPVQNPLLCEEDGPVYQLRRWYEQFYVDQDDVTPEMTERFEFEVDTTKANEHWRAEVEENLARKSAEDAASQDAGAQDTDVTPPIMTGT

SEQ ID NO: 42744 - protein, 500 aa, Bradyrhizobium sp. BTAi1
MFEPMIANCCAELRSRAARLRTGTYVLDVQDVTRAAIAALMTTAIGTDHAPPAAPAPSFALELWDTMRLAAPMALTQLSQIAMMSTDLAFIGRLGGDAVAAAALAGTVYFVGSTFGMGLMSAVAPLAAQAYGASDAGLVRRALRVGLWAGLFIALPIMLIALNGEAILLALGQAPGVAHLAQNYLAGLAWGIAPMLWFLALRSFMGAVNRPEPVLWITLAAIPLNALLVYPLLYGQWGFPQLGLTGVGLATSTVNLGTFLAGLWFATCRAPFRDYHVLARLQRIDWRLMRQLLVIGAPISLSFLLEYGLFSAAAILMGLISTAALAAHQIALQITAILFMVPFGISMAATVRVGHATGRNDAIGVRRAGLMAMLLGVSLAVLFTVGIILARYDIVQLFLGSGLADAEATAALAATLLLVGTTFFITDALQTIAVGALRGIKDTRVPLLLAVLGYWLIGFPASYVLGLRTALGATGIWIGLSLGTAIYAALLVMRFLRLSR

SEQ ID NO: 42745 - protein, 624 aa, Mesorhizobium sp. BNC1
MGRLQRKPASFFGRLLGSFASGEMVSVIRRVIAENARDFLPHYRMAALCMLAIAATTGYMAYLMKPLVDDVFYGHQWEKVIRICIEVVLIFAIRGFASYGQGVLLAKVGNNVVARYQRRLFEHLMRLDIGFFTGTRSGQLAAQIAQNVTGIRDLLNVTLVATTRDIVTLIALVAVMVSTNPALSLIALLIGPPLIYAVNYLARRLRRINREAVEINSRLLGAMQESVQGISIIKAFTMENVLTEKISGVILRAEERSNKIASVSERLGPVTEILAGIAIAAVIGLAGWRAQHYGIPPGDIFAFITALLLAYDPARKLARTQVTLERALINAKMIYEILDIEPQQGDVANAKPLQVTAGNVRFTDVRFSYLDHMPVLHGVSFEAMAGRTTAIVGPSGAGKSTLFALLQRFYDLDAGQITIDGQDISQVTKHSLRSKIAYVSQHPYLFEGTISDNIRYGRPDASDKEVEEAARLANAEDFIVQQPQGYHTLVGENGVTLSGGQRQRLSIARAIVRNAPILLLDEATSALDNESEAKVQQALERVMAKRTTLVIAHRLSTVVNADHIVVLEEGQLVEEGTHRELVARPHGIYARFYRMQTERAENLLEGGEVDTNDATMEQIRGGRR

SEQ ID NO: 42746 - protein, 116 aa, Schizosaccharomyces pombe
MSADGLDYTNLLPIANVARIMKSALPENAKISKEAKDCVQDCVSEFISFVTGEASEQCTQEKRKTITGEDVLLALNTLGFENYAEVLKISLTKYREQQARSASMKETKQSRSEEPQ

SEQ ID NO: 42747 - protein, 341 aa, Oryza glaberrima
MDHRELWPYGLRVLVIDDDCSYLSVMEDLLLKCSYKVTTYKNVREAVPFILDNPQIVDLVISDAFFPTEDGLLILQEVTSKFGIPTVIMASSGDTNTVMKYVANGASDFLLKPVRIEELSNIWQHIFRKQMQDHKNNNMVGNLEKPGHPPSILAMARATPATTKSTATEALLAPLENEVRDDMVNYNGEITDIRDLRKSRLTWTTQLHRQFIAAVNHLGEDKAVPKKILGIMKVKHLTREQVASHLQKYRMQLKKSIPTTSKHGATLSSTALDKTQDHPSRSQYFNQDGCMEIMDYSLPRDDLSSGSECMLEEQNDYSSEGFQDFRWDSDKQEYGPCFWNF

SEQ ID NO: 42748 - protein, 595 aa, Zymomonas mobilis subsp. mobilis ZM4
MKQATKATPKKRKTLGQLRMLWQFASRYPIWIFGALLALLLSSTATIAIPAAFKMVIDRGFGGDSGAHDINLYFCYMLGIILLLALATAARFYCVSWLGERVIADIRMAISRHLMQMPPAFFEENRPSEIASRLTTDTTLIDQIVSSTASVALRNLITGLGGTAYLFMLAPHLTAMLLGGIPIVVFPIIFIGRRLQRLSRKSQDRIADLSSLITETLGAMKIVQAFGQEDRESDRFGQAVQLTFETAKKRITLRAFMTALVILLIFTAIILIMWRGALDVAAGLVSGGTIAAFVLTGGVVAGAFGALSEVYGDLLRGAGAASRLNDLLAEKPAILSPAHPKALPHSTEGCLTFQDVSFRYPSRPDTEALSHFSLELKAGERLAVVGSSGAGKTTLFQLIQRFYDPTSGVISMEGVDLKEADLSDIRSHIAVVPQETVIFAASARDNLRYGRWDASDEELWQAARAAHAEEFLKALPEGLDSFLGEGGARLSGGQRQRIAIARAILRDAPLLLLDEATSALDAESEQAVQQALEKLMKGRSSIIIAHRLATVRHADRIIVMDKGKIVEEGSHDQLIQKNGLYARLAQLQFSDQKIA

SEQ ID NO: 42749 - protein, 245 aa, Oryza sativa
MAGRSELVVSFGEMLIDFVTLRADGEREFMFYRNPSADMLLTHAELNVELIKRAAVFHYGSIGLIAEPCRSAHLRAMEIAKEAGALLSYDPNLREALWPSREEARTKILSIWDQADIVKVSEVELEFLTGIDSVEDDVVMKLWRPTMKLLLVTLGDQGCKYYARDFRGAVPSYKVQQVDTTGAGDAFVGALLRRIVQDPSSLQDQKKLEEAIKFANACGAITATKKGAIPSLPTEVEVLKLMESA

SEQ ID NO: 42750 - protein, 522 aa, Triticum aestivum
MSSMQFSSVLPLEGKACVSPVRREGSACERLKVGDSSSIRHERASRRMCNGGRGPAATGAQCVLTSDASPADTLVLRTSFRRNYADPNEVAAVILGGGTGTQLFPLTSTRATPAVPIGGCYRLIDIPMSNCFNSGINKIFVMTQFNSASLNRHIHRTYLGGGINFTDGSVEVLAATQMPGEAAGWFRGTADAVRKFIWVLEDYYKNKSIEHILILSGDQLYRMDYMELVQKHVDDNADITLSCAPVGESRASEYGLVKFDSSGRVVQFSEKPKGADLEAMKVDTSFLNFAIDDPAKYPYIASMGVYVFKRDVLLNLLKSRYAELHDFGSEILPRALHDHNVQAYVFTDYWEDIGTIRSFFDANMALCEQPPKFEFYDPKTPFFTSPRYLPPTKSDKCRIKEAIISHGCFLRECKIEHSIIGVRSRLNSGSELKNAMMMGADSYETEDEISRLMSEGKVPIGVGENTKISNCIIDMNARIGRDVVISNKEGVQEADRPEEGYYIRSGIVVIQKNATIKDGTVV

SEQ ID NO: 42751 - protein, 77 aa, Eichhornia crassipes
MSCCGGNCGCGSGCKCGNGCSGCKMYPDMEEKTVTAQTMIMGIAAEKGHFEDFEAAGSGNEGCKCGSNCTCNPCNCK

SEQ ID NO: 42752 - protein, 77 aa, Eichhornia crassipes
MSCCGGNCGCGSGCKCGNGCSGCKMYPDMEEKTVTAQTMIMGIAAEKGHFEDFEAAGSENEGCKCGSNCTCNPCNCK

SEQ ID NO: 42753 - protein, 443 aa, Glycine max
MDISPYTTPKKLSSHSTIHSNNHNNIIADEAAALLDHNNMHRSNHSHTSTSRSSDSSEPSEDGKWAPKLLRECAKAISERDSSKTHHHLWMLNELASPYGDCDQKLASYFLQALFCRATESGERCYKTLSSVAEKNHSFDSARRLILKFQEVSPWTTFGHVASNGALLEALEGEPKLHIIDLSSTLCTQWPTLLEALATRNDETPHLKLTVVAIAGSVMKEVGQRMEKFARLMGVPFEFNVISGLSQITKEGLGVQEDEAIAVNCVGALRRVQVEERENLIRVFKSLGPKVVTVVEEEADFCSSRGDFFKCFEECLKFYTLYFEMLKESFPPTSNERLMLERECSRSIVRVLACCGTGHEFEDDHGEFDCCERRERGIQWCERLRNAFSPSGFSDDVVDDVKALLKRYQSGWSLVVTQGDEHISGIYLTWKEEPVVWASAWKP

SEQ ID NO: 42754 - protein, 591 aa, Glycine max
MASSTFTAMSACKLSSSAAISSFPTHRRTNAVLLSRRSRAARVSAMAKELHFNKDGTAIRKLQSGVNKLADLVGVTLGPKGRNVVLESKYGSPKIVNDGVTVAKEVELEDPVENIGAKLVRQAAAKTNDLAGDGTTTSVVLAQGLIAEGVKVVAAGANPVLITRGIEKTAKALVSELKLMSKEVEDSELADVAAVSAGNNYEVGNMIAEALSRVGRKGVVTLEEGKSADNSLYVVEGMQFDRGYISPYFVTDSEKMAVEYENCKLLLVDKKITNARDLINILEDAIRSGYPILIIAEDIEQEALATLVVNKLRGSLKIAALKAPGFGDRKSQYLDDIAILTGGTVIREEVGLTLDKAGKEVLGYASKVVLTKDTTTIVGDGSTQEAVNKRVAQIRNLIEAAEQEYEKEKLNERIAKLSGGVAVIQVGAQTETELKEKKLRVEDALNATKAAVEEGIVVGGGCTLLRLASKVDTIKDSLDNDEEKVGADIVKRALSYPLKLIAKNAGVNGSVVSEKVLSSDNPRYGYNAATGKYEDLMSAGIIDPTKVVRCCLEHAASVAKTFLMSDCVVVEIKEPEPVPAGNPMDNSGYGI

SEQ ID NO: 42755 - protein, 252 aa, Bacillus coagulans
MDAELKKAENKARLKDEEVKNLIRRTEEGDQEARDLIVEKNIRLVWSVVHRFLNRGYEPDDLFQIGCIGLLKSVDKFDLSYDVKFSTYAVPMIIGEIQRFLRDDGTVKVSRSLKETGNRIRKIRDELTKKLGRSPTVHEIASELGMPVEEVVMAQEAGKAPSSIHETVYENDGDPITLLDQISDQNDQKWFDQIALQEAIRGLEERERLIVYLRYYKDQTQSEAGERLGISQVQVSRLEKKILRVMKERMEL

SEQ ID NO: 42756 - protein, 474 aa, Frankia sp. EAN1pec
MSIDRLPTAGHTGAQAPGPGRATPAFLRELLADPLRLFTRLRTSYGPIVRVPVGRGGFHLVCGPEAVEQVLVGEQRAYAKGLRRRTMPPGEGIQPLSLLLGSGLLTSGGDLHRTRRRLIQPMFHRERIAGYGAAISELSRATALGWADGSRREVHTDMSELTLAIVARTVFGVDVDSEVVRRVRRAVAANMRLSQLAVLPGAIRLQQHLPIGPLRAARDARDDLTAVVMEMIEQRRSLDAAGSDLLSTLLATRDADTGAPLDDTSIRDEALTILLAGHETTANAMAWAYHLLATNPQARDRMHTELDDVLNGRKPTTADLAELPYTRAVFSETLRLYPPAWILLRRTTRDVTLTGYHLPADTNVLLSQWVIHRDPTWWPAPEEFRPQRWLTPDPTRPKYAYFPFGGGTRQCIGNTFAEMEGALALAAISSIRTLTPTPGRPVTPIPRVTLRPQPLQMTAHPRTPHPTPATHKPH

SEQ ID NO: 42757 - protein, 218 aa, Photobacterium profundum SS9
MADIKQLFANNLSWSKSIKEETPEFFSHLAESQQPQYLWIGCSDSRVPAERLTGLDSGELFVHRNVANQVIHTDLNCLSVIQYAVDVLKVKHIIVCGHYGCGGVTAAIENPPLGLINNWLLHIRDLYLKHRSELGTLPREDWDNKLCEINVASQVYNLGNSTVMQQAWERGQQVKIHGWIYGMNNGVLRDLGVTATSRESLEIAYQAAMSAILPPKEL

SEQ ID NO: 42758 - protein, 385 aa, Oryza sativa
MGKGEVATRSKSQKSSATQNEQSTPTNPPTAYPDWSQFQAYAYYNPAGTAPMTPPGFFHPNVAPSPQGHPYMWGPQMMPPYGTPPPYAAMYAQGTPYQQAPMLPGSHPYNPYPGQSPNGTVQTPTSAGGTETDKSGKSKRKTPLKRSKGSLGNLDVVATKNKKAPAKPSASSSNEGSSHSESGSGSSSEGSSTNSKSGSRTKDGSEHGQGNDASNKGATAQSSAVEPVQASTGPVVLNPMSTSWPVPPPMAGPATGVNMGMDYWGTPTSVPMHNKVIAAPASAPSSNSRDVVLSDPAIQDERELKRQKRKQSNRESARRSRLRKQAEWEEVANRADLLKQENSSLKEELKQLQEKCNSLTSENTTLHEKLKELEGEKSNGNWYKE

SEQ ID NO: 42759 - protein, 5488 aa, Bacillus subtilis subsp. subtilis str. 168
MKRQLKSPLSEGQKGLWMLQKMSPGMSAYNIPLCFRFSKPIHAETFKKALLFVQRQYPVLASVIQEENGIPFQSVQLSKDLYFVEEDISAMKSADIMPFLKEKAKEPFQLEAGPLWRTHLFHRLEECIVLITIHHIIFDGVSMLTLISALFEAYQQLLNGIEPLQQPSTADYYDFVDWENRMLTGREGEEHLAYWKEQLSGSLPVLDLPADRPRSSARKFKGQAYKSLLPHHLRNQIKSFARTNHVNESVVFLSIYKVLLHHYTKQKDIIVGVPTMGRQEDRFETLIGYFINMMAVRSKNIGSQPLTAFIRELQLTVAVGLDHAAFPFPALVRELNVDRSAADSPVFQTAFLYQNFFQATGLQKVLEPYQTLGIEYIEDIRQEGEFELALEIYEQENETVLHLLYNPDLYELSSIESMMENYMKLAQHMMEDPSLPLEAYSLQLNQEQTSLLEQWNATGTNIANDKCIHEVFEEKAKQTPDAVAVMFEDRSLTYKEVDEKSTSVAVYLQHQGVRPEQPVGICAERSFDMIIGILGILKAGGAYVPLDPSFPQERLKYMLKDSQASIVLTQPNVHDRISGLTGSHVKAINIELACRNGYTDQQSSGLKREVKPEHLAYIIYTSGSTGEPKGVMVEHRSIMNTLNFLESHYPVTAEDAYLLKTNYVFDVSISELFGWFIGDGRLVILPPNGEKSPQLCMDYIETYKVTHINFVPAMLHVFLEMAKDNKRFTEDGPLKYMMVAGEAFPKVLVKKAVSLFTNCRVENIYGPTEASIYAAYFGCGKGDIASHHTPIGKPVSNTKIYIVDQHLKPVPIGKPGELCIAGAGLARGYFKKPGLTAEKFIDNPFESGTKLYKSGDSARWLPDGNIEYLGRIDSQVKIRGFRVELGAIETKLGEFPGILDQAVVVKQLEGHQQLAAYYTEESGHASANPKDLRLHLKSSLPEYMIPSHFIRLDELPLSPSGKVNRKELEKREIVFNRRKPNHLQLTEIEDQVLRIWEETLKVSGFGPEDGFFDAGGDSLLAVAVAERIKKEFDCEFHVTELFEYSTIRAISEYILEMKNSDLAGTQNEDDHDDKKDGKYPKQKIPPYFDDSVAIVGISCQFPGAKNHHDFWNHIKEGKESIRFFSEEDVRANGVPEELIQHPDYVPVQSVIEGKDLFDPGFFQISPKDAEYMDPQLRLLLLHSWKAIEDAGYVAKEIPATSVYMSASSNSYRTLLPKETTEGHESPDGYVSWVLAQSGTIPTMISHKLGLKGPSYFVHSNCSSSLVGLYQAYKSLTSGESQYALVGGATLHAQSAIGYVHQNGLNFSSDGHVKAFDASADGMAGGEGVAVILLKKAVDAVKDGDHIYAIMRGIGINNDGAEKAGFYAPSVKGQTEVIQHVLDTTKIHPETVSYIEAHGTGTKLGDPIEMSALNKVYKQYTDKTQFCGIGSVKTNIGHLDTAAGLAGCIKVAMSLYHNELAPTINCTEPNPDIKFESSPFYVVRERKSLEKHAGVHRAALSSFGLGGTNAHAIFEQYENISDAGAENEGNQPYIIPISAKNSERLQVYAKEMLSYISQDEQRHFSLRDIAYTFQVGREAMDNRIVFIVNDLEEWKHQLEAFVTGKPLAEGCIQGEKTRMTSAEQLLGNAEADDMASSRISKEELRKLAEMWANGFHVEWRRLYPNIKPRRISLPTYPFAEERYWPESSTGAITTIEPSRLHPLEHHNTSVLSEQRFSSIFTGQEYFIAEHIIKGMAILPAAVTLEMARAAIEQGIGGLEDHETGIRLKNVVWVRPVVAGSEPVQVNIGLYDEDGGHIAYRMYGDPESADAEPVVYNQGKAELIQLKREKALDLSKIKKQCDQSKMDAASFYEGMIGADYGPGYKSVEAVYKGDGQLLAKLSLPESVAHTLGDYVLHPSVMDGALQAAEYLQNVVRAELSDTEDFKAALPFALEELEVFRQCVSDMWVYVQFNSKNKPGDLIQKVDIHLCDEHGMICVRLKGFSTRVMEADIQTEPSKINAETLLLQPVWQEQKAANSLAAKKYAEHLVFLCEYDHETRKQIEAAIEDVHVYSLEARPSSVDGRFHSYTEQVFKKVQEIIRTKPKDGILVQIVTSAEGEQQLFSGLTGLLKTACQENAKLTGQMIEVSSEESGESIAGKLLENQMSSDSYVKYQNGTRYIADWREIKQAKGDGSKPWKDNGVYLISGGAGGLGHIFAKEIAEQTKNATVILAGRSPLSESKSKKLKELHSKGADITYRQTDVTNKIEVYQLIDDIQKRYGRLNGILHSAGIIKDSYLVNKQAKDLHDVLAPKVKGLVYLDEASKDLPLDFFILFSSLSGSLGSIGQSDYAAANVFMDMYAGYRNRLADLSQRHGQTLSVNWPLWRDGGMQVDQETEKRLVQLAGIVPMRAEKGIQALYQALHSEANQVMVIEGDVQKIKQNMLAKNASAPMEKKEAEHMTEQINSIDADSLLDKVKAMLKREIAKLLKVKLETIDDHAEMTVYGFDSISMTEFTNHINRAYQLELTPTVFFDHPTIHAFGKHLSEEYQSVFAKTFAVRAVSAQLQPAAKQEQAVRAKAKRRRKQQVMLPNAIQSDAGPEPIAIVGISGIFPMAKDVEAYWNILKEGKDCMTEIPKDRWDWREYEGDPAKEVNKTNVKWGGFIDGIADFDPLFFGISPREAEQMEPQQRLLLTYAWKAIEDAGYSAKRLSGTKTGVFIGTGNTGYSSLLSKANSAIEGSAAANTSPSVGPNRVSYFLNLHGPSEPVDTACSSSLVAIHHAISSIEEGTCDMALAGGVNTIILPEVYISFDKAGALSKEGKCKTFSNQADGFAHGEGAGILFLKKLKAAEEAGDHIYGVIKGSAINHGGRAASLTTPNPKAQADVIQSAYQKAGIDPKTVTYIEAHGTGTELGDPVEINGLKSAFKALGVNEGDTSANPYCGLGSVKTNIGHLSLAAGAAGVIKILLQLKHKTLVKSLHCENVNPYIQLKNSPFYIVRETEEWKALKNEQGEELPRRAGVSSFGIGGVNAHVIIEEYIPEASDENIPSIAPEHPGIFVLSAKNEARLKEHAQQLADALDKQTYSDVNLARIAYTLQAGRDAMEERLGIISGSIEDLQKKLKDFAAEKSGVEDVFKGRIDKGTLQMLTEDEEIQEAVEKWMERGKYAKLLELWVKGLDVDWTKLYGENLPKRISLPTYPFAKDRYWISDHIEKSGSIDANQAASRLGGAVLHPLMHQNTSNLSEQRFSSIYTGEEFFLADHVVKGQRILPGVAHLELARAAVEQAAEVQGVPRIMKLKNAVWVRPIVVEDQPQQVHIRLLPGENGEISYEIYGHSDVTGEQSIVYSQGSAVLNPAENLPAVDLQSLREQCQESHFSVNEVYDTYRMIGFEYGPAYRGVKKIYTAEQFVLAKLSLHPSAADTLSQYKMHPGLMDSALQASSILTGAGDNQLTLPFAVQELEVFGACSSEMWVYARYSQGSKATDKVQKRDMDILDESGNVCVRMKGLSFRAAEGGSGSAESDQTLATLMFEEKWVPKDFKKESPEPHYERHIVMLCDMNGLSKDRIESRMTGAECIVLESFREGLAERFQDYAEQALETVQGLLKSRPQGNVLIQLLTSAQRKQYSFSGLSALLKTAGLENKKLIGQTIEIDSHENVESVIEKLKENKRHTEDQHIKYEKGKRYINDLDEMQIDDREISMPWRDKGVYLITGGAGGLGFIFAKEIARQAEQPVLILTGRSALNADQQAELNELQQLGARAEYRQVDVTQTEAASELITSITSDYEDLNGVIHSAGLIKDNYLMSKTNEELTQVLAPKVKGLVNVDEATEHLALDFFILFSSISSVAGSAGQADYAMANAFMDSYAAYRNALVTAMYRHGQTLSINWPLWKEGGMRANKEIENMTLKNTGVTPMRTETGIQALYKGLAFGKDQVIVMEGFKDMMREKLTQKPSSDDVPMKTVQVRVTSEARMDQGNMFDHIQEVLKQTISQLLKIKPEEIDPDMEFNQYGFDSITLTEFANTLNEKCKLDLTPTVFFEHATVYAFAGYLSEEYPNAFTAQTPAKAEVLMQPVEQNIKNMTFSTENRFVKPSVTPMQKEADHKPEPIAIVGMSGVFPKAKDVEEYWKNLSSGADCITEVPKDRWDWQEYYGDPLKEANKTNVKWGGFIDEVADFDPLFFGISPLEAEQMEPQQRLLMTYAWKAVEEAGHSARSLAGTKTGIFIGTGNTGYSSLLSNVDIEGSAAANMSPSAGPNRVSYFLNIHGPSEPIDTACSSSLVAIHHAVCAIENGNCEMAIAGGVNTVVTPQGHIAYDKAGALSKEGRCKTFSDKADGFAVSEGAGILFLKKLTAAERDGDHIYGVIKGSAVNHGGRANSLTTPNPKAQADVVKTAYEKAGIDPRTVTYIEAHGTGTELGDPVEINGLKAAFKELYEKTGDPAVHGSHCGLGSAKTNIGHLSLAAGVAGVIKVLLQLKHKTLVKSLYSETVNPYIRLDDSPFYIVQESREWQALRDEAGRELPRRAGISSFGIGGVNAHVVIEEYIPKETTHPATAPAVTAQHPGIFILSAKDEDRLKDQARQLADFISKRSITARDLTDIAYTLQEGRDAMEERLGIIAVSTGDLLEKLNLFIEGGTNAKYMYRGRAEKGIAQTLRSDDEVQKTLNNSWEPHIYERLLDLWVKGMEIGWSKLYDGKQPKRISLPTYPFAKERYWITDTKEEAAAHQTALKTVESAALHPLIHVNTSDLSEQRFSSAFTGAEFFFADHKVKGKPVMPGVAYLEMVHAAVTRAVRRTEDQQSVIHIKNVVWVQPIVADGQPVQVDISLNPQQDGEIAFNVYTEAAHNDRKIHCQGSASIRGAGDIPVQDISALQDQCSLSTLSHDQCYELFKAIGIDYGPGFQGIDRLYIGRNQALAELSLPAGVTHTLNEFVLHPSMADSALQASIGLKLNSGDEQLSLPFALQELEIFSPCTNKMWVSVTSRPNEDKIQRLDIDLCDEQGRVCVRIKGITSRLLEEGIQPPDGPTSLGNSKATLNGALLMAPIWDRVQLEKRSISPADERVVILGGDDNSRKAVQREFPFAKELYIEPNASIHRITGQLEALGSFDHIVWMSPSRVTECEVGDEMIEAQDQGVIQMYRLIKAMLSLGYGQKEISWTIVTVNTQYVDQHDIVDPVDAGVHGLIGSMSKEYPNWQTKLIDVKKYEDLPLSQLLSLPADQEGNTWAYRNKIWHKLRLIPVHNNQPVHTKYKHGGVYVVIGGAGGIGEAWSEYMIRTYQAQIVWIGRRKKDAAIQSKLDRFARLGRAPYYIQADAANREELERAYETMKQTHREINGIIHSAIVLQDRSLMNMSEECFRNVLAAKVDVSVRMAQVFRHEPLDFVLFFSSVQSFARASGQSNYAAGCSFKDAFAQRLSQVWPCTVAVMNWSYWGSIGVVSSPDYQKRMAQAGIGSIEAPEAMEALELLLGGPLKQLVMMKMANETNDEAEQTEETIEVYPETHGSAIQKLRSYHPGDNTKIQQLL

SEQ ID NO: 42760 - protein, 167 aa, Ehrlichia canis str. Jake
MICKKKFLSPIINLFHSIIINCKGMYITLRYMFKPKVTLNYPLEKGPLSTRFRGEHALRKYKNGEERCIACKLCEAICPAQAITIEAQERDDGSRRTVRYDIDMTKCIYCGFCQEACPVDAIVEGPNFEYATETREELMYNKSKLLHNGQVWEEAIDFRIKKNSQFY

SEQ ID NO: 42761 - protein, 420 aa, Schizosaccharomyces pombe
MSGYSPLSSGPADVHIGKAGFFSSVINLANTILGAGILSLPNAFTKTGLLFGCLTIVFSAFASFLGLYFVSQCAARLPRGKASFAAVAKHTFPSLAVVFDASIAVKCFGVAVSYLVIVGDLMPQIAPSLGLSSPMFLRRQTWIVFALFVLTPLSFLKRLDSLRHTSVISLIALCYLVFIVLYHFIIGDTVKGEIRYFVPESGFGYLSVLPVFVFGFTCHQNAFSVINEVRNFSQGFVNFTMFTAIISSTLLYLLVAITGYLSFGSLASGNIIAMYDNTSIWIIGGKLAIVVLVLFSYPLQCHPCRNSVYQAIRRSYSAHDMSDGYHAVITLCILLFTHSLALLLSSLEMVLAFVGSTGSTFISFILPGSLYYFFSHKVASPGNSSPLQLRISRAFAAGLAIYGTVVMILCLNINIAKLSH

SEQ ID NO: 42762 - protein, 169 aa, Synechocystis sp. PCC 6803
MTAQANNTIYGFSANALDGSPVALRDFEGKVLLIVNTASQCGFTPQYQGLQALYNRFGDRGFTVLGFPCNQFGQQEPGGSGEIKNFCETRYGVTFPLFEKVEVNGPNAHPLFKFLTAASPGMAIPFLGGAEDIKWNFTKFLVDRQGKVVKRYGSIAKPDEIAADIEKLL

SEQ ID NO: 42763 - protein, 283 aa, Brassica napus
MAKDVEGAEGVTARDYEDPPPTPFFDAEELTKWSLYRAVIAEFVATLLFLYVTVLTVIGYKISSDTKAGGDDCGGVGILGISWAFGGMIFILVYCTAGISGGHINPAVTFGLFLARKVSLVRAVLYMVAQCLGAICGVGFVKAFQSAYYVRYGGGANSLADGYSTGTGLAAEIIGTFVLVYTVFSATDPKRNARDSHVPVLAPLPIGFAVFMVHLATIPITGTGINPARSFGAAVIYNESKPWDDHWIFWVGPFIGAAIAAFYHQFVLRASGSKSLGSFRSAA

SEQ ID NO: 42764 - protein, 394 aa, Burkholderia sp. 383
MTDAVIVSTARTPIGKAYRGAFNATHSPTLLGHAIRHAVLRAGVEPDRIEDAVIGSVLNAGTASLNIARNGVLAAGLPHSVGAQTLDRQCASGLMAIATAAKQIMVDGMEVVVAGGQENISAVQNRYFEWMRAEQDPNVLTAQPTAYMSMLETAEFVSRKYGISREVQDQYALDSQLRTAAAQAEGRFSDEIVPITTQMLVVDKATGQTSLKEVTLAQDEGNRPGTTLESLGALAPVVDGGVVTAGNASQLSDGASACVLMNAKTAQQLGVTPLGIYRGMTVVGNAPEEMGIGPLYAIPKLLKLHGLTIDDIGLWELNEAFACQVLYCRDKLGIDPARYNVNGGAISIGHPYGMTGARLVGHALIEGKRRGVRYVVVSMCVGGGMGAAGLFEVA

SEQ ID NO: 42765 - protein, 121 aa, Triticum aestivum
MHLRQQQQQQHRAEMVAPKGCVTVRVGADGEEQRRFAVPLDHLKHPLFGALLDEAEREYGFRHQGAIAIPCRVDRFVHVERLIDRDLGAHGHQLVDLDCGAATAHAHGHLHLPRFVGCFRA

SEQ ID NO: 42766 - protein, 136 aa, Zea mays
  misc_feature (9)..(9): Xaa can be any naturally occurring amino acid
  misc_feature (102)..(102): Xaa can be any naturally occurring amino acid
  unsure (1)..(136): unsure at all Xaa locations
DKSDNTIRXLAIFKVLNAYYNHPGLLMGCSPINHILYYKVMHYNPNNPYWFNHDRFVLSDSHSCMLHYALLHLACYDSVNEEDLKQIRQYRTKTPGHPENFXTPGVEVTTGPLGQSIPNAGGLALAEKHLAALLTS

SEQ ID NO: 42767 - protein, 411 aa, Propionibacterium acnes KPA171202
MTCAESRGAPVLPKRSGSRAVTDQRGAICGAATLVVKVGSSSLTLPGGGIDVRRVDDLVDALSEVIAVGRRVVLVSSGAIATGFPAMGITHRPRTLAGKQAAASVGQGILLAHYASRFASHGLRVGQVLLTVNDLVRPTSYRNAWSTLDTLLGLGVVPIVNENDTVATGEIRFGDNDRLAALVAELVRAQALILLSDVDALYTAHPDSPDARRVEVVEDIDTLDVDTHKAGSGVGTGGMTTKLEAARMATCAGVPVVLAAAVDAPDVLAGVPVGTYFRPLATRRPRRLLWLADAATPQGQIVIDDGAVEALTQRHSSLLAVGVTRVHGDFQAGDPVTILASDGRVVGRGIAQFSHDEVRVMRGRSSAWLAAEMGPAASREIIHRDAMVLSRRRKAEPSSRNQKSSGSRVTS

SEQ ID NO: 42768 - protein, 573 aa, Symbiobacterium thermophilum IAM 14863
MRMRHRVAIVGGGLAGLRAAIAVHDGGVKDVAIISQLPPVRSHSVAAAGGINGSLGNHPDGRDDNWEKHAFDTIKGSDYLADQDAAEILAKEAVNVIVETEHWGCPYSRNPDGTIAQRPFGGAGFPRTCYAADKTGHALLHTLYQQVLKRGIKIYQEVLVLSIVKHEDRAVGLVVMDIVSGEVGTVQADAILMATGGAGKIYAHSTNNLLNTGLGMALAYWAGVPLKDMEFIQFHPTGLWGTNILMTEGCRGEGGYLVNNQGERFMARYAPKAMELGPRDIVARSILTEILEGRGFNQGGPGGGYVHLDLRHLGEAKINERLPEVREICRNFAGIDPVYEPIPVQPSQHYTMGGIDTNIHGAARLKGLYAAGECACVSVHGANRLGGNSLLDTIVFGKLSGQHMAQYVQEDPVKANVDAVLDEAQKAVEARFRELFDGPGTESEAVLRVELQENMFNNVGIFRDEASLTAGLAKVRELRERYKGVKVRHTGKVYNMELIRAYELRGMIDVAEAIAAGALARKESRGSHARRDYPERDDANFLKHTLAYYTPEGVRLDYCPVTITRYQPQARKY

SEQ ID NO: 42769 - protein, 415 aa, Propionibacterium acnes KPA171202
MAMSSRVIEQAIAARSAATVLRRLRRIDKDDLLAAMGIGLRKGVDEILAANGADVDRGRDAGMDEALLDRLTLTPERIEGMAVGLEGVAHLDDPVGEVVRGWHTPLGVKIEQVRVPIGVIGIIYEARPNVTSDAAGICLKSGNACLLRGSSSALESNRAVIAAMRSRLPEEIREAVQLVEGGHEVTDELMTARGYVDLLIPRGGAGLINAVVTGAKVPVIQTGTGNCHLVIDVSADVEMAVNIAVNAKTQRPSVCNAIETVLVHRGIADSAVRPLVDAMSERGVTVHGDEESIRLDPRIVPAAPDEYDNEYLSLDLALRIVDDLEEAVDHIAKHGSGHSETIVTKSMSSQEFFASSVDAAAVLVNCSSRFVDGGEFGFGAEIGISTQKLHARGPMGLREMTTTTYVLRGDGQTRP

SEQ ID NO: 42770 - protein, 360 aa, Rickettsia marmionii
VIDISMVSAEADCFTYDPGFMSTASCQSTITYIDGDKGILRHRGYDIKDLAEKSDFLEVAYLLIYGELPSGEQYNNFTKQVAHHSLVNERLHYLFQTFCSSSHPMAIMLAAVGSLSAFYPDLLNFKEADYELTAIRMIAKIPTIAAMSYKYSIGQPFIYPDNALDFTENFLHMMFATPCTKYTVNPIIKNALNKIFILHADHEQNASTSTVRIAGSSGANPFACISTGIASLWGPAHGGANEAVINMLKEIGSSEYIPKYIAKAKDKNDPFRLMGFGHRVYKNYDPRAAVLKETCKEVLKELGQLDNNPLLQIAIELEAIALKDEYFIERKLYPNVDFYSGIIYKAMGIPSQMFTVLFAI

SEQ ID NO: 42771 - protein, 207 aa, Orobanche minor
KGGAKKVVISAPSKDAPMFVVGVNEKEYKKDIDIVSNASCTTNCLAPLAKVLNDRFGIVEGLMTTVHSITATQKTVDGPSMKDWRGGRAASFNIIPSSTGAAKAVGKVLPALNGKLTGMAFRVPTVDVSVVDLTARLEKAASYDEIKAAIKEESETNLKGILGYTEDDVVSTDFVGDCRSSIFDAKAGIALNGNFVKVVSWYDNEWG

SEQ ID NO: 42772 - protein, 292 aa, Legionella pneumophila subsp. pneumophila str. Philadelphia 1
MLTNIERAKLQLIDETNDMVIITKAEPLDAPNGPEVVWVNKAFENISKYKANEIIGQTPRILQGKETNQNTLKMIKEALKAQTNINVDLLNYTKDGTPYWISFSIVYLRDGQGNLCYLGAIEKDITALKNLNFKLSEKAKTDPLTNVYNQENFFIAGNEAIKNFHQNQEAVGLLFFDVDDFKGINDTQGHIYGDMILKKVAQESLKLVRKTDNVFRYGGDEFAIIFSGIDVKILERKAQQLQKKLAKSHISVSIGGTISIQSDKSINTLLARADEALYYVKANKKGLFFIAE

SEQ ID NO: 42773 - protein, 600 aa, Erwinia rhapontici
MSSQGLKTAVAIFLATTFSATSYQACSAGPDTAPSLTVQQSNALPTWWKQAVFYQVYPRSFKDTNGDGIGDLNGIIENLDYLKKLGIDAIWINPHYDSPNTDNGYDIRDYRKIMKEYGTMEDFDRLISEMKKRNMRLMIDIVINHTSDQHAWFVQSKSGKNNPYRDYYFWRDGKDGHAPNNYPSFFGGSAWEKDDKSGQYYLHYFAKQQPDLNWDNPKVRQDLYDMLRFWLDKGVSGLRFDTVATYSKIPNFPDLSQQQLKNFAEEYTKGPKIHDYVNEMNREVLSHYDIATAGEIFGVPLDKSIKFFDRRRNELNIAFTFDLIRLDRDADERWRRKDWTLSQFRKIVDKVDQTAGEYGWNAFFLDNHDNPRAVSHFGDDRPQWREHAAKALATLTLTQRATPFIYQGSELGMTNYPFKKIDDFDDVEVKGFWQDYVETGKVKAEEFLQNVRQTSRDNSRTPFQWDASKNAGFTSGTPWLKINPNYKEINSADQINNPNSVFNYYRKLINIRHDIPALTYGSYIDLDPDNNSVYAYTRTLGAEKYLVVINFKEEVMHYTLPGDLSINKVITENNSHTIVNKNDRQLRLEPWQSGIYKLNP

SEQ ID NO: 42774 - protein, 392 aa, Synechococcus sp. CC9605
MKAMILAAGKGTRVQPITHVIPKPMIPILQKPVMEFLLELLKEHGFTEVMVNVSHLAEEIENYFRDGQRFGVEIAYSFEGRIEDGELIGSALGSAGGLKKIQDFQHFFDDTFVVLCGDALIDLDLSEAVRLHKDKGAIASLVTKRVPKDQVSSYGVVVTDDQNRISSFQEKPSVNEALSDTINTGIYIFEPEVFEHIPSGQSFDIGSDLFPKLAELGAPFYAIPMDFEWVDIGKVPDYWQAIRSVLMGDVRQVGIPGKEVRPGVYTGLNVAANWDKINVSGPVYVGGMTKIEDGATIVGPTMIGPSCHICEGATVDNSIIFDYSRIGPGVQLLEKLVFGRYCVGKDGDHFDLQEASLDWLITDARRQDLVEPSPQQKAMAELLGTDLTQAAS

SEQ ID NO: 42775 - protein, 546 aa, Staphylococcus aureus subsp. aureus Mu50
MSKEIDWRKSVVYQIYPKSFNDTTGNGIGDINGIIEKLDYIKLLGVDYIWLTPVYESPMNDNGYDISNYLEINEAFGTMDDFEKLIKVAHQKDLKVMLDIVINHTSTEHEWFKEARKSKDNPYRDYYFFRSSEDGPPTNWHSKFGGNAWKYDSETDEYYLHLFDVSQADLNWDNPEVRQSLYRIVNHWIDFGVDGFRFDVINLISKGEFKDSDKIGKEFYTDGPRVHEFLHELNRQTFGNTDMMTVGEMSSTTIENCIKYTQPERQELNSVFNFHHLKVDYVDGEKWTNAKLDFHKLKEILMQWQRGIYDGGGWNAIFWCNHDQPRVVSRFGDDTSEEMRIQSAKMLAIALHMLQGTPYIYQGEEIGMTDPHFTSIAQYRDVESINAYHQLLSEGHAEADVLAILGQKSRDNSRTPMQWSDDVNAGFTAGKPWIDISENYHQVNVRQALQNKESIFYTYQKLIQLRHTHDIITYGDIVPRFMDHDHLFVYERHYKNQQWLVIANFSASAVDLPEGLAREGCVVIQTGTVENNTISGFGAIVIETNA

SEQ ID NO: 42776 - protein, 557 aa, Saccharomyces cerevisiae
MPIPVGNTKNDFAALQAKLDADAAEIEKWWSDSRWSKTKRNYSARDIAVRRGTFPPIEYPSSVMARKLFKVLEKHHNEGTVSKTFGALDPVQISQMAKYLDTIYISGWQCSSTASTSNEPGPDLADYPMDTVPNKVEHLFKAQLFHDRKQLEARSKAKSQEELDEMGAPIDYLTPIVADADAGHGGLTAVFKLTKMFIERGAAGIHMEDQTSTNKKCGHMAGRCVIPVQEHVNRLVTIRMCADIMHSDLIVVARTDSEAATLISSTIDTRDHYFIVGATNPNIEPFAEVLNDAIMSGASGQELADIEQKWCRDAGLKLFHEAVIDEIERSALSNKQELIKKFTSKVGPLTETSHREAKKLAKEILGHEIFFDWELPRVREGLYRYRGGTQCSIMRARAFAPYADLVWMESNYPDFQQAKEFAEGVKEKFPDQWLAYNLSPSFNWPKAMSVDEQHTFIQRLGDLGYIWQFITLAGLHTNALAVHNFSRDFAKDGMKAYAQNVQQREMDDGVDVLKHQKWSGAEYIDGLLKLAQGGVSATAAMGTGVTEDQFKENGVKK

SEQ ID NO: 42777 - protein, 639 aa, Arabidopsis thaliana
  misc_feature (574)..(574): Xaa can be any naturally occurring amino acid
  unsure (1)..(639): unsure at all Xaa locations
MEELDRSRAFARDVKRIVVKVGTAVVTGKGGRLALGRLGALCEQLAELNSDGFEVILVSSGAVGLGRQRLRYRQLVNSSFADLQKPQTELDGKACAGVGQSSLMAYYETMFDQLDVTAAQLLVNDSSFRDKDFRKQLNETVKSMLDLRVIPIFNENDAISTRRAPYQDSSGIFWDNDSLAALLALELKADLLILLSDVEGLYTGPPSDPNSKLIHTFVKEKHQDEITFGDKSRLGRGGMTAKVKAAVNAAYAGIPVIITSGYSAENIDKVLRGLRVGTLFHQDARLWAPITDSNARDMAVAARESSRKLQALSSEDRKKILLDIADALEANVTTIKAENELDVASAQEAGLEESMVARLVMTPGKISSLAASVRKLADMEDPIGRVLKKTEVADGLVLEKTSSPLGVLLIVFESRPDALVQIASLAIRSGNGLLLKGGKEARRSNAILHKVITDAIPETVGGKLIGLVTSREEIPDLLKLDDVIDLVIPRGSNKLVTQIKNTTKIPVLGHADGICHVYVDKACDTDMAKRIVSDAKLDYPAACNAMETLLVHKDLEQNAVLNELIFALQSNGVXFGLGAEVGISTSRIHARGPVGVEGLLTTRWIMRGKGQVVDGDNGIVYTHKDLPVLQRTEAVENGI

SEQ ID NO: 42778 - protein, 551 aa, Erwinia rhapontici
MRSTPHWKEAVVYQVYPRSFMDSNGDGTGDLNGIISKLDYLQQLGITLLWLSPVYRSPMDDNGYDISDYEEIADIFGSMSDMERLIAEAKARDIGILMDLVVNHTSDEHPWFIDALSSKNSAYRDFYIWRAPAADGGPPDDSRSNFGGSAWTLDEASGEYYLHQFSTRQPDLNWENPRVREAIHAMMNRWLDKGIGGFRMDVIDLIGKEVDPQIMANGRHPHLYLQQMNRATFGPRGSVTVGETWSATPEDALLYSAEERQERQELTMVFQFEHIKLFWDEQYGKWCNQPFDLLRFKAVIDKWQTALADHGWNSLFWSNHDLPRAVSKFGDDGEYRVVSAKMLATALHCLKGTPYIYQGEEIGMTNVNFADIDDYRDIESLNLYQERIAEGMSHEAMMRGIHANGPDNARTPMQWTAVHMPGLPPVSPGLRLILTSGQWNVAAALDDPDSVFYHYQKLVALRKQLPLLVHGDFRQIVVEHPQVFAWLRTLGEQTLVVINNFTRDAVMLAIPDNLQSQQGRCLINNYAPREQLEPIMELQPYESFALLIERL

SEQ ID NO: 42779 - protein, 269 aa, SYNECHOCOCCUS SP. WH 8102
MSSQMLSPIAQRFEQLKHEKRLALMPFLMAGDPDLATTSEVLLSLQNSGADMVELGMPYSDPLADGPVIQAAAARALAAGTTPGKVLEMLTSLKGQLTIPVILFTYSNPLLNVGMEAFCERAAAAGAAGLVVPDLPLEEAERLSPLAEQQGLDLVLLVAPTTPADRMVRIGQRSRGFTYLVSVTGVTGERAQMETRVEGLVEELKQSSAVPVAVGFGISGADQVRQVRSWGADGAIVGSALVKRMAAAGEGQIAEEAGQFCRELRNAAD

SEQ ID NO: 42780 - protein, 469 aa, Triticum aestivum
  misc_feature (382)..(382): Xaa can be any naturally occurring amino acid
  unsure (1)..(469): unsure at all Xaa locations
MADRWLELPNLALQVVGILPEVQRPSSMVPRCQKVAYTAISLLIYLVGSQLPVYGYGVRSPSVADSQYWVDMPDCNSVMSAGIMPLVLSEAVLHFLLWCKVLRANNPEDRMLLSRVQKLVGIIFAADFSVCRVLISPILGKLTLGQSILIVLQHFFGSVIVIYLDDLLKKGYGFLSSIPLFSATDICTSIFWKAFSPCIIKLYGGQHGDQHGEALTSSLIHRFVGNGNYKLSSMHKVYGCRDLPEMASVLSTCAFFLLVLSLQGFHAMLPLRSSEVPSMQMNYAIKLSYLSFAPLLFQDVMAIFLYIISELVYVKFGEKNKVVILLGKWKKSRYFGQAVPVSGLAYYVTTPPTLAEVGRHPFLTLVYALWQLLGCGLTSFSXFQCVGRLLGERRNVTVAQPDSVPLQLWRCYVGKAAFLVGLCIGALTLLADLAGVVGSGTGIMFALTVLYSCLEETSYRGGPAGAFGF

SEQ ID NO: 42781 - protein, 409 aa, Photobacterium profundum SS9
MELTTTVTELRYALDTFFFLISGALVMWMAAGFAMLEAGLVRSKNTTEILTKNFCLYAIACTTYLIVGYNIMYVDNGEGGWLPSIGALIGTQAEGADHSLESDFFFQVVFVATAMSVVSGAVAERMKLWSFLLFSVVLTAFIYPMEGYWTWGGGFLSEAGFSDFAGSGIVHMAGASAALAGVLLLGARKGKYGKNGEINPIPGSNMPLATLGTFILWLGWFGFNGGSQLMLSDFENASAVGQIFLNTNAAAAAGAVAALAVCKTMWGKADLTMILNGALAGLVAITADPLSPSPIASVIVGVVAGALVIFSIIMLDKIKIDDPVGAISVHGVCGFFGLMVVPFSNGDASFGAQLLGAAVIFAWVFTASFVVWFVIKVTIGIRVTEEEEMAGMDLHDCGVDAYPEFVSLK

SEQ ID NO: 42782 - protein, 215 aa, Synechococcus sp. CC9605
MFGFLKQVGDYTRDAVDAARNLAQGFSVTFDHMQRRPVTVQYPYEKLIPSERYRGRIHYEFDKCIACEVCVRVCPINLPVVDWVMNKATKKKELRNYSIDFGVCIFCGNCVEYCPTNCLSMTEEYELAAFDRHSLNYDNVALGRLPTSVTTDPSVVPLRELAYLPAGEMDPHGVASDRPRAGQLPAQVLETLTPPAKPTAKNDGQSSSEAKEGDA

SEQ ID NO: 42783 - protein, 284 aa, Arabidopsis thaliana
MALADSSCAGLETTESRLSCFFNKAIVNVGGDLVKLVPGRVSTEVDARLAYDTNGIIRKVHDLLRLYNEIDVPHDRLLFKIPATWQGIEAARLLESEGIQTHMTFVYSFAQAAAASQAGASVIQIFVGRLRDWARNHSGDTEIESAIKSGEDPGLALVKRSYNYIHKYGYKSKLMAAAVRNKQDLFSLLGVDYVIAPLKVLQSLKDSPAIPDDEKYSFVRKLTPETATHYHFTNKELVKWDQLSLASSMGPASVELLSAGVEGYANQAKRVEELFGKIWPPPNV

SEQ ID NO: 42784 - protein, 160 aa, Medicago sativa
MDFRLMGLMLQCYTALHQMMDLSDENVEKSSSHNAPTRSYVRDAKAMAATPADVKENPNSYVFVIDMPGLKSGDIKVQVEDDNVLVISGERKREEEKEGGAKYLRMERRVGKFMRKFVLPENPNTDAVSPVCQDGVLTVTVQKLPPPRPKKPRTIEVQIA

SEQ ID NO: 42785 - protein, 552 aa, Bacteroides fragilis NCTC 9343
MEQSFIAYIENSIKNNWDLDALTDYKGATLQYKDVARKIEKLHIIFEESGIRKGDKIAVCGRNSSHWGVTFLATLTYGAVIVPILHEFKADNVHNIVNHSEAKLLFVGDVVWENLNESAMPLLEGILMMNDFTLLVSRSERLTHAREHLNEMFGKKFPKNFRKEHIEYHKDQPEELAVINYTSGTTSYSKGVMLPYRSLWSNMAFAFEVLPLKAGDKIVSMLPMAHMYGLAFEFLYEFAVGCQIYFLTRMPSPKIIFQAFADVKPNLIVAVPLIIEKIIKKSVLPKLETPTMKLLLKVPIINDKIKATVREEMIKGFGGNFEAVIVGGAAFNQEVEQFLRMIDFPYTVGYGMTECGPIICYEDWKRFKPGSCGKAALNMEVKVLSPDPENVVGEIVCKGPNVMLGYYKNEEATAQVIDKDGWLHTGDLALEDAEGNITIKGRSKNMLLSASGQNIYPEEIEDKLNNLPYVAESIIVQQNDKLVGLVYPDFDEAFAHGLKNEDMERVMEENRITLNEMLPAYSQISKMKIYPEEFEKTPKKSIKRFLYQEAKG

SEQ ID NO: 42786 - protein, 484 aa, Actinobacillus actinomycetemcomitans
MSAKCPFDHNSATLTTAAGAPVVDNDNTMSAGPRGPLLLQDVWYQEKLAHFARERIPERVVHAKGSAAFGTFTVTHDITQYTKAALFSEVGKQTEVLLRFSTVAGERGAADAERDVRGFSLKFYTEQGNWDLVGNNTPVFFIRDPLKFPDFIHTQKRNPQTNLRDATAAWDFWSRHPESMHQIMILFSDRGIPASLRNMNGYGSHTYSFINADNERFWVKFHFKTQQGHKFLTNAEAAKVVGEDRESSQRDLYDAIANGNFPRWNVRIQIMPEADAEKHNYSFDLTKVWPHKDYPLIDVGVLELNRNPQNYFAEVEQAAFAPNNNVPGIGFSPDRMLQGRLFSYQDAQRYRLGVNHHQIPVNAPKCPYHTTHRDGAMRVDHNGGTHPNYAPNRFDTYVPTHDQGPSLQLEREGAHFNFRDYDEDYYSQPAALYAIMDAAQRDRLAGNFAASLAEVTDDAIVEHQLVHFERVNTELANAIRTKLA

SEQ ID NO: 42787 - protein, 181 aa, Triticum aestivum
  misc_feature (14)..(14): Xaa can be any naturally occurring amino acid
  misc_feature (29)..(29): Xaa can be any naturally occurring amino acid
  misc_feature (94)..(94): Xaa can be any naturally occurring amino acid
  unsure (1)..(181): unsure at all Xaa locations
YSPWPPTVMASSAXTSVAPFQGLKSTAGXLPSAAAPTAASLGSVSNGGRIRCMQVWPIEGIKKFETLSYLPPLSTEALLKQVDYLIRSKWVPCXLEFSKVGFIFREHNASPGYYDGRYWTMWKLPMFGCTDATQVINEVEEVKKEYPDAYVRIIGFDNMRQVQCVSFIAFKPPGCEESGKA

SEQ ID NO: 42788 - protein, 499 aa, Synechocystis sp. PCC 6803
MNSSLVILYHREPYDEVRENGKTVYREKKSPNGILPTLKSFFADAEQSTWVAWKQVSPKQKDDFQADMSIEGLGDRCTVRRVPLTAEQVKNFYHITSKEAFWPILHSFPWQFTYDSSDWDNFQHINRLFAEAACADADDNALFWVHDYNLWLAPLYIRQLKPNAKIAFFHHTPFPSVDIFNILPWREAIVESLLACDLCGFHIPRYVENFVAVARSLKPVEITRRVVVDQAFTPYGTALAEPELTTQLRYGDRLINLDAFPVGTNPANIRAIVAKESVQQKVAEIKQDLGGKRLIVSAGRVDYVKGTKEMLMCYERLLERRPELQGEISLVVPVAKAAEGMRIYRNAQNEIERLAGKINGRFAKLSWTPVMLFTSPLAYEELIALFCAADIAWITPLRDGLNLVAKEYVVAKNGEEGVLILSEFAGCAVELPDAVLTNPYASSRMDESIDQALAMDKDEQKKRMGRMYAAIKRYDVQQWANHLLREAYADVVLGEPPQM

SEQ ID NO: 42789 - protein, 214 aa, Clostridium tetani
MKFFIDTANVEEIKKVAKWGVLDGVTTNPTLIAREGRDLKEVIEEICSIVDGPISAEVISLESEKMVEEAKELIKIHKNIVIKVPMCEEGLKAVSELTKLGIKTNVTLIFSAQQALLAAKAGATYVSPFLGRIDDIGSFGIQLVEDIVTIFTNFGIESEIICASIRTPIHVLECARVGGDIATVPYKVFAQMLKHPLTDRGIEQFLEDYKSMNK

SEQ ID NO: 42790 - protein, 480 aa, Deinococcus radiodurans R1
MRFPAQALSSAHSKLSHPRRERVTATPSPTVHPVDEVPAAQNLLVFGLQHVMSMYAGIVAVPLILAGALGLDATTAARIVSASFFMCGLATLVQTLGVGPFGAKLPIVQGTTFAAVGTMILVGKEFGLPGIYGAVIAGGLFTILLAPYFSRLLRFFPPVVSGTVITMIGISLLPVAFNWAGGGVGNPNFGSPGNLGLAAITLLIVLLISRFGRGYLGRIAVLLGLVIGSVIAALFGQVNGAPISSAAWVGFTPPLAFGAPTWHLVPILSMLLVMLVVMVETTADLLAIGEITGKKVGPREVAAGLRADGLSTAVGGLFNSFPFTAFAQNVGLVRFTGIKSRFVVAAAGVILLLMGFFPKLSALVASIPLPVLGGAGLVLFASVAVSGIQTLAKVDLSDTRNLTVVSVSLALGLIPSTVPGLYAHLPAQAQLFLGSGITAASLCAILLNILFNIVGSDRPRPSATATVAEHAPEPGDLAEH

SEQ ID NO: 42791 - protein, 396 aa, Rubrivivax gelatinosus PM1
MSLFASVELAPRDPILGLNEQFNADPNPAKVNLGVGVYYDENGKLPLLKCVAAAEHQMLEAPKARGYLPIDGIAAYDKAVQGLVFGDAATASGRIATVQGLGGTGGLKVGADFLKRLNPNAQVLISDPSWENHRALFTNAGFTVGTYPYYDAAQRGIAIDGLLGALNTAAAGTIVVLHACCHNPTGYDLSAAQWEQVIAAVKARGLVPFLDMAYQGFGQGIAEDGAVVQQFLASGLDFFVSTSFSKSFSLYGERVGALSVVCASKEEASRVLSQLKIVIRTNYSNPPTHGASVVATVLTTPALRAQWEQELAGMRQRIKAMRVALVEKLQAAGVKGDLSYITTQQGMFSYSGLNAAQMQRLRSEFGIYGVDSGRICVAALNQHNLDAVAKAIAAVI

SEQ ID NO: 42792 - protein, 217 aa, Caulobacter crescentus CB15
MLSLHKTLEMPSADTALPGRAAPIPTAQTHFVNGHALKGPYPEGLETAIVAMGCFWGVERVFWKVPGVYVTAAGYAAGITPNPTYEEVCTGRTGHTEVVLVVFDPKVVTYEALLKTFWENHDPTQGMRQGNDIGTQYRSGLYVTSDAQAAAAAESKAAYQQALSARGLGTITTEIAPAGPFYFAEDYHQQYLAKNPNGYCGIGGTGVVCPIGLGVEG

SEQ ID NO: 42793 - protein, 556 aa, Bacillus clausii KSM-K16
MEWWRTSTVYQIYPKSFNDTTGNGIGDLQGIIEKLDYLKELGIDVIWLTPIYASPQNDNGYDISDYYAIHEDYGTMADFEELLNETHKRGMKLIMDLVVNHTSTEHQWFKNAKLSKQAKYRDFYIWKEGKEGGAPTNWQSKFGGSAWEYNEATDDYYLHLFDVTQADLNWENEQLRKHVYEMMHFWFNKGIDGFRLDVINLISKDQRFPDDDGSVAPGDGRKFYTDGPRVHEYLQEMNREVLAKYDSLTVGEMSSTTIEDCIRYSNPKQRELSMTFNFHHLKVDYPNGEKWAVADFDFKALKQILSEWQVRMHEGGGWNALFWCNHDQPRVVSRYGDEDEYHNQSAKMLAATIHFMQGTPYVYQGEEFGMTNPNFTSIDDYRDVESLNVYARLKEEGVPEEHILAILKQKSRDNSRTPVQWDSSEQAGFTTGTPWIKVSSNYKEINAKKALSDPNSIFYFYQKLIALRKKLPIVTTGDYRLLVPEHDHVFAYVRTDGTEKLLVVSNFYPVNCDFECPEDLVSLKATQLISNYNQKRKLEKTFSLKPYETVAFQLKE

SEQ ID NO: 42794 - protein, 823 aa, Neurospora crassa
MKTAKPPAAEAPSGPSGSNRRAQPVRQTRINPPRTSSLNRTNSFPNGPTPEQPIDIFPAVTHFTDAITALPKELVRHFTLLKEVDAKIFAPEATLFELVDAALKAPVPDRTRSVTDGNNSVAPASTPMSAQNSTSGRVASNANPATVPPSITDSAHAAVFDPTNLPRRHLFRQAAWKIQEMLVSLEEKNHVISTANDALHKQLSRIEEIWPHLENEFSDEAKWGSTTHWAYAENRVPKTNHKEAERSRREGAATLSAAAQQIAEEAAARSSDRKQALAAKKNNKGQATEPEADSKAQETTKKGPGTGKSRKHQAEATPVGLGIANGTPTNGTGPSKRRKVEKEPKANGSAPMERAMSSVFGNGTAKSKTTASPRGSPAPDGATPTGPTTKKRKALPSGSTQAKKRTNAANSPSVAASPLLGSLPDTKAGRNSPVPLPPRPASSRARGNSTASTTLPIQQRPATATTNKPNGITPAVAEAVPQSKSTSDAKAPKEADPPAPTPAKTEAAKPETEIKPPVPPEPVANASTSKKENSKAVTAPAEEPETKKRTNSIVSQTAILPPPISTTVTTTKSGRASKPSTPATGTFAEAANATTTTARSRPSRNSTNQSDKDSNSTSGKDTFGNSTTTTSGTTTSKRSHKKGASSVSAVAVSVALQDEKPGKSAAASDEKKDAASDENSGRPTTSGRGKGSAAAHRDSKAERGSERDRGGERDTKTETNHGHGHGRRGTATAAAARAQQQQPQHQQRQEEEDDDDDDDDVDADEQRYCFCNGISYGEMVACDGDGCPREWFHLECVGLKVAPKGNAKWYCEDCKKRLRASGR

SEQ ID NO: 42795 - protein, 515 aa, Neurospora crassa
MARLLSSTRKVILQYALTALLFQSTSASQIQHRAPQVTAAPTATTAPAAVPTAISGCHLHDTEVFCMAGETEYSIHTTATATSELPAQFTGCHSHDDALFCVTPSGDDVEISRVIEESEQGHDDHDHDEDEATSSTTTSEKKCHFHAGVEHCTGGDEHEEESATCERTDRDYNIRLRVGLLFAMLATSSIGVFGPILLSNFVSPNNVFVTILRQFGTGVVISTAFIHLLSHAQLMFASECLGELSYEGTAGAISMAGIFISFLAEYLGVRVLQWHAAKTEARNIENGGERGDSAQRAEMVNILVLECGVIFHSILIGITLVVAGDTFFLTLFAVIVFHQMFEGIALGSRIAALGTLPPINAASSVHGHSHHGHSHNHAHEVKRSSLPTESTSPTGTDHGVVSEDESARVTVIKPVSLKKKLVLASGFALVTPIGMAIGIGVLKQFNGNDPSTIIAIGTLDALSAGILMWVGIVEMWAHDWMLGGEMTTASPLRTLAGLTALVAGLALMSLLGKWA

SEQ ID NO: 42796 - protein, 161 aa, Bacillus clausii KSM-K16
MSVYDFSVKTSNGQDVSLSAYKGNVLLIVNTATKCGFASQFAGLEKLYNDYKEKGFYVLGFPSNQFLNQEPVADEDMEQVCKINFGVTFPLFAKTDVKGKHANPLFNYLKAAKKGMLSEEIKWNFTKFLVNRKGEVIKRYAPATKPETIEADVIEELKADA

SEQ ID NO: 42797 - protein, 262 aa, Zea mays
MSRPVSDTMAALMAKGKTAFIPYITAGDPDLATTAEALRLLDGCGADVIELGVPCSDPYIDGPIIQASVARALASGTTMDAVLEMLREVTPELSCPVVLLSYYKPIMFRSLAKMKEAGVHGLIVPDLPYVAAHSLWSEAKNNNLELVLLTTPAIPEDRMKEITKASEGFVYLVSVNGVTGPRANVNPRVESLIQEVKKVTNKPVAVGFGISKPEHVKQIAQWGADGVIIGSAMVRQLGEAASPKQGLRRLEEYARGMKNALG

SEQ ID NO: 42798 - protein, 61 aa, Brassica napus
VDPRVRESIHEDGARAQVKLVDFAHVHDGNGVIDHNFLGGLCSFINFVRDILQSSDESTDN

SEQ ID NO: 42799 - protein, 542 aa, Flavobacterium psychrophilum
MAKNIKFDIEARDGLKRGVDALANAVKVTLGPKGRNVIIGKSFGGPTVTKDGVTVAKEIELQDPLENMGAQMVKEVASKTNDLAGDGTTTATVLAQAIVKEGLKNVAAGANPMDLKRGIDKAVEAIVADLTKQAKVVGSDSEKIKQIASISANNDEVIGELIANAFAKVGKEGVITVEEAKGTDTYVDVVEGMQFDRGYLSPYFVTNPEKMDAELENPYILLYDKKVSSLKELLPVLEPVAQSGKPLLIIAEDVDGEALSTLVVNKLRGALKIAAVKAPGFGDRRKAMLEDIAILTGGTVISEERGFTLENTTIEMLGTAKRVTIDKDNTTIVSGAGEADMIKNRVNQIKGQMEASTSDYDKEKLQERLAKLAGGVAVLYVGAASEVEMKEKKDRVDDALHATRAAVEEGIVAGGGVALLRAKNVLKDIKADNADEATGIQIVSRAVEAPLRTIVENAGLEGSVVVAKVAEGSGDFGYNAKTDEYVDMLKAGIIDPKKVTRVALENAASVAGMILTTECALVEIKEENAGGGQMGGGMPGMM

SEQ ID NO: 42800 - protein, 498 aa, Bradyrhizobium sp. BTAi1
MTPTAATRTTPSATASLRERLKDGSLLREQCYIDGSWVGVPVFPVNNPATGAELAKVAQLGAAETTQAVEAAARAFPAWAKLTAKQRSNLLRKWFELIVANREDLALILTSEQGKPLNEALGEVDIGAAYIEFFAEEARRVYGETIPTQKPDARLLALKQPIGVCGAITPWNFPNSMITRKVSPALAAGCTVVLKPANETPLSALALAVLAERAGIPKGVLNIITGDAPPIGKVLCEHPAVRFVGFTGSTEVGKILYRQSAGTVKKLGLELGGNAPFVVFDDADVDAAVEGAIVSKYRNMGQTCVCANRLYAQDGIYDAFVEKLAARVAAMKIGDGTEAGVVQGPLINEEAVEKVERHIADAVKGGATIVTGGKRHALGRTFFEPTVLSNVKADALVAHEETFGPLAPVIRFQSEADVIAMCNASPFGLASYFYARDLGRVWRVAEALESGMVGVNTGLITTEVAPFGGVKESGLGREGSHHGIEEYLEIKYVMMAGV

SEQ ID NO: 42801 - protein, 366 aa, Sorghum bicolor
RPLEYAWNKAANILFAESPAGVVFSYSNTSSDLSMGDDKMAQDTYTFLVKWFERFPHYNYREFYIAGESGHFIPQLSQVVYRNRNNSPFINFQGLLVSSGLTNDHEDMIGMFELWWHHGLISDETRDSGLKVCPGTSFMHPTPECTEVWNKALAEQGNINPYTIYTPTCDREPSPYQRRFWAPHGRAAPPPLMLPPYDPCAVFNSINYLNLPEVQTALHANVSGIVEYPWTVCSNTIFDQWGQAADDLLPVYRELIQAGLRVWVYSGDTDSVVPVSSTRRSLAALELPVKTSWYPWYMAPTEREVGGWSVQYEGLTYVSPSGAGHLVPVHRPAQAFLLFKQFLKGEPMPAEEKNDILLPSEKAPFY

SEQ ID NO: 42802 - protein, 1197 aa, Xylella fastidiosa 9a5c
MRGALLTALLVLVSLLTATAAVPEMPRFRVLDATSGLPSNVVRAMLQDAAGYLWLATSDGLARYDGTAFKVWRHDPNDSGSLPGDSVLALYIDVQDRIWVLSENAGLAVLDAQRRRFIQVPVGSVAKTDALHTLTGHGDAIWLSDLHASVIRIDSAGALTRYALADVSPTLKDTPVVALTFDANGRLWVGTPDGLLYFEAGRLHLAPPPLDKASIHSIAAVGSRLWVGSTDGVYLQDAEGRWRAPNWGPMFASGNLLLSVADAGDGEFWLGSERGLWRTRQERPPVQIPLSDMHHGVSTVSSLWRDTSGGLWVPVYGRGLGYLRQDWKRMAVVRPSDGGESAYCNVAPAAYSGGLWQLNRIGELMHLNTSTGELVHTGWQRHELRGMNITTTLEDSRGRLWLANMQNGLSRLDLKNGQWREWAAHEDDAVPLYGPISWIVEMPDSSLWLEALGVLQQRDLESGRVLNQIVPGSHGLDGSRVEQIGLGPDGRLWLAAGSGVYAWESQRRMFVPISDLTGTRAYSFVPVGGNEVWVHRLRGLEQWRHSSHGWKRVALVGPQHGLPAMESLGMQHDAQGRIWLSTRRGLWRIDNTDELQVRNFGLRDGLGTQEFAEACLWMAPDGVLVGGTTDGYLMLFDTAMPDPAPFVPQLRMETVSVIRAGRRIDLPVDQPFELLPNDRQLIVGARLLSFGDPLSNRYSYWLKGFDTGWIDQGSSGTREFSSLPPADYTLLIQGTDPMGNLSRIHLVTFRVLPPWWRSAWGMSVLTGSGLLLLWGVAWNYHRRLRRRACLQLEQHQREVAERASLAKTQFLATLGHEVRTPMTGVLGMSELLLETPLDTRQHGYATSIQAAGKHLLRLVNDALDLAKIEAGKLSLERRDFDFHALLEQVVAMIRPMVERKGLRFVYRLDPEVPQYVHGDTDRLQQILLNLLINATKFTEHGEVVLQVAPGQEQACLGVRIDVADTGPGLSEEQCQRLFRRFEQVNGASTAARYGGSGLGLAICRELATVMEGEIHVDSELGKGTCFRVLLPLPWVLAVQHAVAVMDAEPSPCSNPLHLLLIEDDPTVAEVIVELLRVRGHRVTHALHGLEALVEVTLTRFDACLCDLDLPGLDGAGLIVQLRAQGQFFPIVVVTARTDADAQRQALQVGCDAFLRKPVTGEMLEQVLTQVLSAPRQEADVDTPKKGMEWEGPGSVTR

SEQ ID NO: 42803 - protein, 120 aa, Glycine max
MAPTVMMASSATAVAPFQGLKSAASLPVARRSTRSLGNVSNGGRIRCMQVWPAYGNKKFETLSYLPPLSTDDLLKQVDYLLRNGWIPCLEFSKLGFVYRENSTSPCYYDGRYWTMWKLPM

SEQ ID NO: 42804 - protein, 576 aa, Bacteroides thetaiotaomicron VPI-5482
MNAIKNITVGHTERLRKPVGYTMLANLVNIVPFCLSIEAINVIFRTFDGSGTPLDTNRLWMIFAILVVYMVVMAFAERAAYRANFRGAYEMSAEGRINLAEHLRKLSLGFLSRRDPGDLSSMLITDFTMAETGISHHLPQLMGALVMPVFAFLGLLWIDWRMAVAMFVALPLAVAVLLLSNIAQRKLSVRQIEAKINAGNRLEEYLQGIRVMKAYNLLGGKFERLKMAFSDLRRACIRQEALLGPFILFSVTLIRAGLTFMILCGTYLLIGGELSLLTFVMFLVVGSRVFDPLTSALTNFAEFRYFSIAGGRILTLMNEPEMKGDRDVPESGDITFDHVSFGYQEKEILHDISVTLRKGTLTALVGPSGSGKSTMLKLCARFYDPRKGSVRFNGMDMKELEPESLMKHCSMVFQDVYLFQDTLKNNIRFGRTDATDEEIVAAAKKACCHEFIMRLPKGYDTMVGEGGCTLSGGEKQRISIARAMLKEAPVVLLDEATASLDPENEVEVQQAINTLIAGRTVIVIAHRLKTIRNADRIIVLEEGRIAEQGTHDELLSRPGLYAKLWNIQEQTSGWKL

SEQ ID NO: 42805 - protein, 366 aa, Methanosarcina barkeri str. fusaro
MKVMIIGGFLGSGKTTTILRISRQLINAGKKTAIIVNEIGEIGLDGDTLTSPGIVTKELTSGCICCTLRISMQYTLQTLEEEFMPDVVIIEPTGIAFPGQIREEIETMGLSELSFSPIVTLVDPGRFGTEAKEIPRFIETQIKDAEILCINKIDVTPVETVLATEKMLYEMNPEAQILKFSAKHQDNQFEKLLHHLAVPGFKKPSQEKKNSIEISEVSAYSALYTLGSRDFSPEENMRFVEENLQTIQNKVRAINPEFVGHLKLSMKLSKSAVKGSVTSSKEVPQVELLPARENENIELRLLSAITKVPKHKLIEIIESTIEGNLEKSGFIFEKEVHEHDTNAHAESHHEHENEQICKVNIYRKDN

SEQ ID NO: 42806 - protein, 552 aa, Erwinia rhapontici
MANWWKEAVAYQIYPRSFNDSNNDGIGDLNGITEKLDYLEDLGIDLIWICPMYQSPNDDNGYDISDYQKIMAEFGTMDDFDRLLEQVHARGMRLIIDLVVNHTSDEHPWFLASSASRDNPKRDWYIWRDGKAGAEPNNWESIFNGSAWKYSAATGQYFLHLFSEKQPDLNWENPEVRSAVYAMMRWWLDKGVDGFRIDAICHMKKEPTFSDMPNPLALPYVPSFERHLNYDGLLDYVDDMCEQVFSHYDIVTIGEMNGASAEQGEEWVGEQRGRLNMIFQFEHVKLWQDGQKDTLEASLDLPGLKEIFTRWQTLLENKGWNALYVENHDLPRVVSGWGDDKNYQRESATAIAAMFFLMKGTPFIYQGQELGMTNTHFASLEDFDDVAAKKLAVEMRRQGREEPEILAFLSRTGRENSRTPMQSDQSAHGGFSNATPWFPANSNYPVINVADQRADSGSVLNFYRALIRLRRQMPVLIEGAYQLLLPTHPQIYAYTRRLNEQQVLVIVNFSAHQQEIDPQQLLLDGWQPLLSNYQEQGKRQILRAYEAQIYQR

SEQ ID NO: 42807 - protein, 480 aa, Rhodiola sachalinensis
MGSETRPLSIFFFPFMAHGHMIPMVDMARLFASQGVRCTIVTTPGNQPLIARSIGKVQLLGFEIGVTTIPFRGTEFGLPDGCENLDSVPSPQHVFHFFEAAGSLREPFEQLLEEHKPDCVVGDMFFPWSTDSAAKFGIPRLVFHGTSYFALCAGEAVRIHKPYLSVSSDDEPFVIPGLPDEIKLTKSQLPMHLLEGKKDSVLAQLLDEVKETEVSSYGVIVNSIYELEPAYADYFRNVLKRRAWEIGPLSLCNRDVEEKAMRGMQAAIDQHECLKWLDSKEPDSVVYVCFGSTCKFPDDQLAEIASGLEASGQQFIWVIRRMSDDSKEDYLPKGFEERVKDRALLIRGWAPQVLILDHQSVGGFVSHCGWNSTLEGISAGLPMVTWPVFAEQFYNEKLLTEVLKIGVAVGARKWRQLVGDFVHKDAIQRAVREIMEGEEAEERRIIARQMGKMAKRAVEKDGSSWTNLNNLLQELKLKKV

SEQ ID NO: 42808 - protein, 228 aa, Triticum aestivum
GVDTSGDGVKLTLEPSAGGEQSILEADIVLVSAGRTPYTAGLGLDAIGVEMDKAGRILVDKRFMTNVSGVYAIGDAIPGPMLAHKAEEDGVACVEFLAGKEGHVDYDLVPGVVYTHPEVASVGKTEEQVKASGIAYRVGKFPLMANSRAKAIDDAEGMVKVVADKETDKILGVHIMAQNAGEIIHEAVLALQYGASSEDVARICHAHPTVSEALKEACLQTHSKAIHI

SEQ ID NO: 42809 - protein, 397 aa, Synechococcus sp. CC9605
MVAQQQTGDLRHARTGIELRPGLDGVPATQSAICDIDGEKGLLTYRGYPMQDLAANSSFLETAYLLIWGELPGRDQLAEFEHAVQMHRRVSFRVRDMMKCFPASGHPMDALQSSAASLGLFYSRRAIDDPQYIYDAVVRLIAKIPTMVAAFQLIRKGQDPIQPRDDLAYSANFLYMLTEREPDPLAARIFDRCLMLHAEHSLNASTFSARVTASTLTDPYAVVASAVGTLAGPLHGGANEDVLAMLEQVGSPENAGAFLDEAIAAKRKIMGFGHREYKVKDPRAVILQTLVEEMFASFGHDDLYDVARAIEAEAASRLGPKGIYPNVDFYSGLVYRKLGIPRDLFTPVFAIARVAGWLAHWREQLGANRIFRPSQIYSGSQPRSWMPIEERVSAPAA

SEQ ID NO: 42810 - protein, 129 aa, Crocosphaera watsonii WH 8501
MEKATFGAGCFWGVEAAFRKLKGVISTSVGYMGGHWPNPCYLDVCARVTGHAEVVQIEYYPTIISYEYLLENFWNIHDPTSLNRQGYDRGEQYRSVIFYHNSTQEKIARHSKIKMPNSGQYKKDIVTET

SEQ ID NO: 42811 - protein, 777 aa, Kineococcus radiotolerans SRS30216
MTEQLPAWTATVLGYPRTGADREAKKALEALWAGRADLASTERALAGVRAATVRRLNSLGLPAHDASIPSAFSAYDQVLDAAVAVGAVPPRFADVVGEDGRVDLAGYSTIARGRGADAPLEMTKWFDTNYHYLVPEIGPGTAFRFADDRGVREFSEALADGFLTRPVVVGPVTFLLLAKAAGGSPEGFAPISRLDDLLGAYEDLLTAYAAAGAEWVQLDEPALVSDSATAGVEGLAGLVRAAYDRLAAVEGRPRLLVATPYGDPGELLEPLAATAVEGLALDLVRGDVPARPELLTGKTVVGGVVDGHNVWRADLVAALARLRTLEGPAARVVAGTSTSLLHVPHDVTRETALDERLRGWLAFADQKVSEVVVLGRALGDAAAVREELSASARARADRTGAPGVVRPEVRERLAALTPEAFHRSDYAVRRLAQEEALGLPALPTTTIGSFPQTAEIRRARAAWTRGDLDQGAYEEFLRAEIDRVVALQEELGLDVVVHGEPERNDMVQYFAEQLDGFAVTAHGWVQSYGSRCVRPPILWGDVVRPAPITVPWSTYTASRTPKPVKGMLTGPVTILAWSFVRDDQPLGDTARQVALALRDEVADLEAAGIGVVQVDEPALRELLPLRTGDQPAYLDWSVGSFRLATAGAGDATQIHTHLCYSEFGEVIDAIDGLDADVTSIEAARSRMEVLDDIARAGFARGIGPGVYDIHSPRVPSTEEIAGLLRAAVASVPARQVWVNPDCGLKTRGYAETTESLRNLVEAARTVRAELPVPAAAS

SEQ ID NO: 42812 - protein, 152 aa, Arabidopsis thaliana
MTKRAPKSGPLSPSCSGGSSRNLELAVKSSEGARRSTRLRLQPLRKPKTSPKKKPVKLQTKMPKKPATAFFFFLDDFRKQYQEENPDVKSMREVIGKTCGEKWKTMTYEEKVKYYDIATEKREEFHRAMTEYTKRMESGAHDESETDSDYSE

SEQ ID NO: 42813 - protein, 460 aa, Oryza sativa
  misc_feature (240)..(240): Xaa can be any naturally occurring amino acid
  unsure (1)..(460): unsure at all Xaa locations
MATPTTNGSFLLGSGGYPGAQILSFSSSGHSGNEMCPLSPKMQSLLNPLEMALTLFTLPSSSERGLDCGSSDVARMQGVLARVRGPFTPTQWMELEHQALIYKHIVANAPVPAGLLLPIRRSLHPPVFPHFSSGGILGSSSLGWGSFQLGYSGSADSEPGRCRRTDGKKWRCSRDAVVDQKYCERHINRGRHRSRKHVEGQSSHAAKATVPAIAQPPIGASNGQLSGSHGVSNELTKTLXATNRMMLDKANLIERSPEYTNQQHNILQNNTKGDNWSEEMSSQADYAVIPAGSLMNTPQSANLNPIPQQQRCKQSLFGKGIQHDDIQLSISIPVDNSDLPTNYNKAQMDHVVGGSSNGGNNTRASWIPGSWEASIGGPLGEFFTNTSSASDDKGKSRHPPSLNLLADGHTTSPQLQSPTGVLQMTSFSSVPSSTVSSPAGSLCNGLLTSGLVNAQTVQTL

SEQ ID NO: 42814 - protein, 456 aa, Issatchenkia orientalis
MSLRNFARSATRAYSTAEPTLKERFAELLPGWQAEVKELKSKHGKTVIGEVLLEQAYGGMRGIKGLVWEGSVLDPVEGIRFRGKTIPDIQKELPKAEGSSEPLPEALFWLLLTGEVPTLAQTKAFSAELASRSALPKHVEDLLDTCPTTLHPMAQFSIAINALESESKFAKAYADGVNKKEYWKYTYEDSIDLLAKLPNVAAKIYRNVFKDGKVAPVNASLDYSHNFANMLGFGDNKEFVELMRLYLSIHSDHEGGNVSAHTTHLVGSALSSPYLSLAAGMNGLAGPLHGRANQEVLEWLVGMKKELGDDIFNKEKIEEYLWKTLNAGRVVPGYGHAVLRKTDPRYTAQREFALKHMPDYDMFKLVSNIYEVAPKVLAEQGKTKNPWPNVDSHSGILLQYYGLTQESYYTVLFGVARAFGVLPQLIIDRGLGMAIERPKSFSTQKYKELVENLNKA

SEQ ID NO: 42815 - protein, 342 aa, Zinnia elegans
MAFIFSSKKTSAFLCICIGFGMFGFSHEFSILGYAPEDLTSIHKVIHLFESSLVKHSKIYESFDEKLHRFEIFMDNLKHIDETNKKVSNYWLGLNEFADLTHEEFKNKFLGFKGELAERKDESIEQFRYRDFVDLPKSVDWRKKGAVSPVKNQGQCGSCWAFSTVAAVEGINQIVTGNLTVLSEQELIDCDTTFNNGCNGGLMDYAFAYVTRNGLHKEEEYPYIMSEGTCDEKRDASEKVTISGYHDVPRNNEDSFLKALANQPISVAIEASGRDFQFYSGGVFDGHCGTELDHGVAAVGYGTSKGLDYVIVRNSWGPKWGEKGYIRMKRNTGKPMGCVAYI

SEQ ID NO: 42816 - protein, 624 aa, Oryza sativa (indica cultivar-group)
MAAHRWAVWAVLLLRLLVPAARVLANMEGDALHSLRTNLVDPNNVLQSWDPTLVNPCTWFHVTCNNDNSVIRVDLGNAALSGTLVPQLGQLKNLQYLELYSNNISGTIPSELGNLTNLVSLDLYLNNFTGPIPDSLGNLLKLRFLRLNNNSLSGSIPKSLTAITALQVLDLSNNNLSGEVPYKHGFSLFTPISFANNPSLCGPGTTKPCPGAPPFSPPPPYNPPTPVQSPGSSSSTGAIAGGVAAGAALLFAIPAIGFAWYRRRKPQEHFFDVPAEEDPEVHLGQLKRFSLRELQVATDTFSNKNILGRGGFGKVYKGRLADGSLVAVKRLKEERTPGGELQFQTEVEMISMAVHRNLLRLRGFCMTPTERLLVYPYMANGSVASRLRERPPSEPPLDWRTRRRIALGSARGLSYLHDHCDPKIIHRDVKAANILLDEDFEAVVGDFGLAKLMDYKDTHVTTAVRGTIGHIAPEYLSTGKSSEKTDVFGYGIMLLELITGQRAFDLARLANDDDVMLLDWVKGLLKEKRLEMLVDPDLQSNYIDVEVESLIQVALLCTQGSPTERPKMAEVVRMLEGDGLAERWEEWQKIEVVRQEVELGPHRNSEWIVDSTDNLHAVELSGPR

SEQ ID NO: 42817 - protein, 480 aa, Photobacterium profundum SS9
MSKEIKAQVVVLGAGPAGYSAAFRCADLGLETVLIERYSTLGGVCLNVGCIPSKALLHVAKVIEEAKALADHGIVFGEPQTDISKIRLWKEKVVNQLTGGLGGMAKMRKVTVVNGFGKFTGPNSIAVTNNSGEGEETTTINFDNAIIAAGSRPIKLPFIPHEDPRIWDSTDALELNEVPEKLLVMGGGIIGLEMGTVYHALGSKIDVVEMFDQVIPAADKDIVKVYTKRIKSKFNLMLETKVTAVEAREDGIYVSMEGKKAPAEPIRYDAVLVAIGRVPNGQLFDAGVAGIEVDERGFIHVDKQMRTNVPHIHAIGDIVGQPMLAHKGVHEGHVAAEVISGKKHYFDPKVIPSIAYTEPEVAWVGKTEREAKAEGINFETASFPWAASGRAIASDCADGLTKLIFDKDTNRVIGGAIVGTNAGELLGEIGLAIEMGCDAEDIALTVHAHPTLHESIGMAAEIYEGSITDLPNAKAKKKKK

SEQ ID NO: 42818 - protein, 214 aa, Synechococcus sp. CC9605
MTASPTYGELTNKGASTNIAWHEASVGRDERSKQRGHRSAILWFTGLSGSGKSTLANAVNAALFERGLATYVLDGDNIRHGLCKDLGFSDADREENIRRIGEVAKLFLDAGVIVLTAFVSPFRADRDKARGLVEDGDFLEVFCAADLEVCESRDPKGLYAKARAGQIKEFTGISSPYEAPETPELKIDTGKQDLADSVELVIKALQERGVIPAA

SEQ ID NO: 42819 - protein, 369 aa, Polytrichum commune
SDSGKDAGRLSAAWQMFKAQEDLVKVAKQYGIRLTMFHGRGGTVGRGGGPTHLAILSQPPDTINGSLRVTIQGEVIEQSFGEEHLCFKTLQRFTAATLEHGMHPPIAPKLEWRNLMDSMAVAATEEYRSFVFQNPKFVEYFRAATPEMEYGRMNIGSRPSKRKPSGGIESLRAIPWIFAWTQTRFHLPVWLGLGAALRHAIDTDSQNLAMLCRMYDQWPFFRVTIDLVEMVFAKGDPRIAALYDNLLVSEELRPLGDELRRKYEETRNLLLRVARHSDILQGNPTLKQRLRLREPYITALNVQQAFTLKKMREQNSCKLETSQPGSPLKPVKRAMELVTLNPTTEFPPGLEDTLILTMKGIAAGMQNTG

SEQ ID NO: 42820 - protein, 369 aa, Polytrichum formosum
SDSGKDAGRLSAAWQMFKAQEDLVKVAKQYGIRLTMFHGRGGTVGRGGGPTHLAILSQPPDTINGSLRVTIQGEVIEQSFGEEHLCFKTLQRFTAATLEHGMHPPIAPKPEWRNLMDSMAVAATEEYRSFVFQNPKFVEYFRAATPEMEYGRMNIGSRPSKRKPSGGIESLRAIPWIFACTQTRFHLPVWLGLGAALRHAIDTDSQNLAMLCRMYDQWPFFRVTIDLVEMVFAKGDPRIAALYDSLLVSEELRPLGDELRRKYDETRNLLLRVARHSDILQGNPTLKQRLRLREPYITALNVQQAFTLKKMREQNSCKLETSQPGSPLKPVKRAMELVTLNPTTEFPPGLEDTLILTMKGIAAGMQNTG

SEQ ID NO: 42821 - protein, 338 aa, Pseudomonas syringae pv. phaseolicola 1448A
MKVFYDKDCDLSIIQGKKVAIIGYGSQGHAQACNLKDSGVDVTVGLRKGSATVAKAEAHGLKVTDVASAVAAADLVMILTPDEFQSQLYKNEVEPNLKKGATLAFSHGFAIHYNQVVPRADLDVIMIAPKAPGHTVRTEFVKGGGIPDLIAVYQDASGNAKNVALSYASGVGGGRTGIIETTFKDETETDLFGEQAVLCGGTVELVKAGFETLVEAGYAPEMAYFECLHELKLIVDLMYEGGIANMNYSISNNAEYGEYVTGPEVINAESRQAMRNALKRIQDGEYAKMFISEGATGYPSMTAKRRNNAAHGIEIIGEKLRSMMPWIAANKIVDKDKN

SEQ ID NO: 42822 - protein, 425 aa, Pseudomonas syringae pv. phaseolicola 1448A
MTQQEFNDPLWRTILSGAQMLFVAFGALVLMPLITGLDPNVALFTAGLGTLLFQIVTGRQVPVFLASSFAFITPIILAKGQFGLAATMGGVMAAGFVYTFLGLAVKIKGTGFIDRLLPPVVIGPVIISIGLAMAPIAANMAMGKTGDGVVLIPYQTAMLISMPALLTTLIVAVFGKGIFRLVPIISGVLVGFALSFYFGVVDTKKIADAAWLALPHFTAPEFNWQAILFIVPVALAPAIEHIGGVIAVGSVTGRDYLKKPGLHRTLFGDGIATTAAGLFGGPPNTTYAEVTGAVMLTKNYNPQIMIWASFFAITLAFIGKFGALLQSIPVPVMGGILCLLFGSIAAVGMNTLIRHKIDLAEARNLVIVSVTLVFGIGGVLIGTGNGPNDFGLKGIALCAITAIILNLVLPGHDSWKRNKPDDQLL

SEQ ID NO: 42823 - protein, 367 aa, Preissia quadrata
SDSGKDAGRLAAAWSMFKCQEDLVKIAKQYGIKLTIFHGRGGTVGRGGGPTHLAILSQPPDTIHGSLRVTVQGEVIEQSFGEEHLCFRTLQRFTAATLEHGMHPPISPKPEWRELMDEISRVSTEEYRSIVFKHPKFVHYFRAATPETEYGRMNIGSRPAKRKPSGGIESLRAIPWIFAWTQTRFHLPVWLGFGGAFKHAFEKSNQNVVLLRQMYNEWPFFRVTIDLIEMVFAKGDPRIAALYDELLVDEELKPLGEKLRTMYAETRDLLLKVAGHEDVLQGNPTLKQRLRLREPYITPLNVQQAFTLKKIRDQSFHVSPGTPKGENSGKQSSELVGLNTTTEYPPGLEDTLIITMKGIAAGMQNTG

SEQ ID NO: 42824 - protein, 358 aa, Zea mays
  misc_feature (340)..(340): Xaa can be any naturally occurring amino acid
  unsure (1)..(358): unsure at all Xaa locations
MASLTDLVNLDLSDCTDRIIAEYIWIGGSGIDLRSKARTVKGPITDPSQLPKWNYDGSSTGQAPGEDSEVILYPQAIFKDPFRKGNHILVMCDCYTPQGEPIPTNKRYSAAKVFSHPDVAAEVPWYGIEQEYTLLQKDVSWPLGWPVGGYPGPQGPYYCAAGADKAFGRDVVDAHYKACLYAGINISGINGEVMPGQWEFQVGPSVGISAGDEIWVARYILERITEMAGIVLSLDPKPIKGDWNGAGAHTNYSTKSMREAGGYEVIKAAIDKLGKRHKEHIAAYGEGNERRLTGRHETADINTFKWGVANRGASIRVGRDTEREGKGYFEDRRPASNMDXPYVVTGMIAETTILWNGN

SEQ ID NO: 42825 - protein, 366 aa, Bacteroides fragilis NCTC 9343
MNIERKILLNPGPATTTDTVKLAQVVPDICPREKEFAGMMKQLRDDLVRVAHGDLSKHTAVLFCGSGTINIDICLNSLLPADKKVLVVNNGAYSTRAVEVCEYYGLPHIDLKFSVYELPDLSVIEKTLSDNPDIALVYTTHHETGTGILNPIREIGKIAHSHGAVFVVDTTSSLGMIPFDIGKDNVDFCMASAQKGLQAMTGLSFIIGDESLIRASRDYPKRSYYCNLYLQYDYFEKTGEMHFTPPVQTVYAARQALDEYFAVGEEAKFARHKRVFEAIHKGLQELGLQYAIKREWQSGLVVSVLYPDDPLWDFDKVHDYCYERGFTIYPGKISTTNTFRLCALGEIDVEDIERFFEVMREAVLKY

SEQ ID NO: 42826 - protein, 371 aa, Rhytidiadelphus squarrosus
SDSGKDAGRLSAAWQMFKAQEDLVKVAKQYGVRLTMFHGRGGTVGRGGGPTHLAILSQPPDTINGSLRVTVQGEVIEQSFGEEHLCFRTLQRFTAATLEHGMHPPIAPKPEWREIMDKMAVISTKEYRAVVFQNPKFVEYFRTATPELEYGRMNIGSRPSKRKPSGGIESLRAIPWIFAWTQTRFHLPVWLGLGSALKEVLQTDPRNIAILRRMYNQWPFFRVTIDLVEMVFAKGDPRIAALYDNLLVSDEVKPLGDELRRKYNETREYLLRVAGHEDILQGNPTLKQRLRLREPYLTALNVQQALVLKKMRDSSSQFCALQNGNSGEVPKSPRRAAELVELNPTTEFPPGLEDTLILTMKGIAAGMQNTG

SEQ ID NO: 42827 - protein, 322 aa, Streptomyces viridochromogenes
MSMFPGFSAGTRLLVTGGAGFIGSHVVDAFLEAGAEVTVLDDLTTGDPERLDPRAVIRRVDVTDAAALDEAVRSARPDVICHLAAQIDVRVSVATPAVDARVNVEGTINVLEAAHAVGARVVFASTGGALYGEGVPVPTNEDTLPRPGAPYGTAKYCAEKYIGLFNRLHGTEHSVLRLGNVYGPRQSPGGEAGVIAIYCGLASEGGVPTVFGDGSQTRDYVYVGDVAAAFVAPYGTVGPASGTSDTGKGSTVLEVLDHIAAASGRDLPPRFAPRRPGEIQHSTLDVTRVAADLGWTASVPLEKGIAATYAWVRSGSPVRQQA

SEQ ID NO: 42828 - protein, 515 aa, Lycopersicon esculentum
MAKISRLFGSTVKAAITAQAGFHGKRIPAVSSLQEHIVKSTPARYNSTQACLENDISGTDNKGFKGHDMLAPFTAGWQSTDVDPLIIEKSEGSHVYDMQGRKYIDTLAGLWCTALGGNEPRLVDAATKQLNTLPFYHSFWNRTTKPSLDLAKELLDMFTAKKMAKAFFTNSGSEANDTQVKLVWYYNNALGRPNKKKFIARAKAYHGSTLISASLTGLPALHQNFDLPAPFVLHTDCPHYWRYHLPGETEEEFSTRLAKNLEDLILKEGPETIAAFIAEPVMGAGGVIPPPATYFDKIQAVVKKYDILFIADEVICAFGRLGTMFGSDMYNIKPDLVTLAKALSSAYMPIGAVLVSPEVSDVIHSQSNKLGSFSHGFTYSGHPVACAVALEAIKIYKERNMVERVNRISPKFQEGLKAFSDSPIIGEIRGLGLILATEFANNKSPNDHFPPEWGVGAYFGAQCQKNGMLVRVAGDTIMMSPPFVVTPEELDELIRIYGKALRETEKRVEELKSQK

SEQ ID NO: 42829 - protein, 458 aa, Lycopersicon esculentum
MAKTNGFMGHDMLAPFTAAWMIDMGPLVIDKAEGSYVYGVNGKKYLDSLSGLWCTVLGGSEPRLIEAASKQLNKSAFYHSFWNRTTKPSLDLAKELINMFTANKMGKVFFTSSGSEANDTQVKLVWYYNNAIGRPNKKKIISRKNAYHGSTYMTAGLSGLPSLHLKFDLPPPYILHTDCPHYWNYHLPGETEEEYSTRLANNLENLILKEGPETVAAFIAEPVMGGAGVIIPPATYFEKIQAVLKKYDILFIADEVICGFGRLGTMFGCDKYNIKPDLVSIAKALSGGYIPIGAVLVSEEISKVIMSQSNQLGVFCHGFTYSGHPVACAVALEALKIYKEKNITEVVNKLSPKLQEGLKAFIDSPIIGEIRGTGLVLSTEFVDNKSPNDPFPPEWGVGTYFGSQCQKHGMLVSFSGDHVNMAPPFTLSLEELDEMISIYGKALKDTEKRVEELKSQKK

SEQ ID NO: 42830 - protein, 242 aa, Nicotiana tabacum
MATNGENGRHQEVGHKSLLQSDALYQYILETSVYPREPEPMKELREITAKHPWNLMTTSADEGQFLSMLLKLINAKNTMEIGVFTGYSLLATAMALPDDGKILAMDINRENYEIGLPIIEKAGLAHKIVFREGPALPVLDQMIEDGKYHGSYDFIFVDADKDNYLNYHKRLIDLVKVGGLIGYDNTLWNGSVVAPPDAPLRKYVRYYRDFVLELNKALAADSRIEICQLPVGDGITLCRRIS

SEQ ID NO: 42831 - protein, 520 aa, Lycopersicon esculentum
MAKITSLIGSGIVAATNQVGPHVKHIPAVGNLQKQIVSDQIQVRWSSTETSLKNDISATDVRGYKGHDMLAPFTAGWHSTDLEPLVIQKSEGSYVYDVNGKKYLDALAGLWCTSLGGNEPRLVAAATKQLNELAFYHSFWNRSTKPSLDLAKELLDLFTANKMAKAFFTNSGSEANDTQVKLVWYYNNALGRPDKKKFIARTKSYHGSTLISASLSGLPALHQQFDLPAPFVLHTDCPHFWRFHQPGETEEEFSTRLANNLENLILKEGPETIAAFIAEPVMGAGGVIPPPATYFEKVQAILKKYDILFIADEVICGFGRLGTMFGCEKYNIKPDLVSVAKALSSGYMPIGAVLVSPEVSDVIYSQSNKLGTFSHGFTYSGHPVSCAVALETLKIYKERNIIEQVNRISPKFQEGLKAFSDSPIIGEIRGTGLLHGTEFTDNKSPNDPFPPEWGIGAYFGARCEKHGVLVRVAGDNIMMSPPYILSLEEIDELIIKYGKALKDTENRVEELKSQKKIKSS

SEQ ID NO: 42832 - protein, 384 aa, Coxiella burnetii RSA 493
MLATDIKNKLQRHTQSALLRKRIVVAKRKEAWVNINGRDCINFCSNDYLGLASHPAVKAAFISGIQQYGAGSGSSALISGYFKPQQMLEEKFAAFLNRDRAIFFNSGYLANLGVMTSLADRKQIIFSDKLCHASLLDAIQLSRAKHYRYPHQNFEQLKFLMSSKRAHFLLTEGIFSMEGDITPLPSIIDLISAQDILLIVDDAHGIGVLGKNGGGICEYWNLTQTELPCLITPLGKAFGCAGAVVSGRSDLVEAVLQFSRSYRNTTALPPALAIAILQSLEIIQTETWRREKLTALSQTFIQYSKKNGLKLISDDPTPIKCLQVSDNKKTQIIQEALINFGFFVSCIRPPSVPAGSARIRISLGCFHTETQIVQLLDRLASLLC

SEQ ID NO: 42833 - protein, 255 aa, Thermoanaerobacter tengcongensis MB4
MNFKDKVVIVTGGGQGIGRCIAQTFASKGAKVVIAEIDDEAGLENEEYIRKNGGEALFVHTDVALEEDVKNMVNKTIETYGKIDILINNAGIGSGGTIYTRPMEEWDRVINVNLKGAYMCAKYVAPHMRDNGGGVIINIASTRAFMSEPHTEPYSASKGGLIALTHSLAISLAYDKIRVNSISPGWIEVSEWKKSREAKKPELTEQDHLQHPAGRVGKPEDVANACLFLCSEEASFITGANLIVDGGMTVKMIYL

SEQ ID NO: 42834 - protein, 442 aa, Coxiella burnetii RSA 493
MLENDMQRLDSQHVWHPCSQMKDYEQFKPLIIKKAYGSYIELSNGQKIIDAISSWWCKSLGHNHPKLKEALKQQLEKFEHVIFANTTNEIIVALSQQLAALLPGLNKVFYAGDGSCAVEIAMKMSLHSRIIQGNKKRKKFIALKNSYHGETVGALSVSDVGLYRAPYSTMLFEPYFIESIPYVLNTQAPEWNDCSAHWDTVERLFEPHAETATAILVEPIVQGASGMKIYSQDFLARLFQWAKNNHIHFIADEIMTGIGRTGKMLACEHAGIIPDFVCLSKGLTSGYLPFSAVLTSDEIYQLFYDDYQTGKAFLHSHTYSGNALAAAVALATLKVFSEEKICARAHKLGKFMLEKMTQVAQETGQLENVRGIGALVAADLIPQPGRLRLGYEVYQEAVKQGVLLRPIGNTLYWLPPLNIDFDLIEVLQKVTKNAIKILSLGF

SEQ ID NO: 42835 - protein, 455 aa, SYNECHOCOCCUS SP. WH 8102
MAIESTFDLIVLGAGSGGLAAAKRAARHGAKVAIVEGDRVGGTCVIRGCVPKKLLVYGAQARHQLNDAPAYGLTLGSVESSVAELFRRVRAEVDRLNHLHLGFLEKAGVARIDGWGRFLSDQCIGIATERGGPIQRELSAAHYLVAVGGRPVRPDIPGIEHTWISDDMFNLEQLPKEVVVVGAGFIACEFACILRGLGVEVTQVVRGSGLLRGFDRELADAVLEGLREQGIHVLLERTVSAVSGQPGDLTVQMSDGLALPCGGVLMATGRRPWLEGLGLDAAGVAVEQGRINVDADSRTSVAHIYAVGDVTDRVNLTPVAIDEGRAFADSTFGTRPRQVNHDLLASAVFSDPELATVGLSEEAAIDRHGVDGVVIHRARFRSMSRALPATGPRCLLKLVVETSTDRVIGCHMVGEHAAEIIQMAAIAVGMGATKADFDRTMALHPSVSEEFVTMG

SEQ ID NO: 42836 - protein, 233 aa, Brassica napus
  misc_feature (187)..(188): Xaa can be any naturally occurring amino acid
  misc_feature (204)..(204): Xaa can be any naturally occurring amino acid
  misc_feature (211)..(211): Xaa can be any naturally occurring amino acid
  misc_feature (214)..(214): Xaa can be any naturally occurring amino acid
  misc_feature (223)..(223): Xaa can be any naturally occurring amino acid
  unsure (1)..(233): unsure at all Xaa locations
MEGRRITASPRPCSGRRVVAKKRTRPDGFVNSVKKLQRREISSRKDRAFSISTAQERFRNMRLVEQYDTHDPKGHSLVALPFLMKRTKVIEIVAARDIVFALAHSGVCAAFSRETNRRICFLNVSPDEVIRSLFYNKNNDSLITVSVYASDNFSSLKCRSTRIEYILRGQPDAGFALFESESLKWPXXVEFDDVNGKVLTYSAXDSVYRVXDLXNYTMLYSIXRQHVQEIKIS

SEQ ID NO: 42837 - protein, 270 aa, Leptolyngbya boryana
MKSYLAAAVQMNSLPDLQKNLAQAEELIEIAVRRGAELIGLPENFSFLGDEEGKIAQADEIAVESEKFLKTMAQRFQVTILGGGYPVPVEPGKVYNTALLVAPNGEELARYEKVHLFDVNLPDGNTYRESATVVAGTRVPPIHPSKDLGNIGLSVCYDVRFPELYRQMTQLGAEVLFVPAAFTAHTGKDHWQVLLQARAIENTCYVIAPAQTGRHNSLRQSHGHAMIIDPWGVILADAGEMTGVAIAEIAPGRLEQVRRQMPSLQHRVFS

SEQ ID NO: 42838 - protein, 407 aa, Zea mays subsp. mexicana
MAREAASEATASRESGAEAAGECWSEALKSFLDHIPVSSVPGALQPTASPAVEVKLHGSVLGALDAMYSSNAAGAVIIDVVHSSLGKYVDRDIGFVEFSSLVLWALEELGKVESEPTDSTSDFLSTLKQHHQIAETKIAWLAKLFLWEPFFPVRTHDTLFHAMLLFSKHHRLNVAPVVESMNSSVIGFVTQDAVMELLLQSSGLEWLDKIADKQLSEFRFANVRKPVLVYSDQTLADGLHILSKEKTGVAVIDRKTSRLIGSLQCSDLYLFLDDSTLFSKRTTTTLEELISLNNKTDRKCSTAENSCAPGRNILALRSRQSGMVGLPATNLESDTLKQAMEKLTTLRSSCSFIVDEHGRVQGVVTTRDIISVFSPPCMDSRIDGATFFSAALEQAGCRVENGQMFQN

SEQ ID NO: 42839 - protein, 468 aa, Burkholderia sp. 383
MSRLVVVSNRIADPRKAAAGGLAVAVKDSLQESGGVWFGWSGRLRGGDDQPTHGDEVQIQNVGGIQLATIDLDPQDYDAYYLGYSNNVLWPVFHYRLDLAQFDRRFADGYRRVNQLFARKLRTLLRPDDTIWVHDYQLIPLAAELRAMGCTNPIGFFLHIPMPPPPIMAAIPEHEWLMRSLFAYDLVGFQTESDLLHFEHYVEAEAGAARLPDGRLRAFGRTLSAGAFPIGINVDEFESLARDRDGIDMFERMRDEYSRRQLLVGVDRLDYTKGLPQRVHAFRQLLEQYPENRNRATLIQIAAPSREDLGAYDDLRREMDSLCGAINGDYGELEWMPMRYIHRTVARKRLPGLYRASRVALVTPLRDGMNLVAKEFLAAQDAADPGVLVLSRFAGAAEQLKSALLVNPYDTQGTAQAIQRALAMPLEERRQRHAALMAIVRKTDVHWWRTRFLDALAEAAEVAAATES

SEQ ID NO: 42840 - protein, 351 aa, Zea mays subsp. mexicana
MEGGAGASEKGTVLVTGASGFVGSWLVMKLLQAGYTVRATVRDPANVGKTKPLMDLPGATERLSIWKADLAEEGSFHDAIRGCTGVFHVATPMDFLSKDPENEVIKPTVEGMISIMRACKEAGTVRRIVFTSSAGTVNLEERQRPVYDEESWTDVDFCRRVKMTGWMYFVSKTLAEKAALAYAAEHGLDLVTIIPTLVVGPFISASMPPSLITALALITGNAPHYSILKQVQLIHLDDLCDAEIFLFENPAAAGRYVCSSHDVTIHGLAAMLRDRYPEYDVPQRFPGIQDDLQPVRFSSKKLQDLGFTFRYKTLEDMFDAAIQTCQEKGLIPLATAAGGDGFASVRAPGET

SEQ ID NO: 42841 - protein, 407 aa, Zea luxurians
MAREAAREATTSRESGAEAAGECWSEALKSFLDHIPVSSVPGALQPTASPAVEVKLHGSVLGALDAMYSSNAAGAVIIDVVHSSLGKYVDRDIGFVEFSSLVLWALEELGKVESEPTDSTSDFLSTLKQHHQIAETKIAWLAKLFLWEPFFPVRTHDTLFHAMLLFSKHHRLNVAPVVESMNSSVIGFVTQNAVMELLLQSSGLEWLDKIADKQLSEFRFANVRKPVLVYSDQTLADGLHILSKEKTGVAVIDRKTSRLIGSLQCSDLYLFLDDSTLFSKRTTTTLEEFISLNNKTDRKCSTAENSCAPGRNILALRSRQSGMVGLPATNLESDTLKQAMEKLTTLRSSCSFIVDEHGRVQGVVTTRDIISVFSPPCMDSRIDGATFFSAALEQAGCRVENGQMFQN

SEQ ID NO: 42842 - protein, 252 aa, Zea luxurians
MEGGAGASEKGTVLVTGASGFVGSWLVMKLLQAGYTVRATVRDPANVGKTKPLMDLPGAKERLSIWKADLAEEGSFHDAIRGCTGVFHVATPMDFLSKDPENEVIKPTVEGMISIMRACKEAGTVRRIVFTSSAGTVNLEERQRPVYDEESWTDVDFCRRVKMTGWMYFVSKTLAEKAALAYAAEHGLDLVTIIPTLVVGPFISASMPPSLITALALITGNAPHYSILKQVQLIHLDDLCDAEIFLFENPAA

SEQ ID NO: 42843 - protein, 375 aa, Symphyogyna brongniartii
SDSGKDAGRLSAAWEMFKCQEDLVKVAKEFGIKLTIFHGRGGTVGRGGGPTHLAILSQPPDTVHGSLRVTVQGEVIEQSFGEEHLCFRTLQRFTAATLEHGMHPPRSPEPEWRVLMDEMALVATEEYRNVVFKHPQFVEYFRAATPETEYGRMNIGSRPAKRKPSGGIESLRAIPWIFAWTQTRFHLPVWLGFGGAFKHVLAKNNSNVVLLRKMYNEWPFFRVTIDLIEMVFAKGDPRIAALYDELLVSDELKPLGEKLRAMYGETRELLMTIAGHEDVLAGNPTLKQRLRLREPYITPLNLIQAFTLQKIRDQSNHISVREAGDRPSTPPKAGESGKQSSHLVTLNKKTEFPPGLEDTLIITMKGIAAGMQNTG

SEQ ID NO: 42844 - protein, 431 aa, Yarrowia lipolytica CLIB122
MDKVIQKKEQWGEKLENLICFHPWIRIIFFSKAQIKHYPKKRFNTNAKERGWTRPIIIVGWFLVYLYAASKAIAEHVYPTMAPLATSHFSGLSLLSSQAVVQSSIFIVTRPAFAKISDHIGRLEGWTLVILAHLLGSVLFAAAPNIGCYFAGTVFWEIGTVGGHLMTELYASDTSTINTRIIFSSFIQSPNIWGPYAAAPIVGAILKVATWRWGYGMFAIILPVCSLGIIVLFSMMRVKEIRLGARGDFYTPGGVKRFLLSFDIVGLVMLCAGTILFFFPITLAAGTEKWSKPSFIVMLTLGSFLMAVFPLWELYGARSPLISWKLFRNRVMICSCIILFFSSMSNKLSVPYYITWLLVVRGYSPKAATNISSALTVSNNAFGILFAAPYLWWNGKPKHMMVLGTCLYFVGTGLTYRFRRAHSGLGILIIS

SEQ ID NO: 42845 - protein, 313 aa, Oryza sativa (japonica cultivar-group)
MVSSALPRGEPVTHICVDLADPAAVSAALAPLTDITHVFYVAWAPHFFEEDQNREANSRMLRNVLSAVVPNCPALVHVSLQTGSKHYIGPPESIGKFTIETPFSEDMPRLDNCPNLYYDQEDALFDAVSRSRRRGAAVISWSVHRPSLVFGFSPQSAMNVVCTLCVYAAICRKEGGRKLRWPGSLGAWEGFSNASDADLVAEQHIWAAVDPAARNEAYNCSNGDVYKWKQLWTVLAGRFGMEWSGYEGEESRVANWWFVDALFMDKWEFLDTMNKSKEHGFLGFRNTVKSFGTWIDKLRLYKIVPSCRIVSSL

SEQ ID NO: 42846 - protein, 990 aa, Synechocystis sp. PCC 6803
MVAQIDSQQQYEQATQAIAKELLAQTREKRSLWDKIGDNLRLDDKLLDWTMGHPGLRVQLFKFIDCLPALQSNSEIANHLQQYMSEEEVELPEALKKLLNFADAHSTPAQIAAGTVSKATEQLAFKYIAGETIAQVIKTVERLRKEKMGFTIDLLGEAVITESEAAEYWQNYLDLMAQLSQQAKSWSKVPQIDQADGEILPQVQVSVKLTAFYSQFDPLDPAGSKAKVCERIRELLRRAQELGVAVHFDMEQYHYKDLILNILKELLVEEEFRSRTDVGITMQAYLRDSTEDLEALIPWAKHRGYPVTVRLVKGAYWDQETIKAQQNHWQIPVYVEKAQTDANYERMTRLLLENHEYLYAAIGSHNVRSQALACAIAEELNIPKRRYEMQILYGMGEPLARAIVKRGHRVRVYAPYGRLLPGMAYLIRRLLENTANSSFLRQNLEERPIEELIAPPQVKGINDLPTKGYGNAPDTDYADADLRQQAFQALTRVKQQLGKTYLPYINGEYVETANYIDSVNPCRPSQAIGKVGLISVEQADHALEIAKAAFPAWKKTPVRERCGILRKAADIMEERRHELNAWICLEVGKIIPQADAEVSEAIDFCRYYADEMERLDQGVNLDIPGETNRYFYQPRGIALVISPWNFPMAIAVGMTVAALVTGNCTLLKPAETSTVIAAKIAEILIAAGVPPGVFQYVPGKGSVVGSHMVNHPDVHLIAFTGSREVGCRIYADAALVQPGQKHLKRVIAEMGGKNAIIVDESADLDQAVAGAVYSAFGYTGQKCSACSRVVVLSPVHDAFVERFVEATRSLNVGPTDDPSTQVGPVIDAKAQARIQEYIEQGKAECELAIACDAPSEGYFVGPTVFKNVDRHATIAQEEIFGPVVTIIRAANFDEALEIANGTDYALTGGLYSRTPDHINRAAAEFEVGNLYINRTITGAIVSRQPFGGFKMSGVGSKAGGPDYLLQFLEPRHVTENIQRQGFAPIEGADQ

SEQ ID NO: 42847 - protein, 503 aa, Zea mays
MTLAILARRRAAAAVLRRPQAAAGAAVSAWRAYAAAGEESDVVVVGGGPGGYVAAIKAAQLGLKTTCIEKRGTLGGTCLNVGCIPSKALLHSSHMYHEAKSSFAHHGVKFSNLEVDLPAMMAQKDKAVAGLTKGIEGLFKKNKVTYVKGFGKLSSPSEVSVDLIDGGSTVVKGKNIIIATGSDVKSLPGITIDEKKVVSSTGALCLSEIPKKLVVIGAGYIGLEMGSVWNRLGSEVTVVEFAPDIVPSMDGEVRKQFQRMLEKQKFKFMLKTKVVGCDTSGDGVKLTLEPAAGGEQNILEADVVLVSAGRTPFTSGIGLETLGVETDKAGRILVDKRFMTNVKGVYAIGDAIPGPMLAHKAEEDGVACVEFIAGKEGHVDYDTVPGVVYTHPEVASVGKTEEQVTALGIPYRVGKFPLLANSRAKAIDDAEGVVKVIAEKETDKILGVHIMAPNAGEIIHEAVIALQYGASSEDVARTCHAHPTVSEALKEACLQTFNKAIHI

SEQ ID NO: 42848 - protein, 110 aa, Quercus suber
SLDIWDPFEGFSAVASVPPSARETTAFATARIDWKETPEAHIFKADLPGLKKEEVKVEVEDGNVLQISGERSKEHEEKNDKWHRVERSCGKFMRRFRLLENAKVDQVKAN

SEQ ID NO: 42849 - protein, 628 aa, Neisseria polysaccharea
SPNSQYLKTRILDIYTPEQRAGIEKSEDWRQFSRRMDTHFPKLMNELDSVYGNNEALLPMLEMLLAQAWQSYSQRNSSLKDIDIARENNPDWILSNKQVGGVCYVDLFAGDLKGLKDKIPYFQELGLTYLYLMPLFKCPEGKSDGGYAVSSYRDVNPALGTIGDLREVIAALHEAGISAVVDFIFNHTSNEHEWAQRCAAGDPLFDNFYYIFPDRRMPDQYDRTLREIFPDQHPGGFSQLEDGRWVWTTFNSFQWDLNYSNPWVFRAMAGEMLFLANLGVDILRMDAVAFIWKQMGTSCENLPQAHALIRAFNAVMRIAAPAVFFKSQAIVHPDQVVQYIGQDECQIGYNPLQMALLWNTLATREVNLLHQALTYRHNLPEHTAWVNYVRSHDDIGWTFADEDAAYLGISGYDHRQFLNRFFVNRFDGSFARGVPFQYNPSTGDCRVSGTAAALVGLAQDDPHAVDRIKLLYSIALSTGGLPLIYLGDEVGTLNDDDWSQDSNKSDDSRWAHRPRYNEALYAQRNDPSTAAGQIYQGLRHMIAVRQSNPRFDGGRLVTFNTNNKHIIGYIRNNALLAFGNFSEYPQTVTAHTLQAMPFKAHDLIGGKTVSLNQDLTLQPYQVMWLEIA

SEQ ID NO: 42850 - protein, 433 aa, Neisseria meningitidis Z2491
MPSEHQHISSLLDFDRTHLLHPYTSMTDPLPVYPVKRAEGVFIELADGTRLIDGMSSWWCAIHGYNHPVLNQVVETQIKQMAHVMFGGLTHESAVELGKLLVGILPQGLDRIFYADSGSVSVEVALKMAVQYRQARGLMAKQNIATVRRGYHGDTWNAMSVCDPETGMHHIFGSTLPQRYFVDNPKSRFDDEWDGADLQPVRALFEAHHADIAAFILEPVVQGAGGMYFYHPQYLRGLRDLCDEFDIVLIFDEIATGFGRTGKMFACEHAEVVPDIMCIGKGLSGGYMTLAAAITSQKVTETISRGEAGVFMHGPTFMANPLACAVACASVKLLLSQDWQANIRRIESILKGRLKAAWDIRGVKDVRVLGAIGVIELDKGVDMARFQADCVAQGIWVRPFGRLVYLMPPYIISDGLLTELADKTVQILKEHSK

SEQ ID NO: 42851 - protein, 36 aa, Saccharomyces cerevisiae
HECQCQCGSCKNNEQCQKSCSCPTGCNSDDKCPCGN

SEQ ID NO: 42852 - protein, 92 aa, Quercus suber
SLDIWDPFEGFSAVASVPPSARETTAFATARIDWKETPEAHIFKADLPGLKKEEVKVEVVDGNVLQISGERSKEHEEKNDKWHRVRGAVASL

SEQ ID NO: 42853 - protein, 384 aa, Synechocystis sp. PCC 6803
MDNKQMLMIPGPTPVPEKVLLAMAKHPIGHRSGDFSKIIAELTANLKWLHQTENDVLMLTTSGTGAMEASIINFLSPGDRVLVGNNGKFGDRWVKVAKTFGLAVEEIKAEWGKALDPNDFKTLLEADSDKTIKALIITHSETSTGVLNDLAAINAAAKAHGGALMIVDAVTSLGATPVAIDDLGLDVVASGSQKGYMIPPGLGFVSVSAKAWQAYETATIPRFYLDLKKYKKSTDEDSSPFTPPINLMYGLQASLQMMKAEGLDAIFTRHQRHTNATRGAMKALNLPLFAPDNAASNAITAVAPLGVEAEKIRSTMRKKFDIAMAGGQDHLKGKIFRIGHLGFVCDRDILSCIGALEATLIELGYEGVTPGSGVAAAAGVLAKG

SEQ ID NO: 42854 - protein, 408 aa, Hordeum vulgare
MQAVTAAAAAGQLLTDTRRGPRCRARLGTTRLSWTGRFAVEAFAGQCQSSATTVMHKFSAISQAARPRRNTKRQCSDDYPALQAGCSEVNWDQNGSNANRLEEIRGDVLKKLRSFYEFCRPHTIFGTIIGITSVSLLPMKSIDDFTVTVLRGYLEALTAALCMNIYVVGLNQLYDIQIDKINKPGLPLASGEFSVATGVFLVLAFLIMSFSIGIRSGSAPLMCALIVSFLLGSAYSIEAPFLRWKRHALLAASCILFVRAILVQLAFFAHMQQHVLKRPLAATKSLVFATLFMCCFSAVIALFKDIPDVDGDRDFGIQSLSVRLGPQRVYQLCISILLTAYGAATLVGASSTNLFQKIITVSGHGLLALTLWQRAQHFEVENQARVTSFYMFIWKLFYAEYFLIPFVQ

SEQ ID NO: 42855 - protein, 488 aa, Bacillus clausii KSM-K16
MRRLTDNQGHPIYDNQNSRTAGQHGPTLLEDYHLVEKLAHFDRERIPERVVHARGAGAHGVFKVKNNMKRYTKANFLSEDGKETPVFVRFSTVIHGGTSPETLRDPRGFSVKFYTEEGNYDFVGNNLPVFFIRDAIKFPDVIHSLKPDPRTNIQSPDRYWDFMSLTPESTNMLTHLFTDEGIPASYREMRGSSVHAFKWVNEHGNMVYVKLNWVPKMGIRNLSMEEAANIQAHDFNHATRDLYEAIERGDYPEWDLYVQILDPADLDNFDFHPLDATKDWLEEDIPSQLVGTMTLNRNPENVFAETEQVGFNPGNLVPGFEPSEDKMLQGRIFSYSDTQRYRVGANYLDLPINCPFAQKANNTRDGAMPIGQQTNRINYEPNRYQDTPKEAEGYEDYRAPINGTIGRIAIEKKNNFGQAGKIYRNYPKNVQDALIKNIANDLKQVAPETALRAICNFYRADEDYGQRLADAIGMDISEYVKHGSENNS

SEQ ID NO: 42856 - protein, 242 aa, Nicotiana tabacum
MATDGENGRHQEVGHKSLLQSDALYQYILETSVYPREPEPMKELREITAKHPWNLMTTSADEGQFLSMLIKLINAKNTMEIGVFTGYSLLATAMALPDDGKILAMDINRENYEIGLPVIEKAGLAHKIEFKEGPALPVLDQMIEDGKYHGSYDFIFVDADKDNYLNYHKRLIDLVKIGGLIGYDNTLWNGSVVAPPDAPLRKYVRYYRDFVLELNKALAADSRIEICQLPVGDGITLCRRIS

SEQ ID NO: 42857 - protein, 186 aa, Glycine max
  misc_feature (150)..(150): Xaa can be any naturally occurring amino acid
  misc_feature (155)..(155): Xaa can be any naturally occurring amino acid
  unsure (1)..(186): unsure at all Xaa locations
MASHDGISAASSDSVFNHLVRAPEDPILGVTVAYNKDPSPVKLNLGVGAYRTEEGKPLVLNVVRRVEQQLINDVSRNKEYIPIVGLADFNKLSAKLIFGADSPAIQDNRVTTVQCLSGTGSLRVGGEFLAKHYHQRTIYLPTPTWGNHPXVFNLXGLSVKTYHYYAPAPRGLDNKGLIEDRGVCPS

SEQ ID NO: 42858 - protein, 309 aa, Thermosynechococcus elongatus BP-1
MVRTYLQEIGRVPLLTHEQEIILGKQVQQMMALREKRDALTKELGREATFEEWAAACNLTPTELCNILKRGERAKQKMIEANLRLVVSVAKKYQKRNLELLDLVQEGTLGLERGVEKFDPTRGYKFSTYAYWWIRQAITRAIAQQARTIRLPIHITEKLNKIKRTQRELAQKLGRSATPAEVAKALELEPEQIREYLTLARQPVSLDLRVGDNQDTELGELLEDDSLSPEQFTTVESLRDDVNLWLAELTPQQRQVLTLRYGLGDGQELSLAKVGEQLNLSRERVRQLERQALDHLRRRRQQMYEYLAS

SEQ ID NO: 42859 - protein, 256 aa, Bacteroides thetaiotaomicron VPI-5482
MNRINQLFNSNKKDILSIYFCAGNPTLDGTVNVIRTLEKHGVSMIEVGIPFSDPMADGIVIQNAATQALRNGMSLKILFEQLRNIRQEVSIPLVFMGYLNPIMQFGFENFCRKCVECGIDGVIIPDLPFRDYQDHYRIIAERYGIKVIMLITPETSEERVREIDAHTDGFIYMVSSAATTGAQQDFNEQKRAYFKKIEDMNLRNPLMVGFGISNKATFQAACEHASGAIIGSRFVTLLEEEKDPEKAILKLKDALK

SEQ ID NO: 42860 - protein, 572 aa, Oryza sativa
MSSPFSVPSLIMEEEGRFEAEVAEVEAWWGTDRFRLTKRPYTARDVALLRGTLRQSYASGDMAKKLWRTLRAHQANGTASRTFGALDPVQVAMMAKHLDTVYVSGWQCSSTHTSTNEPGPDLADYPYDTVPNKVEHLFFAQLYHDRKQREARMSMSRAERAHEPYVDYLKPIIADGDTGFGGATATVKLCKLFVERGAAGVHLEDQSSVTKKCRHMAGKVLVAVSEHVNRLVAARLQFDIMGVETVLVARTDAVAATLIQTNVDARDHQFILGATNPRLRNRSLAAVLSDAMSAGKNGRELQAIEDEWLATAQLKTFSDCVRDAIASLNATDADKQRKLQEWSAATSHDKCVPLEQARDIAAGLGVTSLFWDWDLPRTREGFYRFRGSVAAAVVRGRAFAPHADVLWMETSSPNIAECTAFAEGVRAASPGAMLAYNLSPSFNWDASGMTDADMSEFIPRVARLGYVWQFITLAGFHADALVTDTFARDFARRGMLAYVERIQREERSNGVETLQHQKWSGANFYDRVLKTVQGGISSTAAMGKGVTEEQFKGSWTGPGSESSSHVLAKSRM

SEQ ID NO: 42861 - protein, 618 aa, Xylella fastidiosa 9a5c
MSNERTAQQSDIKQLISKGLEQGYLTYAEVNDHLPEDLVDPDQIEDIIGMINGMGIEVHEVAPDAETLLLNEGNTGNREVDDTAAEEAAAALSALDTEAGRTTDPVRMYMREMGTVELLTREGEIAIAKRIEEGLSEVQAALGVFPLSTELLLSEYELHKEGKRRLTEVVVGFNDLIEEDNSVTSSVDVTDESIVEVDEEDDDSVGNDEDAPTIGPDPAEVASRIESLSTEYAKFKKLYAKHGPEHKAVIKVREDVAAIFVTFKLSLPLTDLLVQQLQNMVNSVKDHERKVLHLATNVAKMPRKDFIRSWENNQTNLEWVEDAIKRKQKWSSALRDIKDQITAEQQASIDLEKANSLTLADIKEINRMMVYGEAKASKAKKEMVEANLRLVISIAKKYTNRGLQFLDLIQEGNIGLMKAVCKFEHRRGFKFSTYATWWIRQAITRSIADQARTIRIPVHMIETINKLNRISRQMLQQFGREATPEELAKEMDMPEDKIRKVMKIAKEPISMETPIGDDEDSHLGDFIEDPNVESPVDTTTNVNLSETVREVLAGLTPREAKVLRMRFGIDMNTDHTLEEVGKQFDVTRERIRQIEAKALRKLRHPSRSEQLRSFLDID

SEQ ID NO: 42862 - protein, 564 aa, Saccharomyces cerevisiae
MKYVVVSGGVISGIGKGVLASSTGMLLKTLGLKVTSIKIDPYMNIDAGTMSPLEHGECFVLDDGGETDLDLGNYERYLGITLSRDHNITTGKIYSHVISRERRGDYLGKTVQIVPHLTNAIQDWIQRVSKIPVDDTGLEPDVCIIELGGTVGDIESAPFVEALRQFQFEVGRENFALIHVSLVPVIHGEQKTKPTQAAIKDLRSLGLIPDMIACRCSEELNRSTIDKIAMFCHVGPEQVVNVHDVNSTYHVPLLLLKQHMIDYLHSRLKLGEVPLTLEDKERGSQLLTNWENMTKNLDDSDDVVKIALVGKYTNLKDSYLSVTKSLEHASMKCRRQLEILWVEASNLEPETQEVDKNKFHDSWNKLSSADGILVPGGFGTRGIEGMILAAKWARESGVPFLGVCLGLQVAAIEFARNVIGRPNSSSTEFLDETLLAPEDQVVIYMPEIDKEHMGGTMRLGLRPTIFQPNSEWSNIRKLYGEVNEVHERHRHRYEINPKIVNDMESRGFIFVGKDETGQRCEIFELKGHPYYVGTQYHPEYTSKVLEPSRPFWGLVAAAPAHLVK

SEQ ID NO: 42863 - protein, 470 aa, Dechloromonas aromatica RCB
MKKEKALVWFRRDLRDHDHAALSAALAEAQQVYCAFVFDSEILDPLPTRHDRRVHFIRESLVELDAALRARGGGLIIRHGQAVDEIPALARRLGVSAVFTNRDYEPSAKRRDAQVARQLRNDDIAFHGVKDQAIFDGDEVLTQAGKAFSVFTPYKNAWLKRLTTADYAAWPCDGRLAGQELAGIPTLEEIGFTPTDLAELGIQPGMSGAKGLWDDFSRDRIERYGSLRDFPAVKGVSYLSVHLRFGTISIRQLVRQALAHQADTWLSELIWRDFYFMILDHFPHVAGHAFKPEYDAIQWASRPEAFAAWCEGCTGYPLVDAAMRQLNFSGWMHNRLRMVVASFLTKDLGIDWRLGEKYFAEQLNDFDLSANNGGWQWASSSGCDAQPYFRIFNPVTQSEKFDAEGKFIRRYVPELAKVHDKYIHAPWKMGRIEQEALGVVIGRDYPSPIVDHATARDETLARYAVVKKQA

SEQ ID NO: 42864 - protein, 407 aa, Zea mays subsp. parviglumis
MAREAASEATASRESGAEAAGECWSEALKSFLDHIPVSSVPGALQPTASPAVEVKLHGSVLGALDAMYSSNAAGAVIIDVVHSSLGKYVDRDIGFVEFSSLVLWALEELGKVESEPTDSTSDFLSTLKQHHQIAETKIAWLAKLFLWEPFFPVRTHDTLFHAMLLFSKHHRLNVAPVVESMNSSVIGFVTQDAVMELLLQSSGLEWLDKIADKQLSEFRFANVRKPVLVYSDQTLADGLHILSKEKTGVAVIDRKTSRLIGSLQCSDLYLFLDVSTLFSKRTTTTLEELISLNNKTDRKCSTAENSCAPGRNILALRSRQSGMVGLPATNLESDTLKQAMEKLTTLRSSCSFIVDEHGRVQGVVTTRDIISVFSPPCMDSRIDGATFFSAALEQAGCRVENGQMFQN

SEQ ID NO: 42865 - protein, 227 aa, Zea mays subsp. parviglumis
MEGGAGASEKGTVLVTGASGFVGSWLVMKLLQAGYTVRATVRDPANVGKTKPLMDLPGAKERLSIWKADLAEEGSFHDAIRGCTGVFHVATPMDFLSKDPENEVIKPTVEGMISIMRACKEAGTVRRIVFTSSAGTVNLEERQRPVYDEESWTDVDFCRRVKMTGWMYFVSKTLAEKAALAYAAEHGLDLVTIIPTLVVGPFISASMPPSLITALALITGNAPHYSI

SEQ ID NO: 42866 - protein, 127 aa, Arabidopsis thaliana
  misc_feature (22)..(22): Xaa can be any naturally occurring amino acid
  misc_feature (36)..(36): Xaa can be any naturally occurring amino acid
  unsure (1)..(127): unsure at all Xaa locations
IDSEVAEIFINQVVIAAVFQQXAAHRFWHGPRCGFXGEVGISTSRSHACGPVGVGALSSSVWIMRGKVQVVDGVNGIVYRHKDFPVAQGTEQEENGIYLSLFIRRQSYVFQERLKDLAPDAQDSSVP

SEQ ID NO: 42867 - protein, 401 aa, Xylella fastidiosa 9a5c
MIRPDLNERILSLRKLRLAQCRTRTRRTIERRNGVRLEINGSWLVEFCSNDYLGLAQHFEIIAALQDAAARDGIGATASHLICGHHAIHKALEYELAEWLGYPRALLFGNGFTANLAVQQALLTKENDICVQDRLNHASLIDATRLAGCRLRRYPHLDVDGAAHQLKNAPEGAAMLATDGIFSMDGDIAPLRALSLVARTQQALMYVDDAHGIGVTGPQGSGCVAAAWLSVEEVPLQLVTLSKALGGYGAALLGSATLIQHLAETARPYIYTTALPPAQAAAALTAIRIARRDEWRRQRLQELVERFRENSRRHGLEIMDSETPIQPLQCGDETTTMAMSAALEREGFLVNAIRPPTVPEGKSRLRVTLSALHTTEQIDTLVQALARSRDALATEAAPVQV

SEQ ID NO: 42868 - protein, 461 aa, Thermoanaerobacter tengcongensis MB4
MENLHTREYDLAVIGGGPGGYVAAIKAAKKGAKVALFEKDKLGGTCLNRGCIPTKAYARAAEVYGILKKAKEFGFDIQINYFDYAQVVKRKDTIVGELVEGIKALLKANKIEVFNKEAKVDKEKNVIFEGEKIKAKNIIIATGSSPAELPIEGIDSKNVLNSDTILEITSLPKSLCIIGGGVIGMEFAFIMNQFGVEVYVVEMMPNILPSLDKKVSSAVKFAAQKRGIKIYTSSTVEKVEEEGENSVVTIRSGDDIKKISVDKVFVSIGRKLNTSIGPIVDLLEFDKKAIKVDEHMRTNIEGVWAVGDVTGKMMLAHVASSQGEVAVDNIFGKSRTLDYYKIPAAVFTEPEIGYFGYTEEEAKEKFGEIKVGRFDFKHNGRAKTYGETEGFAKIISTEDGEVVGAWVVGSGASELVHIISTACQSGAKAEELKDVVYAHPTKSETIMEAFKDIFKEAIHKI

SEQ ID NO: 42869 - protein, 749 aa, Legionella pneumophila subsp. pneumophila str. Philadelphia 1
MFKRTIPLFAAFTLAISPSIFPNYAHAQEDKPKTNQYWWPKMLDLSPLRQPNATSNPMGEKFNYAEEFNSLDLNAVIEDLKKLMTTSQDWWPADYGNYGPLFIRMSWHAAGTYRIYDGRGGANGGFQRFAPQNSWPDNANLDKARRLLWPIKQKYGRKISWADLLVLAGNVAMESMGFKTIGFAGGREDAWEAININWGPEGKWLESKRQDKDGKLEKPLAATVMGLIYVNPEGPNGVPDPLAAAEKIRETFGRMAMNDEETVALIAGGHAFGKTHGAASGKYLGPAPEAAGIEEQGFGWKNSYGSGKGKDTITSGLEGAWTVTPTHWSHNYLQNLFNFNWVKTKSPGGAIQWVPENSNASSMVPDAFDPSKRHAPVMLTTDLALKFDPVYSKIAKRFLDNPKEFDDAFARAWFKLIHRDMGPRSRYLGSLVPKEAMIWQDPVPPVDYKLVDANDIANLKGKILNSGLTTSELVKTAWASASTFRGTDMRGGANGARIRLAPQKDWPANDPQELAKVLKTLESIQNNFNNAQADGKKISLADLIVLGGNAAIEQAAKQAGYDIIVPFTPGRTDATQGMTDVKSFEVLEPKADGFRNYFDKSNNMSPPEMLVEKASLLKLSVPEMTVLVGGMRVLNANTGQNQYGVFTDKPGTLNNDFFINLLSMSTEWKKSSETEGIYEGYERKTGKLKWKATSVDLIFGANSELRAVAEAYATDDAKEKFIQDFINAWVKVMTADRFDIKAANANINS

SEQ ID NO: 42870 - protein, 497 aa, Magnaporthe grisea 70-15
MAATSIRGLLLLAVAAAAGPLEAAQEPHDPGCLHMPIMHMSKAEQYQKRAVKVPFDQRFDVGYYTKLSFGTPAQEALVHLDTGSFELWINPTCNNLDGAGEQQFCRAGGSYDPAQSTTVQRLGTTNTLRYGIGSANISYVKDTVGIPGTNMSVRSAQFGVATSSETQNAGILGIGHGVGQAIGYRNFIDELKAQNVTKTRAFSVALGGKDEKQGTVVFGGVDTSKFAGGLARLPIIPAAQSPDGVRRYWVNMSSISLHPPSGRNKTYPGTNMPVFLDTGSTLTLLPEALVKSVASDFGSMQQDAGGYWPVDCSLVGINGTMDFAFDGVTIKVPYKELIRQFGNSCVLGLSSHSSFTLLGDTFMRSAYFVFDQDSDCVWMTQYTNCGSTPAALASVASLRTLQGACPLKQGSVSAVTAGTAGAAAPSTTASPKAPGAGGGSGSNGGGGAKGSPPPGASASAPDSKLKNAGGRAMQVPAISSAVVTLVLTTLAALHLAL

SEQ ID NO: 42871 - protein, 110 aa, Quercus suber
SLDIWDPFEGFSAVASVPPSARETTAFATARIDWKETPEAHIFNADLPGLKKEEVKVEVEDGNVLQISGERSKEHEEKNDKWHRVERSCGKFMRRFRLPENAKVDQVKAN

SEQ ID NO: 42872 - protein, 248 aa, Yarrowia lipolytica CLIB122
MKILTIDVFGTLFVPRPSVPAQYLRIVQQHEKCSATVAQVQAGFHKAFKRLFKEYPLYGKETIGYEQWWCLVIRETFENKISLQTAHHVYDHFGTTKPYHLYEDAIPLLTKVRAMGFRTAALSNMDPRVIDVLHDLGLTQYLDETILSFDTEVEKPDIRAWKNVENIFGVTHKDSDGDNLLYHVGDERKKDLVSVPGWVTILVDRSEGFQEFHEFEENQAVELKKDILKVSDDQFVVKSLVDVVELLE

SEQ ID NO: 42873 - protein, 362 aa, Rickettsia sp. RDa420
WQDVIDISKVYSEADCFTYDPGFMSTASCRSTITYIDGDQGILRHRGYDIKDLAEKSDFLEVAYLLIYGELPNSKQYNDFTKKVAHHALVNERLHYLFQTFCSSSHPMAIMLAAVGSLSAFYPDLLNFFKEADYELTAIRMIAKIPTIAAMSYKYSIGQPFVYPDNSIDFTENFLHMMFATPCEKYKVNPVIKNALNKIFILHADHEQNASTSTVRIAGSSGANPFACVSTGIASLWGPAHGGANEAVINMLKEIGSVENIPKYIAKAKDKNDNFRLMGFGHRVYKNYDPRAAVLKETCKEVLKELGQLDNNPLLQIAIELEAIALKDEYFIERKLYPNVDFYSGIIYKAMGIPPQMFTVLF

SEQ ID NO: 42874 - protein, 944 aa, Yarrowia lipolytica CLIB122
MSEYLPPPPPLSPFSEWFEFGDTDLQIDKLQLAPDQSTATAPSTAGTTSASAPTQPPPPPPAPFISARESSMNVGPQHLPRDMGRPPQPTHSQSQPSHSQIHTQIPKHAPPPIPTLKKPPPPIRHYSSPSNGSSAANAIPGANHPPPQAQSQHSQAAQAAQQAHAALHAAQSASAPVSAVSPVSNTPLVTSWDKTKVAEWLRSLKCAEYIPMFEQNEICGEVLLEIDQKLLKDMGVVKVGDRVRINVAIKDLRSQHRKTTLQNQQPTPHQRSQHRTGKTLSYLDEQCVSPFASHGLGISSSSGTPVTPDRASSAGSDFSSHLRPQTARAPSSTTSTGDVKGILSMDQVRQGTVKFIYTMGQSKTVNISGCFNAESIIRTALKKFAIKDSPNNWCIHVSDNAFATSTRIVSDNELVTICHSPSRAERRRLMLCLNDMPPTQKQFAKSQSVLLESVDTNTNSSSSSGNYSANQPTISQLSGDYFSSDPQKMAPLPRSNLPHNSRRLQRFGHRPPSELISSNLAEYFPQAGSKVLEQTIRNSIRFSNRMSRMSTSTASNYHYNRMSIATISSFMNNEGGIGSENDSDNIPAVPEIPSDLSMPQTLTRESMQPSRTQSSSQVERGSSLRKSTASIPATLETLSQQEEAASAAASATASLVDPPHSATPSEDDMSDEQIIAMQSEAPKNWIKGTLIGQGSFGCVHLGMNSLTGELMAVKQVSLGDFSKTSHKQAMVDALQREMNLLRDFQHDNIVQYLGSSSDEEYLNIFLEYVPGGSVSSMLTKYGQFEEPLVKHFVRQILKGLDYLHSRNIIHRDIKGANVLVDNKGNVKISDFGISKKIEASSSNRQSLQGSVYWMAPEVVKQTSYTLKADIWSLGCLIVEMLTGSHPFPQFSQMQAIFKIGTSGRPDIPENCSEDTKDMLRQTFEQDYNKRPSAAELLAHEFLNT

SEQ ID NO: 42875 - protein, 110 aa, Quercus suber
SLDIWDPFEGFSAVASVPPSARETTAFATARIDWKETPEAHIFKADLPGLKKEEVKVEVEDGNVLQISGERSKEHEEKIDKWHRVERSCGKFMRRFRLPENAKVDLVKAN

SEQ ID NO: 42876 - protein, 237 aa, Pseudomonas syringae pv. phaseolicola 1448A
MAICDLELPAGLVARDFDTPQQLADALAANVAERLKQAIGENGLATLVVSGGRSPVAFFQSLAVQPLDWSKVVISLADERFVPTEHADSNAGLLQRHLLQGPVAKAKFLGLYSVAGSVEEAALAADQALAELPPIDVLILGMGDDGHTASLFPGSPNLKEALDLQGERRCLPMLAPSVPHQRLTLTRRLLASARSPILSVSGQAKLDTLRTALAGDDLAEMPVRAFLNPSLEIYWCP

SEQ ID NO: 42877 - protein, 369 aa, Rickettsia sp. RDla440
DSEFAELKIRGKIFKLPILKASIGEDVIDISRVSAEADCFTYDPGFMSTASCQSTITYIDGDKGILRHRGYDIKDLAEKSDFLEVAYLLIYGELPSGEQYNNFTKQVAHHSLVNERLHYLFQTFCSSSHPMAIMLAAVGSLSAFYPDLLNFKEADYELTAIRMIAKIPTIAAMSYKYSIGQPFIYPDNSLDFTENFLHMMFATPCTKYKVNPIIKNALNKIFILHADHEQNASTSTVRIAGSSGANPFACISTGIASLWGPAHGGANEAVINMLKEIGSFEYIPKYIAKAKDKNDPFRLMGFGHRVYKNYDPRAAVLKETCKEVLKELGQLDNNPLLQIAIELEAIALKDEYFIERKLYPNVDFYSGII

SEQ ID NO: 42878 - protein, 388 aa, Synechocystis sp. PCC 6803
MKAMILAAGKGTRVRPITHTIPKPMIPILQKPVMEFLLELLRQHGFDQIMVNVSHLAEEIESYFRDGQRFGVQIAYSFEGNIVDGDLVGKALGSAGGLKKIQEFNPFFDDTFVVLCGDALIDLDLTTAVKLHREKGAIATIITKTVPQELVSSYGVVVTDDNGKILTFQEKPAVEEALSTEINTGIYIFEPEVIDYIPSGQEYDLGGDLFPKLVDSGLPFYAVNMDFEWVDIGKVPDYWQAIRGVLSREIKNVQIPGIEVRPGVYTGINVAANWDNIEIEGPVYIGGMTRIEDGVKIIGPSMIGPSCLICQGAVVDNSVIFEYSRLGPGARLVDKLVFGRYCVDKTGAAIDVQAAALDWLITDARHAAVQYRQEYPSQREISKLLQPE

SEQ ID NO: 42879 - protein, 150 aa, Glycine max
MASSIQQQRSTATSSGSEGGGDPQMIDERKRKRMLSNRESARRSRMRKQKQLEDLTDEVSRLQGANKKLAENIKAKEEACVETEAANSILRAQTMELADRLRFLNSILEIAEEVEGLSVEIPEIPDPLLKPWQIPHPIQPIMATANMFLR

SEQ ID NO: 42880 - protein, 448 aa, Sphingomonas sp. RW5
MSDYDYDLIVIGAGSGGVRAARVAAAHGARVAIVEEYRVGGTCVIRGCVPKKLLIYGAHFAEDLRDARQFGWQVPDCQFDWPTLRDNVLAEVDRLEGLYRNTLGSHGVTILPGRGTIIGPHGVRIAGGQDVTSRMILVATGARPLLPSFDGAEHGISSNEAFHLDDVPRRIAIVGGGYIANEFAGIFNELGSAVTVINRSGQLLRGYDHSVRDRLVEISTRKGIAFRFDASFEKVIKLADGSLSVQLAGEDAFSVDCLMFAIGRVPNSSDLGLEEQGVEIDPLGAIIVDDDGRSTVGSIFAVGDVTNRIQLTPVAIREGQAFADTQFGGKPHRVDYRHVPSAVFSHPPIAFVGLTEQQARDQVGEVKIYTSDFRPMKNVLAKRDERALYKMICDADTDRILGLHMIGPDAPEILQAAAIAVKAGLSKAAFDETIALHPTMAEELVLLR

SEQ ID NO: 42881 - protein, 917 aa, Pseudomonas chlororaphis
MLKKLGIKGRVLLLTLLPTSLMALVLGGYFTWMQQSDLQTQLLQRGEMIAEQLAPLVAPALAHQNTALLERIATQSLEQQDVRAVSFLAPDRTPLAHAGPSMLNQAPTGNGSQMLQRTGSDATRYLLPVFGRHRNLAGDLIPDESDRLLGWVELELSHNSMLLRGYRSLFASLLLITAGLICTGLLALRMGRTINNPLSQIKQAVTQLKDGNLETRLPLLGSQELDELASGINRMAGTLQNAQEELQHSIDQATEDVRQNLETIEIQNIELDLARKEALEASRIKSEFLANMSHEIRTPLNGILGFTHLLQKSELTPRQLDYLGTIEKSADSLLGIINEILDFSKIEAGKLVLDSIPFNLRDLLQDTLTILAPAAHAKQLELVSLVYRDTPLSLVGDPLRLKQILTNLVSNAIKFTREGTIVARAMLEEEHEDSVQLRISIHDTGIGLSNQDVRALFQAFSQADNSLSRQPGGTGLGLVISKRLIEQMGGEIGVDSTPGEGSEFWISLRLPKTRDDAEDLPAPPLLGRRVAVLENHELARQALQHQLEDCGLEVTPFNTLEALTNGVTGVHQTEQAIDLAVLGITTNDMPPERLNQHIWDLEHLGCKVLVLCPTTEQTLFHLSVPNPHSQLQAKPACTRKLRRALADLVNPKAVRSEPSEPIASRPPRVLCVDDNPANLLLVQTLLEDMGAKVLAVDSGYAAVKAVQNESFDLVMMDVQMPGMDGRQSTEAIRQWESERNCTPLPVIALTGHAMANEKRALLQSGMDDYLTKPISERQLAQVVLKWTGLALRNQGPERTGEPSGNGHELQVLDHDEGLRLAAGKADLAADMLAMLLASLEADREAIRAARAANDHNALIERVHRLHGATRYCGVPQLRAACQRSETLLKQEDIKAFAALDELERAINRLATEARINA

SEQ ID NO: 42882 - protein, 404 aa, Oryza sativa (japonica cultivar-group)
MQASSAAAAAACSAIKPAAHQHTVQVQEDKRGSEFRARFGTRKLSWGGKLSVENSALHQCQSLTRSIRRQKRQHSPVLQVRCYAIAGDQHESIATEFEEICKEVPQKLGAFYRFCRPHTIFGTIIGITSVSLLPMRSLDDFTMKALWGFLEALSSSLCMNIYVVGLNQLYDIQIDKVNKPSLPLASGEFSVATGAVLVLTSLIMSIAIGIRSKSAPLLCALFISFFLGSAYSVDAPLLRWKRNAFLAASCILFVRAVLVQLAFFAHMQQHVLKRPLAPTKSVVFATLFMCCFSSVIALFKDIPDIDGDRHFGVESLSVRLGPERVYWLCINILLTAYGAAILAGASSTNLCQMIITVFGHGLLAFALWQRAQHCDVENKAWITSFYMFIWKLFYAEYFLIPFVQ

SEQ ID NO: 42883 - protein, 666 aa, Dehalococcoides ethenogenes 195
MSNTKSDSLCINALRFLAVDAVQKANSGHPGAPMGMAAMAYALWQNFLKHNPQDPAWPNRDRFILSAGHASALLYSLLHLTGYDLPLDELKNFRQWGSKTPGHPEYGLTPGVEMTTGPLGQGFASGVGMAMAEAHLAAVFNQPDCKIIDHYTYGIVSDGDLMEGVASEAASLAGHLALGKLIYLYDDNEISIEGSTELAFTENTALRFESYGWQVIGPVDGLNPEAVSGAIKEAQSDSARPSLIICKTVIGFGSPNKAGKASAHGEPLGTDEVAKSRKSLGWDYEPFVIPPEALAEFRMALDKGKTAQQVWQSKLDYYSSRYPEKAALLQDRLSGKLPDNWDNELDKLFDKAMASREASGLIINTLASRLPALMGGSADLSPSNKTVIKDGGEYEPPHYEGRNIHFGVREHAMGAIANGLALHGGIIPYVATFLIFYDYMRPAVRLASLMGQRVIYIFTHDSIGLGEDGPTHQPIEQLAGLRSVPGLVTIRPADSYETAQAWKTAILRKDGPTAIALSRQKLPLLDNSQANSVNLAKGAYILAETDSRPQVALVASGSEVSIAVQAAEILKNKGVSSRVVSFPSWQLFEAQPRTYRQSILPASLPRVIIEAGSAQGWCKYLGANGDIISIDHFGASAPAPVLYQHFGLTPENMAEKALKLLENEDE

SEQ ID NO: 42884 - protein, 330 aa, Synechococcus elongatus PCC 6301
MARMYYDADANLDLLNGKTVAIIGYGSQGHAHALNLRDSGVNVVVGLYPGSKSAAKAEAEGPKVLPVAEAAQAADWIMILLPDEFQKSVFENEIRPALSAGKVLAFAHGFNIHFAQIVPPADVDVVMIAPKSPGHLVRRTYEQGQGVPCLFAIYQDASGQARDRAMAYAKGIGGTRAGILETSFREETETDLFGEQAVLCGGLSALIKAGFETLVEAGYQPELAYFECLHEVKLIVDLIVEGGLAAMRDSISNTAEYGDYVTGPRLITEETKAEMKRVLADIQQGRFALDFVQECGAGKPVMTATRRLEAEHPIESVGKDLRAMFSWLKK

SEQ ID NO: 42885 - protein, 110 aa, Quercus suber
SLDIWDPFEGFSAVASVPPSARETTAFATARIDWKETPEAHIFKADLPGLKKEEVKVEVEDVNVLQISGERSKEHEEKNDKWHRVERSCGKFMRRFRLPENAKVDQVKAN

SEQ ID NO: 42886 - protein, 238 aa, Bacteroides fragilis NCTC 9343
MKPYIFPSSIETARALILHLVKLMLDEPDRTFCIAFSGGSTPALMFDLWANEYTDITPWERLKVFWVDERCVPPENSDSNYGMMRSLLLSIVPIPYENVFRIQGEKNPKKEAARYSKLVMKEVPVENEFPVFDVVLLGAGNDGHTSSIFPGQEELLSTDHIYEANFNPNNGQKRIALTGLPILNARRIIFLITGRVKSPVVEDIFYSGDTGPAAYIAHHADNVELFMDNAAAEKVIRG

SEQ ID NO: 42887 - protein, 145 aa, Bacillus subtilis
MSLVPYDPFRQLSNMRREFDRFFSELPISFDNEHGIGGIRVDVHETENEVVATCDLPGLEKKEDVDIDIQNNRLSISGSIKRTNEIKEENMLKKERYTGRFQRMITLPSPVSHDGVKATYKNGILEITMPKVAKDVKKKIDVSFQ

SEQ ID NO: 42888 - protein, 607 aa, Bacillus anthracis str. A2012
MCGITGWVDWKEDLSNQHVILKKMANRIQHRGPDAEGFWFSPRAAFAHRRLIVIDPEGGAQPKTFRAGDYTYALTYNGEIYNFRELREQLQKCGHTFETHSDTEVLLHAYLEWKEDCVQHLNGIFAFALWDDQKQRLFLARDHLGVKPLFYTERNDSIIFGSEIKALLAHPSVPAEIDADGINEIFGLGLFRTPGCGVFKHIEEVRAGHSITFTRDKKVVTKYWNLESKVHTDSIEDTSSHILSILQDTVKRQLIADVPLVCMLSGGLDSSGITALAGKEFAAENKTLHTYSVDFVNSAKDFELTFARTGLDAPWVKRVSEHVGTSHHDIIVNAEELANHLFVPLRAKDLPSAGEMETSLYLLFCEMKKDATVALSGESADEVFGGYPWFHQEELLYVDKFPWLTNWKNTSPLLLHEISNQCNLENYIDTRFQEAILEVPTLEGESKKSAKQRQMFYLFLTRFLPFLLDRKDRMSMAVGFEVRVPFCDYRLVEYLWNVPFNIKSIDNIEKGILRRALKPALPDDVRNRRKSAYPTSQDPQYLQTIRHLSLDMCSNKNNPIFSLINHSTLLAIADGSNKEINNFEARSAMEYMLQVNEWLKTYHIHIA

SEQ ID NO: 42889 - protein, 284 aa, Mesorhizobium loti MAFF303099
MQEKIRETCLATKTVKLLSARRLIVKIGSAVVADAETGEIRGPWLETLIKDVVRFFARGQQVIIVTSGAVAAGSRHFKQLDRSLRIEEKQAAAAIGQIRLMIAYEQSLKRHGFGLGQVLLTSADVDNQRCRLNARSAFQQLLNVGAVPVINENDATATPEVCLGDNDRLAARVAQIAKADLLILLSDVDGLFTEDPHDNPLARMIPEVRRITPEIEIMASLSPARHGSGGMVTKLMAARIAMEAGCNVVIAKGSKSYPLAAIENGAPSTWFIPPARETATRGGR

SEQ ID NO: 42890 - protein, 334 aa, Streptomyces viridochromogenes
MTTEEGKPAMSAEPRAVRLYRTMRLIREFEERCLAMSLSGEIVGGIHPYIGQEAVAAGVCAALTDDDVVTSTHRGHGHVLAKGADPKRMLAELCGTTAGLNRGRGGSMHAADVSLGVYGANGIVGAGAPIAAGAAWSFQRRGDGRVAVAFFGDGALSQGVVLEAFNLAALWRLPVVFVCENNGYATSLPLDRALAGDPVERAAGFGLTARAVDGMDADAVADAAAEAVERCRRGGGPTFLDCRTYRFNGHHSFEEQVGLNYRDDAEVGEWRARDPLRTQSTRVDGATAGAIDAETSTLIDEAVEFARAGRAPDPAEALHHLYADGTTPRPGVMI

SEQ ID NO: 42891 - protein, 4930 aa, Bacillus subtilis
MLKDSQASIVLTQPNVHDRISGLTGSHVKAINIELACRNGYTDQQSSGLKREVKPEHLAYIIYTSGSTGEPKGVMVEHRSIMNTLNFLESHYPVTAEDAYLLKTNYVFDVSISELFGWFIGDGRLVILPPNGEKSPQLCMDYIETYKVTHINFVPAMLHVFLEMAKDNKRFTEDGPLKYMMVAGEAFPKVLVKKAVSLFTNCRVENIYGPTEASIYAAYFGCGKGDIASHHTPIGKPVSNTKIYIVDQHLKPVPIGKPGELCIAGAGLARGYFKKPGLTAEKFIDNPFESGTKLYKSGDSARWLPDGNIEYLGRIDSQVKIRGFRVELGAIETKLGEFPGILDQAVVVKQLEGHQQLAAYYTEESGHASANPKDLRLHLKSSLPEYMIPSHFIRLDELPLSPSGKVNRKELEKREIVFNRRKPNHLQLTEIEDQVLRIWEETLKVSGFGPEDGFFDAGGDSLLAVAVAERIKKEFDCEFHVTELFEYSTIRAISEYILEMKNSDLAGTQNEDDHDDKKDGKYPKQKIPPYFDDSVAIVGISCQFPGAKNHHDFWNHIKEGKESIRFFSEEDVRANGVPEELIQHPDYVPVQSVIEGKDLFDPGFFQISPKDAEYMDPQLRLLLLHSWKAIEDAGYVAKEIPATSVYMSASSNSYRTLLPKETTEGHESPDGYVSWVLAQSGTIPTMISHKLGLKGPSYFVHSNCSSSLVGLYQAYKSLTSGESQYALVGGATLHAQSAIGYVHQNGLNFSSDGHVKAFDASADGMAGGEGVAVILLKKAVDAVKDGDHIYAIMRGIGINNDGAEKAGFYAPSVKGQTEVIQHVLDTTKIHPETVSYIEAHGTGTKLGDPIEMSALNKVYKQYTDKTQFCGIGSVKTNIGHLDTAAGLAGCIKVAMSLYHNELAPTINCTEPNPDIKFESSPFYVVRERKSLEKHAGVHRAALSSFGLGGTNAHAIFEQYENISDAGAENEGNQPYIIPISAKNSERLQVYAKEMLSYISQDEQRHFSLRDIAYTFQVGREAMDNRIVFIVNDLEEWKHQLEAFVTGKPLAEGCIQGEKTRMTSAEQLLGNAEADDMASSRISKEELRKLAEMWANGFHVEWRRLYPNIKPRRISLPTYPFAEERYWPESSTGAITTIEPSRLHPLEHHNTSVLSEQRFSSIFTGQEYFIAEHIIKGMAILPAAVTLEMARAAIEQGIGGLEDHETGIRLKNVVWVRPVVAGSEPVQVNIGLYDEDGGHIAYRMYGDPESADAEPVVYNQGKAELIQLKREKALDLSKIKKQCDQSKMDAASFYEGMIGADYGPGYKSVEAVYKGDGQLLAKLSLPESVAHTLGDYVLHPSVMDGALQAAEYLQNVVRAELSDTEDFKAALPFALEELEVFRQCVSDMWVYVQFNSKNKPGDLIQKVDIHLCDEHGMICVRLKGFSTRVMEADIQTEPSKINAETLLLQPVWQEQKAANSLAAKKYAEHLVFLCEYDHETRKQIEAAIEDVHVYSLEARPSSVDGRFHSYTEQVFKKVQEIIRTKPKDGILVQIVTSAEGEQQLFSGLTGLLKTACQENAKLTGQMIEVSSEESGESIAGKLLENQMSSDSYVKYQNGTRYIADWREIKQAKGDGSKPWKDNGVYLISGGAGGLGHIFAKEIAEQTKNATVILAGRSPLSESKSKKLKELHSKGADITYRQTDVTNKIEVYQLIDDIQKRYGRLNGILHSAGIIKDSYLVNKQAKDLHDVLAPKVKGLVYLDEASKDLPLDFFILFSSLSGSLGSIGQSDYAAANVFMDMYAGYRNRLADLSQRHGQTLSVNWPLWRDGGMQVDQETEKRLVQLAGIVPMRAEKGIQALYQALHSEANQVMVIEGDVQKIKQNMLAKNASAPMEKKEAEHMTEQINSIDADSLLDKVKAMLKREIAKLLKVKLETIDDHAEMTVYGFDSISMTEFTNHINRAYQLELTPTVFFDHPTIHAFGKHLSEEYQSVFAKTFAVRAVSAQLQPAAKQEQAVRAKAKRRRKQQVMLPNAIQSDAGPEPIAIVGISGIFPMAKDVEAYWNILKEGKDCMTEIPKDRWDWREYEGDPAKEVNKTNVKWGGFIDGIADFDPLFFGISPREAEQMEPQQRLLLTYAWKAIEDAGYSAKRLSGTKTGVFIGTGNTGYSSLLSKANSAIEGSAAANTSPSVGPNRVSYFLNLHGPSEPVDTACSSSLVAIHHAISSIEEGTCDMALAGGVNTIILPEVYISFDKAGALSKEGKCKTFSNQADGFAHGEGAGILFLKKLKAAEEAGDHIYGVIKGSAINHGGRAASLTTPNPKAQADVIQSAYQKAGIDPKTVTYIEAHGTGTELGDPVEINGLKSAFKALGVNEGDTSANPYCGLGSVKTNIGHLSLAAGAAGVIKILLQLKHKTLVKSLHCENVNPYIQLKNSPFYIVRETEEWKALKNEQGEELPRRAGVSSFGIGGVNAHVIIEEYIPEASDENIPSIAPEHPGIFVLSAKNEARLKEHAQQLADALDKQTYSDVNLARIAYTLQAGRDAMEERLGIISGSIEDLQKKLKDFAAEKSGVEDVFKGRIDKGTLQMLTEDEEIQEAVEKWMERGKYAKLLELWVKGLDVDWTKLYGENLPKRISLPTYPFAKDRYWISDHIEKSGSIDANQAASRLGVVLHPLMHQNTSNLSEQRFSSIYTGEEFFLADHVVKGQRILPGVAHLELARAAVEQAAEVQGVPRIMKLKNAVWVRPIVVEDQPQQVHIRLLPGENGEISYEIYGHSDVTGEQSIVYSQGSAVLNPAENLPAVDLQSLREQCQESHFSVNEVYDTYRMIGFEYGPAYRGVKKIYTAEQFVLAKLSLHPSAADTLSQYKMHPGLMDSALQASSILTGAGDNQLTLPFAVQELEVFGACSSEMWVYARYSQGSKATDKVQKRDMDILDESGNVCVRMKGLSFRAAEGGSGSAESDQTLATLMFEEKWVPKDFKKESPEPHYERHIVMLCDMNGLSKDRIESRMTGAECIVLESFREGLAERFQDYAEQALETVQGLLKSRPQGNVLIQLLTSAQRKQYSFSGLSALLKTAGLENKKLIGQTIEIDSHENVESVIEKLKENKRHTEDQHIKYEKGKRYINDLDEMQIDDREISMPWRDKGVYLITGGAGGLGFIFAKEIARQAEQPVLILTGRSALNADQQAELNELQQLGARAEYRQVDVTQTEAASELITSITSDYEDLNGVIHSAGLIKDNYLMSKTNEELTQVLAPKVKGLVNVDEATEHLALDFFILFSSISSVAGSAGQADYAMANAFMDSYAAYRNALVTAMYRHGQTLSINWPLWKEGGMRANKEIENMTLKNTGVTPMRTETGIQALYKGLAFGKDQVIVMEGFKDMMREKLTQKPSSDDVPMKTVQVRVTSEARMDQGNMFDHIQEVLKQTISQLLKIKPEEIDPDMEFNQYGFDSITLTEFANTLNEKCKLDLTPTVFFEHATVYAFAGYLSEEYPNAFTAQTPAKAEVLMQPVEQNIKNMTFSTENRFVKPSVTPMQKEADHKPEPIAIVGMSGVFPKAKDVEEYWKNLSSGADCITEVPKDRWDWQEYYGDPLKEANKTNVKWGGFIDEVADFDPLFFGISPLEAEQMEPQQRLLMTYAWKAVEEAGHSARSLAGTKTGIFIGTGNTGYSSLLSNVDIEGSAAANMSPSAGPNRVSYFLNIHGPSEPIDTACSSSLVAIHHAVCAIENGNCEMAIAGGVNTVVTPQGHIAYDKAGALSKEGRCKTFSDKADGFAVSEGAGILFLKKLTAAERDGDHIYGVIKGSAVNHGGRANSLTTPNPKAQADVVKTAYEKAGIDPRTVTYIEAHGTGTELGDPVEINGLKAAFKELYEKTGDPAVHGSHCGLGSAKTNIGHLSLAAGVAGVIKVLLQLKHKTLVKSLYSETVNPYIRLDDSPFYIVQESREWQALRDEAGRELPRRAGISSFGIGGVNAHVVIEEYIPKETTHPATAPAVTAQHPGIFILSAKDEDRLKDQARQLADFISKRSITARDLTDIAYTLQEGRDAMEERLGIIAVSTGDLLEKLNLFIEGGTNAKYMYRGRAEKGIAQTLRSDDEVQKTLNNSWEPHIYERLLDLWVKGMEIGWSKLYDGKQPKRISLPTYPFAKERYWITDTKEEAAAHQTALKTVESAALHPLIHVNTSDLSEQRFSSAFTGAEFFFADHKVKGKPVMPGVAYLEMVHAAVTRAVRRTEDQQSVIHIKNVVWVQPIVADGQPVQVDISLNPQQDGEIAFNVYTEAAHNDRKIHCQGSASIRGAGDIPVQDISALQDQCSLSTLSHDQCYELFKAIGIDYGPGFQGIDRLYIGRNQALAELSLPAGVTHTLNEFVLHPSMADSALQASIGLKLNSGDEQLSLPFALQELEIFSPCTNKMWVSVTSRPNEDKIQRLDIDLCDEQGRVCVRIKGITSRLLEEGIQPPDGPTSLGNSKATLNGALLMAPIWDRVQLEKRSISPADERVVILGGDDNSRKAVQREFPFAKELYIEPNASIHRITGQLEALGSFDHIVWMSPSRVTECEVGDEMIEAQDQGVIQMYRLIKAMLSLGYGQKEISWTIVTVNTQYVDQHDIVDPVDAGVHGLIGSMSKEYPNWQTKLIDVKKYEDLPLSQLLSLPADQEGNTWAYRNKIWHKLRLIPVHNNQPVHTKYKHGGVYVVIGGAGGIGEAWSEYMIRTYQAQIVWIGRRKKDAAIQSKLDRFARLGRAPYYIQADAANREELERAYETMKQTHREINGIIHSAIVLQDRSLMNMSEECFRNVLAAKVDVSVRMAQVFRHEPLDFVLFFSSVQSFARASGQSNYAAGCSFKDAFAQRLSQVWPCTVAVMNWSYWGSIGVVSSPDYQKRMAQAGIGSIEAPEAMEALELLLGGPLKQLVMMKMANETNDEAEQTEETIEVYPETHGSAIQKLRSYHPGDNTKIQQLL

SEQ ID NO: 42892 - protein, 498 aa, Lycopersicon esculentum
MKKVTVGVAVVGAAAVCAVAVLIVNHRMRKSSKWGRAMAILREFEEKCKTQDAKLKQVADAMTVEMHAGLASEGGSKLKMLITYVDNLPTGDEAGVFYALDLGGTNFRVLRVQLGGKDGGIIHQEFAEASIPPSLMVGTSDELFDYIAAELAKFVAAEEEKFHQPPGKQRELGFTFSFPVMQTSINSGNIMRWTKGFSIDDAVGQDVVGELTKAMKRKGVDMRVSALVNDTVGTLAGGKYTQKDVAVAVILGTGTNAAYVERVQAIPKWHGPVPKSGEMVINMEWGNFRSSHLPLTEYDHALDNESLNPGEQIFEKMTSGMYLGEILRRVLLRVAEEAGVFGDEVPPKLKEPFVLRTPDMSAMHHDTSSDLKVVGEKLKDILEISNTSLKTRKLVVELCNIVATRGARLAAAGVLGILKKMGRDTPKQGGSERTVIAMDGGLYEHYTEYRMCLENSLKDLLGEELATSIVFVHSNDGSGIGAALLAASHSMYLEDQDA

SEQ ID NO: 42893 - protein, 367 aa, Escherichia coli
MSDSQTLVVKLGTSVLTGGSRRLNRAHIVELVRQCAQLHAAGHRIVIVTSGAIAAGREHLGYPELPATIASKQLLAAVGQSRLIQLWEQLFSIYGIHVGQMLLTRADMEDRERFLNARDTLRALLDNNIVPVINENDAVATAAIKVGDNDNLSALAAILAGADKLLLLTDQKGLYTADPRSNPQAELIKDVYGIDDALRAIAGDSVSGLGTGGMSTKLQAADVACRAGIDTIIAAGSKPGVIGDVMEGISVGTLFHAQATPLENRKRWIFGAPPAGEITVDEGATAAILERGSSLLPKGIKSVTGNFSRGEVIRICNLEGRDIAHGVSRYNSDALRRIAGHHSQEIDAILGYEYGPVAVHRDDMITR

SEQ ID NO: 42894 - protein, 407 aa, Escherichia coli
MLEQMGIAAKQASYKLAQLSSREKNRVLEKIADELEAQSEIILNANAQDVADARANGLSEAMLDRLALTPARLKGIADDVRQVCNLADPVGQVIDGGVLDSGLRLERRRVPLGVIGVIYEARPNVTVDVASLCLKTGNAVILRGGKETCRTNAATVAVIQDALKSCGLPAGAVQAIDNPDRALVSEMLRMDKYIDMLIPRGGAGLHKLCREQSTIPVITGGIGVCHIYVDESVEIAEALKVIVNAKTQRPSTCNTVETLLVNKNIADSFLPALSKQMAESGVTLHADAAALAQLQAGPAKVVAVKAEEYDDEFLSLDLNVKIVSDLDDAIAHIREHGTQHSDAILTRDMRNAQRFVNASTRFTDGGQFGLGAEVAVSTQKLHARGPMGLEALTTYKWIGIGDYTIRA

SEQ ID NO: 42895 - protein, 136 aa, Dechloromonas aromatica RCB
MTDLSRLRGVRVMVIDDSNTIRRSAEIFLVQAGCQVVLAEDGFDALAKIADHQPSVIFCDIMMPRLDGYQTCSLIKKNPRFKATPVIMLSSKDGLFDRARGRMVGSDQYLTKPFTKDSLLQTVAAFALPVETESNS

SEQ ID NO: 42896 - protein, 923 aa, Nocardia farcinica IFM 10152
MTEPRIETEQDATRPLRDDIRFLGGVLGDTIRDHEGPEVFDLIERVRIEAFRVRREEVGRSAVAEMLRGVDIAVALPLIRAFSYFVLLANLAEDIQRDRRRAVHVAAGEPPQDSSLAATYRKLDAAALDAAAVADLLSDALVSPVITAHPTETRRRTVFDAQTRITELMRARQRATDPAERAALESRIRRQVLSLWRTALIRLARLRIQDEIAVGLRYYELTLFDVIPAINAEVRAALRARWPGADLLARPILRPGSWIGGDRDGNPYVTAEVVRHAATQAAGVALRRYLAELVELAKTLSLSARLVPVTPRVAELAAAGYPDPATHGDEPYRRALHHIRVRLSATADRVLDAPVPEAVAEPDAQPYAGPREFLDDLDAIDASLRASGDGLLADDRLAALRHAVETFGFHLQGLDMRQNSEVHEQVVAELLAWAGVHPAYGDLPEDARVELLAAELRTRRPLLGPHARLSEQAAKEVGIVRAAKQVVDTFGPEAVPNYIISMCTSVSDMLEAALLLKEGGLLDPGAPEGSPSCTVNIVPLFETIEDLGAGAATLAAALEVPVYRELVAAAGMRQEVMLGYSDSNKDGGYLAANWALYRAELDLVEVARKTGIRLRLFHGRGGTVGRGGGRSYDAILAQPAGAVRGALRLTEQGEVIAAKYAEPGAAHRNLESLIAGTLESTLLDVEGLGADAEPAYELMDELAALARAAYARLVHETPGFVEYFRQSTPVAEVGDLNIGSRPASRKPTNSVSDLRAIPWVMAWSQARVMLPGWYGTGAALEEWVGGDPGRLARLTDLYRRWPFFRTVLSNLAQVMAKSDLDIAARYAELVDDAALRDQIFGMIREEHARTLRMHAAITGHDQLLADNRSLAESIHNRFPYLEPLNQMQVELLRRLRSGDDSELVKRGILLTMNGLATALRNSG

SEQ ID NO: 42897 - protein, 531 aa, Pleurotus eryngii
MFPGARILATLTLALHLLHGTHAAIGPIADMYIVNEDVSPDGFARSAVVARSVPATDPTPASVSVPGVLVQGNKGDNFQLNVRNQLSDSTMLKTTSIHWHGFFQSGSTWADGPAFVNQCPIASGNSFLYDFNVPDQAGTFWYHSHLSTQYCDGLRGPFVVYDPSDPHLSLYDVDNADTVITLEDWYHVAAPQGAVLPTPDSTLINGKGRFAGGPTSPLAIINVESNKRYRFRLISMSCDPNFTFSIDGHSLQVIEADAVNIVPIVVDSIQIFAGQRYSFVLNANQAVDNYWIRANPNLGSTGFEGGINSAILRYAGATENDPATTSSTSTPLLETNLVPLENPGAPGPAVPGGADININLAMGFDFTNFEMTINGSPFKAPTAPVLLQILSGATPAASLLPSGSIYALAANKVVEISIPALAVGGPHPFHLHGHTFDVIRSAGSTTYNFDTPARRDVVNTGIDANDNVTIRFVTDNPGPWFLHCHIDWHLEIGLAVVFAEDVASIKAPPAAWDDLCPIYDALSDSDRGGIA

SEQ ID NO: 42898 - protein, 407 aa, Bradyrhizobium sp. BTAi1
MRRVVITGMGIVSSIGNNTQEVLASLYEAKSGISRAEKYAELGFRSQVQGAPTLNPADVVDRRAMRFLGEGAAWNHVAMEQAILDAGLEPSDVSNVRTGIIMGSGGPSTRTQVEAADITRTKGPKRVGPFAVPKCMSSTASATLATWFKIKGVNYSISSACATSNHCIGNAYEMIQYGKQDMMFAGGCEELDWTLSVLFDAMGAMSSKHNDTPATASRPYDVTRDGFVIAGGAGVLVLEELEHAKARGAKIYGEIVGYGATSDGYDMVAPSGEGAERCMQMALSTVRTKVDYINPHATSTPAGDPPEIEAIRKVFGSGEKCPPIAATKALTGHSLGATGVHEAIYSLLMMKNGFICESAHITELDPMFADMPIVRKRIDNAKLGTVLSNSFGFGGTNATLVFKHVDA

SEQ ID NO: 42899 - protein, 292 aa, Zea mays
MRNSAAAQPSSPAATYVSGAAYVAPASSAAMYGSGASYVAPAASAPGGGGYIYPAPASSGGSAGYSKIPTYPAVPSAYPNPSRLPPRVSTHAPVEDPTALPSPLAKAGELVTRLREQGQVLIAARRPWGEVFRAPAFSKPPSLGEAIARMRRNTAYFRANYALAVLAVVAASLLWHPGTLFVLLFLCAAWFFLYFARPAQGGQPLRVLGMEFDDGSVLAALCGVTVIAMLFTSVGWNVVGSVMIGGALVSAHAALRTTDDLFLTEQEAAGDGLLAAGMSAAGPMLPTYVRIG

SEQ ID NO: 42900 - protein, 277 aa, Lotus corniculatus var. japonicus
MCEALKSQYQLCEEIGRGRFGTIFRCFHPISTDTFAVKLIDKSLLADSTDRHCLENEPKYMSLLSPHPNILQIFDVFEDDDVLSMVIELCQPLTLLDRIVAANGTSIPEVEAAGLMKQLLEAVAHCHRLGVAHRDVKPDNVLFGGGGDLKLADFGSAEWFGDGRRMSGVVGTPYYVAPEVLMGREYGEKVDVWSCGVILYIMLSGTPPFYGDSAAEIFEAVIRGNLRFPSRIFRNVSPAAKDLLRKMICRDPSNRISAEQALRHPWFLSAGDTVNVT

SEQ ID NO: 42901 - protein, 472 aa, Daucus carota
MVFFRSVSLLNKLRSRAVQQSNLSNTVRWFQVQTSASDLDLRSQLKELIPEQQERIKKLKAEHGKVQLGNITVDMVLGGMRGMTGLLWETSLLDPEEGIRFRGLSIPECQKLLPGAKPGGEPLPEGLLWLLLTGKVPTKEQVDALSAELRSRAAVPEHVYKTIDALPVTAHPMTQFATGVMALQVQSEFQKAYEKGIHKTKYWEPTYEDSITLIAQLPVVAAYIYRRMYKNGQSISTDDSLDYGANFAHMLGYDSPSMQELMRLYVTIHTDHEGGNVSAHTGHLVASALSDPYLSFAAALNGLAGPLHGLANQEVLLWIKSVVSECGENVTKEQLKDYIWKTLNSGKVVPGYGHGVLRNTDPRYICQREFALKHLPDDPLFQLVSNLFEVVPPILTELGKVKNPWPNVDAHSGVLLNHYGLTEARYYTVLFGVSRAIGICSQLVWDRALGLPLERPKSVTMEWLENHCKKSS

SEQ ID NO: 42902 - protein, 427 aa, Dechloromonas aromatica RCB
MTSRNQQLFERAQRHIPGGVNSPVRAFRSVGGTPCFFQKGVGAKVQDADGKWYTDYVGSWGPMILGHAHPDVIAAVQAAVVDGLSFGAPTEKEVDIADLLCELVPSMDMVRLVSSGTEATMSAIRLARGHTGRDVLIKFEGCYHGHSDGLLVKAGSGLLTFGNPSSSGVPAGTAETTMVLTYNDPQELADAFAKHGDKIAAVIVEPVVGNMNLIAPTQAFLNAMRDLCTKNGSVLIFDEVMTGFRVGLKSAQGLFGITPDLSTFGKVVGGGMPLGAFGGKREIMEKIAPLGPVYQAGTLSGNPIATAAGLATLKLIQAPGFYEALTAKTKALCDGLVAAAKKHGVAFSAQNIGGMFGLYFAEQCPGTYDEVLACDKEAFNRFFHAMLDAGHYFAPSAFEAGFVSAAHSDADIAGTIAAADAYFASLK

SEQ ID NO: 42903 - protein, 483 aa, Zea mays
NNLDIYDRTYISISTDTHPALSMLEVSTLRGPTSSGSKAEQHCGGGGGFVGDHHVVFPTSGDCFAMVDDNLLDYIDFSCDVPFFDADGDILPDLEVDTTELLAEFSSTPPADDLLAVAVFGADDQPAAAVAQEKPSSSLEQTCGDDKGVAVAAARRKLQTTTTTTTTEEEDSSPAGSGANKSSASAEGHSSKKKSAGKNSNGGKRKVKVDWTPELHRRFVQAVEQLGIDKAVPSRILEIMGTDCLTRHNIASHLQKYRSHRKHLMAREAEAATWAQKRHMYAPPAPRTTTTTDAARPPWVVPTTIGFPPPRFCRPLHVWGHPPPHAAAAEAAAATPMLPVWPRHLAPPRHLAPWAHPTPVDPAFWHQQYSAARKWGPQAAAVTQGTPCVPLPRFPVPHPIYSRPAMVPPPPSTTKLAQLHLELQAHPSKESIDAAIGDVLVKPWLPLPLGLKPPSLDSVMSELHKQGVPKIPPAAATTTGATG

SEQ ID NO: 42904 - protein, 324 aa, Nocardioides sp. JS614
MGDDSRTGRGRYLTSGDFDRDMTYIPDRITKDGRRPEHGPVQGGLWPVEPGRYRLVAAKACPWATRSIIVRQLLGLEDVISMGLCGPTHDERSWTFDLDPGGRDPVLGIERLQEAYFARYPDYPRGITVPAVVDVPTGAVVTNDFPWITHDLFFEWRDHHRPDAPDLWPDDLREEMDQVMQRIFTEVNNGVYRCGFAGTQEAYDAAYDRLWTALDWLEERLADRRYLMGDRLTEADVRLFTTLARFDAVYHGHFKCNRNKLAEMPVLWAYARDLYQTPAFGENTDFDQIKAHYYVVHEDINPSKVVPKGPDPSVWLTPHGRDRL

SEQ ID NO: 42905 - protein, 551 aa, Hordeum vulgare subsp. vulgare
MATVRQSDGVAANGLAVAAAANGKSNGHGVAAAVNGKSNGHGVDADANGKSNGHGVAADANGKSNGHAEATANGHGEATANGKTNGHRESNGHAEAADANGESNEHAEDSAANGESNGHAAAAAEEEEAVEWNFAGAKDGVLAATGANMSIRAIRYKISASVQEKGPRPVLPLAHGDPSVFPAFRTAVEAEDAVAAAVRTGQFNCYPAGVGLPAARSAVAEHLSQGVPYMLSADDVFLTAGGTQAIEVIIPVLAQTAGANILLPRPGYPNYEARAAFNRLEVRHFDLIPDKGWEIDIDSLESIADKNTTAMVIINPNNPCGSVYSYDHLSKVAEVAKRLGILVIADEVYGKLVLGSAPFIPMGVFGHITPVLSIGSLSKSWIVPGWRLGWVAVYDPRKILQETKISTSITNYLNVSTDPATFIQAALPQILENTKEDFFKAIIGLLKESSEICYKQIKENKYITCPHKPEGSMFVMVKLNLHLLEEIDDDIDFCCKLAKEESVILCPGSVLGMANWVRITFACVPSSLQDGLGRIKSFCQRNKKRNSSDDC

SEQ ID NO: 42906 - protein, 231 aa, Streptococcus pyogenes MGAS10394
MVKLVFARHGESEWNKANLFTGWADVDLSEKGTQQAIDAGKLIKEAGIEFDLAFTSVLTRAIKTTNLALENAGQLWVPTEKSWRLNERHYGALTGKNKAEAAEQFGDEQVHIWRRSYDVLPPAMAKDDEYSAHKDRRYADLDPALIPDAENLKVTLERAMPYWEEKIAPALLDGKNVFVGAHGNSIRALVKHIKGLSDDEIMDVEIPNFPPLVFELDEKLNIVKEYYLGGE

SEQ ID NO: 42907 - protein, 961 aa, Lotus corniculatus var. japonicus
MANRNLEKMASIDAQLRQLAPAKVSEDDKLIEYDALLLDRFLDILQDLHGEDLKETVQEVYELSAEYERKHDHEKLEELGKVITSLDAGDSIVVAKSFSHMLNLANLAEEVQISRRRRNKLKKGDFADENNATTESDIEETLKKLVFKLKKSPQEVFDALKNQTVDLVLTAHPTQSVRRSLLQKHARIRNSLSQLYAKDITPDDKQELDEALQREIQAAFRTDEIKRTPPTPQDEMRAGMSYFHETIWKGVPKFLRRVDTALKNIGINERVPYNAPLIQFSSWMGGDRDGNPRVTPEVTRDVCLLARMMASNLYYSQIEDLMFELSMWRCNDELRVHADELHRNSNKDEVAKHYIEFWKKVPPNEPYRVVLGEVRDRLYKTREHSRILLAQGYSDIPEEATFTNVEEFLEPLELCYRSLCDCGDRAIADGSLLDFLRQVSTFGLSLVRLDIRQESDRHTDVMDAITKHLEIGSYQEWSEEKRQEWLLGELSGKRPLFGPDLPQTEEIRDVLDTFHVIAELPSDNFGAYIISMAIAPSDVLAVELLQRESHIKNPLRVVPLFEKLDDLEAAPAALARLFSIEWYRNRINGKQEVMIGYSDSGKDAGRFSAAWQLYKAQEDLIKVAKKFGVKLTMFHGRGGTVGRGGGPTHLAILSQPPDTIHGSLRVTVQGEVIEQSFGEEHLCFRTLQRFTAATLEHGMNPPFSPKPEWRALMDQLAVIATEEYRSIVFQEPRFVEYFRLATPELEYGRMNIGSRPAKRRPTGGIETLRAIPWIFAWTQTRFHLPVWLGFGAAFRQLIEKDVRNLHTLQEMYNQWPFFRVTIDLVEMVFAKGDPGIAALNDRLLVSEDLWPFGEQLRNKYEETKKLLLQVAGHKEVLEGDPYLKQRLRLRDSYITTMNVFQAYTLKRIRDPNYDVKHISKEKSKPADELVRLNPTSEYAPGLEDTLILTMKGIAAGMQNTG

SEQ ID NO: 42908 - protein, 333 aa, Bradyrhizobium sp. BTAi1
MSARKKPLVVVTRKLPDSVETRMRELFDARLNLDDEPMSQDQLADAVRTAEVLVPTVTDHISADILNQPDCKLRMIANFGNGVDNIDVAAAVARGITVTNTPKVLTEDTADMTMALILAVPRRLIEGASILTEGKNWAGWSPTWMLGHRIGGKRLGIIGMGRIGQAVARRARAFGLQIHYHNRRPVAPVIADELGATYWESLDQMLARMDIISVNCPHTPATFHLLSARRLKLIRKDAYIVNTARGEVIDEETMTRLIEAGDIAGAGLDVFEHEPAVNPRLVRLAKSGKVTLLPHMGSATIEGRVEMGEKVIINIKTFLDNHRPPDRVLPSML

SEQ ID NO: 42909 - protein, 551 aa, Hordeum vulgare subsp. vulgare
MATVRQSDGVAANGLAVAAAANGKSNGHGVAAAVNGKSNGHGVDADANGKSNGHGVAADANGKSNGHAEATANGHGEATANGKTNGHRESNGHAEAADANGESNEHAEDSAANGESNGHAAAAAEEEEAVEWNFAGAKDGVLAATGANMSIRAIRYKISASVQEKGPRPVLPLAHGDPSVFPAFRTAVEAEDAVAAALRTGQFNCYPAGVGLPAARSAVAEHLSQGVPYMLSADDVFLTAGGTQAIEVIIPVLAQTAGANILLPRPGYPNYEARAAFNRLEVRHFDLIPDKGWEIDIDSLESIADKNTTAMVIINPNNPCGSVYSYDHLSKVAEVAKRLGILVIADEVYGKLVLGSAPFIPMGVFGHITPVLSIGSLSKSWIVPGWRLGWVAVYDPRKILQETKISTSITNYLNVSTDPATFIQAALPQILENTKEDFFKAIIGLLKESSEICYKQIKENKYITCPHKPEGSMFVMVKLNLHLLEEIDDDIDFCCKLAKEESVILCPGSVLGMANWVRITFACVPSSLQDGLGRIKSFCQRNKKRNSSDDC

SEQ ID NO: 42910 - protein, 967 aa, Lotus corniculatus var. japonicus
MANRNLEKMASIDAQLRQLVPAKVSEDDKLVEYDALLLDRFLDILQDLHGEDLRETVQEVYELSAEYERKHEPQRLEVLGNLITSLDAGDSIVVAKSFAHMLNLANLAEEVQIAHRRRIKLKKGDFADEGNATTESDIEETFKKLVGEMKKSPQEVFDELKNQTVDLVLTAHPTQSVRRSLLQKHGRIRNCLTQLYAKDITPDDKQELDEALQREIQAAFRTDEIRRTAPTPQDEMRAGMSYFHETIWKGVPKFLRRVDTALKNIGINERVPYNAPLIQFSSWMGGDRDGNPRVTPEVTRDVCLLARMMAANLYYSQIEDLMFELSMWRCNDELRVRAEELTSSSNKDAVAKHYIEFWKNIPPSEPYRVVLGEVRNRLYQTRERSRHLLANEYSDILEEHTFTNVEEFLEPLELCYRSLCACGDRAIADGSLLDFLRQVSTFGLSLVRLDIRQESDRLTDVLDAITKHLGIGSYLEWSEEKRQQWLLSELSGKRPLFGPDLPQTEEIKDVLDTFHVIAELPSDNFGAYIISMATAPSDVLAVELLQRECHVKNPLRVVPLFEKLADLETAPAALARLFSVEWYRNRINGKQEVMIGYSDSGKDAGRFSAAWQLYKAQEELIKVAKEYGVKLTMFHGRGGTVGRGGGPTHLAILSQPPDTIHGSLRVTVQGEVIEQSFGEEHLCFRTLQRYTAATLEHGMHPPISPKPEWRALMDEMAVIATEEYRSIVFKEPRFVEYFRLATPELEYGRMNIGSRPAKRKPSGGIETLRAIPWIFAWTQTRFHLPVWLGFGAAFKHVIAKDIRNLNMLQEMYNQWPFFRVTIDLVEMVFAKGDPGIAALYDRLLVSEDLWSFGEQLRTMFEETKQLLLQVAAHKDLLEGDPYLKQRLRLRDSYITTLNVCQAYTLKRIRDPNYNVKLRPHISKEAIDVSKPADELVTLNPTSEYAPGLEDTLILTMKGIAAGMQNTG

SEQ ID NO: 42911 - protein, 512 aa, Schizosaccharomyces pombe
MLNSVIKRSALCRFKFTCLQVSECRPAQIEISKRLYSAKASGNGEYDLCVIGGGPGGYVAAIRGAQLGLKTICVEKRGTLGGTCLNVGCIPSKALLNNSHIYHTVKHDTKRRGIDVSGVSVNLSQMMKAKDDSVKSLTSGIEYLFKKNKVEYAKGTGSFIDPQTLSVKGIDGAADQTIKAKNFIIATGSEVKPFPGVTIDEKKIVSSTGGPYLYQRYPKKMTVLGGGIIGLEMGSVWSRLGAEVTVVEFLPAVGGPMDADISKALSRIISKQGIKFKRSTKLVSAKVNGDSVEVEIENMKNNKRETYQTDVLLVAIGRVPYTEGLGLDKLGISMDKSNRVIMDSEYRTNIPHIRVIGDATLGPMLAHKAEDEGIAAVEYIAKGQGHVNYNCIPAVMYTHPEVAWVGITEQKAKESGIKYRIGTFGFSANSRAKTNMDADGLVKVIVDAETDRLLGVHMIGPMAGELIGEATLALEYGASAEDVARVCHAHPTLSEATKEAMMAAWCGKSIHF

SEQ ID NO: 42912 - protein, 398 aa, Nocardioides sp. JS614
MTQQAAGGNPAHTAGFGPDLAEVFGPAQQDGGPELVQLLTPEGERVEHPDFSFDLGDDTILGFYRDMVLTRRIDTEATALQRHGELGIWAQLLGQEAAQIGAGRALRPQDFVFPTYREHGVAWCRGIDPLDLLGLFRGVDQGSWDPKDKNFGLYTIVIGAQTLHATGYAMGMQRDGVVGTGDPDRDAAVIAHFGDGASSQGDVNESFVFAASYNAPVVFFCQNNQWAISEPFERQSRIPLYQRALGFGFPGVRVDGNDVLATYAVTQAALDRARDGQGPTFVEAYTYRMGAHTTTDDPTRYRLSDDLERWKLKDPIARVEAYLRRNGIADDAFFAGVQEEAADLGVRLREGCRALPDPSPLSIFDHVYTELTEELEQQREAFAAYLASFDGADFEGAH

SEQ ID NO: 42913 - protein, 1733 aa, Mycobacterium bovis AF2122/97
MADVAESQENAPAERAELTVPEMRQWLRNWVGKAVGKAPDSIDESVPMVELGLSSRDAVAMAADIEDLTGVTLSVAVAFAHPTIESLATRIIEGEPETDLAGDDAEDWSRTGPAERVDIAIVGLSTRFPGEMNTPEQTWQALLEGRDGITDLPDGRWSEFLEEPRLAARVAGARTRGGYLKDIKGFDSEFFAVAKTEADNIDPQQRMALELTWEALEHARIPASSLRGQAVGVYIGSSTNDYSFLAVSDPTVAHPYAITGTSSSIIANRVSYFYDFHGPSVTIDTACSSSLVAIHQGVQALRNGEADVVVAGGVNALITPMVTLGFDEIGAVLAPDGRIKSFSADADGYTRSEGGGMLVLKRVDDARRDGDAILAVIAGSAVNHDGRSNGLIAPNQDAQADVLRRAYKDAGIDPRTVDYIEAHGTGTILGDPIEAEALGRVVGRGRPADRPALLGAVKTNVGHLESAAGAASMAKVVLALQHDKLPPSINFAGPSPYIDFDAMRLKMITTPTDWPRYGGYALGGVSSFGFGGANAHVVVREVLPRDVVEKEPEPEPEPKAAAEPAEAPTLAGHALRFDEFGNIITDSAVAEEPEPELPGVTEEALRLKEAALEELAAQEVTAPLVPLAVSAFLTSRKKAAAAELADWMQSPEGQASSLESIGRSLSRRNHGRSRAVVLAHDHDEAIKGLRAVAAGKQAPNVFSVDGPVTTGPVWVLAGFGAQHRKMGKSLYLRNEVFAAWIEKVDALVQDELGYSVLELILDDAQDYGIETTQVTIFAIQIALGELLRHHGAKPAAVIGQSLGEAASAYFAGGLSLRDATRAICSRSHLMGEGEAMLFGEYIRLMALVEYSADEIREVFSDFPDLEVCVYAAPTQTVIGGPPEQVDAILARAEAEGKFARKFATKGASHTSQMDPLLGELTAELQGIKPTSPTCGIFSTVHEGRYIKPGGEPIHDVEYWKKGLRHSVYFTHGIRNAVDSGHTTFLELAPNPVALMQVALTTADAGLHDAQLIPTLARKQDEVSSMVSTMAQLYVYGHDLDIRTLFSRASGPQDYANIPPTRFKRKEHWLPAHFSGDGSTYMPGTHVALPDGRHVWEYAPRDGNVDLAALVRAAAAHVLPDAQLTAAEQRAVPGDGARLVTTMTRHPGGASVQVHARIDESFTLVYDALVSRAGSESVLPTAVGAATAIAVADGAPVAPETPAEDADAETLSDSLTTRYMPSGMTRWSPDSGETIAERLGLIVGSAMGYEPEDLPWEVPLIELGLDSLMAVRIKNRVEYDFDLPPIQLTAVRDANLYNVEKLIEYAVEHRDEVQQLHEHQKTQTAEEIARAQAELLHGKVGKTEPVDSEAGVALPSPQNGEQPNPTGPALNVDVPPRDAAERVTFATWAIVTGKSPGGIFNELPRLDDEAAAKIAQRLSERAEGPITAEDVLTSSNIEALADKVRTYLEAGQIDGFVRTLRARPEAGGKVPVFVFHPAGGSTVVYEPLLGRLPADTPMYGFERVEGSIEERAQQYVPKLIEMQGDGPYVLVGWSLGGVLAYACAIGLRRLGKDVRFVGLIDAVRAGEEIPQTKEEIRKRWDRYAAFAEKTFNVTIPAIPYEQLEELDDEGQVRFVLDAVSQSGVQIPAGIIEHQRTSYLDNRAIDTAQIQPYDGHVTLYMADRYHDDAIMFEPRYAVRQPDGGWGEYVSDLEVVPIGGEHIQAIDEPIIAKVGEHMSRALGQIEADRTSEVGKQ

SEQ ID NO: 42914 - protein, 342 aa, Kineococcus radiotolerans SRS30216
MSTATTGSTGYVNPTGDFRRDQRYIETRITADGRDGYPVEADRYRLIVSRACPWANRAIIVRRLLGLEPVLSMGIAGPTHDERSWTFDLDPDGRDPVLGIERLQEAFFARYPGYDRGITVPAIVDVPTGKVVTNDFPQITVDLSLEWTQFHREGAPQLYPEHLRAEIDAVNRDVFRDVNNGVYRAGFAGTQEAYQRAHDRLFARLDALSERLEHQRYLVGDTITEADVRLFTTLARFDPVYHGHFKCNRQKLSEMPVLSAYFRDLYQTPGFGDTTDVLHIKQHYYGVHRDINPTGVVPAGPDLSGWLEPHGREALGGRPFGDGTPPPPPVEAEVVPAGHRPV

SEQ ID NO: 42915 - protein, 485 aa, Bacteroides thetaiotaomicron VPI-5482
MDKTYKRHSFTKLWIATAMFIFCCFATSAFAQEAVDADTFMTTTETITEVKTTPEIAETATASAETTPDTIGELALGLNTVWMLLAAMLVFFMQPGFALVEAGFTRVKNTANILMKNFVDFMFGSLLYWFIGFGLMFGAGGLIGMPHFFDLSFLDSDLPREGFLVFQTVFCATAATIVSGAMAERTKFSMYLVYTIFISVLIYPISGHWTWGGGWLMNGEEGSFMMNLFGTTFHDFAGSTIVHSVGGWIALVGAAILGPRIGKYGKDGKSRAIPGHNLTVAALGVFILWFGWFGFNPGSQLAASTEADAMAISHVFLTTNLAACAGGFFALAMSWMKYGKPSLSLTLNGVLAGLVGITAGCDAVAPSGAVLIGAICGVVMIFAVDFIDKVLKIDDPVGASSVHGVCGFLGTVLTGLFSTSEGLFYGHGAGFLGAQLFGAVVVGVWAAGMGFIIFKVLDKIHGLRVPARVEEEGLDIYEHGESAYN

SEQ ID NO: 42916 - protein, 442 aa, Rhodobacter sphaeroides 2.4.1
MPGHIFGRSTRGSLPVAAEGEGCYILDTEGRRYLDGSGGAAVSCLGHSNAAVRAALHDQLDRLAFAHTGFFTSEPAERLADRLAAAAPEGIERVYLVSGGSEAVEAALKLARQYFMEVGQPGRHRVIARRQSYHGNTLGALAAGGNEWRRAQFAPLLVETSHVSPCYEYRGRAEDESLEAYGLRVADELEAEIQRLGPETVMAFVAEPVVGATAGAVPAVPGYLKRVREICDRHGVLLILDEVMCGMGRTGHLFACAEDGVAPDMITIAKGLGAGYQPIGALLVQGRIYDAIAAGSGFFQHGHTYMGHAMAAAAANAVLDEIEGRDLLQAVRRQGARLEALLQERLGQHPHVGDIRGRGLFRGIELVADRETKEPFDPARKLHARIKAEAFAGGLICYPMGGTLDGVRGDHILLAPPFIISDAELDELVDKLSGALDRALAA

SEQ ID NO: 42917 - protein, 345 aa, Zea mays
MGRAPCCEKVGLKKGRWTKEEDEVLARYIKEHGEGSWRSLPKNAGLLRCGKSCRLRWINYLRAGLKRGNISEEEEDMIIKLHATLGNRWSLIAGHLPGRTDNEIKNYWNSHLSRRAADFRDGVVVDIDLSKLPGGGKRRGGRASRGAVVAAAKEKKAKEKDDRGNSKVAEAEQQLRDTEDDDGGSVSTPRPQSDDCGTAQSEEEQAQASASGLTSDGHGPEEEEEEDPLALSEEMVSALLAPESPKLEVGPDGSCMDSYSGPPSGESGCGSSGPSGDVAQDLDLDDDKAIMDWDLMGLDISTAGDMWDQLVWDYDETLVTEPEGGEEGHQQQDDVMSDLFFLDNL

SEQ ID NO: 42918 - protein, 422 aa, Oryza sativa
MGLGNEASSSSSRLLDPAPLLPHHGGDGAGKLSSQPKTFANVFIAVVGAGVLGLPYTFSRTGWAAGSILLLSVAALTFYCMMLLVACRRRLADEHPKIASFGDLGDAVFRGPGRLAVDTMLVLSQASFCVGYLIFISNTMAHLYPVFAPSSNALLSPKALFIWAMLPFQLGLNSIKTLTLLAPLSIFADVVDLGAMGVVLGEDVSVWLAKPPPVFAFGGLSAILYGIGVSVYAFEGIGMVLPLEAEAANKKKFGTTLGLSMGFIAVMYGLFGAMGYIAFGDATRDIITTNLGTGWLSAAVQLGLCINLFFTMPVMMHPVYEVAERLLHGKRYCWWLRWLLVLAVGLSAMYVPNFTDFLALVGSSVCVLLGFVLPASFHLKVFGAEMSWSGVLSDVLLVLLGLSLAVFGTYTSLLQIFHSSSA

SEQ ID NO: 42919 - protein, 401 aa, Cryptococcus neoformans var. neoformans JEC21
MEDEQVPQLLVSTPEAGTSSLPPARFERPQVPITLLTGYLGAGKSTLLQYILTANHGYRIAVCMNDFGDTTDIESKSLTMSDPDSSTTTSEFLSLPNGCLCCSVKDMGIAAIEDMVMKAPGGVDWVVVELTGLADPTPIVKSFWSNEEMGDLFLDGVVCVVDSRNVLKMDTRIMTKSRNAKSVLPLASACVAHEIFFLIRQVASADVILLNKIDLVSEEHLSKVERAVRELNATLRIHYTRNSQAPISELFHIRAFTNSVTPAIKEAPAALDDGHQHSSDCGHPHENGELLPHRNSRINTTLIPIPPLNLLQYNRINTFLESVLWSATFPASSKVAPEILRTKGYITLQDDRAFVLQGVADLFELKEVDRALDPEMKGKIVFIGKGVGEDLKRELQVWVGL

SEQ ID NO: 42920 - protein, 307 aa, Antirrhinum majus
MEILAPSSYFSSSSWFLEESRSTTRWTAAENKAFENALAVFDENTPNRWERVAERVPGKTVGDVMRQYKELEDDVSSIEAGFVPVPGYSTSSPFTLEWGSGHGFDGFKQSYGTGGRKSSSGRPSEQERKKGVPWTEEEHKLFLMGLKKYGKGDWRNISRNFVITRTPTQVASHAQKYFIRQLSGGKDKRRASIHDITTVNLSDNQTPSPDNKKPPSSPDHSMAQQQTSSTSIHKLPFQWDQTSNETIMGFASSGHHGNMFQSNPFGMNSYGFKMQGQQMQRGGFCDTYLGSQNMAFQMQSGLHFPNA

SEQ ID NO: 42921 - protein, 151 aa, Oryza sativa (japonica cultivar-group)
MTSGFGFTPWAADTCPTLEQLMASSASPSPSSSLDDNAAAAEEENGEVEEEEERRRQRRKVSNRLSARRSRARKQQRLEELRGESARLRAENRELAARLHAVARHGLAARCQNARLRAEAAALARRLLALQRLARGRHMMITASPPQFSRR

SEQ ID NO: 42922 - protein, 200 aa, Shigella flexneri
ELKARHLTMIAIGGSIGTGLFVASGATISQAGPGGALLSYMLIGLMVYFLMTSLGELAAYMPVSGSFATYGQNYVEEGFGFALGWNYWYNWAVTIAVDLVAAQLVMSWWFPDTPGWIWSALFLGVIFLLNYISVRGFGEAEYWFSLIKVTTVIVFIIVGVLMIIGIFKGAQPAGWSNWTIGEAPFAGGFAAMIGVAMIVG

SEQ ID NO: 42923 - protein, 291 aa, Antirrhinum majus
MEILTPSSYFSNSNLFVEESWSPKWTAADNKAFENALAVFDEYTPHRWERVAEIVPGKTVWDVIRHYKELEDDVTSIEAGLVPVPGYNTSLPFTLEWGSGHGFDGFMQSYVVGGRKSSCSRPSDQERKKGVPWTEEEHKLFLMGLKKYGKGDWRNISRNFVITRTPTQVASHAQKYFIRQLSGGKDKRRASIHDITTVNLNDGQTFPRENKIKQSSPLAHQSNSAAATSKLHIQWNQTRNETITGFGSGNMFVSDPYNYMNSNEVGLQGRSPFGSRNMVFRMHPCFSYPSA

SEQ ID NO: 42924 - protein, 138 aa, Symbiodinium microadriaticum
EFKEAFSLFDKDGDGTITTKELGTVMRSLGQNPTEAELQDMINEVDADGNGTIDFPEFLSLMARKMKDTDTEEELIEAFKVFDRDGNGFISAAELRHVMTNLGEKLTDEEVDEMIREADVDGDGQINYEEFVKMMMAK

SEQ ID NO: 42925 - protein, 148 aa, Oryza sativa
GELELHRGGGRSRTSGSPGLQEFGTREGIKKFETLSYLPPLTVEDLLKQIEYLLRSKWVPCLEFSKVGFVYRENHRSPGYYDGRYWTMWKLPMFGCTDATQVLKELEEAKKAYPDAFVRIIGFDNVRQVQLISFIAYKPPGCEESGGN

SEQ ID NO: 42926 - protein, 316 aa, Synechococcus elongatus PCC 6301
MLSGVRMASASAHAVATAQRRTRDNVSWYLSSIGRIPLLTADQEIELGQKVQVMMNLLEETSSDRTFTEAETAAIQLGQRAKERMIKANLRLVVSVAKKYQGKGLEFLDLIQEGALGLERAVEKFDPSKGYKFSTYAFWWIRQSMTRAIACQSRTIRLPVHLTERLSQIRKVTRELAHELGRLPSRQEIAEAVQLPLNDLETILRQSRQCTSLDAPVSGEDGKSFLGELIADPNGNEPMDIMENAMQREQLDAWLEHLTPQERQVLYLRFGLGDGERHTLAEIGRMMEVSRERVRQVEVKALRKLRNLTKRSRIAV

SEQ ID NO: 42927 - protein, 549 aa, Sinorhizobium meliloti
MTMNETTSSLLEADRDWWRRPVIYQIYPRSFQDTNGDGIGDLQGITARLPHIAGLGADAIWISPFFTSPMRDFGYDVSNYVDVDPIFGTLEDFDALIAEAHRLGLRVMIDLVLSHTSDRHPWFVESRSSRSNAKADWYVWADSKPDGTPPNNWLSIFGGSAWQWDPTRLQYYLHNFLTSQPDLNLHNPQVQEALLAVERFWLERGVDGFRLDTINFYFHDRELRDNPALVPERRNASTAPAVNPYNYQEHIYDKNRPENLEFLKRFRAVMDEFPAIAAVGEVGDSQRGLEIAGEYTSGGDKVHMCYAFEFLAPDRLTPQRVAEVLRDFHRAAPEGWACWAFSNHDVVRHVSRWADGVTDHDAHAKLLASLLMSLRGTVCIYQGEELALAEAELDYEDLQDPMASSSGPTSSAGRCRTPMVWESLPDGGFSSATPWLPISQSHIRGRCRAGGRPGLGAAHYRRFLAFRKANPALAKGEIEFVETRGSLLGFLRSHGNEKVFCLFNMSDEAATKELPMKRLEPLEGHGFVSEILDHEVKLPAWGAFFARLA

SEQ ID NO: 42928 - protein, 130 aa, Glycine max
  misc_feature (51)..(51): Xaa can be any naturally occurring amino acid
  misc_feature (120)..(120): Xaa can be any naturally occurring amino acid
  unsure (1)..(130): unsure at all Xaa locations
MGIFLAQNKKRHSGPVLTGTVPHPDEKDQSLNSTFASRYVREPLSHFIMPXNSIPTDSSFHIINDDLMLDGAPKLNSASIVTTWIDPAYHKLIMSSLNKNYGNIDKYPVTTVLQNLYLNXLSNLFHAPIS

SEQ ID NO: 42929 - protein, 105 aa, Quercus suber
SLDIWDPFEGFSAVASVPPSARETTAFATARIDWKETPEAHIFKADLPGLKKEEVKVEVEDGNVLQISGERSKEHEEKNDKWHRVERSCGKFMRRFRLPENAKVD

SEQ ID NO: 42930 - protein, 205 aa, Shigella flexneri
RRELKARHLTMIAIGGSIGTGLFVASGATISQAGPGGALLSYMLIGLMVYFLMTSLGELAAYMPVSGSFATYGQNYVEEGFGFALGWNYWYNWAVTIAVDLVAAQLVMSWWFPDTPGWIWSALFLGVIFLLNYISVRGFGEAEYWFSLIKVTTVIVFIIVGVLMIIGIFKGAQPAGWSNWTIGEAPFAGGFAAMIGVAMIVGFSF

SEQ ID NO: 42931 - protein, 244 aa, Crocus sativus
MGRGRVELKRIENTINRQVTFSKRRGGLLKKANEISVLCDADVAIIIFSTKGKLSEYSTDARMESILERYDRYSCAERDIVAPDPDSQESWRDEYGRLKAKLEALQTSQRHLMGAQLDMLSAKELQQLEQQLENALKNIRSRKNQLLFDSISELLKKEKTLTTQNKDMEMKLIEKKKVKSMARQGQQYTESSSPPSLLIQDPFPSLTIGINPASGSSEEDNEARLLPPVNRNRLPPWMVRSANE

SEQ ID NO: 42932 - protein, 110 aa, Quercus suber
SLDIWDPFEGFSAVASVPPSARETTAFATARIDWKETPEAHIFKADLPGLKKEEVKVEVEDGNVSQISGERSKEHEEKNDKWHRVERSCGKFMRRFRLPENAKVDQVKAN

SEQ ID NO: 42933 - protein, 197 aa, Shigella flexneri
ELKARHLTMIAIGGSIGTGLFVASGATISQAGPGGALLSYMLIGLMVYFLMTSLGELAAYMPVSGSFATYGQNYVEEGFGFALGWNYWYNWAVTIAVDLVAAQLVMSWWFPDTPGWIWSALFLGVIFLLNYISVRGFGEAEYWFSLIKVTTVIVFIIVGVLMIIGIFKGAQPAGWSNWTIGEAPFAGGFAAMIGVAM

SEQ ID NO: 42934 - protein, 88 aa, Quercus suber
SLDIWDPFEGFSAVASVPPSARETTAFATARIDWKETPEAHIFKADLPGLKKEEVKVEVEDGNVLQISGERSKEHEEKNDKWHRVERS

SEQ ID NO: 42935 - protein, 297 aa, Brassica napus
MGVMVNHHLLAIIFGILGNAISFLVFLAPVPTFYRIYKNKSTESFQSLPYQVSLFSCMLWLYYALTKQDAFLLITINSFGCVVETIYIAMFFTYATKEKKMAAIKLFLTMNVAFFSLIIMVTHFAVKRPSLQVSVIGWICVAISVSVFAAPLMIVARVIKTKSVEFMPFTLSFFLTISAVMWFAYGAFLHDICIAIPNVVGFILGLVQMVLYGVYRNSGEKLDIGKRNNSSSEQLKTIVVMSPLGLSEMHPVDVTVTEPVIPLSYTVHHEDPSKITKEEEPSTEAGQSHVETAPSRI

SEQ ID NO: 42936 - protein, 1034 aa, Synechocystis sp. PCC 6803
MNLAVPAFGLSTNWSGNGNGSNSEEESVLYQRLKMVEELWERVLQSECGQELVDLLTELRLQGTHEAITSEISEEVIMGITQRIEHLELNDAIRAARAFALYFQLINIVEQHYEQNEQQRNRWEASQETNFYEQAGNEEEMVPPSRLGASTEPLPVGIDQNELQASVGTFHWLMRELKRLNVPPQHIQNLLDHLDIRLVITAHPTEIVRHTIRRKQRRVDRILRKLDQLQGSVTGRDWLNTWDAKTAIAQLTEEIRFWWRTDELHQFKPTVLDEVDYSLHYFDEVLFDAVPELSKRLGQAIKETFPHLRAPRANFCYFGSWVGGDRDGNPSVTPEVTWQTACYQRGLVLGKYLFSLGELVAILSPSLHWCKVSQELLDSLERDRIQLPEIYEELSLRYRQEPYRMKLAYVTKRLENTLRRNNRLANPEERQTMITMPAENHYRTGEELLEELRLIQRNLTETGLTCLELENLITQLEVYGFNLAQLDFRQESSRHAEAIAEIAEYMGVLTTPYEEMAEEDKLAWLGVELQTRRPLIPQEMPFSERTRETIETLRTLRHLQMEFGVDICQTYIISMTNDASDVLEVLLLAKEAGLYDPATASNSLRIVPLFETVEDLKNAPGIMDSLFSLPFYRATLAGSYHSLKELQNQPPDYYQIPTTTALLNPGNLQEIMVGYSDSNKDSGFLSSNWEIHKAQKSLQAVAQSHRVILRLFHGRGGSVGRGGGPAYKAILAQPAGTVDGRIKITEQGEVLASKYSLPELALYNLETLTTAVIQASLLKSSFDFIEPWNRIMEELACTARRAYRSLIYEEPDFLDFFLTVTPIPEISELQISSRPARRKGGKADLSSLRAIPWVFSWTQTRFLLPAWYGVGTALKSFVDQDPVKNMKLLRYFYFKWPFFNMVISKVEMTLSKVDLTIASHYVQELSKPEDRERFDRLFQQIKQEYQLTRDFAMEITAHPHLLDGDRSLQRSVLLRNRTIVPLGLLQISLLKRLRQVTQEAETSGVRYRRYSKEELLRGALLTINGIAAGMRNTG

SEQ ID NO: 42937 - protein, 110 aa, Quercus suber
SLDIWDPFEGFSAVASVPPSARETTAFATARIDWKETPEAHIFKADLPGLKKEEVKVEVEDGNVLQISGERSKEHEEKNDKWHRVERSCGKFMRRFRLPESAKVDQVKAN

SEQ ID NO: 42938 - protein, 461 aa, Hordeum vulgare subsp. vulgare
MVHQSNGHGEAAAAAANGKSNGHAAAANGKSNGHAAAAAVEWNFARGKDGILATTGAKNSIRAIRYKISASVEESGPRPVLPLAHGDPSVFPAFRTAVEAEDAVAAALRTGQFNCYAAGVGLPAARSAVAEHLSQGVPYKLSADDVFLTAGGTQAIEVIIPVLAQTAGANILLPRPGYPNYEARAAFNKLEVRHFDLIPDKGWEIDIDSLESIADKNTTAMVIINPNNPCGSVYSYDHLAKVAEVARKLGILVIADEVYGKLVLGSAPFIPMGVFGHIAPVLSIGSLSKSWIVPGWRLGWVAVYDPTKILEKTKISTSITNYLNVSTDPATFVQEALPKILENTKADFFKRIIGLLKESSEICYREIKENKYITCPHKPEGSMFVMVKLNLHLLEEIHDDINFCCKLAKEESVILCPGSVLGMENWVRITFACVPSSLQDGLERVKSFCQRNKKKNSINGC

SEQ ID NO: 42939 - protein, 508 aa, Oryza sativa
MCTADGSVTLLAKRKGSPCQQEEDDNQDAKRMRNPRVSLPEDIWYHIHSLLPLRDAARAACVSSTFLYSWRCRPNLIFSKKTLGLNGNWRENVRELVNKVDHIMKNHSGIGLRTFGLQSYNLINTYYLDRWLNIAITPAIEELSLTQFPENNTKYYNFPCSILFNRGGNSIKHICLSHCAFRPTGGLNFLRRLHLGEVHITGDELECLLSNSFALEQLTLKYCKELNYLRIPCQLQQLKDLEVYERKALQMMEVKAPNLSTFHYDGNLARLSDGGLLAVKKLRISSFYQYNNVHYASANLSSIVPTIETLIISSFGEKFNTVVAPFKFLHLKSLKISLIGFNGAFSPAYDYLSLAYFIGASPVLETFTLIVSQIRMEHDVISENSSHLRQMPRSSHGNIKNVNIIGFCSAKSMIELTCHILENATSLECLTLDTIHDDYVHPDRLSVHEVGFCGRIGSPMIMEAENALLAIKRYIVGKVPSTVKLVVLKPCGWCHATEGLGVKDHRVA

SEQ ID NO: 42940 - protein, 338 aa, Arabidopsis thaliana
MQNRSISQVATMATSSSTEKLPRVLIVKRPDAMAVLGDGFVASTKFEILKAFESPLPLPEFLAYHSDSISAIIAPVAAPVTADLIRILPNLRLVVTTSAGVDHVDLVECRRRGISVANAGSSFSEDVADTAVGLLIDVFRRISAANRFVKQRFWPLKGDYPLGSKLGRKRIGIVGLGSIGSKVATRLDAFGCQISYSSRNRKPYDVPYHYYMDIEEMAANSDALIICCELNEKTLRLINKDVLSALGKRGVIVNVARGAIIDEEEMVRCLREGEIGGAGLDVFEDEPNVPKELFELDNVVFSPHSAFMTLEGLEELGKVVVGNIEAFFSNKPLLTPVL

SEQ ID NO: 42941 - protein, 568 aa, Propionibacterium acnes KPA171202
MSVPFQYAHDDDGGLLRIAARGQEVLTNPLANRGTAFTIEQRKALGLTGLLPSGVMTITDQLKRVYAQYSAQPDDLAKYLYLNHMHDRNEVLYFRLLAEHIEEMLPIVYTPTIGKAIEEYSHWYDRPRGIYLSIDDPEDMEQALAQLGHGPDDVDLIVATDAEGILGIGDQGVGGVAITVGKLAVYTAAAGIHPHRVLPVILDVGTDNMERLNDDGYLGVRHPRVRGERYDEFVQQYVETAHRMFPHALLHWEDFAAGNATRILNKYRDDYCTFNDDIQGTAAVVVAAVLSAVKSSGIPLNDHRIVIHGAGSAGTGIANLLVQLMVSQGADEKTARSHFWGLGSHGLLREGLRLRDFQQPFARNKEELEGWTLDSPDQYTLGDVVRNVHPTILIGCSAQPGAFTEDIVKTMAAQCERPVIMPLSNPTRKAEALPSDVLTWTDGRALVATGSPFKPVMINGVTYQIAQANNALVFPGIGLGTIAVRASRVTSGMIAAAAEAVAMHIDNRVVGASLLPSIKSLRPLSASVAIAVAQQAMEEGVATEVTDNPVEKVFSAMWQPRYPRIAVV

SEQ ID NO: 42942 - protein, 156 aa, Sisymbrium irio
MNILNRFGLGSGGQTTSMGPSPIAQGNDDDAPSPGNQFAQFGAGCFWGVELAFQRVPGVTQTEVGYTQGIIHNPSYEDICSGTTRHAEVVRVQYDPKDCTYQTLLDLFWSRHDPTTLNRQGNDVGTQYRSGIYFYTPEQEKLAQESLERHQQQMER

SEQ ID NO: 42943 - protein, 297 aa, Rhodobacter sphaeroides 2.4.1
MAEARRDGRLPLTLVGGFLGAGKSTWLRHQLHAGRFARHHLLVNEAAETPVDNLLLGGAARLTLLAGGCACCEGQAQLRAALRAICETESGPEAGGIEGILLETSGLADPGAIAAMVAADPVLVRRLALAETLVLVDAAHGTAQLAAEPLARAQIEAAGRLVLTKPAAAPDLARLAATLRALAPEAELSAAERGVPVPLPAGAAEPYPLPPLAAAAPIRPHRLRIGAEGGWVALSTWLSALLQARGEDVVRVKGVVRTPAGRLLLQSVRRMVQPPETLPEGADLPGPAPPPRRERSC

SEQ ID NO: 42944 - protein, 352 aa, Propionibacterium acnes KPA171202
MLLPILGPLLLGCDCVVARCLAHLVAHVTPLGSTTGLTRPATHMGLSLAKPPHTRRQGSLSFLVGSLGQGHSNGVSITAHGVNTPKEETEMSSIPNTSALALAHDASSTESTRFSTSSRQPHEPDKGTGSLNSKLNWLRAAVLGANDGIISTAGIVMGVAGATVDRSSLFIAGLAGLAAGALSMAGGEYVSVSSQRDIEKTVMAKEAAELRDFPDEELEELTEIYTEKGLSRGTARQVALELTAHDPLRAHAEAELGLDPDEYTNPWYAAFASMAAFTVGALVPLLVMVCSPTATRVYITIAATIVGLFLTGLGSALASGSGKTRPVARNIIVGICSMAITYLIGHLVGTRV

SEQ ID NO: 42945 - protein, 559 aa, Bacteroides thetaiotaomicron VPI-5482
MCGIAGILNIKTQTKELRDKALKMAQKIRHRGPDWSGIYVGGSAILAHERLSIVDPQSGGQPLYSPDRKQALAVNGEIYNHRDIRARYAGQYDFQTGSDCEVILALYKDKGIHFLEEISGIFAFVLYDEEKDEFLIARDPIGVIPLYIGKDKDGKIYFGSELKALEGFCNEYEPFLPGHYFYSKEGKMKRWYTREWTDYESVKDNDAKVSDVKEALEDAVHRQLMSDVPYGVLLSGGLDSSVISAIAKKYAAKRIETDGASDAWWPQLHSFAIGLKGAPDLIKAREVAEYIGTVHHEINYTVQEGLDAIRDVIYFIETYDVTTVRASTPMYLLARVIKSMGIKMVLSGEGADEVFGGYLYFHKAPTPKDFHEETVRKLSKLHMYDCLRANKSLSAWGVEGRVPFLDKEFLDVAMALNPKAKMCPGKEIEKRIVREAFADMLPESVAWRQKEQFSDGVGYSWIDTLREITAAAVSDEQMEHAAERFPINTPLNKEEYYYRSIFEEHFPSESAARSVPSVPSVACSTAEALAWDVAFRNLNEPSGRAVRGVHEEAYAEEVK

SEQ ID NO: 42946 - protein, 282 aa, Brassica napus
MGSLRGNVEEPISQSLPRQNSLYSLKLHEVQNHLGSSAKPLGSMNFDELLKNVWSAEATNQPREATEAGLSRQGSLALPRGLSKKTVEEVWREIQHDKNGSSGNPHGERIDNNNNNKQPTLGEITLEDLLLKAGVVTETVLPQTVVNVASNEPWVQYHHPQHQQQGFMPYPVCEMQEMVSPMNMMMGDAPQAHGRKRVAPSGGDIVERVVERRQKRMIKNRESAARSRARKQAYTHELEIKVSSLEEENEKLRRLKKVEKILPSEPPPDPKWKLRRTSSASF

SEQ ID NO: 42947 - protein, 165 aa, Oryza sativa
  misc_feature (17)..(17): Xaa can be any naturally occurring amino acid
  misc_feature (121)..(121): Xaa can be any naturally occurring amino acid
  unsure (1)..(165): unsure at all Xaa locations
MDSYKHRPSRSFNGPLXSTNSGAPVLNNNNSLTVGSRGPILLEDYHLVEKLANFDRERIAERVVHARGASAKGFFEVTHDITHLTCADFLRAPGVQTPVIVRFSTVIHERGSPETLRDPRXGFAIKFYTREGNWDLVGNNFPVFFIRDGMKFPDMVHSLKPNPKS

SEQ ID NO: 42948 - protein, 268 aa, Xylella fastidiosa 9a5c
MHRIDETFRRLRAQSRKALIPFITAGDPSLEAAVPVMHALVRAGADVIELGVPFSDPMADGPVIQHSSERALQRGVGLAYVLQTVDVFRQSDAVTPVVLMGYLNPLEIYGIARFTQHAVACGVDGVLLVDLPPEEADEIRPIFSAAGLALIVLASPTTSASRLARLSGVAQGYLYYVSFSGVTGADRLDAQSAGDRLRGLRAQTQVPVVVGFGIRDAASAAVMAVDADGVVVGSALVTALSDAPDVDTACRRADAFLAPLRQALDAVK

SEQ ID NO: 42949 - protein, 344 aa, Haloarcula marismortui ATCC 43049
MRASTLTDVGEITVEDRDRPDPADDEVLVQVGACSVCMTDYHMYHGTFAAETPLVLGHEGAGTVAEVGADVDRFAVGDRVAINPTVPCNACSYCKKGETHLCENNTSIGGAGDTILDGAFAEYVRVPAINVEDIGEMSFERAALAEPLACCVHGVEQADIKPGDSVGIIGAGPIGLLLLQAFRNAGAAPIVVSELDDERRELAADLGADAVIDPNEEDPEEAIPAAAGGPVNVGAEAIGLVPTIKQANAVTAPGGSTLIFGVPDQEATMEVSPFDVFFDEVDYRGSFSLTTEDFERAITLLRHERIDAETLITERIGLDDLPAAFERMGNAEGLKKVVVPGDSE

SEQ ID NO: 42950 - protein, 471 aa, Legionella pneumophila subsp. pneumophila str. Philadelphia 1
MTIALVWFRQDLRLTDNPAFIEACSHHEIVIPLYIYDDKCSVLGQAQAWWLHYSLIALGKSLNQQGLSLVLRKGSPQEIILELVAQYGVESVYWNRCYEPQVIARDKKIKLALVEREIKVQSFNGNLLHEPWTIKNKNGDFFKVFTPYWKQCRQILNIPSPFILTKRPRGIEIASDDIGKWKLLPAINWAARFSEYWIPGEEGAQKKLDEFIVHHLSGYKRDRDFPAKNATSRLSPHLHFGEISPWVILRALELAKLEHTCDLASVEHFLSELGWREFSVYLLYHFPKLDCENFRKEFDAFPWQNDEQLLTCWQKGMTGYPIIDAGMRELWATGYMHNRVRMIVASFLTKDLLIDWRSGAQWFLDTLVDADLANNSASWQWVAGCGADAAPYFRIFNPILQSQKFDPDGVYIRQWIPELAQLNSQSIHQPWTDADASSIFLGKKYPKPIIDHQEARTKALSYYQQIKKGMD

SEQ ID NO: 42951 - protein, 356 aa, Avicennia marina
MSLLSDLLNLDLSETTEKIIAEYVWVGGSGMDLRSKARTISGPVSDPSKLPKWNYDGSSTGQAPGEDSEVILYPQAIFRDPFRRGKNILVMCDTYTPAGEPIPTNKRHAAAKIFSHPDVAAEEPWYGIEQEYTLLQKNVKWPMGWPTGGYPGPQGPYYCGVGADKAFGRDIVDAHYKSCLYAGINISGINGEVMPGQWEFQVGPAVGISAGDELWMARYILERITEIAGVVLSFDPKPIQGDWNGAGAHTNYSTKSMRKEGGFEVIKKAIEKLGHRHKEHIAAYGEGNERRLTGRHETADINSFKWGVANRGASVRVGRDTEREGKGYFEDRRPASNMDPYIVTSMIAETTILGKH

SEQ ID NO: 42952 - protein, 200 aa, Shigella flexneri
LKARHLTMIAIGGSIGTGLFVASGATISQAGPGGALLSYMLIGLMVYFLMTSLGELAAYMPVSGSFATYGQNYVEEGFGFALGWNYWYNWAVTIAVDLVAAQLVMSWWFPDTPGWIWSALFLGVIFLLNYISVRGFGEAEYWFSLIKVTTVIVFIIVGVLMIIGIFKGAQPAGWSNWTIGEAPFAGGFAAMIGVAMIVGF

SEQ ID NO: 42953 - protein, 603 aa, Cryptococcus neoformans var. neoformans JEC21
MSAIRPIMRPFRMTTPFRQSSSFRQLRITWAPSFGAGSSRCLTIGLSPSSGSGSSFRRRLLYPLAILPVGLLLLPVLSADSEPDAIPVPTSLSTSTTSELLRTWFIYAIISMPGVVDYSPAVLNFFINSSLRGPTEWFVRHTFFGQFVAGETVEGCMPTLKAFRERNVGAMLNYSAEVDESQLTETAPSKEERNRKEREKKFETIITALEAAGEYERSLPVDQRGVTGFALKITGLIDPNILERASYTLLRLRPLAKSNSPTAPNTHLFVPYPGTPETLDRQVVARTPELKLGDGKELLALKGKWDDMGVLEKDPGLQEGDLEELRQLWYKLQKIGHKAKENDIILYVDAEYTWYQPALDAYTLLLSQEFNRPPTSKEEIWTGPLIYGTYQTYLCRQPTHLIHAIQHAEVNGYALGVKLVRGAYFEQERKKWSDEGRVGAAPIWPNKSATDVAYNGSISTIMTTLASQLKSPHPELALSVAFGTHNPESCDLVCENLLRNGLAKEVGEAKMLRLREDVRGKVRIAQLLGMKDDLTDRMARKFVNDGKPVALKYMAYGKLSEVMPYLGRRAIENKSLMSGDHGAAAEMRRVAAELKRRFFGGSV

SEQ ID NO: 42954 - protein, 458 aa, Bacillus subtilis subsp. subtilis str. 168
MDYRRDGQNDQHQTEPSHTEQQNTENQKLIGHSEQELLDAPVSYEAGRQETASALEMEKQETAVKKEKKRRAAWLSPILGGIIGGGLMLGIAPYLPSDQNQATETASANKQVQSDNFTTAPITNASNIADMVEDLEPTIVGISNIQTSQNNTFGTGGGSSSESESGTGSGVIFKKDSDKAYIITNNHVVEGANKLTVTLYNGETETAKLVGSDTITDLAVLEISGKNVKKVASFGDSSQLRTGEKVIAIGNPLGQQFSGTVTQGIISGLNRTIDVDTTQGTVEMNVLQTDAAINPGNSGGPLINASGQVIGINSLKVSESGVESLGFAIPSNDVEPIVDQLLQNGKVDRPFLGVQMIDMSQVPETYQENTLGLFGDQLGKGVYVKEVQANSPAEKAGIKSEDVIVKLNGKDVESSADIRQILYKDLKVGDKTTIQVLRKGKTKTLNATLTKQTESSSS

SEQ ID NO: 42955 - protein, 203 aa, Shigella flexneri
ELKARHLTMIAIGGSIGTGLFVASGATISQAGPGGALLSYMLIGLMVYFLMTSLGELAAYMPVSGSFATYGQNYVEEGFGFALGWNYWYNWAVTIAVDLVAAQLVMSWWFPDTPGWIWSALFLGVIFLLNYISVRGFGEAEYWFSLIKVTTVIVFIIVGVLMIIGIFKGAQPAGWSNWTIGEAPFAGGFAAMIGVAMIVGFSF

SEQ ID NO: 42956 - protein, 592 aa, Arabidopsis thaliana
MDVRSLPSNGVATIQDSAPTAATILGSSAATLGRHLSRRLVQAGVTDIFTVPGDFNLSLLDQLIANPELNNIGCCNELNAGYAADGYARSRGVGACVVTFTVGGLSVLNAIAGAYSENLPVICIVGGPNSNDFGTNRILHHTIGLPDFSQELRCFQTVTCYQAVVNHLEDAHEQIDKAIATALRESKPVYISISCNLAAIPHPTFASYPVPFDLTPRLSNKDCLEAAVEATLEFLNKAVKPVMVGGPKLRVAKARDAFVELADASGYPVAVMPSAKGFVPENHPHFIGTYWGAVSTLFCSEIVESADAYIFAGPIFNDYSSVGYSLLLKKEKAIIVHPDSVVVANGPTFGCVRMSEFFRELAKRVKPNKTAYENYHRIFVPEGKPLKCKPREPLRINAMFQHIQKMLSNETAVIAETGDSWFNCQKLKLPKGCGYEFQMQYGSIGWSVGATLGYAQATPEKRVLSFIGDGSFQVTAQDVSTMIRNGQKTIIFLINNGGYTIEVEIHDGPYNVIKNWNYTGLVDAIHNGEGKCWTTKVRYEEELVEAINTATLEKKDSLCFIEVIVHKDDTSKELLEWGSRVSAANGRPPNPQ

SEQ ID NO: 42957 - protein, 2900 aa, GIBBERELLA ZEAE PH-1
MASAEASADDHQRAVLERQLHGLPNDAEQPNSKPNIIIYATRLDKVILSLSSICAIIAGALNPLVPVIYGLLVSVFNGFSNGSVEASELRSEISTFSLYYVYLSIALFVFTYLGTLGFYFSGDRIARALRIAYLEAVIRQNMAFFDVLRPGEISTRIMSDMGILQEAITSKTSIMLSAVATFCAAFIISFIMYWKTALILSPFFVTMLLMFSVGGSYSVKHQKVSRQKYGHAAGIPEEAFGAIRQVAAFGMQTFVKEKYSQGLKEAAVAERKAQIIVACLIASMCAMPCLIYSLSFWTGSIFLVRGETSVSAITSTTLAVTIGMFAIIRIAPSMQALVSGIAISGSLFETISRRSPQDPLGDKGELPGSLSGNIQLNNVDLVYPSRDQAKVLDNITLQFSANKTTAIVGPSGGGKSSILGLVERFYEPTSGSVSVDGNDIQSLNLRWLRQQIGLVDQDPILLDTSISENIWYGCADANDTTPESKRLDLVIDAAKKAYAHDFIMASPNGYQTRVGEKGMQLSGGQRQRIAIARALIRDPKILLLDEATSALDSASEKAIQAAIDIASKHRTTIIIAHRLSTIRNADLIVVLSRGQVADQGTHDELMARNGLYADLIEKQQIKEESQKQAGASIGQDDEVDVMLPGTQGAPQESENEKAGTTEATILEDTTNGNTDLSVPNRKRAFSFLLAMSKPNWKVLTIGLICSLLAGLEIPAESIFFAKLLTIIGLPENKYSQLRRDVNLWSGLYVALAAAGFVFWLGVGTTLAYATQKLSKRVRETCCDKITVQSMEFFDEANNSPSALSNALSKGTDDLAGMGGSVMGGILTFTATIIGGIAVSLAVGWKLALVCTATIPVVVACGWLRLQVLAAFDARIRQSGVDSAAYAGQIVRSMRTVASLGLEKRVLGMYGGFLSNHAAKSLRSILVTSALYAASQSVVYLCAALGFWYGGTLIANGEYSAFQVYVCFVCLISGSQIAGSIFTFAPDAGKAMHAAQELQKIAELPDGEKEIQSFHATEHTHEKKAVPSHLLDGPDPWQVKFQDVSFAYPSRPHKPALNHFTVSVEPGKTLALVGQSGSGKSTCLALLERFYALQHGQILVDGQDIRSLDLNSYRLAISLISQEAVIFSSSMRENIAVGVVGHDVSDDEILAACRQANILDFVNSLPDGLASPVGTGGSMLSGGQKQRIAIARAFLRKSKLLLLDEATSALDSESEAVVQTAIEAVKKNRTTIMVAHRLSTVMNADVICVMREGSVAEIELSCNEEHLDPRISSCDVILSRHACIQPLRLVRIMHKQKYTKGSKGPYRRLNLKPPVNGNDASHEKQMEYWTRQLERSKPAEFLFDKPRPGVLSTSNISRQELKITGSLYGHLQRFCKNHQVPLLSILLAAFRVTHYRLSGTEDATIGTNKSGASPSPGDVDTEQSSNTQLSSRDLQCIRIKVQDELTFEQVVRLVDETLKNAHLNQQISFEDLVSQIFPQGPANGDTAEKRSSSLPVLDLEFRISKASGGLYGHAFFCQDLFHEETIRAIIEVFYEVLTRGMKEPQTPIASLRINGNNTPEITAISSDSQYSRDSSIIEVFQRQVTATPVAIAVKDSLQQMTYDELEKASGIIEVWLRNKGLAPETLVSVLAPRSCQAVAAILGILKANLAYMPLDVKAPASRIGAILSAAPGHRLILVGPDVVFPVLSQADVTLVSIPEIFKARQSETITDATKPSATSLAYVMFTSGSTGQPKGVMIEHRGVVRAAAVLSPIWGTCPVAHIANIAFDTSTSEIYTPLFNGGTIICVDDMVAVDAPRLGELFHKEKVEVAVLAPALLKQCLSASPSTLEALRILFTAGDRLDAQDARRVLDLVREGVFNSYGPTENSVLSTLYQLRKEDNCVNGVPIGRPVAYSGAYVVDRELRPVASGVIGELLVTGDGVARGYTDPARDEGRFVNIILIEGNEPVRAYRTGDRVRRRPVDGLLEFFGRLDYQVKIRGHRVELPEVEQALMMANETVIDAVTVVREVGEESDRDVELVSFVTISEADVSDSSHTNGETSGALAAEDKTEQGQVDAWKEHFDKSSYADIESHIDTDKLGRDFIGWTSMYDGKPINLTEMNEWLDDTMTTLLGGGEPRNVLEIGTGSGMILFNLPRSIESYVGLELSEQAAAFANKAANTIPVLKGKVDVRVGTVTDLNSIDNPRFNNPDLVVINSTVQYFPGPEYLLKAIENLLQLGSVERLFIGDVRSYALYREFQVSKALHGINFYSQGISLDSLQQSMAAIERAEEELLVDPAFFTALKERLPNLVEHVEILPKHMVATNELSCYRYAVVIHGKPVSKSANKLPVRELGDGQWIDFQKNQLTRQSLLDMLDGRAKTNSDPELDIVAISNIPFSKIVFERGVLGHYDNNNGRKSTDSVDWLEGCRVSATTSIDTGGSLSAVDLHEIAGSAGYLIQISCARQESQNGGIDAVFYRDPCPERVSRILFNFPTDHQGRDWKSFTNDPLQQRHWRQVEEKLRSHLKARLPSYMVPSVVRVLEAMPLNDNGKVDRRELTKKAQTLVVSKSFSGSSSASKSKDHPRTELEHAVCDEFASVLGLSQDDVGISDDFYHLGGHSLQAARLVSRLNQRLGCRLYVSDLVRSPTPMALGSLIANLPTNIPNGNGVNGDKSDGTKLIINGQVNNNLEPPRGFSELYSRPQSKFTIVLIHGLWGQGSVFAPMIPFLDPLFDVLVLDDPFFGQAQGPESIQQWAKIYLDHVQERLGNKSGSTLIFGGYSLGGLIAYEMASLWYSRHGEYQALLLLLDAAMYVSYAGNDNELEYGLTLFGQEQKQMVHDHYSKISPLTKRELSTIKPYLGPCFCLLTPESHDKGAAAWWSKRCPSLQVDSIDCSHHDLVGRVSVGEVGRRVNERCTEALKSWDQ

SEQ ID NO: 42958 - protein, 110 aa, Quercus suber
SLDIWVPFEGFSAVASVPPSARETTAFATARIDWKETPEAHIFKADLPGLKKEEVKVEVEDGNVLQISGERSKEHEEKNDKWHRVERSCGKFMRRFRLPENAKVDQVKAN

SEQ ID NO: 42959 - protein, 221 aa, Candida glabrata CBS138
MESRIVSSAEQATDIRYSFLNTLDHFSCEYVRTLWLIQYLDNKCLDGARDEEALELQICGKAEYLNKLVEERVSFLQQYKQDLEMQKGINKRYSQLLSRKKGTSTVVRQSSKTTTKKQNGKKLLLKINLKKAYRRDMELEKKRKDYLQKSSNESKKREVKDANGDEERYCFCNDVSYGAMIACDNSKCEREWFHYPCIGMTKPPSGKWYCSEKCRLQGGKK

SEQ ID NO: 42960 - protein, 306 aa, Escherichia coli CFT073
MDIAVIGSNMVDLITYTNQMPKEGETLEAPAFKIGCGGKGANQAVAAAKLNSKVLMLTKVGDDIFADNTIRNLESWGINTTYVEKVPCTSSGVAPIFVNANSSNSILIIKGANKFLSPEDIDRAAEDLKKCKLIVLQLEVQLETVYHAIEFGKKNGIEVLLNPAPALRELDMSYACKCDFFIPNETELEILTGMSVDTYDHIRLAARSLVDKGLNNIIVTMSEKGALWMTRDQEVHVPAFKVNAVDTSGAGDAFIGCFSHYYVQSGDVEAALKKAALFAAFSVTGKGTQSSYPSIEQFNEFLTLNE

SEQ ID NO: 42961 - protein, 110 aa, Quercus suber
SLDIWDPFEGFSAVASVPPSARETTAFATARIDWKETPEAHIFKADLPGLKKEEVKVEVEDGNVLQISRERSKEHEEKNDKWHRVERSCGKFMRRFRLPENAKVDQVKAN

SEQ ID NO: 42962 - protein, 327 aa, Synechocystis sp. PCC 6803
MQSFNRINSMKYFPLSNGEQIPALGLGTWKSSPQVVGQAVEQALDLGYRHLDCAAIYGNEAEIGATLANAFTKGVVKREELWITSKLWSNAHHPDAVLPALEKTLQDLGLDYLDLYLIHWPVVIQPDVGFPESGDQLLPFTPASLEGTWQALEKAVDLGLCHHIGVSNFSLKKLEMVLSMARIPPAVNQVELHPYLQQSDLLTFANSQNILLTAYSPLGSGDRPAAFQQAAEPKLLTDPVINGIAAEQGCSAAQVLLAWAIQRGTVTIPKSVNPERLEQNLRAADITLTDSEMAKIALLDRHYRYVSGDFWTMPGSPYTLQNLWDEI

SEQ ID NO: 42963 - protein, 220 aa, Zea mays
  misc_feature (218)..(218): Xaa can be any naturally occurring amino acid
  unsure (1)..(220): unsure at all Xaa locations
MGRRPARCYRQIKNKPYPKSRYCRGVPDPKIRIYDVGMKRKGVDEFPYCVHLVSWEKENVSSEALEAARIACNKYMTKSAGKDAFHLRVRVHPFHVLRINKMLSCAGADRLQTGMRGAFGKPQGTCARVDIGQVLLSVRCKDNNAAHASEALRRAKFKFPGRQKIIESRKWGFTKFSRADYLKYKSEGRIVPDGVNAKLLGNHGRLEKRAPGKAFLEXVA

SEQ ID NO: 42964 - protein, 166 aa, Zea mays
PIALGVGIGSGYLYKTTFEKEVYSDLYGERGCLMGGIHGMFLAQYEVLRERGHSPSEAFNETVEEATQSLYPLIGANGMDWMYEACSTTARRGAIDWSPKFKDALKPVFNSLYDAVKDGSETKRSLEYNSQPDYREKYEAEMKEIRELEIWRAGKAVRSLRPENQK

SEQ ID NO: 42965 - protein, 110 aa, Quercus suber
SLDIWDPFEGFSAVASVPPSARETTAFATARIDWRETPEAHIFKADLPGLKKEEVKVEVEDGNVLQISGERSKEHEEKNDKWHRVERSCGKFMRRFRLPENAKVDQVKAN

SEQ ID NO: 42966 - protein, 212 aa, Bacillus subtilis subsp. subtilis str. 168
MLFFVDTANIDEIREANELGILAGVTTNPSLVAKEANVSFHDRLREITDVVKGSVSAEVISLKAEEMIEEGKELAKIAPNITVKIPMTSDGLKAVRALTGLGIKTNVTLIFNANQALLAARAGATYVSPFLGRLDDIGHNGLDLISEVKQIFDIHGLDTQIIAASIRHPQHVTEAALRGAHIGTMPLKVIHALTKHPLTDKGIEQFLADWNK

SEQ ID NO: 42967 - protein, 406 aa, Bartonella quintana str. Toulouse
MRRVVVTGMGIVSAIGNNPQAVLTSLHEAKSGISYASQYAELGFRSRVYGKPDINIEELVDRRALRFHGRGTAWNHIAMDQAIADAGLEPHEVSNEHTGIIMGSGGASTLSIVEAADITRQKNPKRVGPFVVPKAMSSTASATLATFFKIKGVNYSISSACATSNHCIGNAYEMIQYGKQDRIFAGGCEDLDWTLSVLFDAMGAMSSKYNDVPEKASRAYDTHRDGFVIAGGAGVLVLEELEHAKARGAKIYGEIIGYGATSDGYDMVAPSGEGAERCMRMALATVKNKIDYINPHATATPVGDPPEIEAIRRIFGTGDQCPPISATKSLTGHSLGAAGVQEAIYTLLMMNHNFICESAHIEELDPAFADMPIVRERRDHQQLNTVLSNTFGFGGTNATLVFQRYG

SEQ ID NO: 42968 - protein, 160 aa, Pseudomonas putida KT2440
MSAFHDLKLEALNGGELPLAPFKGQVVLVVNVASKCGLTPQYKALENLYQIYKDKGFNVLGLPCNQFAGQEPGSEKEIQDFCSLNYGVSFPLGSKLEVNGPQRHSLYRLLAGEGAEFPGDITWNFEKFLVGKDGRVLARFSPRTAPDDPAVVQAIEKALA

SEQ ID NO: 42969 - protein, 255 aa, Salmonella typhimurium LT2
MSGLKITLLQQPLVWMDGPANLRHFDRQLELVSGRDVIVLPEMFTTGFAMEAANNSLSQDSVITWMQAKARQTDALIAGSAALQTERGAVNRFLLVEPEGKVHLYDKRHLFRMADEHQHYAAGDKRIIVQWRGWRILPLICYDLRFPIWSRNRNDYDLALYVANWPAPRSLHWQTLLTARAIENQAYVAGCNRVGTDGNGLHYRGDSRIINPQGDIIATAEPHQATRIDADLSLVALQDYREKFPAWRDADPFTL

SEQ ID NO: 42970 - protein, 582 aa, Bacillus clausii KSM-K16
MKTIKRYLVFVKPYRKEIIGTILIGLLKFGIPLLFPLAMMYIIDDVLLNEELSIAEQSSQLYWIIGGMAFLFIVLRPPIEYYRQYFAQWIGNKVLYDIRDHLFTHIQKLSLRFYSNRKVGEVISRVIHDVEQTKNFVITGLMNIWLDLATILIAIAIMLQLNVWLTLVAISMFPFYGFSIKYFYQRLRKLTRTRSQALADVQGHLHERVQGMNVIRSFANEEYEQKQFAVRNQRFLAKALDHTAWNAKTFAVVNTVTDIAPLLVLFVSALFVLNGSLELGAMSAFVLYMERLYGPLRRLVNSSTTLTQSIASMDRVFEFIDEKYDITDKEGADVLTDVKGAVTFEHVTFSYDNEADPALQDIHLNIPAGQTVALVGMSGGGKSTLVSLIPRFYDVTKGRILIDGKDIRDLVVRSLRDNIGMVLQDNILFSDSVKSNIKIGKPDATDEEVIQAAKAANAHEFICKLENGYDTEVGERGVKLSGGQKQRIAIARVFLKNPPVLVFDEATSALDLESEHFIQEALEKLARDRTTFIVAHRLSTITNADTIVVIDDGKVVEQGTHKELMEKQGSYYKLYSVQELEA

SEQ ID NO: 42971 - protein, 582 aa, Vibrio sp. Ex25
MSINTDETTWQTFKRLWQFIRLYKSGLVVAVIALVINAISDTYMISLLKPLLDEGFGNAESDFLRTLPLIIFAMMFVRGISGFVSTYCLSWVSGNVVMQVRRMVFNHFMHMPVSYFDKEKTGNLLSRITYDSEQVSAATSQALVSIVREGASIIGLLVLMFYNSWQLSLVLFAVAPVVAWGIGVVSKRFRKISKNMQTMMGNVTASAEQMLKGHKVVLSYGGQDIERQRFEKVSNQMRQQSMKLVTAQAAANPIIQMIASLAIVAVLYLASIDSIKEQLTPGTFTVVFSAMFGLMRPLKALTNVTSQFQRGMAASQTLFALIDLEPEKNEGKLTVERANGDVSVKNVSFTYTGAEKPALENVSFDIPRGKTVALVGRSGSGKSTIANLFNRFYDVDSGSITLDGHDIREYELKNLRQQFALVSQNVHLFNDTIANNIAYATDGKYERSDIEKAAKLAHAMEFISKMDDGLDTMIGENGASLSGGQRQRVAIARALLRDAPVLILDEATSALDTESERAIQAALDELQKDKTVLVIAHRLSTIEKADEILVVDDGAIIERGNHADLIAKNGAYAQLHRIQFGE

SEQ ID NO: 42972 - protein, 524 aa, Glycine max
  misc_feature (156)..(156): Xaa can be any naturally occurring amino acid
  unsure (1)..(524): unsure at all Xaa locations
GNQDSNEPVDEALLSSVTKQKVAATKQYIENHYKEQMKNLQERKERRTILEKKLADADVSEEDQNNLLKFLEKKETEYMRLQRHKMGVDDFELLTMIGKGAFGEVRVCREKTSDHVYAMKKLKKSEMLRRGQVEHVKAERNLLAEVDSNCIVKLYXSFQDDEHLYLIMEYLPGGDMMTLLMRKDILTEDEARFYVGETVLAIESIHKHNYIHRDIKPDNLLLDRYGHLKLSDFGLCKPLDCSTLEENDFSVGQNVNGSTQSSTPKRSQQEQLQHWQINRRTLAYSTVGTPDYIAPEVLLKKGYGMECDWWSLGAIMYEMLVGYPPFYSDDPMLTCRKIVNWKTYLKFPEEARLSPEAKDLISKLLCNVNQRLGSKGADEIKAHPFFKGVEWNKLYQMEAAFIPEVNDELDTQNFEKFDESDSQTQSSSRSGPWRKMLSSKKDLNFVGYTYKNFEIVNDYQVPGMAELKKKQSKPKRPTIKSLFETPEASDTSANDQPAQGSFLKLLPPQLEVSPHRDKNLPPRS

SEQ ID NO: 42973 - protein, 372 aa, Pseudomonas fluorescens PfO-1
MPTRREFIKQVSVAVGAGAAVMGLGLSPARVLAASEGRWFMPDEGDKHERAYMAFGAQDAIWEDFTEDVQEALGRIARAIARYEPLTIYCRSGERSLAEEICGSSNITYQIANLDDIWMRDISANFVIDDKNGLGAVDFNFSGWGNKQQHSKDAKIAKRVAADAQATYQRSELVGEGGGIEVDGHGTAIMTESCWVNENRNPGWSKADVEAELKARLGLRKIIWLPGIKGKDITDAHVDFYARFVTPGVVIANLDTDPRSYDNKVTLAHLEILKKATDADGRPLQIHTVSPPLKPRKTKFNKDNDDFAAGYINYFVINGAVIAPEFGDKDADKKAFDLLKKLYPNRDVVQINIDAIAAGGGGIHCVTSHQPA

SEQ ID NO: 42974 - protein, 273 aa, Triticum aestivum
  misc_feature (58)..(58): Xaa can be any naturally occurring amino acid
  unsure (1)..(273): unsure at all Xaa locations
MNGSPKTFYCPRLLVFGGESAPVIPGGWAPDQVGVTDRALLGNLLGKKKAEGAKEKRXELVTGMEKVPVEEPEVKKEEHEDGEKKETLFSKLHRSSSSSSSSSDEEEEEVIDDNGEVIKRKKKKGLKEKLKEKLPGHKDTEGEHVTGLPAPAAPASVQTHHDTDVVVEKIDGDVKTEAAPAVPEEEKKGFLEKIKEKLPGGHKKPEDAAPVPVTHAAPAPVHAPAPAAEEVSSPDAKEKKGLLGKIMDKLPGYHKTGEEDKAAAAAGEHKPSA

SEQ ID NO: 42975 - protein, 514 aa, Schizosaccharomyces pombe
MKASFFVFAISALQALQASVASAYSEVPGKRSVVLNLQHSQYDHVARKLERTKVLNKRDSSGYPVLDLEYTDAGGYFANLTLGSNERVYSLTLDTGSPYTWVTAKNITALSASEIWSDTDGVDAGRSTSDIRTNACTNYTCFDYSSTTARRTNSSTIGFLASYGDNTTVLGYNMVDNAYFAGLTLPGFEFGLATREYDSSQISVTPGIIGLSVAMTITGISSDDKVVAFTPPTIVDQLVSANVIDTPAFGIYLNEDVGELIFGGYDKAKINGSVHWVNISSSDDSTFYSVNLESITVTNSTSSNNVQSSKRSSKDIEVNTTVTLDTGTVYIYLPEDTVESIADQYQGIVSEYGYVVIYCDSFSDSDYISFNFGSDADFHVSVNDLVIYRQESTSGDICYLALFEGDTSSYLLGQYFLQYVYSIYDWDAQKIGLAALNSNATSTANHQILNINSALRSVTSGQSVSATPTVSMSIAATSFGSSLVLTASASPSSTSVDGSSSSDSSEASGAASVG

SEQ ID NO: 42976 - protein, 263 aa, Zea mays
MLEEAIPALLSAVHGWFTPAVLFVVLNIVIGTIAVTSKAAASATGGDEEEVAAAGAGWEPHRRLARVPSMAFERLKSFNGRFATAEPAPAETGVVDLGYNKQPHTAETEKEGPVVVEGAVDPEPEPEPQHAAHMERSRSEADAEAKLPLLPSRLHKSASDKSAFAHFGAEEVEETVRAVEARRPATTRESRGRRLPVAEPEPASESSESESESEEEEASGGEVDARADDFINQFRHQLKLQRIDSFIRHRETVRRGQAAAQGV

SEQ ID NO: 42977 - protein, 346 aa, Nicotiana tabacum
MSPPLLDVREEEGQSNVTLLASSASLGSICKKGSELKERNYMGLSDCSSVDSCTISTSSEDNNACGLNLKATELRLGLPGSLSPERGIETCPLASNEKLLFPLHPAKDSALAVSQKTVVTGNKRRFSDAMDGFSEGKFMPNSGLKAGDTKETSRVQPPKMKEATNQNTVPERTSAVNGASNRVGSGAPATKAQVVGWPPIRSFKKNTLASTSKNNEKVDGKAGSPALFIKVSMDGAPYLRKVDLKNYSAYQELSSALEKMFSCFTIGQYGSHGAPGKEMLSESQLKDLLHGSEYVLTYEDKDGDWMLVGDVPWEMFIETCKRLRIMKGSDAIGLAPRGMEKCRSRN

SEQ ID NO: 42978 - protein, 218 aa, Sisymbrium irio
MAAFEESTDLDAIQGHLFEDFMVSDGFMGDFDFNASFVSGLWCIEPVMNQVPKQEPDSPVLDPDSFVKEFLQVEAESSTSTGTTELNSSSQETDQSISTRKKSKRFEEQEEEEPRHYRGVRRRPWGKFAAEIRDPAKKGSRIWLGTFESDVDAARAYDCAAFKLRGRKAVLNFPLDAGKYEAPANSGRKRKRSDVQGELQRSQSNSSSSSSDGETTCE

SEQ ID NO: 42979 - protein, 343 aa, Haloarcula marismortui ATCC 43049
MRTAVLVEPTEFELEDRPRPSPGPDEVLVAVRDVGICGSDVHYYEHGRIGDYVVEDPLVLGHESAGKVVEVGENVTDHEPGDRVALEPGVPCRRCAHCKRGDYHLCESVRFMATPPHDGAFTEYVSWPADFAYTLPESVSTAEGALCEPLSVGIHACRRGSVGTGDTVLITGAGPIGLMVLEAARAAGATDIILTDVVKEKLEFAEKRGADLTVDVTETDLDTAVAEYTDGVGADVVVEASGAEPSIKSTIDVVRRGGTVVLVGLASEAEVPFDVLELIDNEVDVHGSFRYKNTYDAAVDLLADGEVDVEGIIDFESELEDIDDAFRRSMEPTVVKGMISLDS

SEQ ID NO: 42980 - protein, 119 aa, Bacteroides thetaiotaomicron VPI-5482
MVKANATAPAINVFETEKEYKVELAAPGMTKEDFNVRIDEDNNLVISMEKKTENKEEKKEGRYLRREFSYSKFQQTMILPDNVDKEKISAAVENGVLSVQLPKISEEEVKKAEKQIEVK

SEQ ID NO: 42981 - protein, 289 aa, Mycoplasma gallisepticum R
MYLTTKKIKVMKYNLLANNYKMPSIGFGTYKLEDGKQTVEAVKTALEVGYRHLDCAEIYENQLSVSQGIKLSGVNRKEIFITSKIWNDDKGYESTKKAFHKILKDLDLEYLDLLLIHWPIGKGFKDNWQEVNAQTWKAMEEFYLEGKIKAIGLSNFLVHHIEALKKSAKILPMVNQLEFHPGYLQPEIVEYCQKNNIVVQAWSPFSQSKVLENKTLVQLAKKYEVTVAQLILNWIIQKDIVPLPKSKTPERIRSNFDVFNFGINQADLKVIDQLNDCGGLGLHPDQVDF

SEQ ID NO: 42982 - protein, 220 aa, Silicibacter pomeroyi DSS-3
MFPIQTLKPIALIAAMALATILQGGKAEAAETQTLTVAGGCFWCVEADFEKVPGVLGAVSGYTGGTLDNPTYKQVTRGGTGHFEAVQILFDPDQVSRERLLHMFFRSVDPTDAGGQFCDRGDSYRTAIFVSNKVESALASQAKANAEAELGQTVVTPILTAGRFYPAEAYHQDYAKGEKLVLTRFGPKRQQEAYKLYRKSCGRDARVKQLWGDAAPFAGS

SEQ ID NO: 42983 - protein, 447 aa, Yarrowia lipolytica CLIB122
MKFSILTLAVFTALASAATDKTLKVGFNQRVNHLKNSPNPNGLSNPSKNPSNPVAILNNKVVEYVVDITLGTPAQKFSVQIDTGSSDLWVKADGSDTAYNSSLSSTYEEYKPGAFFIAYGDQTTASGDWVKDTIDVAGASIPDFVFAAAKKTDTDPVFGVGYPSNEASDSQDEQGPEFEYDNFPIRLAKAGVINTPAYSLYLDSLQATTGTLLFGAVDTSKFADELALLPFIKDSPGDPGPKEFQVTLNSIDFGDSNALNVARLALLDAGTTLTILPSTTFLTLFNSLGLYNTEDGPVASQSQLDKWKSEGSAITYTFQGKKVNVPLTQLFIADTDGEGNQRYVTLADGSQEAAYSWLVGDAQSDEGQSVLGDSFLRSVYVAYDLQNNQVGLGQVKYDNSAENIVAISSGGIPSATKAPSAATWSTDHPIPTTAAPPSGIVGVGPKF

SEQ ID NO: 42984 - protein, 463 aa, Arabidopsis thaliana
  misc_feature (26)..(26): Xaa can be any naturally occurring amino acid
  misc_feature (40)..(40): Xaa can be any naturally occurring amino acid
  unsure (1)..(463): unsure at all Xaa locations
MAFEKNNEPFPLHFVLFPFMAQGHMXFPWVDIARLLGSAXGVAYKQLSRRLHNGSQGSKNVLKPGPWSLGLPINLVQVKFPYQEAGLIEEMSPRPSCLISDMCLSYTSEIAKKFKIPKILFHGMGCFCLLCVNVLRKNREILDNLKSDKEYFIVPYFPDRVEFTRPQVPVETYVPAGWKEILEDMVEADKTSYGVIVNSFQELEPAYAKDFKEARSGKAWTIGPVSLCNKVGVDKAERGNKSDIDQDECLEWLDSKEPGSVLYVCLGSICNLPLSQLLELGLGLEESQRPLIWVIRGWEKYKELVEWFSESGFEDRIQDRGLLIKGWSPQMLILSHPSVGGFLTHCGWNSTLEGITAGLPMLTWPLFADQFCNEKLVVQILKVGVSAEVKEVMKWGEEEKIGVLVDKEGVKKAVEELMGESDDAKERRRRAKELGESAHKAVEEGGSSHSNITLLLQDIMQLA

SEQ ID NO: 42985 - protein, 538 aa, Prunus cerasus
MADRRAEYNAVVSGQPQKNIADFDPPGKPKRNKYAFACAILASMTSILLGYDIGVMSGAVIYIKKDLKVSDVEIEVLVGILNLYSLIGSAAAGRTSDWIGRRYTIVLAGAIFFAGALLMGFAPNYAFLMFGRFVAGIGVGYALMIAPVYTAEVSPASSRGFLTSFPEVFINAGILFGYVSNYGFSKLPTHLGWRLMLGVGAIPSIFLAIGVLAMPESPRWLVMQGRLGDARKVLDKTSDSLEESKLRLGEIKEAAGIPEHCNDDIVEVKKRSQGQEVWKQLLLRPTPAVRHILMCAVGLHFFQQASGIDAVVLYSPRIFEKAGITNPDHVLLCTVAVGFVKTVFILVATFMLDRIGRRPLLLTSVAGMVFTLACLGLGLTIIDHSGEKIMWAIALSLTMVLAYVAFFSIGMGPITWVYSSEIFPLQLRAQGCSIGVAVNRVVSGVLSMTFISLYKAITIGGAFFLFAAIAAVGWTFFFTMLPETQGRTLEDMEVLFGKFYRWRKANALLKQKKQVDHGDGNNNPNNPQIQLGTKGQAN

SEQ ID NO: 42986 - protein, 201 aa, Shigella boydii
LKARHLTMIAIGGSIGTGLFVASGATISQAGPGGALLSYMLIGLMVYFLMTSLGELAAYMPVSGSFATYGQNYVEEGFGFALGWNYWYNWAVTIAVDLVAAQLVMSWWFPDTPGWIWSALFLGVIFLLNYISVRGFGEAEYWFSLIKVTTVIVFIIVGVLMIIGIFKGAQPAGWSNWTIGEAPFAGGFAAMIGVAMIVGFS

SEQ ID NO: 42987 - protein, 635 aa, Solanum tuberosum
MESCDCIEALLPTGDLLVKYQYLSDFFIAVAYFSIPLELIYFVHKSACFPYRWVLMQFGAFIVLCGATHFISLWTFFMHSKTVAVVMTISKMLTAAVSCITALMLVHIIPDLLSVKTRELFLKTRAEELDKEMGLIIRQEETGRHVRMLTHEIRSTLDRHTILKTTLVELGRTLDLAECALWMPCQGGLTLQLSHNLNNLIPLGSTVPINLPIINEIFSSPEAIQIPHTNPLARMRNTVGRYIPPEVVAVRVPLLHLSSFTNDWAELSTRSYAVMVLVLPMNGLRKWREHELELVQVVADQVAVALSHAAILEDSMRAHDQLMEQNNALDDARQEAEMAIRARNDFLAVMNHEMRTPMHAVIALCSLLLETDLTPEQRVMIETILKSSNLLATLINDVLDLSRLEDGILELENGTFNLHGILREAVNLIKPIASLKKLSITLALALDLPILAVGDAKRLIQILLNVAGNAVKFTKEGHISIEASVAKPEYARDCHPPEMFPMPSDGQFYLRVQVRDTGCGISPQDIPLVFTKFAEARPTSNRSTGGEGLGLAICRRFIQLMKGNIWIESEGSGKGTTVTFVVKLGICNHPNALPLLPMPPRGRLNKGSDDLFRYRQFRGDDGGISVNAQRYQRSL

SEQ ID NO: 42988 - protein, 907 aa, Xanthomonas oryzae pv. oryzae KACC10331
MGAGPARSRHRCRGRSVGRASLRVARQIPTHPSRGEAAVRVMAHPRRRGRMNAVASLQADAEPSAVVADQRWYKDAIIYQVHVKSFFDSNDDGIGDFPGLISKLDYIAELGVDTIWLLPFYPSPRRDDGYDIAEYMAVHPDYGSIEDFEQLVAQAHARGIRIVTELVINHTSDQHPWFQRARTAPAGSPGRDFYVWSDTDQEYEGTRIIFCDTEKSNWTWDPVAGQYFWHRFYSHQPDLNFDNPAVLEAVLEVMRFWLDRGVDGLRLDAVPYLIERAGTSNENLPETHAILRKIRATLDAEYPDRMLLAEANMWPEDTQQYFGQNADECHMAFHFPLMPRMYMAIAREDRFPITDIMRQTPEIPESCQWAIFLRNHDELTLEMVTDSERDYLWQTYAADRRARINLGIRRRLAPLLERDRRRIELMTSLLLTMPGTPVLYYGDEIGMGDNIHLGDRDGVRTPMQWSIDRNGGFSRADPAQLVLPPVMDPLYGFQAVNVEAQIRDQHSLLTWTRRVLSVRKRYQAFGRGTLRFLYPGNRRMLAYLRCYQDETVLCVANLSHTLQAVELDLSEFEGRVPVDIIGGGSFPPIGRLTYLLTVPPFGFYAFELVSEGTLPDWHVPSPVPLPDYRTLVLRSDADGSAALLPHLPTLEGEILPAWLSARRWFSAKDQALRSVRIARRTPLPGDQPMTLLELEVELEDGRRERYMLPVGIVWEREQPSTLAEQLALARVRQGREVGYLTDAFALKPMVRGVIDALCSNAALKFCDGEEASQQGQVRFEATPALAMLDIPHDPEIRWLSAEQSNSSLVIADKAVFKLLRHVAVGANPEIEIGRRLTEMGYANAAPLLGSISRVDGQGTVTTIALLQGFIRNQGDAWRWTLDHLARSFDEYVDRADRRSARRSRRWL

SEQ ID NO: 42989 - protein, 163 aa, Triticum aestivum
  misc_feature (2)..(2): Xaa can be any naturally occurring amino acid
  misc_feature (8)..(8): Xaa can be any naturally occurring amino acid
  misc_feature (10)..(10): Xaa can be any naturally occurring amino acid
  misc_feature (23)..(23): Xaa can be any naturally occurring amino acid
  misc_feature (28)..(28): Xaa can be any naturally occurring amino acid
  misc_feature (37)..(37): Xaa can be any naturally occurring amino acid
  misc_feature (49)..(49): Xaa can be any naturally occurring amino acid
  misc_feature (52)..(52): Xaa can be any naturally occurring amino acid
  misc_feature (54)..(54): Xaa can be any naturally occurring amino acid
  misc_feature (58)..(58): Xaa can be any naturally occurring amino acid
  misc_feature (63)..(63): Xaa can be any naturally occurring amino acid
  misc_feature (71)..(71): Xaa can be any naturally occurring amino acid
  misc_feature (87)..(87): Xaa can be any naturally occurring amino acid
  misc_feature (92)..(92): Xaa can be any naturally occurring amino acid
  misc_feature (110)..(110): Xaa can be any naturally occurring amino acid
  misc_feature (114)..(114): Xaa can be any naturally occurring amino acid
  misc_feature (117)..(117): Xaa can be any naturally occurring amino acid
  misc_feature (132)..(132): Xaa can be any naturally occurring amino acid
  misc_feature (134)..(134): Xaa can be any naturally occurring amino acid
  misc_feature (139)..(139): Xaa can be any naturally occurring amino acid
  misc_feature (146)..(146): Xaa can be any naturally occurring amino acid
  unsure (1)..(163): unsure at all Xaa locations
MXPTVMAXSXTSVAPFQGLKSTXGLPVXRRSNGASLXSVSNGGRIRCMXVWXIXGIKXFETLXYLPPLSTXALLKQVDYLIRSKWVXCLEFXKVGFIFREHNASPGYYDXRYWXMWXLPMFGCTDATQVINXVXEVTKXYPDSYVXIIGFDNIRQVQLRQASP

SEQ ID NO: 42990 - protein, 470 aa, Erwinia carotovora subsp. atroseptica SCRI1043
MVEKLKETADLAPEQGEGLQRNLTNRHIQLIAIGGAIGTGLFMGSGKTISMAGPSIIFVYMIIGFMLFFVMRAMGELLLSNLNYKSFSDFAADLLGPWAGFFTGWTYWFCWVVTGIADVVAISAYSQFWFPDLSQWVSSLLCVLLLLTLNLATVKLFGEMEFWFAMIKIVAIVALIVVGVALVMMQFSSPSGNVASFNNLWNDGGMFPKGISGFFAGFQIAVFAFVGIELVGTTAAETKNPKVVLPRAINAIPIRIIMFYVFALIMIMSVTPWGAITADRSPFVEMFVLVGLPAAASMINFVVLTSAASSANSGVFSTSRMLFGLAKQGDAPKSFGMLSKRAVPSTGLMFSCICLLSGVVLIYLIPNVMTVFTLVTTVSAILFMFIWSIILCSYLTYRKKRPQLHAESSYKMPLGVFMCRVCLAFFAFVIVLLTLQPDTRQALVVTPLWFIVLAIAYQFVRRKKQVVDVK

SEQ ID NO: 42991 - protein, 434 aa, Bacillus clausii KSM-K16
MNRKTSESLYQEAQHVIVGGVNSPSRAYKGVGGGTPVFMERGEGAYFYDVDGNRYIDYLAAYGPIITGHAHPVITKAIQDQAAKGVLFGTPTRLENEFAQELTNAIPSLEKVRFVNSGTEAVMTTIRVARAYTGKEKIIKFAGCYHGHSDLVLVAAGSGPSTLGTPDSAGVTAATASEVITVPFNDIEAFKEALAHWGSETAAVLVEPIVGNFGIVEPEPGFLEAVNDLAHSAGALVIYDEVITAFRFMYGGAQDYLNVKPDMTALGKIIGGGLPIGAYGGRMDIMEQVAPLGPAYQAGTMAGNPASMSAGIACLEVLRTEGVYEKLDELGARLEEGLYLAAAKANVPISINRLKGALTVYFTDEPVIDYEGAKRSNGDQFSVFFKAMLNEGIHLAPSKYEAWFLTIAHTKNDIDETIEAAYRSFKTVAAGFYS

SEQ ID NO: 42992 - protein, 520 aa, Dehalococcoides ethenogenes 195
MPAEKDKKEFSPDDTYDDKDIEDGLEDIHEEQDAEAENDKMAEPDLKDIADTDIPAELTEEELAAEADMMPDTDEEIGPLNIDLEIPLEQIDTQGIVDDPVRMYLHEIGRVPLLSAEDEKTLAKKMEEGKRIREIRQECLEKRGRYPSAAESFLCMLRELSQATEVLFQLGQELGMDTSASLKNVIHDPKLRTAIDHEIDQQLTKNISDNTGKSMAEIEQSFINLAINSSLLPKVILDAIPEKMTIPEIATYTNDPAFISHLERHEASLKYYLDNLEIDAKRAERHLIQANLRLVVSVAKKHIGRGMPLLDLIQEGNIGLIRAVEKFDFHRGFKFSTYATWWIRQAITRAIADQARTIRIPVHMVETINKLLSISRQLSQKLGREPTPDEIAVEMDLPPEKVREIAKVSQLPVSLESPIGEEEDSHLGDFIEDQNALAPPDAASRQLLKEQIDTVLGSLTPRERRVLQLRFGLEDGRSRTLEEVGKEFNVTRERIRQIEAKALRKLRHPSRSRKLKDYLE

SEQ ID NO: 42993 - protein, 533 aa, Candida glabrata CBS138
MQIFVKTLTGKTITLEVESSDTIDNVKSKIQDKEGIPPDQQRLIFAGKQLEDGRTLSDYNIQKESTLHLVLRLRGGMQIFVKTLTGKTITLEVESSDTIDNVKSKIQDKEGIPPDQQRLIFAGKQLEDGRTLSDYNIQKESTLHLVLRLRGGMQIFVKTLTGKTITLEVESSDTIDNVKSKIQDKEGIPPDQQRLIFAGKQLEDGRTLSDYNIQKESTLHLVLRLRGGMQIFVKTLTGKTITLEVESSDTIDNVKSKIQDKEGIPPDQQRLIFAGKQLEDGRTLSDYNIQKESTLHLVLRLRGGMQIFVKTLTGKTITLEVESSDTIDNVKSKIQDKEGIPPDQQRLIFAGKQLEDGRTLSDYNIQKESTLHLVLRLRGGMQIFVKTLTGKTITLEVESSDTIDNVKSKIQDKEGIPPDQQRLIFAGKQLEDGRTLSDYNIQKESTLHLVLRLRGGMQIFVKTLTGKTITLEVESSDTIDNVKSKIQDKEGIPPDQQRLIFAGKQLEDGRTLSDYNIQKESTLHLVLRLRGGY

SEQ ID NO: 42994 - protein, 154 aa, Zea mays
MSLVRRSSVFDPFSVDLFDPFDSMFRSIVPSSPSSAAASETAAFASARIDWKETPEAHVFKADLPGVKKEEVKVEVEDGNVLLISGQRSREKEDKGDKWHRVERSSGQFVRRFRLPENAKTEEVRAALENGVLTVTVPKAEVKKPEVKSIQISG

SEQ ID NO: 42995 - protein, 198 aa, Shigella boydii
LKARHLTMIAIGGSIGTGLFVASGATISQAGPGGALLSYMLIGLMVYFLMTSLGELAAYMPVSGSFATYGQNYVEEGFGFALGWNYWYNWAVTIAVDLVAAQLVMSWWFPDTPGWIWSALFLGVIFLLNYISVRGFGEAEYWFSLIKVTTVIVFIIVGVLMIIGIFKGAQPAGWSNWTIGEAPFAGGFAAMIGVAMIV

SEQ ID NO: 42996 - protein, 110 aa, Quercus suber
SLDIWDPFEGFSAVASVPPSARETTAFATARIDWKETPEAHIFKADLPGLKKEEVKVEVEDGNVLQISGERSKEHEEKNDKWHRVERSCGKFMRRFRLPENAKVDQVKAN

SEQ ID NO: 42997 - protein, 446 aa, Thermosynechococcus elongatus BP-1
MEAAEMGGTCVNRGCIPSKALLAAAGRVRELRQASHWQALGIQLGQVNVDRAGVAAHAANLVQKIRSDLTNSLKRLGVDILIGRGKIAGSQKVSITTPTGEKIITAKDIIIATGSVPWVPPGIEVDGKTVYTSDDAIKLDWLPQWVAIIGSGYIGLEFADIYTALGSEVTMIEALDQLMPTFDPDIAKQAQRILIAGRDIETYSGTLAKRVIPGSPVVIELADGKTQEVVDVLEVDACLVATGRIPATQDIGLESVGVSTDKRGFIPVNEYLAVTKKGKPVPHLWAIGDATGKMMLAHAASAQGIAVVETIVGRPRQVDYRSIPAAAFTHPEMSFVGLTEPQARELGEKEGFEVQVARTYFKGNSKALAETETDGLAKVIFRADTGELLGAHIFGLHAADLIQEAANAIRDRQTVSHLAFNVHTHPTLSEVLDEAFKRAHEMVTHR

SEQ ID NO: 42998 - protein, 406 aa, Bacillus halodurans C-125
MGYYDEHVSNRNEKQKGARRGIGISAFIGAILGALLVLFSVPALSGLGWLPYEIDSGAPTEETGQLTEAPNDIETVNYAVNSDVSQAVEKVSDAVVGIVSMTNGSMFSSSEEEEGTGSGVIYKKEGDRAFIVTNEHVISGANQVEVVLTDGSRLPAEVLGSDVFTDLAVLEIDGSDVETVAEFGNSDLLSPGEPAIAIGNPLGLRFSSSVTLGIISATERSIPIDLTGNGQIDWQAEVLQTDAAINPGNSGGALVNIQGQVIGINSMKIAQSTVEGIGFAIPSNLAIPVIEDLEFYGDVQRPQMGVAFRSLSEIPSFHWEETLKLPEDVKGGVVITDIVPMSPAETAGLRQYDVIVELNGEDINDGHELRKFLYTELNIGDEVEVTYYREGKKETTTLTLVEQQSS

SEQ ID NO: 42999 - protein, 1140 aa, Oryza sativa
MKSGKSKFAVANITSTAWRGRRQGGQRAPPSLNMPSTTPPPPQSSLPPSTGEKQDGNSDVEGNLEAVSPLAQTTHATGFGAKINDNDGHPAASREGEGRRGRRPPVASAREAAILKTKWCCEEGGARRGLDAAWGSRGRNYGLFGFTMNDYLSVGTVISFTTIINFGRVMMALAVDVSRFEGVPMAPPDPILGVSEAFKADQNDLKLNLGVGAYRTEELQPYVLNVVKKAETLMLEKGENKEYLPIEGLAAFNKATAELLFGADNPVLKQGRVATLQSLSGTGSLRLAAAFIQRYFPEAKVLISSPTWGNHKNIFNDAKVPWSEYRYYDPKTVGLDFEGMIADIQAAPDGSFVLLHGCAHNPTGIDPTPEQWEKIADVIQEKKHMPFFDVAYQGFASGSLDEDASSVRLFVQRGLEVFVAQSYSKNLGLYAERIGAINVVCSTPEVANRVKSQLKRLARPMYSNPPIHGARIVANVVGDPTMFGEWKQEMEEMAGRIKNVRQKLYDSLSAKDDSGKDWSFILRQIGMFSYTGLNKTQSDNMTDKWHIYMTKDGRISLAGLSLAKCEYLADAIIDSFHNGPSSHVYVNKDSNTEKVKLPEKIGCQKTSWYQSRPAGGRRRLNPSWPEAWRLEQGRECASAAARKSGASAARRGGRSRAAAGAELLLLLGAELAGRSGSCSVVAGSQHSEDFASLVENQGIEQVMGKLVDMLAKKFSEASTTSNAIIPHTESILKIELMQNEIKLEGVKNYLSWSRRALLILKTKGLEGYVTGEVKEPENTSSVEWKTWSTTNSLVVAWLLTSLIPAIATTVETISSAREMWKTLTKLYSGEGNVMLMVEAQEKISALRQGERSVAEYVVELKSLWSDLDHYDPLGLEHSDCIAKMKKWVERRRVIEFLKGLNPEFEGRRDAMFHQTTLPTLDEAIAAMAQEELKKKVLPSAAPCSPSPTYAIVQGKETRECFNCGEMGHLMRDCHAPRKPTYGRGRGVDRGGTRGGRGYAGRSNRGRGYGYRGDYKANAVTLEEGSSGTTPDNVANFAHSTSGSFNQAFMSMNTSHSSWILDSGASRHVTGMSGEFTSYKPYSFAHKETIQTADGTSCQERRTGKKLGISIRRDGLWYLDRRGTNEDVCALMASTSKEVTE

SEQ ID NO: 43000 - protein, 145 aa, Thermosynechococcus elongatus BP-1
MALVRWEPFREIDAIQRQMNRLFDELIPLTERRSDLSFLPAAELEETPEALLLKVELPGMDPKDIDVQVTAEAVSISGERKSETKTETEGMKRTEFRYGKFQRVIPLPVRIQNTSVKAEYKDGILHLTLPKAEEEKNRVVKVSLA

SEQ ID NO: 43001 - protein, 416 aa, Salmonella typhimurium LT2
MLEQMGIAAKAASYKLALLSSGEKNRVLEKIADELEAQMESILSANVQDVEQARANGLSEAMLDRLALTPARLKAIADDVRQVCNLADPVGQVIDGGLLDSGLRLERRRVPLGVVGVIYEARPNVTVDVASLCLKTGNAVILRGGKETYRTNAATVRVIQKALKACGLPEAAVQAIDNPDRSLVNEMLRMDKYIDMLIPRGGAGLHKLCREQSTIPVITGGIGVCHIFVDSSADIAPALKIIVNAKTQRPSTCNTVETLLVHQDIAERFLPALSKQMAESGVTLHGDETVMQVLHGPAKLVPLKPEELDNEFLSLDLNVVVVENMDGAIAHIREHGTQHSDAILTCDMHNAARFVNEVDSAAVYVNASTRFTDGGQFGLGAEVAVSTQKLHARGPMGLEALTTYKWIGFGDGTIRA

SEQ ID NO: 43002 - protein, 430 aa, Streptomyces nogalater
MKESINRRVVITGIGIVAPDATGVKPFWDLLTAGRTATRTITAFDPSPFRSRIAAECDFDPLAEGLTPQQIRRMDRATQFAVVSARESLEDSGLDLGALDASRTGVVVGSAVGCTTSLEEEYAVVSDSGRNWLVDDGYAVPHLFDYFVPSSIAAEVAHDRIGAEGPVSLVSTGCTSGLDAVGRAADLIAEGAADVMLAGATEAPISPITVACFDAIKATTPRNDTPAEASRPFDRTRNGFVLGEGAAVFVLEEFEHARRRGALVYAEIAGFATRCNAFHMTGLRPDGREMAEAIGVALAQAGKAPADVDYVNAHGSGTRQNDRHETAAFKRSLGDHAYRVPVSSIKSMIGHSLGAIGSLEIAASVLAITHDVVPPTANLHEPDPECDLDYVPLRARACPVDTVLTVGSGFGGFQSAMVLCGPGSRGRSAA

SEQ ID NO: 43003 - protein, 620 aa, Legionella pneumophila
MTMNDQDQQSSQITKVISLGKEQGYLTYSQINDLLPNIVDTEHFDVIISMLEGMNIKVFELPPSEDELALLLNTEEVPDIEEAAMVLASVDKETGRTTDPVRMYMREMGTVELLTREGEIRIAKRIEEGIYQVLKSLAHYPETVQLVLEDYDRFLAEEIRLNEIISGFADVDEEIAPATNIGSMLDEEQQEEILLDVDEEDEDGEGGISDVDDGPNPEQAKIYFDELREAFEKAMKALKEHGRTNKKTVELLDSMSESFLKLKLTSRQVDKLTRHFRQLRNHIREFERSIMRLCIEKARIPRKLFIDTFPGQETDLGWLETIISKHAKKLDLQRIEENREEILRLQSKLASFEIEYGLTISEIKDINRKMSIGDEARRAKKEMVEANLRLVISIAKKYTNRGLQFLDLIQEGNIGLMKAVDKFEYRRGYKFSTYATWWIRQAITRSIADQARTIRIPVHMIETINKLNRISRQILQETGREATPEELAEKMELSEDKIRKVLKIAKEPISMETPVGDDDDSHLGDFIEDNNIESPIDMATAEGLREATLEILETLTPREAKVLRMRFGIEMNTDHTLEEVGKQFDVTRERIRQIEAKALRKLRHPSRSEKLRSFLEGDEG

SEQ ID NO: 43004 - protein, 442 aa, Ralstonia eutropha JMP134
MTAADVQAAIAAADRALPAWRATSSRERSRLLRRWFDLCMAHQEDLATILTLEQGKPLKESRGEIAYGSGFIEWFSEEARRIYGDVIPAPSSDRRIIVIKQPVGVVAAITPWNFPNAMITRKAGAALAAGCTIVIKPASATPFSALALAALAKEAGIPDGVLNVVTGSASVVGGELTSSPVVRKLSFTGSTDVGKTLLEQCAGTVKKVSMELGGNAPFLIFDDADLDAAVAGVMASKFRNAGQTCVCANRIFVQDGVYDAFAEKLRIAVEAQVVGDGMAPGVDLGPLIDDAAIEKVREHIYDAVSLGAQVFTGGRAHALGGRFFKPTILTDVSPKAKLMNEETFGPLAPLIRFKTEEEAVAMANDTPFGLAAYFYTTNYARSWRVAEALECGIVGLNEGLISTEVAPFGGVKESGVGREGSKYGIEDYVEVKYICAGGLALR

SEQ ID NO: 43005 - protein, 444 aa, Oryza sativa (japonica cultivar-group)
MAPTTAAAAASSNGGGESDGSSKEWRLTAPTRGGAMAAAGDKMSIRAVRYKISASVDDRGPRPVLPLAHGDPSVFPEFRTAAEAEDAVADALRSGDFNCYPAGVGLPAARRAVADHLSRDLPYKLSSDDIFLTAGGTQAIEVVISILAQPGTNILLPRPGYPNYEARAAFNNLEVRHFDLIPEKGWEIDLNSLESIADKNTTAIVIINPNNPCGNVYTYEHLSKVAEVARKLGILVITDEVYGNLVFGSSPFVPMGCFGHIVPILTIGSLSKRWIVPGWRLGWVAICDPKKTLQETKIATLITNFLNVSTDPATFIQGALPNILKNTKEEFFKRIIDLLTETSDICYRGIKDIKCITCPHKPEGSMFVMVKLNLYLLEGIHDDVDFCCQLAKEESVILCPGSVLGMKNWVRITFAIDSSSLLDGLERIKSFCQRHKKKNPLNYI

SEQ ID NO: 43006 - protein, 1035 aa, Thermosynechococcus elongatus BP-1
MRIFMFRFPLLSFIQLFLPTTAVIAALLTPLYVGQRQALFKDFRVGQEGKLEEIQLTIANDIDDAVTDPKGLGSFHLWHELIDSPSQGELAEEVQELVDQWHRLKEHYDQLYVLDTRGRIRFQWTSTPQSDPPSTVKAINSYWPILRELTPDQVFVSPVEVTATKSSGLPFPVLYIGVPLYHQSAPKGVLVVRYQLNHLFNNLLSRCNIQMGWCLVADDQGYWLLGEDIREQWGFDFPERRQFTVRHQYPLLWQQMQHQLRGGLFGPDGLFVFQSFSLLQENWISAERSAHSSRRQSNVRWWLIGFLPSSALEQYLDHLNRDFLVSFTALCILAAVAVLLITRDRQRKRSLQKLLETSNARFRSVSEMAPVGIFTLDAQGQPTFLNQRLLQLLQVHNLEEAQQQWIERLHPEDRDRVLKAWAACQQKRVPFHERFRIVHNDSSSHWINARIIPLQESSATDSFVGTWEDISQMMQQQELLEVARQAAEEASRAKSEFLATMSHEIRTPMNAIIGLTGLLLDTPLNPQQQEFVNTIRLSGDALLGVINDILDFSKIESGKLELESYPFNLRTCVEEVLDLLASRAAEREVELAAHIDSGVPCAVIGDMGRLRQVLVNLIGNAIKFTQKGNVTLYVKAKPMPMSQYEFMPSYYSYLFAIQDTGIGISAAGMNRLFKPFSQVDASTTRQYGGTGLGLVICQRLVERMGGQIWVESKKTGESLVVGGTPLAVYESIPIAESGSVFYFTARFLLNPNPAPEPTDDTCYLENRRVLIVDDNATNRQILALQIKKWKMQPLVAESGPSALALLQQQGWVDLAILDLQMPEMDGVTLARQIRAAYGELPLILLTSLGNTLTESEKALFSSLISKPVKQSTLYNALNSLFCEKQKTVSPKPAAAPSFEHLKAELPPLRILVAEDNKVNQMVALRILEKLGYRGDIAANGLEVLDAVQRQPYDVILMDMQMPEMDGITATREVTQLFQGLKKPRPRIIAMTANAMESDRQLCLDAGMDDYVSKPIRLEELVRALRQCQPLQTPTT

SEQ ID NO: 43007 - protein, 409 aa, Streptomyces nogalater
MTAAVVVTGLGVVAPTGLGVREHWSSTVRGASAIGPVTRFDAGRYPSKLAGEVPGFVPEDHLPSRLMPQTDHMTRLALVAADWAFQDAAVDPSKLPEYGVGVVTASSAGGFEFGHRELQNLWSLGPQYVSAYQSFAWFYAVNTGQVSIRHGLRGPGGVLVTEQAGGLDALGQARRQLRRGLPMVVAGAVDGSPCPWGWVAQLSSGGLSTSDDPRRAYLPFDAAAGGHVPGEGGALLVLESDESARARGVTRWYGRIDGYAATFDPPPGSGRPPNLLRAAQAALDDAEVGPEAVDVVFADASGTPDEDAAEADAVRRLFGPYGVPVTAPKTMTGRLSAGGAALDVATALLALREGVVPPTVNVSRPRPEYELDLVLAPRRTPLARALVLARGRGGFNAAMVVAGPRAETR

SEQ ID NO: 43008 - protein, 309 aa, Ralstonia eutropha JMP134
MPAEIEAALKERFVVKLNESDELTDSATIIERAKGASVLLVTATERIDGNVLRALSPTLKTVATLSVGYDHIDLATAGELGIEVLHTPDVLSDACAEVALMLLLNAARRGYEADRMVRSGQWPGWAPTQLLGKGLVGKRLGIFGMGRIGRAIATRARAFGMQIHYHNRSQLGPEDAEGAIYHATLDGLCRHSDMLLVAAPGSPQLKGALNQVHIRALPRGAVVANISRGDIVDDDALIEALNNGHVFAAGLDVFANEPNVDPRYRALDNVFLSPHIGSATEETRNAMGWLLIDGIEALRRGERPANRLS

SEQ ID NO: 43009 - protein, 340 aa, Thermotoga maritima MSB8
  misc_feature (13)..(13): Xaa can be any naturally occurring amino acid
  misc_feature (64)..(64): Xaa can be any naturally occurring amino acid
  misc_feature (166)..(166): Xaa can be any naturally occurring amino acid
  misc_feature (174)..(174): Xaa can be any naturally occurring amino acid
  misc_feature (207)..(207): Xaa can be any naturally occurring amino acid
  misc_feature (231)..(231): Xaa can be any naturally occurring amino acid
  misc_feature (283)..(283): Xaa can be any naturally occurring amino acid
  unsure (1)..(340): unsure at all Xaa locations
MGSDKIHHHHHHXKPLRKIRLGIVGCGIAARELHLPALKNLSHLFEITAVTSRTRSHAEEFAKXVGNPAVFDSYEELLESGLVDAVDLTLPVELNLPFIEKALRKGVHVICEKPISTDVETGKKVVELSEKSEKTVYIAENFRHVPAFWKAKELVESGAIGDPVFXNWQIWVGXDENNKYVHTDWRKKPKHVGGFLSDGGVHHAAAXRLILGEIEWISAVAKDLSPLLGGXDFLSSIFEFENGTVGNYTISYSLKGNERFEITGTKGKISISWDKIVLNEEEXKVPQENSYQKEFEDFYQVVAEGKPNDLGSPVQALKDLAFIEACVRSAGNKVFVSSLL

SEQ ID NO: 43010 - protein, 323 aa, Staphylococcus epidermidis RP62A
MNKILVTRQIPQHYIEQLKKIGQVVMWEHDLTPMSRESFLANVEDATACVITLSEHIDEEVFLRAQQLKVIANMAVGFDNIDITLAKKHGVVVTNTPHVLTETTAELGFTLMLTVARRIIEATSYIQEGKWKSWGPYLLSGKDVYGATVGIFGMGDIGKAFARRLQGFDARIIYHNRKRDLIAESELNATYVTFSSLLEQSDFIICTAPLTKKTENQFDNRAFNKMKNDAVFINIGRGAIVDEEALLEALKNHEIQACGLDVMRQEPIQPDHPILKLPNAVVLPHIGSSSQVTRNRMVQLCIDNIKAVLNNDAPLTPVTPLHI

SEQ ID NO: 43011 - protein, 185 aa, Oryza sativa
GGLEARVPFLDKAFLDVAMNTDAADKMFSKGSLQEVDADGRPRMEKYILRKAFDVIPDDIEAGGDGTGSMLSASAPKKPYLPEDILWRQKEQFSDGVGYSWIDGIKDHAEQSISDEKFQERAKRYPTDTPDTKEAYMIREIFESWFPSDAAASTSVRWIPRADWGCASDPSGRAVKIHESAYADE

SEQ ID NO: 43012 - protein, 339 aa, Salmonella typhimurium LT2
MKSIVIEKPNTLTIETRALPQPAPGEVRIKVKLAGICGSDSHIYRGHNPFAKYPRVIGHEFFGVIDAVGDNVNHDRIGERVSVDPVISCGHCYPCSVGKPNVCTSLVVLGVHRDGGFSEYAVAPARNAHRIPDNIADHHAVMVEPFTIAANVTGQVNPTEQDVALIYGAGPMGLTTVQALKGVYQVKTVIVVDRIEERLAMAKQSGADWTLNNGQHSLAEFLQQKALKPTLIVDAACHPAILQEAITLASPAARIVLMGFSSDPCEIVQQGITGKELAIYSSRLNANKFPVVIDWLNKGLIDPDKLITHTFDYQHVTDAIELFEKDQRQCCKVLLTFAK

SEQ ID NO: 43013 - protein, 346 aa, Cryptococcus neoformans var. neoformans JEC21
MPAIQPGSLVLVTGASGYIAAHTIDALLKEGFNVRGTVRSQSKGEYLAKLFKGAKARFEYVIVGDIAQEGAFDEAVKSVNAVAHMASPYHFNAVELDELFEPAKKGTTGVLESLKKNNPDCKRVVVTSSVAAIVNSNIKPPHTFTEADWNPVSLKVCEEKGRDADGVNKYRASKTLAEKVFWKFFEDEKPSFDGVAINPPLVLGPIIHECDSPESLNTSVANFYDWMIGKKTEKNLPEAGGNYVDVRDCALAHLRALVVPEAAGQRFITGNGAYNGNDFCIALAETCPDLKGVAKGNADPAYRKKLIDENNHMDGSKAEKVLGLAYRSKNETLRDMAKSLRARFNF

SEQ ID NO: 43014 - protein, 201 aa, Shigella boydii
LKARHLTMIAIGGSIGTGLFVASGATISQAGPGGALLSYMLIGLMVYFLMTSLGELAAYMPVSGSFATYGQNYVEEGFGFALGWNYWYNWAVTIAVDLVAAQLVMSWWFPDTPGWIWSALFLGVIFLLNYISVRGFGEAEYWFSLIKVTTVIVFIIVGVLMIIGIFKGAQPAGWSNWTIGEAPFAGGLAAMIGVAMIVGFS

SEQ ID NO: 43015 - protein, 385 aa, Saccharomyces cerevisiae
MTKSVDTLLIPGPIILSGAVQKALDVPSLGHTSPEFVSIFQRVLKNTRAVFKSAAASKSQPFVLAGSGTLGWDIFASNFILSKAPNKNVLVVSTGTFSDRFADCLRSYGAQVDVVRPLKIGESVPLELITEKLSQNSYGAVTVTHVDTSTAVLSDLKAISQAIKQTSPETFFVVDAVCSIGCEEFEFDEWGVDFALTASQKAIGAPAGLSISLCSSRFMDYALNDSKNGHVHGYFSSLRRWTPIMENYEAGKGAYFATPPVQLINSLDVALKEILEEGLHKRWDLHREMSDWFKDSLVNGLQLTSVSRYPSNMSAHGLTAVYVADPPDVIAFLKSHGVVIAGGIHKDIGPKYIRIGHMGVTACNKNLPYMKNCFDLIKLALQRKK

SEQ ID NO: 43016 - protein, 405 aa, Oryza sativa (japonica cultivar-group)
MSPPATATAAVAAAVSASAAAAVSSAIDRRRRRMEMRRIRIASDLELQAGEDGRPGKRQRLARTASGAPRPDEDSASERPSCGRTEEFPRYGVTAVCGRRREMEDAVSIRPDFLPASGKFHFYGVFDGHGCSHVATTCQDRMHEIVAEEHNKGASGEVAPWRDVMEKSFARMDGEVGNRASTRSDDEPACPCEQQTPSRRDHAGSTAVVAVVSPTQVVVANAGDSRAVISRAGVPVALSVDHKPDRPDELERIEAAGGRVIYWDGARVLGVLAMSRAIGDGYLKPYVTSEPEVTVTERTDDDECLILASDGLWDVVTNEMACEVVRACFHNNGPPAPAARPSGVPSSAEAAETENGGAASVKGISKAESSDKACSDAAMLLTKLALARRSADNVSVVVVDLRRGL

SEQ ID NO: 43017 - protein, 126 aa, Brassica napus
MASSASKFIKCVTVGDGAVGKTCMLICYTSNKFPTDYIPTVFDNFSANVVVEGTTVNLGLWDTAGQEDYNRLRPLSYRGADVFVLSFSLVSRASYENVFKKWIPELQHFAPGVPLVLVGTKLDLRE

SEQ ID NO: 43018 - protein, 201 aa, Shigella boydii
LKARHLTMIAIGGSIGTGLFVASGATISQAGPGGALLSYMLIGLMVYFLMTSLGELAAYMPVSGSFATYGQNYVEEGFGFALGWNYWYNWAVTIAVDLVAAQLVMSWWFPDTPGWIWSALFLGVIFLLNYISVRGFGEAEYWFSLIKVTTVIVFIIVGVLMIIGIFKGAQLAGWSNWTIGEAPFAGGFAAMIGVAMIVGFS

SEQ ID NO: 43019 - protein, 534 aa, Cryptococcus neoformans var. neoformans JEC21
MPDPAPFWLCHECGAQMRPVTIDGTPHCASCNGEFIEILDPEVNPDPDYELPPPPPTRPGQQTPSRFDPHFLSNFPPPQSEGSSSPARQRDTNNTGNFLSSLFSMLGTGSRQGSEETPRRPPPSFHGEPSASQRNGQSQNTDRPGMRTYAFNFGNARGSVTIGSFGSNLGRQGYRMNNDPTSPSGNLFNDPDPFRADPFDARFRPPGDGNRDINGDMPLPLGANEALQLIAALLDGNPPPNMGNLGDFATSDADFMRILQETFMEAAGPQGPVPANETVIEGLPRFTFDSGSLAKSQFRDCPVCKDDFEIGNEVMLIPCGHIYHPDCLVPWLRQNGTCPVCRFSLVSEDEQPNNQRTPNVGTEHTRNAEEERPATPTIPAAVSNFFRNLFGGSESQPSTPRAAAGGGHGSNASQDPHSSVNVVSESTISADASSRHSPTIHGATRREQVQPCDEVASEGSSNDSLVRVYPEHSSGETHGDGATDGEAGRIAEQEQQVASRDRLADRVNRDFNERWQRLRREREEDDTVYHPDLD

SEQ ID NO: 43020 - protein, 352 aa, Yarrowia lipolytica CLIB122
MQTLSEFADRHAFHSASDSVALYHSIPPHQRPAQATLKLRERALSADNEHEYADDMIAHMHMLEKAYSCDTDMMRQQPHVTFANRREALEDVVNSHRYFDLSSDTLFTAVALLDRYTSKCIIVDGYYPLVALAALWIAAKYVERKVAVPTLDQLHRLQPAYSKREYLQMEGYMLNVLEWSVSAPTADAFLDMFIGTTDPIFDDKFRTLRLFGLYLCECALFNEQLIDARKSSVAMAAQLLAMYYTHGIPDYPVSPRPDVNFIINQLETQAVPACIQSKYASTKFEFMRNAIGLRGGETPDPEDVMMTPPVTPERSKRYGFVGAQNQPQTQPQTQAIPKQPYDYGYNQGYYHS

SEQ ID NO: 43021 - protein, 453 aa, Galactomyces geotrichum
MREIVSIQCGQAGINQVSTAFWSTITDEHGLDADGHLRPDASSLESDRLDVFFNEASNKKYVPRAVAVDLEPATLDAIRSGPLGHIYRPDNLISGESGAGNNWAKGFYTEGAELMDSVMDIIRREAEQSESLQGFQLAHSLGGGTGSGLGTLLLTKIREEYPDRMLSTYSVLPSPKVSDTVTEPYNAVLSFHQLIDNADATYCLDNEALYDICEKTLKINRPSHQDLNSLIALVMSGVTTGLRYPGQLNGDLRKLAVNLVPFPRLHFFTTGFAPLFAKNSRAFHNLTVPELTQQLFNPANVMAACNPYHGRYLTISTIFRGQVAMKEVEDAIHTARTKYSPYFVEWIPNNVQTSVCNVPPKGLTTSATFIANSTAVQELFERTANQFSVMFKRKGFLHWYTGEGMEPVEFSEAQSDLEDLILEYQQYQNAGVDEDEELMDHEEYADEGVEDFN

SEQ ID NO: 43022 - protein, 370 aa, Selenicereus wittii
SDSGKDAGRLSAAWQLYKAQEELIKVAKQFGVKLTMFHGRGGTVGRGGGPTHLAILSQPPDTIHGSLRVTVQGEVIEQSFGEEHLCFRTLQRYTAATLEHGMHPPISPKPEWRTLLDEMAVVSTKEYRSIVFQEPRFVEYFRLATPELEYGRMNIGSRPAKRKPTGGIESLRAIPWIFAMTQTRFHLPVWLGFGAAFKHVIEKDIRNLNMLREMYNMWPFFRVTIDLIEMVFAKGDPEIAALYDKLLVSEELQSFGELLRKNYEETSRLLLEVAEHKDLLEGDPYLKQRLRLRDPYITTLNVSQAYTLKRIRDPDFKVTERPHLSKDIMESNNPAAELVKLNPTSEFPPGLEDTLVLTMKGIAAGMQNTG

SEQ ID NO: 43023 - protein, 607 aa, Bacillus halodurans C-125
MERKVGFFKSIQFKLIIIYVLLILIAMQIMGVYFTRQLEDQLVENHFNMLDERADLLAYSLVEPLTAQWEDRAELTAEVNSLLRDLFSIENSEVQVIDANRVVIGTSNLSNQNIIGQLSSEIPVRRALIGNRDGPGSIYRDPQTGNRIRVLAVPIRDEEAIVGALYIEASIEDIYDQMQDINSILASGTLIAASITALLMILLSRTITGPILDMRKQALRMGYGDFSRKVNVHSTDEIGQLAMSFNDLTMKLKDALSTRDQEQKKLRSVLTHMTDGVIASDKYGKMILMNKRAEEMLGVSYEEVQGTLLPELLNISETFAVDELYDYNDSVLLDFSTEEDYLIQASFSVIQEDEGPVNGLITVLHDVTEREKIEQERREFVANVSHELRTPLTTMKSYLEALDDGAMNDPNLAPRFLHVTQNETERMIRLVNDLLQLSKIDTHDYKLNLSWVDLGPYLHDMIDRHEIIAKEKDIHFIRKITKHATFVEIDQDKLTQVIDNILSNAMKYSPEGGDVTITLLHQGHNVRVSISDQGMGIPKESQTKIFDRFYRVDKARARSVGGTGLGLAIAKELVHAHGGEIWVESKYKVGTTIYFTLPYSTFKGEEA

SEQ ID NO: 43024 - protein, 264 aa, Arabidopsis thaliana
MYVTKYKNKLPTLQVDLIIMPHQTQACIYKQTLSLHQIFQQRKATKTLHTKKTMMSKKKESIGRQKIPMVKIKKESHRQVTFSKRRAGLFKKASELCTLCGAEIGIIVFSPAKKPFSFGHPSVESVLDRYVSRNNMSLAQSQQLQGSPAASCELNMQLTHILSEVEEEKKKGQAMEEMRKESVRRSMINWWEKPVEEMNMVQLQEMKYALEELRKTVVTNMASFNEAKDDVFGFLDNKVTVPPYVNMPSGPSNIYNFANGNGCF

SEQ ID NO: 43025 - protein, 369 aa, Scapania nemorea
SDSGKDAGRLSAAWEMFKCQEDLVKVAKEHGIKLTMFHGRGGTVGRGGGPTHLAILSQPPDTIHGSLRVTVQGEVIEQSFGEEHLCFRTLQRFTAATLEHGMHPPRSPKPKWRELMDEMAKVATEEYRNVVFKHPQFVEYFRSATPETEYGRMNIGSRPAKRKPSGGIESLRAIPWIFAWTQTRFHLPVWLGFGGAFKQSLAKSSTNLALMREMYNEWPFFRVTIDLIEMVFAKGDPRIAALYDELLVSDELKPLGQKLRTMYAETRELLLKIAGHEDVLAGNPTLKQRLRLREPYITPLNLIQAFTLAKIRDQNFHVTEQPTTPRSGDPAKQSSELVSLNRTTEYPPGLEDTLIITMKGIAAGMQNTG

SEQ ID NO: 43026 - protein, 368 aa, Sphagnum palustre
SDSGKDAGRLSAAWQMFKAQEDLVKVAKEYGVKLTMFHGRGGTVGRGGGPTHLAILSQPPDTINGSLRVTIQGEVIEQSFGEEHLCFRTLQRFTAATLEHGMHPPIAPKPEWRALMDSMAVVATEEYRSIVFQNPKFVAYFRAATPEMEYGRMNIGSRPSKRKPSGGIESLRAIPWIFAWTQTRFHLPVWLGLGRALSHALDTDPKNITTLRQMYNKWPFFRVTIDLVEMVFAKGDPRIAALYDSLLVSPEFKPFGEELRQKYNETRNNLLRVAGHDDVLAGNPTLKQRLRLREPYITPLNVQQAYTLKKMREENKQLNITQNGELAKPTKRATELVKLNTTTEYAPRLEDTLILTMKGIAAGMQNTG

SEQ ID NO: 43027 - protein, 261 aa, Gossypium hirsutum
MCGGAIISDFVAVKHDPKLTGDDLWSEIDIFSDLLGFDNNGKSFVNHQFHNNNKKLINPKDNQLNKERSETIQKTSRVTKNVEKTQRTRKNFYRGIRQRPWGKWAAEIRDPQKGVRVWLGTHNTAEEAARAYDEAAKRIRGDKAKLNFPQTPTKNQAASPALTQLPPAKKRCIVPELTQPSFQTDSPPYPMGLGSGRSEDYKPIEVVESELELKEQIWSLESFLGLETNHETMTQLSGNGGTDSLELWTLDDLVTQYKQRR

SEQ ID NO: 43028 - protein, 384 aa, Bartonella quintana str. Toulouse
MSGLIKTAGLQKLAHYKRIVVKIGSALLVEPQTGLRAEWLKSLINDVAKLHQKGVEILLVSSGAIALGRTLLRLPRGALKLEESQACAALGQIELAKTYGDALAQYGLKTGQILLTLLDTEERRRYLNARATINVLLRFGAVPVINENDTVATSEIRYGDNDRLAARVATMMGADLLILLSDIDGLYTKSPHRDPTAEFIPFIASITSDIEKMADVAASELSRGGMKTKLDAGKIANSAGTAMVITSGKRMNPLAAIDRGERRSFFAASEKPVNAWKTWISGHLGPSGILTIDPGAAKALESGKSLLAAGVIAVDGMFHRGDTVAIVDTNGVEIARGLVSYGKNEAVRIMGCKREEIESILGYEARSAMVHRNDMVLRCLTDST

SEQ ID NO: 43029 - protein, 412 aa, Bartonella quintana str. Toulouse
MKDMGQKARHAAALLAVMSSEQKNKALEMIALSLEAQSAEILQANHQDLVNAAQNNLNVAMVDRLKLDKVRLCTIIDSVRQVACLPDPVGQVMSEWTRPNGLHIRRVRTPLGVIGIIYESRPSVTIDASILCLKSGNAAILRGGSDSFHSAHALHSALVKGLKEAGLPQDAIQMVGTKDRDVVGEMLKGLDGAIDVIVPRGGKDLVARVQSDARVPIFAHLEGLCHIYIDQSADLDMARNIVLNAKLRRTGICGAVETVLIDRQALKKFLPVLTALQEKGCEIRATEDIVFLLPDVKLASEEDWSQEYLDAILSVKTVEGIEGAIAHIRRYSSGHTESIIAEDMKVVKIFFNCLDSAILLHNASTQFADGGEFGFGAEIGIATGKMHARGPVGVEQLTSFQYHVKGNGQVRS

SEQ ID NO: 43030 - protein, 573 aa, Lycopersicon esculentum
IRHESTVTGGVQDVYGEDSATEDQSITPWTLSVASGFSLLRNPHYNKGLAFSERERDTHYLRGLLPPVVISHDLQVKKMMNSIRKYDVPLQRYMAMMDLQEMNERLFYKLLIDNVEELLPIVYTPTVGEACQKYGWIFKRPQGLFFSLKEKGKIHEVLKNWPEKKIQVIVVTDGERILGLGDLGCQGMGIPVGKLSLYSALGGIRPSACLPVTIDVGQTMKFVDDEFYIGLRQRRATGQEYSELLDEFMYAVKQNYGEKVLIQFEDFANHNAFNLLAKYGTSHLVFNDDIQGTASVVLAGLMAALNLVGGSLSEHTFLFLGAGEAGTGIAELIALEMSKQTGIPLEETRKKIWMVDSKGLIVKSRMEMLQHFKRPWAHDHEPVQELVNAVKSIKPTVLIGSSGAGRTFTKEVVQAMATFNEKPIIFALSNPTSQSECTAEEAYSWSEGRAIFASGSPFAPVEYNGKVYASGQANNAYIFPGFGLGLIISGAIRVHDDMLLVASEALADEVSQENFEKGTHIPPFSNIRKISAHIAKVAAKAYELGLATRLPQPKDLVAYAESCMYSPAYRSYR

SEQ ID NO: 43031 - protein, 695 aa, Oryza sativa
MELAGPTEGDGGGSVDSQLWAACAGSMSSVPPVGAAVYYFPQGHAEQASAAVDLSSARVPPLVPCRVVAVRFMADAESDEVFAKIRLVPLRPGDAVVDVGEAAAAEARREEENSRPRPTSFAKTLTQSDANNGGGFSVPRFCAETIFPELDYSSEPPVQSVCAKDVHGVEWTFRHIYRGTPRRHLLTTGWSPFVNKKQLTAGDSIVFMRDEGGNIHVGLRRAKRGFCSIGGDDESLSSIPGWDQYRGLMRRNATATATGGRTPPKGKVPPENVLTAATRATTGQPFEVLYYPRASTPEFCVRAAAVRTAMAVQWCPGMRFKMAFETEDSSRISWFMGTVAGVQASDPVRWPQSPWRLLQVTWDEPELLQNVKRVCPWLVELVSSMPNLHLPSFSPPRKKPRNPPYAELPLEGQIFTGPVFPPNPMAHDHHHHHGFPFLPFPDSSAQPAGIQGARHAQFASPFPEFHIGNLQPNLMLYAGIRLPPADRAAPAPRPPRIIISTDLTIGSPGKPDDAACSPSSGGKKIDDTKPRGFLLFGQAILTEEQIKNGNSDGRPASPNWDAEKAPNTSEGSDSGVTQGSPTKNTTPSWSLPYFGGNNISRASEYELNPGQCKVFVESETVGRSLDLSALSSFEELYACLSDMFSIGSDELRSHLVYRSPAGEVKHAGDEPFCAFVKSARKLRILTDAGSDNLGD

SEQ ID NO: 43032 - protein, 545 aa, Porphyromonas gingivalis
MAKEIKFDMESRDLLKKGVDALANAVKVTLGPKGRNVILSKTYGAPHITKDGVSVAKEIELECPFENMGAQLVKEVASKTNDDAGDGTTTATILAQSIIGVGLKNVTAGANPMDLKRGIDKAVKAVVTHIAGMAKEVGDDFQKIEHVAKISANGDENIGSLIAEAMRKVKKEGVITVEEAKGTDTTVEVVEGMQFDRGYISPYFVTNTDKMEVQMENPFILIYDKKISVLKEMLPILEQTVQTGKPLLIIAEDIDSEALATLVVNRLRGSLKICAVKAPGFGDRRKAMLEDIAILTGGTVISEETGLKLENATMDMLGTAEKVTVDKDNTTIVNGAGNKEGIASRITQIKAQIENTTSDYDREKLQERLAKLAGGVAVLYVGAASEVEMKEKKDRVEDALSATRAAIEEGTVPGGGTAYIRAIAALEGLKGENEDETTGIEIVKRAIEEPLRQIVANAGKEGAVVVQKVKEGKDDFGYNARTDVFENLYSTGVIDPAKVTRVALENAASIAGMFLTTECVIADKKEDNPAAPAMPGGMGGMGGMM

SEQ ID NO: 43033 - protein, 207 aa, Arabidopsis arenosa
MASFEESSDLEAIQSHLFEDLLACDGFMGDFDFDASFVSGLWCIESQVPKQEPDSPVLDPDSFVNEFLQVEGESSSSSSPELNSSSSTYETDQSVKKAERFEEEEEARHYRGVRRRPWGKFAAEIRDPAKKGSRIWLGTFESDVDAARAYDCAAFKLRGRKAVLNFPLDAGKYEAPANSGRKRKRSDVQEELQRTQSNSSSSSCDAF

SEQ ID NO: 43034 - protein, 300 aa, Zea mays
  misc_feature (88)..(88): Xaa can be any naturally occurring amino acid
  unsure (1)..(300): unsure at all Xaa locations
SGAFTHCCCSVLASGSHRSADDCLLCPSFPSQWQAEDLQCLPSSARPTPPAAQHRGRGETQDHQLAWVQQSKKKKFRGVRQRHWGSWXVSEIRHPLLKRRVWLGTFETAEEAARAYDEAAVLMSGRNAKTNFPVLPCGRTRGGGGGGGSSGNNTNASASASASTSTSSLSQSQVLSAKLRRCCKAPSPSLTCLRLDPERSHIGVWHKGAGARADSSWVMTVQLSDKDAAPAPSATSSATATTTTAASHPPPATVVVVDDEERIALQMIEELLGGGGGPVSQQPLGNGMLQIAAAGGGLVI

SEQ ID NO: 43035 - protein, 1138 aa, Synechocystis sp. PCC 6803
MVISATVISMKSPLRRLLLSPVLPILIGAGLSVMTVHTWLFLYNQVQERLKQVLTNRLTNIHEQIENQLNIHVRQLEQMAGRWERSPTGTEQTDWRLDARAQAEGFDGYQTIQWVDPKFVVRWVEPLPDDEHDIDYANQYPHQIQSLELAARQKNTILSGVVDLDQGEKGFLVYVPLFIGDRFDGFVVGVFQLDQFIGSVRPLSGNKPDQDSGLRSFGLRIFEGNQLIYNDVPDDWEQDIVVTQELAWANSLPQAEAMTSRWQLQLVPGPILLDQYGSSQWILFSGLLMAWAVAIAVYYLQKSSKHSEQLSESIKQQQKVEEFLKSTLQELAVQKTALDEAAIVAITDTEGVITYVNDKFVEVSGYSREELIGNTHRLVSSGYHSPEFFQQFWQTIRAGKVWHGQINNRAKAGNTYWVDSTVVPFLDDNGNPYQYLAIRFEITSSKQAEKSLRESEARFRMMADTSPIMLWVADQDKKMTFVNQSWLEFRGATLAEESGNGYLEGIHPDDKGHYLGVYSQAFGDPRRFELEYRYRRVDQQYRWIVNVGVPRYLEDGKFMGYVGSCLDITDRKQAQDILQKKLNQILLMRKISQEIRRSLQPTLIFQTAARQVGNVFAVSRCLIHNYSEATTLQVPVVAEYLGGQFTSLLAGEIAVQQAYDPTIIQGDRAMAVVDLDQDLNSTHTKAFYQRFQVKSFLAVRTSYQGKANGIIALHQCDRQRVWTADEIELLEAIAEQMGIALAQAALLEKERERRRELAQKNLELEKATWAAEAANRAKGEFLAMMSHEIRTPMNGVIGMSELLIMTDLNLQQLDYVQTIRQSGETLLTIINDILDFSKIEADKLVLETQAFELRPLIETVLEMFGPIARAKHLELTYGIDPQTPARILGDQVRLRQILSNLIGNALKFTEKGEVVLTVKGEPFDPAESYHTILNLPHPSHRICFNLRDTGIGIPLDRQDRLFKSFSQVDSSTTRKYGGTGLGLVISQRLTQMMGGVLTVTSEPGVGSNFRFCILTTAQAPALAEADSVQQMKGKQVLIVDDNETNRRILQDQCQAWGLVCHCFTSGESALDWFARCPDLDAAILDLQMPNMDGITLAHHLRQFAQGKDLPIILLSSLVAGGMSCLYFRRCSINQCVSP

SEQ ID NO: 43036 - protein, 326 aa, Triticum aestivum
MDYMNGPGRNHLFVPGPVNIPDQVIRAMSRQNEDYRSPAIPALTKTLLEDVKKIFKTTTGTPFLFPTTGTGAWESALTNTLSPGDRIVSFSLGQFSLLVDGVSSICALDFRMDEWGVDVALTGSQKALSLPTGLGIVCASPKALEAAKTAKSVRVFFDWKDYLKFYKMGTYWPYTPSIQLLYGLRAGLDLLFEEGLDNVIKRHTRLGTATRLAVAAWGLKNCTAKEENFSDTVTAVVVPPYIDSSEIVKHAWKRYNLSLGLGLNKVAGKVFRIGHLGHLNELQLLGCLGGVEMVLKDIGYPVKLGSGVAAAAAYLSNSTPLIPSRI

SEQ ID NO: 43037 - protein, 202 aa, Capsella rubella
MNILNRLGLGSSGQSNMDPSPIAQGKDDDAPSPGNQFAQFGAGCFWGVELAYQRVPGVTQTEVGYTQGIVHNPSYEDICKGTTNHTEVVRVQYDPNDCSYESLLDLFWSRHDPTTLNRQGNDVGTQYRSGIYFYTPEQEKLARASLERHQEQLDRKIMSEILPAKKFYRAEDHQQQYLSKGGRFGLGQSTAKGCNDPIRCYG

SEQ ID NO: 43038 - protein, 362 aa, Zea mays
MGRAPCCEKVGLKRGRWTAEEDQLLANYIAEHGEGSWRSLPKNAGLLRCGKSCRLRWINYLRADVKRGNISKEEEDIIIKLHATLGNRQAKKHDRYHAFGSHYEAAAAQPAAMITWSLIASHLPGRTDNEIKNYWNSHLSRQIHTYRRKYTAGPDDTAIAIDMSKLQSADRRRGGRTPGRPPKTSASRTKHSDADQPGGEAKGAAASSPRHSDAVNPGPNQPNSSSGSTGTAEEEGPSSEDASGPWVLEPIELGDLWGEADSEMDALMPIGPGGHDSAALQGLGAVGGEAQVDDLFDMDWDGFAAHLWGGPEQDDHSAQLRQAAEPMEAAAVAAAAAAATAACTPDDRELEAFETWLLSDSF

SEQ ID NO: 43039 - protein, 364 aa, Pseudomonas putida
MNSAIGPYKGGLRFHPSVNLGVLKFLAFEQTFKNSLTSLPMGGGKGGSDFDPKGKSDAEVMRFCQAFMSELYRHIGADVDVPAGDIGVGAREIGFLFGQYKRLSNQFTSVLTGKGMTYGGSLIRPEATGFGCVYFAEEMLKRRGQSVEGKRVAISGSGNVAQYAARKVMDLGGKVISLSDSEGTLYCEAGLSEAQWLALLELKNIKRGRISELASAHGLEFRAGQHPWSLPCDIALPCATQNEVDAGAARTLLRNGCVCVAEGANMPTTLAAVDIFIEAGILFAPGKASNAGGVAVSGLEMSQNAMRLLWTAGEVDSKLHAIMQSIHHACVHYGEDNGQINYVKGANIAGFVKVADAMLAQGVV

SEQ ID NO: 43040 - protein, 464 aa, Legionella pneumophila subsp. pneumophila str. Philadelphia 1
MVLEFDTIILGGGKGGKTLAMDLAKSGQKIAMVENNQIGGTCINVACIPTKTLVQSAKVAHYCRKAKDYGLNTTLHPIDFKAIRARKDAVVKGMREANLKQFLDSGMDLMLGHGHFIGPKMIEVTLSSPRDKQKTLHITADKIIINTGALPFIPPIAGLDKVNYFTNDSLMNTDLVPQHLLIIGGGYIGLEFAQMFRRFGAEVTVIEASSEFLGREDKDIAEQVFQTLSNEGIQFAVDTKINAIRQEQTEVIIEANRQGQSEIIRGTAVLVAVGRIANTAGLHLDKTGVELDERGFIKVNEFLETTAAGIWALGDVKGGAQFTHLSLDDYRLVKHNLQNPQKKLSSQNRLIPYTVFLDPELARIGLTEAQARSQGRRIKIATIPAAAIPRAKTQGETTGILKAVIDAETDLILGVSIFCAEAGEILGVIQLAMELRVPYQKLRDMMFAHPTLVEGINLWFAQII

SEQ ID NO: 43041 - protein, 397 aa, Dehalococcoides ethenogenes 195
MSDNNLANIKSAVIKMIDTEKGSLEELSLKLHANPELGYQEYKAVEWLCEYLSRHNFSIERNTGGLKTAFKATFGQGKPVIGFLAEYDALPQLGHACGHNLIATAAAGAAVAARLAAKLYGGTVCLIGTPAEELSGGKIQMVEKGVFKELEAALIAHPGNDDIATTQALACVTLNVEYFGKESHAAAHPDKGINALDAIVLAYTSLNSLRQHIEPGARIHGIITDGGKAANIVPGHSAGTFLIRSQTLPYLRELMDRVLDCFKSAAQATGARLEYRFDKSIYAPMNNNMALANLYVKNMDMLGHRTLLEDPEMNFGSTDMGNVSQVVPSLHGYYAITGKDVSGHTPEFASAACSAKGIKGALDAAKAMAMTAADLFGSSANLEKVKTEFQKSTRPSA

SEQ ID NO: 43042 - protein, 392 aa, Prochlorococcus marinus str. NATL2A
MKAMILAAGKGTRVQPITHVIPKPMIPILQKPVMEFLLELLKEHGFTEVMVNVSHLAEEIENYFRDGQRFGVEIAYSFEGRIEDGELIGDALGSAGGLKKIQDFQKFFDDTFVVLCGDALIDLDLSEAVKRHKEKGALASLITKRVSKDQVSSYGVVVTDEEDRVKAFQEKPSIDNALGDTINTGIYLFEPEIFNYIPSGKPFDIGSDLFPKLVEEGAPFYALPMDFEWVDIGKVPDYWRAIRNVLKGDVRQVEIPGKQVRPGIYTGLNVAANWDKINVKGPIYVGGMTRIEDGVTIVGPSMIGPSCCICEGATIDNSIIFDYSLIGPGVQLVEKLVFGRYCVGKEGDHFDLQEAALDWLITDARRQDLGEPSPQQKAMAELLGTDLIGSSN

SEQ ID NO: 43043 - protein, 665 aa, Colletotrichum trifolii
MDNNNNRLYLNIGNNNDRLGPGSDRQYPTTPSTFPQPVFPHQGQQQQQQQQQQLHHQQQPGMQHPQQYQAQQQQQQQQQQQQQQPYQTGYAPSGYFNPNQQAAQYPPQGHGDYNAAYQPRSNTPGTNDPNVGLAHQFSHQNLGGAARASPYGSRGPSPGQRPRTAGASGQPPSGYGHYATPPLPNQQPASVDPFAPAPERNYEKYGPNANGNQKKCTQLASDFFKDSVKRARERNQRQSEMEAKLSEPNQSQSRREQIWSTAGRKEGQYLRFLRTKDKPENYNTVKIIGKGAFGEVKLVQKKGDGKVYAMKSLIKTEMFKKDQLAHVRSERDILAESDSPWVVKLYTTFQDSYFLYMLMEFLPGGDLMTMLIKYEIFSEDITRFYIAEIVLAIEAVHKLGFIHRDIKPDNILLDRGGHVKLTDFGLSTGFNRLHDNNYYQQLLQGRSNKPRDRNSVAIDQINLTVSNRSQINDWRRSRRLMAYSTVGTPDYIAPEIFTGHGYTFDCDWWSLGTIMFECLVGWPPFCAEDSHDTYRKIVNWRQTLYFPDDIQLGVEAENLIRSLICNTENRLGRSGAHEIKAHSFFRGVEFDSLRRIRAPFEPRLTSAIDTTYFPTDEIDQTDNATVLKAQAIQQARSGIPQVEESPEMSLPFIGYTFKRFDNNFR

SEQ ID NO: 43044 - protein, 371 aa, Scleropodium purum
SDSGKDAGRLSAAWQMFKAQEDLVKVAKQYGVRLTMFHGRGGTVGRGGGPTHLAILSQPPDTINGSLRVTVQGEVIEQSFGEEHLCFRTLQRFTAATLGHGMHPPIAPKPEWREIMDKMAVISTKEYRAVVFQNPKFVEYFRTATPELEYGRMNIGSRPSKRKPSGGIESLRAIPWIFAWTQTRFHLPVWLGLGSALKEVLQTDPRNIAILRRMYNQWPFFRVTIDLVEMVFAKGDPRIAALYDNLLVSDEVKPLGDELRRKYNETREYLLRVAGHEDILQGNPTLKQRLRLREPYLTALNVQQALVLKKMRDSSSQFCALQNGNSGEVPKSPRRAAELVELNPTTEFPPGLEDTLILTMKGIAAGMQNTG

SEQ ID NO: 43045 - protein, 204 aa, Shigella boydii
RRELKARHLTMIAIGGSIGTGLFVASGATISQAGPGGALLSYMLIGLMVYFLMTSLGELAAYMPVSGSFATYGQNYVEEGFGFALGWNYWYNWAVTIAVDLVAAQLVMSWWFPDTPGWIWSALFLGVIFLLNYISVRGFGEAEYWFSLIKVTTVIVFIIVGVLMIIGIFKGAQPAGWSNWTIGEAPFAGGFAAMIGVAMIVGFS

SEQ ID NO: 43046 - protein, 244 aa, Pseudomonas syringae pv. phaseolicola 1448A
MGTINNVRNTLQIGLVGDFNADVPAHQAIPLALAMAAETVHVPVSFEWLPTPRIGSGARLGEFDGLWCVPASPYLDMQGALTAIRFARERLVPFLGTCGGFQHALVEYARNQLGWADAEHGETAPQAANVIIEPLSCSLVESVAAIHLQPDTLIAQAYGTLNIEERYHCRYGLRRELEPALFGDALKVSGRGPEGEVRSIELQGHPFFVATLFQPERAALQGKVSPVVAAFVRACSQAAQRNRS

SEQ ID NO: 43047 - protein, 364 aa, Vanilla aphylla
  misc_feature (134)..(134): Xaa can be any naturally occurring amino acid
  unsure (1)..(364): unsure at all Xaa locations
SDSGKDAGRLSAAWQLYKAQEDLIKVAKKYGVKLTMFHGRGGTVGRGGGPTHLAILSQPPDTIHGSLRVTVQGEVIEQSFGEEHLCFRTLQRFTAATLEHGMHPPISPKPEWRTLLDEMAVVATNEYRSIVFQXPRFVEYFRLATLELEYGRMNIGSRPSKRKPSGGIESLRAIPWIFAWTQTRFHLPVWLGFGTAFKHVVQKDIKNLRILQEMYNEWPFFRVTIDLVEMVFAKGNPGIASLYDKLLVSEDLLPFGERLRANYQETKDLLLQVAGHKDLLEGDPYLKQRLRLRDSYITTLNVCQAYTLKRIRDPSFHVKVRPHISKEISDASKPAAELVKLNPMSEYAPGLEDTLILTMKGIAA

SEQ ID NO: 43048 - protein, 160 aa, Triticum aestivum
MHHHGIAAKTASHLPLLPAPAAKPGSPKKRGKTEVNESLLTPRFYTTDFDEMEQLFNAEINKQLNQDEFDALLQEFKTDYNQTHFIRNPEFKEAADKMQGPLRQIFVEFLERSCTAEFSGFLLYKELGRRLKKTNPVVAEIFSLMSRDEARHAGFLNKGL

SEQ ID NO: 43049 - protein, 623 aa, Amaranthus hypochondriacus
MLVLCSRSRLTSSLIRRLKDQIANVSNHRSFATSEGHRLAIVNKRSLDILQDPWFNKGTAFSMTERDRLDLRGLLPPNVMTTEQQIERFTADLRVLELTTKDGPSDTYDLAKWRILNRLHDRNETMFFKVLIENIEEYAPIVSTPTVGLVCQKFSGLYRRPRGMYFSSDDRGEMMSMVYNWPAEQVDMIVVTDGSRILGLGDLGVHGIGVAIGKLDLYVAAAGINPQRVLPVMIDVGTNNEDLLKNPLYLGLQKKRLDGEEYLAVMDEFMEAVFTRWPNVIVQFEDIQNKWALTLLQRYRHKYRTFNVDVQGTSGVAIAGLLGAVRAQGRPMIDFPKQKIVVAGAGSSGVGVLNAARKTMARMLGNDESAFDRARSQFWVVDDKGLITEKRANLDPEVQPFAWKENEISLQGLNEGAKLVEVVRQVKPDVLLGLSAYGGLFSKEVLEALKDSTSTRPAIFAMSNPTKNAECTPEEAFSIVGDHVVYASGSPFKDVDLGNGKIGHVNQGNNMYLFPGIGLGVLLSGSRIISDSMFQAAAERLAGYMTDEEVINGVIYPSISRIRDITKEVAAAVIKEAVEEDLAEGYRDMDARELQKLNEEQILEYIEKNMWNPEYPTLVYKKR

SEQ ID NO: 43050 - protein, 364 aa, Vanilla pompona
SDSGKDAGRLSAAWQLYKAQEDLIKVAKKYGVKLTMFHGRGGTVGRGGGPTHLAILSQPPDTIHGSLRVTVQGEVIKQSFGEEHLCFRTLQRFTAATLEHGMHPPISPKPEWRTLLDEMAVVATNEYRSIVFQEPRFVEYFRLATPELEYGRMNIGSRPSKRKPSGGIESLRAIPWIFAWTQTRFHLPVWLGFGTAFKHVVQKDIKNLRILQEMYNEWPFFRVTIDLVEMVFAKGNPGIASLYDKLLVSEDLWSFAERLRANYQETKDLLLQVAGHKDLLEGDPYLKQRLRLRDSYITTLNVCQAYTLKRIRDPNFHVKVRPHISKEISDASKPAAELVKLNPTSEYAPGLEDTLILTMKGIAA

SEQ ID NO: 43051 - protein, 198 aa, Shigella boydii
RELKARHLTMIAIGGSIGTGLFVASGATISQAGPGGALLSYMLIGLMVYFLMTSLGELAAYMPVSGSFATYGQNYVEEGFGFALGWNYWYNWAVTIAVDLVAAQLVMSWWFPDTPGWIWSALFLGVIFLLNYISVRGFGEAEYWFSLIKVTTVIVFIIVGVLMIIGIFKGAQPAGWSNWTIGEAPFAGGFAAMIGVAM

SEQ ID NO: 43052 - protein, 193 aa, Shigella boydii
IAIGGSIGTGLFVASGATISQAGPGGALLSYMLIGLMVYFLMTSLGELAAYMPVSGSFATYGQNYVEEGFGFALGWNYWYNWAVTIAVDLVAAQLVMSWWFPDTPGWIWSALFLGVIFLLNYISVRGFGEAEYWFSLIKVTTVIVFIIVGVLMIIGIFKGAQPAGWSNWTIGEAPFAGGFAAMIGVAMIVGFS

SEQ ID NO: 43053 - protein, 645 aa, Xanthomonas oryzae pv. oryzae KACC10331
MPGVTLHALFYSSRDSEMSDWSLDQARKTYSIPHWADGYFDVNAAGHVVVTPTADGPAVSLPEVVDAARAAGAKLPLLVRFPDILGQRLGKLQAAFAQAQSEWDYAGGYTAVYPIKVNQHRGVAGTLASHHGDGFGLEAGSKPELMAVLALSRPGGLIVCNGYKDREYIRLALIGRKLGLQTFIVIEKPSELNLVLEEARALDVKPGLGVRMRLASLGAGKWQNSGGDKAKFGLSPRQVLDLWKTLRDTEYADSLNLLHFHMGSQISNVRDIANGMREATRYFVELSRLGAKISHVDVGGGLGIDYEGTRSRSYCSINYGLHSYASNIVQPLASACEEHGLAPPRIVTECGRAMTAHHAVLIANVSEVEQAPEGRVPDAHADEPAAIRHLREIHDELDVRPAVELFQEAQHFHAEGLSAYALGQIDLTHRARIDDLFYAIAHGVRARLSFDEKSHRPVLDELNERLVDKYFVNFSVFESIPDVWAIDQVFPIVPIERLNEAPQRRGIIADMTCDSDGMVKTYVENESLDSSLPLHSLNAGESYRIGFFLVGAYQEILGDIHNLFGDTDAVEVAVDGDGYRIAQQRRGDTTDVMVDYVGYHLDTLRATYAERIAAAQLPPERAQELSAALEAGLTGYTYLSDEPLG

SEQ ID NO: 43054 - protein, 363 aa, Vanilla phalaenopsis
SDSGKDAGRLSAAWQLYKTQEELVQVAKQFGVKLTMFHGRGGTVGRGGGPTHLGILSQPPDTILGSLRVTVQGEVIEQCFGEERLCFRTLQRFTVATLEHGMHHHISPKPEWRSLMDEMAVIATKEYRSIVFQEPRFVEYFRLATPELEYGRMNIGSRPAKRKPSGGIESLRAIPWIFAWTQTRFHLPVWLGFGAAFKHVITKDIRNLHILREMYNGWPFFRVTIDLIEMVFTKGNPGIASLYDELLVSNDLLSFGMELKANYEETKRLLLQVAGHKDLLEGDPHLKQRLRLRDPYITTLNVCQAYTLKRIREPSYHAMAPHHVSNETESRKSAAELVKLNPTSEYAPGLEDTLIITMKGIAA

SEQ ID NO: 43055 - protein, 284 aa, Glycine max
  misc_feature (106)..(106): Xaa can be any naturally occurring amino acid
  misc_feature (151)..(151): Xaa can be any naturally occurring amino acid
  unsure (1)..(284): unsure at all Xaa locations
TRPATGWGLEIPELKKQLEAAKSKGINVRALVVINPGNPTGQVLGEANQRDIVEFCKQEGLVLLADEVYQENVYVPEKKFHSFKKVSRSMGYGENDITLVSFQSGXRGGYMEVTGFSAEVREQIYKVASVNLCSNISGQILASLVMSPPKXLQVGDESYDSFNAEKENILESLARRAKTLEDAFNKLEGVTCNKAEGAMYLFPQIRLSQKAIKAAGDANTAPDNFYCKRLLNATGVVVVPGSGFGQVPGTWHFRCTILPPEEKIPAIVTRLTEFHEKFMDEFRD

SEQ ID NO: 43056 - protein, 289 aa, Wolbachia endosymbiont of Drosophila simulans
VDEFNKAVGRCKQSLISLMIHCEIQDKLDAVSLKCNSGQITFNNVKFHYDGTEPLFQNKSIAIKAGQKVGLVGYSGGGKSTFVNLILRLYDVTDGAILIDDQDICNVTQDSLRAKIAMIPQDPSLFHRTLMENIRYGKTNASDDEVIEAAKKAHVHEFISKLPQGYDSLVGERGVKLSGGQRQRIAIARAILKNAPILILDEATSQLDSVTESNIQESLWELMQDKTTIVIAHRLSTLLHMDRILVFDQGKILEDGTHQELLDKNGMYKTLWNAQVGGFLPDKKEVEIV

SEQ ID NO: 43057 - protein, 179 aa, Triticum aestivum
  misc_feature (100)..(100): Xaa can be any naturally occurring amino acid
  misc_feature (106)..(106): Xaa can be any naturally occurring amino acid
  misc_feature (132)..(132): Xaa can be any naturally occurring amino acid
  misc_feature (144)..(144): Xaa can be any naturally occurring amino acid
  misc_feature (170)..(171): Xaa can be any naturally occurring amino acid
  misc_feature (175)..(175): Xaa can be any naturally occurring amino acid
  unsure (1)..(179): unsure at all Xaa locations
MAPTVMASSATSVAPFQGLKSTAGLPVSRRSNGASLGSVSNGGRIRCMQVWPIEGIKKFETLSYLPPLSTEALLKQVDYLIRSKWVPCLEFSKVGFIFRXSTNASXPGYYDGRYWTMWKLPMFGVQPDATQXVINEVEEVKEGXPDAYVRIIGFDNMRQVQWVSFNCLKXXGCEXSGKG

SEQ ID NO: 43058 - protein, 480 aa, Arabidopsis thaliana
MIHFYSSSLHSSKFLDGFRYHSLSVIRSEARSFNVTTTRKEVVVAAAPLLSLPENRVIPLSNLDLLIPPVDINVCFFYKKPLYGIIGDALKTAMAEALVSYYVLSGEVSINPTNGENEILCSNGGVEFVEAAADVELRELNLYEPYQSIAKFVPMKKHGVFAIQVTELKCGSVVVGCTFDHRIADAYSMNMFLVSWAEISRSDIPISYVPLLKRSLLKPRRPLIIDSSIDKLYMPITSLTVPQEITNQDNILTSRIYYIKADVLEKFQTLATNGKRTKLESFSAFLWKLLAKHAATESVLPTKTSKLGIVVDGRKKLMEQENCNYFGNVLSVPFGERRIDDLIHKPLSWVTDEVHKLLESTMTKDHFLNLIDWVETSRPIPVISRIYSTGSNDGPAFVVSSGKSFPVARIDFGWGSPVFGSYHLPPGSRAGYVMTMPSPVENGGSGDWTVYLHLTKGQLRFIEQEASHVFNPVDNDYLKI

SEQ ID NO: 43059 - protein, 683 aa, Coxiella burnetii RSA 493
MGRQNWKIKNLEVCMEVSTTRIHKPILKKLGSLFLNLAETSQDIFWIRSVDFYTHVYVSPAFENIFGISRQTLYANPNKWMNAVIIEDRDRLRHLIMEWQVKNKKGAAYTVDYRIIDAYGEMHWINETSYPVYEDDQCLGYAGVVKDVSSEKLRVKEFDNAVHYFRHFVERVSGVFWVKGSRGDKQIYISPTYEKIWGVSCESLYQNPKSWIDYVLPEDISNGKVNVNFYETAADQRTPDSKYEFHFRIRRPDGEIRWIKDTYFPIMENGKLVGFAGIAEDVTNDALREKELWEAKEFAEQANRTKSDFLAMMSHELRTPLNAILGMSQILKTHNLSDEQQGQIDVISQAGQNLLALLNDLLDFAKLEAGKLSFTEETMDLHELVMKIKGDMLLLAHKKGIQLKFDYPENIPSKVMGDAKRIRQVLVNLLSNALKFTEKGYVQLTANCLKKDHKKMTLCFTVKDTGIGMEKTKLSSIFNRFQQINSVYQRKYDGVGLGLSIVKELLEKMGGTISVTSEPGVGSEFTCIIPFRLQADSNPTLPARDLLEKQAVNNSTYDRESRFNMNVLVVEDNLINQRISKIMLEQVGCQVDIAGCGKDAIEKMKKHYDMVFMDIGLPDMDGFETTQCIRHNETPGQRVPIVAMTAHVFAQDRKRCFDVGMDEVMAKPIMQDDLIKVLKRWAA

SEQ ID NO: 43060 - protein, 396 aa, Staphylococcus epidermidis RP62A
MTQSEKIINLTNHYGAHNYVPLPIVISEAEGVWVKDPEGNTYMDMLSAYSAVNQGHRHPRIIQALKDQADKVTLVSRAFHSDNLGQWYEKICKLAGKDKALPMNTGAEAVETALKAARRWAYDVKGIEPNKAEIIAFNGNFHGRTMAPVSLSSEAEYQRGYGPLLDGFRKVEFGDVNQLKAAINKNTAAILVEPIQGEAGINVPPEGYLKTIRELCDEHQILFIADEIQAGLGRSGKLFATDWDHVKPDVYILGKALGGGVFPISVVLADNEVLDVFTPGSHGSTFGGNPLASAVSIAAIDVIIDEDLPGRSLELGEYFKSELKKIEHPSIKEVRGRGLFIGIELHESARPYCEALKEQGLLCKETHDTVIRFAPPLVITKEELDMALEKIKSVFA

SEQ ID NO: 43061 - protein, 537 aa, Bacteroides thetaiotaomicron VPI-5482
MGETKYIFVTGGVASSLGKGIISSSIGKLLQARGYNVTIQKFDPYINIDPGTLNPYEHGECYVTVDGHEADLDLGHYERFLGIQTTKANNITTGRIYKSVIDKERRGDYLGKTIQVIPHITDEIKRNVKLLGNKYKFDFVITEIGGTVGDIESLPYLESIRQLKWELGKNALCVHLTYVPYLAAAGELKTKPTQHSVKELQSVGIQPDVLVLRAEHPLSDGLRKKVAQFCNVDDKAVVQSIDAETIYEVPLLMQAQGLDSTILEKMGLPVGETPGLGPWRKFLERRHAAETKEPINIALVGKYDLQDAYKSIREALSQAGTYNDRKVEVHFVNSEKLTDENVAEALKGMAGVMIGPGFGQRGIDGKFVAIKYTRTHDIPTFGICLGMQCIAIEFARNVLGYADADSREMDEKTPHNVIDIMEEQKAITNMGGTMRLGAYECVLQKGSKAYLAYGEEHIQERHRHRYEFNNDYKAQYEAAGMKCVGINPESDLVEIVEIPALKWFIGTQFHPEYSSTVLNPHPLFVAFVKAAIENEKN

SEQ ID NO: 43062 - protein, 700 aa, Zea mays
  misc_feature (139)..(139): Xaa can be any naturally occurring amino acid
  unsure (1)..(700): unsure at all Xaa locations
MEVNSSGEETVIKVRKPYTITKQRERWTEAEHKRFLEALKLYGRAWQRIEEHVGTKTAVQIRSHAQKFFTKLEKEAINNGTSPGQAHDIDIPPPRPKRKANSPYPRKSGLSSETPTKELPSDKSTKPNMPLSNENVLMXKFQRKELSGKESCSEVLNLFRDAPSPSFSSVNKSSSNHGAPIEASKTKIRDMTIMENSSLNPNMQEDVKEINDQEMERLNGTQISSKCEHSHEGYLDISMQQMKLKPESVETTYVDKQTARASHSLAERTGTTSIPVTATEETHSVLTSDQVGINGSMNLSIHPMFPADPKFDSSATPQPFPHNYAAFAPMMQCNCNQDTHRSLVNMSSTFSSMLVSTLLSNPAIHAAARLAASYWPAAEGNTPIDPNQENLADGVQGRSIGSPPSMASIVAATVAAASAWWATQGLLPFFAPPMAFSFVPAPSAAFPTVDVPRPSEKDRDCPAENAQKECQEARKQGQFEGFRVAASSEYDGSGKGEVSVHTELKISPVQNADATSAAGADTTDAFMNKKKQDRSSCGSNTPSSSDVDVDNVPEKEGNGNEKAKQASCSNSSAGDTNHRRFRSSGSTSDSWKEVSEEGRLAFHALFSREKLPQSFSPPQAEGSKEVGKEEEDEVTTVAVFKYRTRRRYEVLLASGPAFGWRYGRRSSLVYRRPQLQVTKRTAVERFPSISVSFCRIWRWR

SEQ ID NO: 43063 - protein, 204 aa, Capsella rubella
MATIEESSDLEAMQKHLFEDFLVSDGFLGDFDFDASFVSGLWCIEPQVPKQEPDSPVLDPDSFVNEFLQVEAKSSPELNTSSSSTYETDQCVKKAERFEEEVETRHYRGVRRRPWGKFAAEIRDPAKKGSRIWLGTFESDVDAARAYDCAAFKLRGRKAVLNFPLDAGKYEAPANSGRKRKRSDAQEELQRTHSNSSSSSCDAF

SEQ ID NO: 43064 - protein, 323 aa, Oryza sativa
LNMARPLGQQQVGAAAALVIVVACCVVAGCSGARGRGFREEFDVIWGEDHVRVTDEDDAATRQVVALTLDQASGSGFQSKDQFLFGEFSMEMKLVPGESPGTVATFYLTSEGDAHDEIDFEFLGNVSGEPYVMHTNVFAQGRGNREQQFYLWFDPTADFHNYTILWNPLNIIFSVDGKAVRVFKNHEAAGVPYPSGQAMRVHASLWNGDFWATRGGQVKINWTAAPFVASYRTYAYSACAVPAAGGGGGGPCTSGQLPNSTSSPSTCDCGGAWMDRQLGADGERDVAWARANYMIYDYCGDQWRFPQGLPAECSLDQSSGHRT

SEQ ID NO: 43065 - protein, 218 aa, Prochlorococcus marinus str. NATL2A
MLGFLEKVADYTKEAVSAAKYLVDGLGVTFDHMRRRPVTVQYPYEKLIPSERYRGRIHYEFDKCIACEVCVRVCPINLPVVDWVMNKETKKKELRNYSIDFGACIFCGNCVEYCPTNCLSMTEEYELSAFDRHSLNYDNVALGRLPTSVTSDPSVRPLRELPYLPKGIMDPHELPANQLRAGKLPSQIIKELQADKSEEEGKNNSSDMVPNKLNSTNK

SEQ ID NO: 43066 - protein, 308 aa, Bordetella parapertussis 12822
MTQSSQTTSPSADARVKHRYLDLDELRIFYRETGPADAPVVLLPHGYPCSSFQYRDFMPALADQWRLLAPDFPGFGYSDTPDTARFACDFEHYTDFLQQFAHALGLPSYALYLHDYGSQIGLRLAMREPDKVSGLIIQNGDIYEDELGPRYAPLQAYWADPTLEGRYKLSLAVSEEGFRDEFLNDLPEEQAECITPDMWKLAWALLREPRRREIMVGLMEGLEDNLAWFPRYQAYLRERQPPTLIVWGVHDGYMPEAAARAYLRDLPDAELHLLQAGHWALETHLAPIVALTRAFLQRVHATPNFPPP

SEQ ID NO: 43067 - protein, 311 aa, Oryza sativa (japonica cultivar-group)
MAKHFVLNTGAKIPSVGLGTWQSDPGVVGDAVYAAVKAGYRHIDCARMYKNENEVGIALKKLFEEGVVKREDLFITSKLWCDCHAPEDVPESLDKTLSDLQLEYLDLYLIHWPFRVKKGSGISNTEDYIPPDIPSTWGAMEKLYDSGKSRAIGVSNFSSKKLGDLLAVACVPPAVDQVECHPGWQQTKLHNFCQSTGVHLSAYSPLGSPGSTWMNSNVLKESVIISIAEKLGKTPAQVALHWNIQMGHSVLPKSVTEERIKQNIDVYDWSIPEDLLVKFSEIKQVRLLRGDVIVNPHSVYKTHEELWDGEI

SEQ ID NO: 43068 - protein, 375 aa, Prochlorococcus marinus str. NATL2A
MVLKPGLEGVPVTNSGICEINGTEGRLSYRGYPISELAQKSSFLETAFLLIWGELPTENELEKFEKDVQMHRRVSFRIRDMLKCFPESGHPMDALQASAASLGLFYSRRAIDDPKYIYDAVVRLIAKIPTMVAAFEQIRKGDDPIQPQDDLPYSSNFLYMLTEREPNPLAARVFDRCLILHAEHSLNASTFSARVTASTLTDPYAVVASAVGTLAGPLHGGANEDVIAMLEEIGRPDEVSSFLNDAIAKKRKIMGFGHREYRVKDPRATILQAFAEELFSEFGKDEMYEVAKALEEEAISKLGPKGIFPNVDFYSGLVYRKLGIPRDLFTPVFAISRVAGWLAHWREQLGANRIFRPSQIYEGAKMRNWKPLESR

SEQ ID NO: 43069 - protein, 364 aa, Vanilla phalaenopsis
SDSGKDAGRLSAAWQLYKAQEDLIKVAKKYGVKLTMFHGRGGTVGRGGGPTHLAILSQPPDTIHGSLRVTVQGEVIEQSFGEEHLCFRTLQRFTAATLEHGMHPPISPKPEWRTLLDEMAVVATNEYRSIVFQEPRFVEYFRLATPELEYGRMNIGSRPSKRKPSGGIESLRAIPWIFAWTQTRFHLPVWLGFGTAFKHVVQEDIKNLRILQEMYNEWPFFRVTIDLVEMVFAKGNPGIASLYDKLLVSEDLLPFGERLRANYQETKDLLLQVAGHKDLLEGDPYLKQRLRLRDSYITTLNVCQAYTLKRIRDPSFHVKVRPHISKEISDASKPAAELVKLNPMSEYAPGLEDTLILTMKGIAA

SEQ ID NO: 43070 - protein, 397 aa, Bacillus clausii KSM-K16
MNVVGIRERAEQLQDQLITWRRHLHKHPERSFQEKETAAFVAQVLRRLPGMVVTEQVGGYGVVAELAGKQGKTVVLRADMDALPIEEQLPHSFASIKQGTMHACGHDAHTAILLGAATILSERHQAGYRNGTVRFLFQPAEEKMDEAGKTGAIYMIEAGAMAGADIAFALHMCPWLRPNAIQVHSGASMASFDAFKGTITGSGGHGAYPHLGVDAIWLLSQVLPAIYGLTGRFASPLEPAVISIGQIHGGKANNVIPEIVEVEGTIRCYNDDVRKKLTEEVSNAFAVANVFGGEGACTVKRGEPALVNDSEAIALIKQAAHHLYPNDRIVTGPYGLGSEDFAHMAKTTKAAMFFLGCQPRHGEFDLHTPQFQIDEACLSKGAALMAGVCADALNKKE

SEQ ID NO: 43071 - protein, 363 aa, Vanilla phalaenopsis
SDSGKDAGRLSAAWQLYKCQEELVQVAKKFDVVLTMFHGRGGTVGRGGGPTHLAILSQPRDTVNGSLRVTVQGEVIEQSFGEEHLCFKTLQRFTAATLEHGMHPPTSPKEEWRKLMDEMGAISTEVYRSVVFQEPKFVSYFRMATPELEYGRMNIGSRPSNRKPSGGIESLRAIPWIFAWTQTRFHLPVWLGFGTAFKHVVQEDIKNLRILQEMYEEWPFFRVTVDLVEMVFAKGDPRIAALYDSLLVSPDLQEIGKQLRAKYEQTQKLLLQVAGHKELLEGNPTLKQRLRLREPFITTLNVQQAYTLKKMRQADSDPPAVVDPRKPAAELVNLNKTTEYAPGLEDTVILTMKGIAAGMQNTG

SEQ ID NO: 43072 - protein, 202 aa, Shigella sonnei
LKARHLTMIAIGGSIGTGLFVASGATISQAGPGGALLSYMLIGLMVYFLMTSLGELAAYMPVSGSFATYGQNYVEEGFGFALGWNYWYNWAVTIAVDLVAAQLVMSWWFPDTPGWIWSALFLGVIFLLNYISVRGFGEAEYWFSLIKVTTVIVFIIVGVLMIIGIFKGAQPAGWSNWTIGEAPFAGGFAAMIGVAMIVGFSF

SEQ ID NO: 43073 - protein, 321 aa, Candida boidinii
MSSPLLTLNNGLKMPQIGFGCWKVDNATCAETIYEAIKVGYRLFDGAMDYGNEKEVGEGVNKAIKDGLVKREELFIVSKLWNNFHHPDSVKLAIKKVLSDLNLEYIDLFYMHFPIAQKFVPIEKKYPPNFYCGDGNKWSFEDVPLLTTWRAMEELVEEGLVKSIGISNFVGALIQDLLRGCKIRPAVLEIEHHPYLVQPRLIEYAKTEGIHVTAYSSFGPQSFVELDHPKVKDCTTLFKHETITSIASAHDVPPAKVLLTWATQRGLAVIPKSNKKERLLGNLKINDFDLTEAELEKIEALDIGLRFNDPWTWGYNIPTFI

SEQ ID NO: 43074 - protein, 457 aa, Ashbya gossypii ATCC 10895
MSYNNKKRNGSFKRRNGGDYYFPNKRPHHHHQPTGTTSRYNNQVRPPTEPEPAAPAPADVATSAAVAATRQSRFQPHRALPKAPRQVSRYNNGNLPAPPAGPASLRVPATIITHTHSVESSYQRITQVGEGTYGKVYKCRNIYTNKLVALKKLRLETERDGFPITSIREIKLLQHCQHENVSTIAEIMCEAQKTVYMIFEYADNDLSGLLMNKEIHFSDANCKHLFRQLLKGMEYLHECRILHRDIKGSNILIDNRGNLKITDFGLARKMKQEPDYTNRVITLWYRPPELLLGTTRYGTEVDMWGCGCLLVELFLKAAFFQGTNELEQLRCIFQVLGTPTIEQWPGLFDMPWWFMMIPQQKENYPSRFDEKVSGVLPTQSCRDLARGLLLYDQKKRFSASEALKSAYFYELPRPEPLNLGDFDGCHEFEARRQRRKEREETKKAAAASASSASKKSA

SEQ ID NO: 43075 - protein, 203 aa, Shigella sonnei
RELKARHLTMIAIGGSIGTGLFVASGATISQAGPGGALLSYMLIGLMVYFLMTSLGELAAYMPVSGSFATYGQNYVEEGFGFALGWNYWYNWAVTIAVDLVAAQLVMSWWFPDTPGWIWSALFLGVIFLLNYISVRGFGEAEYWFSLIKVTTVIVFIIVGVLMIIGIFKGAQPAGWSNWTIGEAPFAGGFAAMIGVAMIVGFS

SEQ ID NO: 43076 - protein, 212 aa, Prochlorococcus marinus str. NATL2A
MEQNSKSPLSKATNIVWHQSSIDREARFQQRGHRSAILWFTGLSGSGKSTLANAVNVALHKDGYSTYVLDGDNIRHGLCKDLGFSDLDREENIRRIGEVSKLFLDAGIIVLTAFVSPFRVDRDNARSLVGENDFIEIYCSADLGVCETRDTKGLYAKARNGDIKDFTGISSPYEEPESPELKIDTGNLEIDQCVDIVTNLLVERKIISKISK

SEQ ID NO: 43077 - protein, 498 aa, Myxococcus xanthus
MPASVLIVDDEKNILLTLSQSLQLAGYQTHLANSGQVALDVVSARPVDAVLMDVKMPDMDGLTALAKLTELKPELPVIMMSGHGTIDTAVKATQLGARDFLEKPIARERLLVALRNVLKHQAAMAELQELRAQLGRYDMVGSGPAMQRIFSLIQRTAPSEGRVLITGENGTGKELIARALHQHSKRKGQPFVKLNCAAVPHELIESELFGHEKGAFTGAVSVRRGKFELAHEGTLFLDEIGDMPQAMQAKLLRVLQEGELERVGGAETHKVDVRVVAATNKNLEAEIAAGRFREDLYYRINVVQIHSPPLRERREDLPDLIKTFLDEACAKNGRRPLTLSPDALAVMSAYDYPGNVRELRNLVERLAILCEGPIVTRTDALELLPRGRNVPPPAPVETPASPLPPPSPEAAVVLASSTPAPAIAAPVATEPPAPVGFRPRADRTFREQVEDAEREIIQHVLSHTHDNVTEAARLLDLERGHFYKKMKALGLRRGSSES

SEQ ID NO: 43078 - protein, 411 aa, Pseudomonas syringae pv. syringae B728a
MRALTYHGANSVKVDTVPDPVIEQADDIILRVTATAICGSDLHLYRGKIPTVEHGDIFGHEFMGVVEETGSAVTAVAKGDRVVIPFVIACGSCFFCNLDQFAACETTNTGRGAILNKKSIPPGAALFGFSHLYGGVPGGQAEYVRVPKANVGPFKVPGTLADEKVLFLSDILPTAWQAVLNAGIGQGSTVAIYGAGPVGLMSAACAKMLGAEKIFMVDHHPYRLAYAQKTYGVIPINFDEDDDPADTIIRQTAGMRGVDGVIDAVGFEAKGSTTETILATLKLEGSSGKALRQCIAAVRRGGVVSVPGVYAGFIHGFMFGDAFDKGLTFKMGQTHVHRFMPELLEHIEAGRLEPEAIITHRMSLEDAAKGYKLFDKKEEDCRKVILTPGNNTIVVPDDTTEALVGGGVPAM

SEQ ID NO: 43079 - protein, 202 aa, Shigella sonnei
ELKARHLTMIAIGGSIGTGLFVASGATISQAGPGGALLSYMLIGLMVYFLMTSLGELAAYMPVSGSFATYGQNYVEEGFGFALGWNYWYNWAVTIAVDLVAAQLVMSWWFPDTPGWIWSALFLGVIFLLNYISVRGFGEAEYWFSLIKVTTVIVFIIVGVLMIIGIFKGAQPAGWSNWTIGEAPFAGGFAAMIGVAMIVGFS

SEQ ID NO: 43080 - protein, 333 aa, Oryza sativa
MADASSRTDTSTVLDTDDKNQMVDGQSGAIVPSNSSDRSDRSDKPMDQKVLRRLAQNREAARKSRLRKKAYVQQLESSKLKLASLEQEINKARQQGIYISSSGDQTHAMSGNGAMTFDLEYARWLEEQNKQINELRTAVNAHASDSDLRLIVDGIMAHYDEIFRLKGVAAKADVFHILSGMWKTPAERCFLWLGGFVSSELLKLLVNQLEPLTEQQLLGLSNLQQSSQQAEDALSQGMEALQQSLADTLAGSLGPSGSSGNVANYMGQMAMAMGKLGTLENFLRQADNLRQQTLHQMQRILTIRQAARALLAIHDYFSRLRALSSLWLARPRE

SEQ ID NO: 43081 - protein, 500 aa, Sorghum bicolor
MTATPAMIGLSAGKRLLATSFGNTDLAPPDAHPSLQFAPAAPKLTVVAHRASASSSSSSSSPAGHARAHAIRALRNHSAPALAPPLPLPLPPPPAADPAPELDSEFEFELESSLEAIVLLQRSMLEKQWQLPFEDEDEDDERLTKAAVVVARSGVSARQRRMSGRRRGPGRKSVTVSPELMQSRNRIYLRGTVSKDLLTHKQVIQLSRKIKDGIWLQHQRSKLKEKLGNEPSYKQLAQSLHISPPELRARMRESFLAREMLTMSNIRLVISIAQKYDNLGVELADLIQGGLIGLLRGIEKFDASRGFRISTYVYWWIRQGVSRALADNSKAFRLPTYLHERLIAIRGAKYALEDQGIAPTVENIAESLNISEKKVHNATEAVNKVLSLDQQAFPSLNGLPGDTLHSYIEDQNVANDPWHGFEERYLKEEVNNLINSNLNERERDIIRLYHGIGKQCHTWEDISRQFGLSRERVRQVGLVAMEKLKHAARRKHLDALLEEY

SEQ ID NO: 43082 - protein, 419 aa, Ashbya gossypii ATCC 10895
MSLTAFNQLEILPPDALFDVKKRLTQDTRSFKVDLGLGAYRDENGKPWVLPCVREAEKQLMADPGYNHEYLGIAGLEEFRAAAARVLLGEDSEALAEGRVVSVQSISGTGALHVAAKLLAKTVPDATVYMSDPTWGNHFAVFETQGLRTATYPYWDAATRSLDMEGVLGALGAAPRGSVFVLHACAHNPTGLDPNEEQWVQILDAVAAREHTVLFDSAYQGFASGSLARDAYALRAGLRRLAEVTPVLVCQSFAKNIGMYGERVGALHVVLPRQPAESLAHVKAAVLSQLSHITRSELSNPPAYGAKIVTKVLTTPELAAQWKKDMITMSSRIARMRRVLRDRLVELGTPGNWDHIVQQCGMFSYTGLTKEMVARMEKDFAIYMVSSGRISIAGLNDSNVGHVANAIDNAVRHFSTPKL

SEQ ID NO: 43083 - protein, 168 aa, Glycine max
  misc_feature (13)..(13): Xaa can be any naturally occurring amino acid
  unsure (1)..(168): unsure at all Xaa locations
AAEKMGGPKGFKXVRGAPMAPKSELGESLGYASPIGNPIQEKPHCFKGGASFFSEKIEKGPGSISVVFSPPNIGSGKWASTKAIQLGVGKVNPQLKFAPLYGKQQALSFGLNNPGFLVEKYIPFGPGNRGSPSLFRRGEKKTGLLVASGFYRQFLRKELGRKLKTAMF

SEQ ID NO: 43084 - protein, 480 aa, Pyrococcus furiosus DSM 3638
MKIEDVYIWDINAKWLGITPYQLMENAGAGVAKTIEEKFGKNLRIAVFCGTGNNGGDGFVAARHLSFENDVTVFLIGDESKIRSEEAKLNWNILKNLDFIKIEILKDSSQIKELNLEEFDVIIDALLGAGTRGEPKEPIKSAIEKINEYAGKAKIVSIDLPSGYPSNLRVKADFAVTFQWDKEEYSGFERIVVKIGYPRELYHLAGPAHVKFAFQRRGEHKGQNGKLLIIGGSENYYGAPYLAAKSASYLVDLVYLLTPERVAKKISDPNLIVREVKGENLSLESIDKALELSERVDAVVLGPGLGIKEETKDFVKEFVKRVSKPLVIDADGLKIVSENLDILKGKEFVLTPHAGEFKTLFGVKPEGGLREKAKIVIEKAREIGGVVLLKGKYDIISDGEVWLYNKTGNRGMTTGGTGDVLAGTVGAFLALKNSLLRSAAAGAFLVGFAGDLVAQEKGESFVASDVAEKIPIALKKILEM

SEQ ID NO: 43085 - protein, 168 aa, Arabidopsis thaliana
  misc_feature (38)..(38): Xaa can be any naturally occurring amino acid
  unsure (1)..(168): unsure at all Xaa locations
MAPKAEKKPAEKKPVEEKSKAEKAPAEKKPKAGKKLPXEAGAGGDKKKKMKKKSVETYKIYIFKVLKQVHPDIGISSKAMGIMNSFINDIFEKLASESSKLARYNKKPTITSREIQTAVRLVLPGELAKHAVSEGTKAVTKFTSFLKLWILLKSMFVKLGFFRFDGCC

SEQ ID NO: 43086 - protein, 465 aa, Buchnera aphidicola str. Bp (Baizongia pistaciae)
MKKITMIFNTVLIFLVFLLISGFSWHKSEIPTQEKFFESKSFSLSTVLEKVIPSVVSITVEGNVTQSTRIPRQFQSSFNKKVLDCFGISRCMTRQGKFHALGSGVILDSKNGYIVTNSHVVDRANKIQVQLSNGCKHEAVVIGKDARFDIAIIKLKKVKNLHEIKMSNSDILKVGDYVIAIGNPYGLGETVTSGIISALHRSGLNIENYENFIQTDAAINRGNSGGALVNLKGELIGINTAILTPDGGNIGIGFAIPINMVNNLTTQILEYGQVKQNELGIVGMELNSDLAKVLKINVHRGAFISQVLSKSPADVSGIKPGDVIILLNRKPIASFATLRAEIASFPIKTKIELGILRNKKVKFIIVELKQKIQSKIDSSVLCKLISGASLSNFRIHGQNKGICVNYVNNGTPAYRTGLRKNDIIFEVNKYQVSSLSNFQKVLKTKPLILVLHVKRGNDVLYLVTH

SEQ ID NO: 43087 - protein, 377 aa, Pyrococcus furiosus DSM 3638
MNTEKYLAKGLEDVYIDQTNICYIDGKEGKLYYRGYSVEELAELSTFEEVVYLLWWGKLPSLSELENFKKELAKSRGLPKEVIEIMEALPKNTHPMGALRTIISYLGNIDDSGDIPVTPEEVYRIGISVTAKIPTIVANWYRIKNGLEYVPPKEKLSHAANFLYMLHGEEPPKEWEKAMDVALILYAEHEINASTLAVMTVGSTLSDYYSAILAGIGALKGPIHGGAVEEAIKQFMEIGSPEKVEEWFFKALQQKRKIMGAGHRVYKTYDPRARIFKKYASKLGDKKLFEIAERLERLVEEYLSKKGISINVDYWSGLVFYGMKIPIELYTTIFAMGRIAGWTAHLAEYVSHNRIIRPRLQYVGEIGKKYLPIELRR

SEQ ID NO: 43088 - protein, 451 aa, Vibrio sp. Ex25
MATHFDYICIGGGSGGIASANRAAMYGAKVALIEAQDLGGTCVNVGCVPKKVMWHGAQIAEAMNLYAEDYGFDVDVKGFDWSKLVESRQAYIGRIHQSYDRVLGNNKVNVIKGFAKFVDEKTVEVNGEHYTADHILIAVGGRPTIPNIPGAEYGIDSNGFFDLAEQPKRVAVVGAGYIAVEIAGVLHALGTETHLFVRKESPLRSFDPMIIDTLVEVMEAEGPTLHTHSVPKEVVKEADGSLTLHLENGESQNVDQLIWAIGRHPATDAINLASTGVATNEKGYIKVDEYQETNVKGIYCVGDIMEGGIELTPVAVKAGRQLSERLFNNKPNAKMDYDLVPTVVFSHPPIGTIGLTTQEAEEKYGKDNIKVYTSGFTAMYTAVTKHRQPCKMKLVCAGEEETVVGLHGIGFTVDEMIQGFGVAMKMGATKADFDSVVAIHPTGSEEFVTMR

SEQ ID NO: 43089 - protein, 104 aa, Magnetospirillum magnetotacticum MS-1
MVETDNAIEVSIELPGMEMKDIEVTVNDDMLTVKGEKKIERQVEKKGYYLSERSYGAIYRTIPLPPGVDGEKAQASFKNGVLTIKLPQTPEAQAKIKRIDVKNG

SEQ ID NO: 43090 - protein, 361 aa, Magnetospirillum magnetotacticum MS-1
MSSAAPRASTPDDVLDPRAMREPLPNAWYCVGPAASVAGGKMRAVALNGEQVVLGRAKDGALFALRDRCPHRGMALSKGKFDGDTLMCPFHGWRFGTDGRCRDVPTLSEHDASDFSCIAVQRFPIVESAGFLWVNPHLGPSDLEAVPAVPSLGFEPAGSLVLELEVEASFDLTTLSLVDPGHVAFVHDNWWFRASKELREKVKTFQPVPHGFVMTSHATTTSSPLYRLLGGAPEVEIEFRLPGVRLERIAAGTKRVANYTFATPMGPNRTMLTNALYWSMPALNLLKPIARPLMRQFLTQDQQVLQHAQAGLDRKPTMVLLGQGDLPSQWYFRLKRETLEAAREGRPFANPLVRQELRWRS

SEQ ID NO: 43091 - protein, 1736 aa, Arabidopsis thaliana
MAAYYRWKSFEENEDRPEKPRRYGVTEMRGPHYSVLSQNLLQEIFESMGQFVDGLKFSGGSNSLIPKSFIKQAIEMAHEHGVYVSTGDWAEHMLRSGPSAFKDYVEECKQLGFDTIELNANLLEVPEETLLRYVRLIKNGGLRAKPMFAVKFNKSDIPGRNRAFGSYVVPEPRSSEFVEDIDLLIRKAERCLEAGADTIMIDADDVCKYADSLRADIIAKVIGRLGIEKTMFEASDAKLVEWFIKRYGPNVFADTLVLSIIFNLLFEWSPSQDSYLFVLVFQVNLYVDHSQIMDLECLRGRHLAIAFGFVFIMNGKLSSGTTPHEADPPQASNLALSPEAAPPDTAMDDASGINFGPLPPFVPEFPVYIFYLGERKHDDPNLVTQSHLEILKSVLGSEEATNKSMVYSYHHGFSGFAAKLKPAEAEKLKKHPEVIILLENRKLGLQTTRTWDYLGQFSTPTSSKSLLHETNMGSGAIIGVIDSGIWSESGSFDDDGYGPIPKHWKGQCVSADQFSPADCNKKLIGAKYYIDGLNADLETSINSTTEYLSPRDHNGHGTQVSSTAAGSFVSNMTLLGLSSGSIMRGGAPKAHIAMYKACWDVEGGMCSVADVWKAFDEAIHDGVDVLSVSVGGSALKTLDVEIDIAIPALHAVNKGIPVVSPAGNEGSRSSSVINVSPWILTVAATTLDRSFSTLITLENNKTYLGQSLYTGPEISFTDVICTGDHSNVDQITKGKVIMHFSMGPVRPLTPDVVQKNGGIGLIYVRNPGDSRVECPVNFPCIYLDMEVGSELYTYIQTRSSMKIKISPYKTIIGESVASKVAKSSARGPSSFSPAILKPDIAAPGLTLLTPRIPTDEDTREFVYSGTSMATPVIAGIVALLKISHPNWSPAVIKSALVTTAMKTDPYGERLTVDGGNYKVADAFDYGGGLVNLEKATDPGLVYDMDINDYTHYLCSQTLYTDKKVSALTGNVNNKCPSSSSSILDLNVPSITIPDLKGTVNVTRTVTNVGRVKSVYKPVIEAPFGFNVVVSPKKLKFNKTRNKLAFTIYVVHLGVRRHDDSELVSESHQRMLESVFESAEAARESIVYNYHHGFSGFAARLTDSQAKQLSDRPDVFSVAPNRKVELQSTRIYDYLGLSPSFPSGVLHESNMGSDLVIGFLDSGVWPESPAYNDEGLEPIPKHWKGKCVAGEDFDPAKHCNKKLVGAKYFTDGFDENNSGISEEDFMSPRGYRGHGTMVSSIAASSFVPNVSYGGLAPGVMRGAAPKARIAMYKIVWDRALLMSSTATMVKAFDEAINDGVDVLSISLASAAPFRPIDSITGDLELGSFHAVMKGIPVIAGASNTGPEAYTVANVFPWMLTVAATNIDRTFYADMTFGNNITIIGQAQYTGKEVSAGLVYIEHYKTDTSSMLGKVVLTFVKEDWEMASALATTTINKAAGLIVARSGDYQSDIVYNQPFIYVDYEVGAKILRYIRSSSSPTIKISTGKTLVGRPIATQVCGFSSRGPNGLSPAILQGTGTSYATPVVAGLVVLLKALHPDWSPAALKSAIMTTAWKTDPSGEPIFAEGEPRKLADPFDYGAGLVNAERAKDPGLVYDMNIDDYIHYFCATGYNDTSITIITGKPTKCSSPLPSILDLNYPAITIPDLEEEVTVTRTVTNVGPVDSVYRAVVEPPRGVEIVVEPETLVFCSNTKKLGFKVRVSSSHKSNTGFFFGSFTWTDGTRNVTIPLSVRIRVLNP

SEQ ID NO: 43092 - protein, 424 aa, Triticum aestivum
  misc_feature (345)..(345): Xaa can be any naturally occurring amino acid
  misc_feature (359)..(359): Xaa can be any naturally occurring amino acid
  unsure (1)..(424): unsure at all Xaa locations
MAASSAPLLLLLCLAVVSPAAARTEDLLAAARAPEAAAWLRGVRRRIHQRPELAFQEHRTSELVRRELDAIGVPYAWPVARTGVVATIGSGAGPVVALRADMDALPVQELVDWEYKSLEDGKMHACGHDAHTAMLLGAAKLLQSRKEDLKGTVKLVFQPAEEGSGGAYYVLEEGVLDDASAIFGLHVDPALPVGVVSSRPGPFAATSGRFLATVTGKGGHAAGPHDAIDPVVAASSAVLSIQQIVSREIDPLQGAVVSITFVKGGDAYNVIPESVAFGGTLRSMTDEGLSYLMKRIREIVQGQAAVHRCSASVDFMEETMRPYPAVVNAEGMYAHAKEVAGRLLXGEGNVRVAPQLMGXAEDFGFYAQRMAGAFFTIGVGNESTMEQLRTTHSPYFVIDEDALPVGAAFHAAVAIEYMEKHASA

SEQ ID NO: 43093 - protein, 417 aa, Salmonella typhimurium LT2
MYTPLNWTTTQRHVAFACFTSWMLDAFDFFILVFVLSDLAEWFHASVSDVSIAIMLTLAVRPIGALLFGRMAEKYGRRPILMLNILFFTVFELLSAWSPTFMAFLIFRVMYGVAMGGIWGVASSLAMETIPDRSRGLMSGIFQAGYPCGYLFASVIFGLFYSMVGWRGMFLIGALPVVLLPYIWFKVPESPVWLAARARKENTALLPVLRKQWKLCLYLVLVMAFFNFFSHGTQDLYPTFLKMQHGFDPHLISIIAIFYNIAAMLGGIFYGTLSERIGRKKAIMIAAFLALPVLPLWAFSSGSFTIGLGAFLMQFMVQGAWGVVPTWLNELVPANARAVLPGFVYQLGNLLASVNATLQARIAETHGGNYGLAMAIVAGAVAILICVFVAFGRETRGVVISGTDSDALPESAISHRT

SEQ ID NO: 43094 - protein, 471 aa, Arabidopsis thaliana
MEADESGISLPSGPDGRKRRVSYFYEPTIGDYYYGQGHPMKPHRIRMAHSLIIHYHLHRRLEISRPSLADASDIGRFHSPEYVDFLASVSPESMGDPSAARNLRRFNVGEDCPVFDGLFDFCRASAGGSIGAAVKLNRQDADIAINWGGGLHHAKKSEASGFCYVNDIVLGILELLKMFKRVLYIDIDVHHGDGVEEAFYTTDRVMTVSFHKFGDFFPGTGHIRDVGAEKGKYYALNVPLNDGMDDESFRSLFRPLIQKVMEVYQPEAVVLQCGADSLSGDRLGCFNLSVKGHADCLRFLRSYNVPLMVLGGGGYTIRNVARCWCYETAVAVGVEPDNKLPYNEYFEYFGPDYTLHVDPSPMENLNTPKDMERIRNTLLEQLSGLIHAPSVQFQHTPPVNRVLDEPEDDMETRPKPRIWSGTATYESDSDDDDKPLHGYSCRGGATTDRDSTGEDEMDDDNPEPDVNPPSS

SEQ ID NO: 43095 - protein, 362 aa, Arabidopsis thaliana
MAEICYEVVTDACPSSVYESTPAHSRRRPRFQTVMHEDWEKNCKRSKQEALATRYSSIPRSSREDFSDQNVDVSSPRYGVSSVCGRRREMEDAVAIHPSFSSPKNSEFPQHYFGVYDGHGCSHVAARCRERLHKLVQEELSSDMEDEEEWKTTMERSFTRMDKEVVSWGDSVVTANCKCDLQTPACDSVGSTAVVSVITPDKIVVANCGDSRAVLCRNGKPVPLSTDHKPDRPDELDRIEGAGGRVIYWDCPRVLGVLAMSRAIGDNYLKPYVSCEPEVTITDRRDDDCLILASDGLWDVVSNETACSVARMCLRGGGRRQDNEDPAISDKACTEASVLLTKLALARNSSDNVSVVVIDLRR

SEQ ID NO: 43096 - protein, 220 aa, Olimarabidopsis pumila
MDSSLKAQETKQLDTPEVAPSLKAEEPQLVDKPAIVPSPIAQEPDNDVPAPGKEFAEFAAGCFWGVELAFQRIPGVTVTEVGYTQGISHNPSYEDVCTNTTNHAEVVRVQYDPKECTYETLLDLFWSRHDPTTLNRQGKLVGAQYRSGIYVYTPEQEKLARDSLEKQQTKLEDKIVTEVLPAKKFYKAEEYHQQYLVKGGRYGNAQSPAKSCKDPIRCYG

SEQ ID NO: 43097 - protein, 202 aa, Olimarabidopsis pumila
MNILNRLGLGSSGQSNMDPSPIAQGNDDDAPSPGNQFAQFGAGCFWGVELAFQRVPGVTQTEVGYTQGIIDNPSYEDVCSGTTNHSEVVRVQYDPNDCSYETLLDMFWSRHDPTTLNRQGNDVGTQYRSGIYFYTPEQEKLAHESLERHQQQMERKIMTEILPAKKFYRAEEHHQQYLSKGGRFGLGQSTAKGCNDPIRCYG

SEQ ID NO: 43098 - protein, 64 aa, Oryza sativa (japonica cultivar-group)
MADRPPAMADRTATFVDLVIAIILPPLGVFLKVGCEIEFWICLLLTFLGYFPGIIYAVWVIVNH

SEQ ID NO: 43099 - protein, 392 aa, Thermobifida fusca YX
MACSLRIAWNDGLTSYNFGPQHPLAPVRVELTMELCRRLGVFDAPGVSFAPVEPADDALLELVHSRDYIAAVKQAGKTLEPNMKYALGTSDNPVFPDMHEASALVAGASVAAARAVWQGEAEHGANIAGGLHHAMPNKAWGFCVYNDAAVAIAWLLEQGAKRVAYVDVDVHHGDGVQEMFYNDPRVLTISLHESPLTLFPGTGYPEEIGGPDAEGYAVNVALPAGTNDAMWLRAFHAIVPPLLREFQPEVLVTQQGCDTHTLDPLANLTLSIDGQRRTYEALHELAKETAAGRWVLLGGGGYELVQVVPRAWTHLLAEAAGTPIDPETRTPDEWHEFVKERTGEVPPLHMTDGRKADYVPFEAGFDPADAVDRAIRATRAAVFPCHGIDPMM

SEQ ID NO: 43100 - protein, 483 aa, Tuber borchii
MNDPDHLNYVPLVPFNGTKPFGGDSLTQDLNIWYESGNVAWVMTSTALVLLMIPGVGFFYSGLARRKSALSLIWLSMMATAVVSFQWFLWGYSLAFSHTGGRFIGNLDNFGFKGLLGYPSIGSEKIPDLLFALYQGMFSAITVALAIGAAAERGRMLPCVVFMFVWATLIYDPIACWTWNSSGWSFRMGGLDFAGGTPVHISSGSAALAYSLMLGKRRGHGTHELNYRPHNVTHIVLGTVFLWVGWFGFNGGSALSGNMRAVMACVVTNLAASVGGITWCLLDYRLEQKWSTVGFCSGVIAGLVAITPGSGYVPSWAAVIYGVVGGAACNYATKLKFVIGVDDALDIFAEHGVGGIVGNILTAFFAADYIAHLDGSTEINGGWLNGHYKQLGYQVADSVAGFAYSFGGTCIILFIMNLIPGLSLRATEEAEILGIDDAELGEFAYDYVELTREVISDDDTVPKMSSENNASVELPAERAEKSA

SEQ ID NO: 43101 - protein, 164 aa, Mycoplasma gallisepticum R
MFHNQTYNKDKMKKYKKKPIEVLKKELTPLQFDVTQNSATERPYTNEYDQNFKKGIYVDITTGEPLFLSTDKYDSGCGWPAFSHPIAKSLINEVKDLSHNMVRVEVRAKNSDSHLGHVFTDGPTDKGGLRYCINSASLKFIPYEDLKKAGYEEFIAILDQEAKH

SEQ ID NO: 43102 - protein, 535 aa, Mycoplasma gallisepticum R
MMAKELTFEQQARAKLLEGINKLAKAVKITAGPKGRNALIEKKYGAPLIVNDGVTIAREIELKDPVENMGAKLIAEAAISTNDIAGDGTTTATILTHEIVNKAIEAINNGTNPVNLRIGIENAAKLVSEYLTSVSKPIKSIDEITQVGAISSGSKFIGELIAKAMDIVGPSGVISIDDAKSFDTTLDTTDGLEFKGGYSSPYMVTDSEKMLSELANPKILVSLNKINTVKEILPLLEASVESSAPLLIVASDIAEDVVTALAINKLRGTLNVVSVKCAEFGEAQKNTLEDLAISVNTILVDSAAGIEFKDLELNKLGSAEKVIISKDKTTVINGACHKDVLAKYLNNLKAKSANLTSKYDKERITKRIANLSNGVAVIHVGGATEVAQKELKLRIEDALNSTKAAVEEGIVAGGGIALMNAIEVLKQVKESNPEIALGYEIVRSSLTAPARQIIENAGQNSSKIINNIINSKQLGYGYNAETNEFVNMINNGIIDPTKVTKTALEKACSVAALLITTEVAINDELKEEKPSLNHL

SEQ ID NO: 43103 - protein, 529 aa, Cryptococcus neoformans var. neoformans JEC21
MGRPLSGSSSAASGDKKGLELWSSLPKASQETTVAIASAFEDDDAPNKINICTPGYRDETGKLFVPPTVRYAEKQLNSESMVSREALPIEGHAPFLDAGVKFAYGGDSHPYRHKRVAAVQAVSLTGALRLAGTFLSRFPTLPPTKTVFIPSPTTDEDVTALQDAGLEIRSFRFLDLKTGGVDWESLREDLQDAPMKSIVLLHVSGSVPSGAELTTNQWRLLASLLQEREMIPLVIMAFQGLSSGDTNRDAQALRFMVHEGLPVVLVQNFDATMGLYADSPSIVSIVTRNSEDKDRVESQLRAIGRGMWIHPSPWGAHIAHQILTDAKLHPSWLKEMRLMSDRLRSARSKLYMQLVDKLKTPGDWAHIKKANGMYCTALLPSAQTEALTAKHHIHLLPDGCFNLGSLNSSKIDALSRAIDSVVREGIREAEEAQAHRLAMELALAAAKEQAAREETQREEEREAAEMRAAREEDTLLMERSIANAIERQKREEEEERKREEQRKREDEQQRKQREREEIARQAEAILATI

SEQ ID NO: 43104 - protein, 508 aa, Mycoplasma gallisepticum R
MNKKHKDFDLNFLKKTKIVATCGPSITYKLFSLADLEDPSKQEIVQKAKENLRQLFLNGVSTVRLNFSHGNQEEQAVRMILARSVANELNLPISIMLDTNGPEIRLNQISETDNTVKKDQIVKIYTNREIVGNATEFSVSDSSKKYNMAKDVSLGSIVLVDDGKLTLQVIEVAEDFSYIRAIAKNEHKIITKKRINLPNAKYSIPFLSQKDYNDITFGLKNKVDYIAASFVNSADDIYEIKAILKQYGMEHVQVIAKVETRHAIKNLDEIIDVSDGVMVARGDLGLEIPYYEVPYWEKYIIKACRFKNKRVIVATQMLDSLEKNVQPTRAEVTDVFFAVERGCDATMLSGETANGMYPIIAVETMKKINKQSELLFDYKRAITHYFPMTDVCKTAFGERVLDIAKKICPNREIENEDFSTHFLVHFTNNREEIFALSNAKLAASVIIVTDDQNVYTGHGVDYGVFTYKVDDLTKALSNYQLVAKKAILHYSELFEIKPDNKTNFVLLK

SEQ ID NO: 43105 - protein, 234 aa, Dehalococcoides ethenogenes 195
MIKGVFFDLYNTLIGYQPSREEMTVKLLAELGYTINEDDLYLPVNKADEYFYQQNAQKPISLRERAEQMAVWSHYYRIILEEIGIEPKPELINNLISRWKNLKWEMTLYQDVIPCLENLKKRNLKIGLISNAEKDMSELFNKTGLNKYLETVVISQEVGVTKPNPLIFQAALKKSGLTAKEVLYIGDQYQVDYMGAMNVGLNPVLLDRRNCYLDLKDCRRITGLAELEYCIDNT

SEQ ID NO: 43106 - protein, 198 aa, Shigella sp. K-319
TMIAIGGSIGTGLFVASGATISQAGPGGALLSYMLIGLMVYFLMTSLGELAAYMPVSGSFATYGQNYVEEGFGFALGWNYWYNWAVTIAVDLVAAQLVMSWWFPDTPGWIWSALFLGVIFLLNYISVRGFGEAEYWFSLIKVTTVIVFIIVGVLMIIGIFKGAQPAGWSNWTIGEAPFAGGFAAMIGVAMIVGFSFQG

SEQ ID NO: 43107 - protein, 706 aa, Debaryomyces hansenii CBS767
MSKRQETPIKKNAFVHKLYSMLNDPELTNLIWWTRDEDSNTFALSPGKDFANALTRYFKHGNVASFVRQLHMYGFHKVSDPSHTNVTATSTNAELPVWEFKHSSGKFKKNDESSLVYIKRRSSSNNSRNVYNNENDANVVIPTSTPSPEHAQFIQEGGHPYLPQGYYFYNGHQVTHHMSPHMQFPSGGVPPQLHQSKHPQMYYTQKPMPSSIPHAYSQENTLKKPKMPDIQRSISPQSQPGSQHQAPQVPKPHPVTHIPQPPISQAQLQPPLQDATKPSHPQPDAHDSQRPQHYTPNLQFRKIWENDNLHSRPRNPSLLFDPLAPVPVTSQLQPLQQSQNAEQQSQSSFSYLLSRSDSRSSYASARESFTSTRDSFVSNRDSIASGRESLASAKDSISSTKDSFSSARDSFGNSRDSFTLLKDPDNRLSIKLPPPSSIHNPSFYPNNSNSPFSMASDTNSNASTVTSSNLPKAPSNEFPSSSTSMSTIKTKSNSIPETSTTAKRPSIFPSHSVHEKLRPSLIELHFGSSSKASILNPQHDSIGSQSSHNSVFSNNSSLSSTSSFHRTSSFGSISHHPIFANKNSISIAPHEVLPVTLLSRSIAEQEVYSDSKDSTPPLKTPKVLQMNSPIKRSSTTAIPTTNGVPVALKIRSLNSSPLSRLLTNEDLIAVDATNLKSSNTKVSIHSLLDDGQGEEKILLPSKSSRS

SEQ ID NO: 43108 - protein, 467 aa, Mycoplasma gallisepticum R
MVLNMYNYDLIVIGAGPGGYVAGEHAAKNGLKTLVIERGTYGGVCLNVGCIPTKTLLQSSKVKHYIEKAAEYGLDLVNNQLSVNWANILKRKEAVVNKLVNGVKTILKVAKADTIVGEARIVDGHTVTVNNQTFYITTKDIIVATGSSPRKLPLPGFDQGRAEGVIIESTKALELPQIPQSLVVIGGGVIGIEFAMLYASLGTKVTILQAVDRLCELLDQDASDFIAKRMKSLGVNVVYNAKILGYQNNAIIYEDNGTAYQLPSQYILESVGRVVNDQVFGSFNVARDDRNRIKLNDKLQTSTDSIYVIGDAAGQIMLAHYAYHQALYAVDTILNRKTKKLSSLTTPGCIYTYPEIATIGYTEQQLKEKNIEYVVSKMPMAVNGKAIADGSTEGFIKFMFGKKYGEILGCVLIASTASDMISEIALAMENELTVFELEQAIHPHPTIAEIISECAKQAIYNHFNKKH

SEQ ID NO: 43109 - protein, 204 aa, Shigella sp. AR-21793
RELKARHLTMIAIGGSIGTGLFVASGATISQAGPGGALLSYMLIGLMVYFLMTSLGELAAYMPVSGSFATYGQNYVEEGFGFALGWNYWYNWAVTIAVDLVAAQLVMSWWFPDTPGWIWSALFLGVIFLLNYISVRGFGEAEYWFSLIKVTTVIVFIIVGVLMIIGIFKGAQPAGWSNWTIGEAPFAGGFAAMIGVAMIVGFSF

SEQ ID NO: 43110 - protein, 478 aa, Yarrowia lipolytica CLIB122
MSVFIDFTGTASAPLASTSASDESYITDFNAIKITSTESGETVACVESANESTNASSASIPILTPNKSNSHQRNGSFGASHLSHRLGKSYEVGIFSNYVSSNSPSSVPGDCCDDPSVEPCGSDMLTQSSRGKLTTSDFEPIKVLGCGAFGKVLLVREKSTGHLYAQKQLKKASMIVEKKALQTKTERAILESVRHPYIVKLFYALQDQEKLYLILEYAQGGELFHHLATEHMLPEQTASFYVAEMILALSHLHLNVGVVYRDLKPENCMLDQDGHLVLTDFGLSKVATNDTCTTFSGTPEYMAPEVLQGKEYDYSVDWWSLGAVTFDLLTGNPPFTGNDYQKILAKIDKCKAMRYPFYLSQDAKDFLNGCLKKCPNRRLGSRDLEKVKKMRFFRKLDWDLLEARDPSLEPPIKPLITDPILAENFSTTFTDMVLSPPGDKSLETGDFPSFNGFSFTASESYINSGFAGFMKAKQKAFD

SEQ ID NO: 43111 - protein, 543 aa, Arabidopsis thaliana
MAGGGGGGGGVAPPLKHDGLEPHPVKDQLSSISYCITSPPPWPEAILLGFQHYLVMLGTTVLIPTYLVPQMGGGNEEKAKMVQTLLFVSGLNTLLQSFFGTRLPAVIGGSYTYVPTTLSIILAGRYSDILDPQESENMQKFKRIMRGIQGALIVASILQIVVGFSGLWRNVVRLLSPLSAVPLVALAGFGLYEHGFPLLAKCIEIGLPEIILLLLFSQYIPHLIRGERQVFHRFAVIFSVVIVWIYAHLLTVGGAYKNTGVNTQTSCRTDRSGLISGSPWIRVPYPFQWGPPTFHAGEAFAMMAVSFVSLIESTGTYIVVSRFASATPPPPSVLSRGVGWQGVGVLLCGLFGAGNGASVSVENAGLLALTRVGSRRVVQISAGFMIFFSILGKFGAIFASIPAPVVAALHCLFFAYVGAGGLSLLQFCNLNSFRTKFILGFSVFMGLSIPQYFNQYTAVNKYGPVHTHARWFNDMINVPFSSKAFVAGILAFFLDVTMSSKDSATRKDRGMFWWDRFMSFKSDTRSEEFYSLPFNLNKYFPSV

SEQ ID NO: 43112 - protein, 406 aa, Streptomyces avermitilis MA-4680
MAGMDIAVTGLGLVTPGGIGVGPSWAAVCDGRPAAALDPVLADNPVRISCRVPDFDPEQLLSARRAHRLDRFVQFALVAAHEAVADAGLDPTTWDGARVGVVLGCADGGPGTVEEQHRVLLEQGADRVSPLLLPMQLPNMLAGQTAIEFGATGPNLVVATACASGATAIGTARDLLALGRCDVVLAGGSEAMITPLVMAGFAQMGALSRREDDPASASRPFDADRDGFVAGEGAGILVMERVEDARARGAHIHGRIIGYGATADAHHMTSPHPDGAGIEAAVRAALADAGADPDDVQHVNAHGTSTPLNDLAEARMIQRTLQGDPLVTSTKGVTGHLLGAAGAVEAAFALLSIEHEMVPPIAGLCIPDPRIDIKLAQSATSMPIDLALSNSCGFGGQNTALAIAPA

SEQ ID NO: 43113 - protein, 143 aa, Ehrlichia ruminantium str. Gardel
MLERTLSILKPDVVKRNIAGQVNSYIENSGLKIIIQKMCLLTRYQAEKFYEIHKSQVFFVPLINFMISGPVVVQVLEGENAISLYREVMGATDPKKANSGTIRGDFAENIDANCVHGSDSLENAIREIRFFFSEYELLSLYEC

SEQ ID NO: 43114 - protein, 429 aa, Neurospora crassa
MLSSVRLVTRRAAVRSAFASPGRSLLAVRAASFWANVPQGPPDAILGITEAFKADTFDKKINLGVGAYRDDKGKPYVLPSVRKAEDKVIHSRMNKEYAGITGVPEFTKAAAVLAYGKDSSALDRLVITQSISGTGALRIGGEFLNRFFPGAKKIYIPTPSWANHGAVFRDSGLEVAQYAYYDKNTIGLDFEGLIRDLKAAPNSSIFLFHACAHNPTGVDPTPEQWKEIEAVVKDKGHYSFFDMAYQGFASGDIHKDAFAVRYFVEQGHNICLAQSFAKNMGLYGERVGAFSIVCADADEKKRVDSQVKILVRPLYSNPPIHGARIAAEILNTPELYEQWLTEVKEMADRIIKMRALLKENLEKLGSKHDWSHITSQIGMFAYTGLTPEQMEKLAKEHSVYATKDGRISVAGITSENVGRLAEAIFKVKG

SEQ ID NO: 43115 - protein, 359 aa, Mycoplasma gallisepticum R
MAIIVKNKIPELLHRVIDNEGRVIDPSYVQKLSDERVIEAYYYMNLSRELDKKMLTWQRSGKMLTLAPNIGEEALQLGTSLAMTKKDWLVPAFRSGALMLHRGVKPYQLMLYWNGNEKGNVFDEGVRVIPINITIGAQYSQAAGIGYALKQNKERAAAVTFIGDGGTAEGEFYEAMNLASIHKWQTVFCVNNNQYAISTRTNLESAVSDLSTKAIAVNMPRVRVDGNDLLACYDAMLEAIEYSRSGMGPIFVEFVTYRQGPHTTSDDPSVYRTKQEEEEAKKSDPIARIKKFLTAKGLWDEAKEKTMFEQIEAKISEEYDVMLQHIQTTVDDVFDHTYATLPQNLVEQKAVAKKYFGDK

SEQ ID NO: 43116 - protein, 721 aa, Kluyveromyces lactis NRRL Y-1140
MAGELDADSNSRASGITIPANGQRRRQSIMMLSESVKSRRSLKSHSRVIPAAATPPLGKSIESNALIDVGSPSFKSPNLEHEAEIIQSLKQNYLRDNINKSSSFSQLSKKSHSSTLQDSDAPSETAISIPEHDSNLNTEGGDILRDLYKLSSNLDNNVKKNRNKSADDLSISGAHRRKGSTASALNVPGGFRREYIVQKIRNELPRQNCTTDSESHHTTPSYGSVTSSNLEDQTNVADKVPFLTRNFLEFLYVYGHFAGETFNDDFAVDEDDEFNESEVPLLNASDRERLGHNKRVIARPSQVKTSTFKAFLLMLKSFIGTGVLFLPSAFANGGLIFSVLMLSFFGMYSYWCYYILIRSKVATGVSSFGDIGIKLYGPWMRYAILASLILTQLGFSAAYVVFTCKNLLAFFQNVFHLHSLRIEHLLILQTIIFIPLAFIRNVSKLSLTSLLANFFTMAGLIIIVFFVVKHLVIDLDLKPEAGIIYGFNSSKWSLFIGTAIFAFEGIGLIIPVQDSMRKPEKFPLVLGLVILTATVLFISIAALGYLAFGRYIETVILLNLPQDNIFVNLVQFFYSLAILLSTPLQLFPAIGIIESKLVPKFRKTVSPTNKNDVQLSPNSGKLDWKVKWTKNFLRSIIVIFVICLAYFGSSKLDVFVSFIGCFACIPLVYMYPPLLHLKSCSQPAYKQNQTLKNRLMITMDYGLVIFGGVSMLYTSYQCIMG

SEQ ID NO: 43117 - protein, 380 aa, Escherichia coli CFT073
MISFFPKIEWQRIMSDSQTLVVKLGTSVLTGGSRRLNRAHIVELVRQCAQLHAAGHRIVIVTSGAIAAGREHLGYPELPATIASKQLLAAVGQSRLIQLWEQLFSIYGIHVGQMLLTRADMEDRERFLNARDTLRALLDNNIVPVINENDAVATAEIKVGDNDNLSALAAILAGADKLLLLTDQKGLYTADPRSNPQAELIKDVYGIDDALRAIAGDSVSGLGTGGMSTKLQAADVACRAGIDTIIAAGSKPGVIGDVMEGISVGTLFHAQATPLENRKRWIFGAPPAGEITVDEGATAAILERGSSLLPKGIKSVTGNFSRGEVIRICNLEGRDIAHGVSRYNSDALRRIAGHHSQEIDAILGYEYGPVAVHRDDMITR

SEQ ID NO: 43118 - protein, 417 aa, Escherichia coli CFT073
MLEQMGIAAKQASYKLAQLSSREKNRVLEKIADELEAQSESILNANAQDVADARANGLSEAMLDRLALTPARLKGIADDVRQVCNLADPVGQVIDGGVLDSGLRLERRRVPLGVIGVIYEARPNVTVDVASLCLKTGNAVILRGGKETCRTNAATVAVIQDALKSCGLPAGAVQAIDNPDRALVSEMLRMDKYIDMLIPRGGAGLHKLCREQSTIPVITGGIGVCHIYVDESAEIAEVLKVIVNAKTQRPSTCNTVETLLVNKNIADSFLPALSKQMAESGVTLHADAAALAQLQTGPAKVVAVKAEEYDDEFLSLDLNVKIVSDLDDAIAHIREHGTQHSDAILTRDMRNAQRFVNEVDSSAVYVNASTRFTDGGQFGLGAEVAVSTQKLHARGPMGLEALTTYKWIGIGDYTIRA

SEQ ID NO: 43119 - protein, 469 aa, Streptomyces avermitilis MA-4680
MSQTTTAVSGVSAPVSIGVRLDRMPITPMHRRLTAVIGIGLLFDTFENSLSGTIAKVLQGDFAFGATSLKLVLASVFVGQFIGSLVLGRVADRFGRRRAFLINLAIYSGFSLLGAFSPNAGWLIATRFLAGIGIGAEQALSDCYLADVLPAAKRGRFIAWAYTLAFCGVPAVGFAALWLVPLTPLGVDGWRWLFVIGALGSAVVWVLRRQLIESPRWLAATGRTAEADRLVSRMEAQAPAGRTAEDLPAPYEAPGAARVRLRDVFAPGLRRRTVMLWIFCALSVVGYYGFGTLAPQILAAKGFDIVAGLGFTALCFLGYPVGSALSLPVIDRVERKTLVAASAAAMVAAGMGFAFTDSPALIVAFGFGYTLCSNVFSSVSHVYLSEQYPTAIRATASGAAYSLSKLSAAALPFVLLPVLDSYGPGALFAVIAAAMAALAVTVLTLGERTTGASVDRAPVPVNIPTLKRS

SEQ ID NO: 43120 - protein, 760 aa, Oryza sativa
MVISRTLVVRGFDELWETIRPVLVSSDGPASMSKNGLLLVVSEEFWIGKVWWVSGDRIWGLEMKEVGEVEEVRCLDPQLWHACAGGMVQMPAPRSRVYYFAQGHAEHADGGGGAAAAAAELGPRALPPLVLCRVEGVQFLADRDSDEVYAKIRLAPVAPGEAEFREPDELCPLGAAGDAAEPSPEKPTSFAKTLTQSDANNGGGFSVPRYCAETIFPKLDYRADPPVQTVLAKDVHGVVWKFRHIYRGTPRRHLLTTGWSTFVNQKKLVAGDSIVFLRTRHGELCVGIRRAKRMACGGMECMSGWNAPGYGGGGFSAFLKEEESKLMKGHGGGGYMKGKGKVRMADVVEAASLASSGQPFEVAYYPRASTPDFVVKAASVQAAMRIQWCSGMRFKMAFETEDSSRISWFMGTISSVQVADPNRWPNSPWRLLQVTWDEPDLLQNVKCVSPWLVELVSSIPPIHLGPFSSPRKKLRVPPHPDFPFEGHLLNPIFHGNPLGPSNSPLCCYPDTAPAGIQGARHAQFGLPLTDHQLNKLHLGLLHSGSFNRLDAITPPSRISKGFVVSSAPAHDNISCLLSISTPQVAEKSDDRKTTPHIMLFGKAIFTEQQITSSGSTETLSPGVTGNSSPNGNAHKTGNASDGSGSSICIGFSSQGHEASDLGLEAGHCKVFMESEDVGRTIDLSVFGSYEELYGRLADMFGIEKEEIINHLHFRDAAGVVKHPGEVPFSDFMKAARRLTIIAGDRERIERPLIECLVEQA

SEQ ID NO: 43121 - protein, 411 aa, Xanthomonas campestris pv. vesicatoria str. 85-10
MSRRVVVTGMGMVSPLGNDLATSWDGIVHGRSGIGPITQIDASQFTTKIAGEIKNFDPTLFVSAKDVKKMDSFIHYGVGASFMALDDSGLEIDESNAERVGAILGSGIGGLLGIEEQTIKFHEGGARKISPFYVPSTIINMLPGQVSLIKGLKGPTFSAVSACATSNHSIGTAMRMIQHGDADVMLAGGAERGSSPSSVGGFCAMKAMSTRNDDPTGASRPWDKQRDGFVLGDGAGVLVLEEYEHAKARGARIYAELVGFGASSDAFHMTAPSEDGEGAARSMAAAMRDAKLNPEQIGYLNAHGTSTPLGDLAETMAMKRALGDHAYKTMVSSTKSMTGHLLGAAGGVEAIFSVMALHTGIIPPTINLEEPSEGCDLDYVPNVAREVQVDAVMSNGFGFGGTNGTLVFKRV

SEQ ID NO: 43122 - protein, 256 aa, Bacillus circulans
MTKWMSIRVKMTALLAAAALLISVSATQPIQAQGAAFTEPLNGPNPGMFYTSDGWGNGVDFGVGWKASNQEFSNGIMALRLDNVGCPSNCSGKPYASAEYATTQKYGYGRVEARIKAAKGTGLVTSLFTYSGAAPGTSNDEIDIEILGKDTTKMETNYFTNGVGGHSTVIDLGFDASLDFHDYAFEWSPTSIKWYVDGRLVHTETGSRGPLPTSPGYIMVNLWSGAGPAEIWTGKFTYPGHPIRAYYDWIKFTPAS

SEQ ID NO: 43123 - protein, 507 aa, Gloeobacter violaceus PCC 7421
MSEQPIGIAPMDVHNTRLVAHTHPLDWVNPKPAGRYNLVVIGGGTAGLVSAGGAALLGGKVALVERHLLGGDCLVAGCVPSKALIRSARAMADVKDAHRYGIRVHGNVEADFGAVMERLRRVRADISPHDAAERFKNWGVDVFLGAARFTGPDTVRVGEVELRFKRAIVATGGRAARPEIAGLAEAGFLTNETVFSLTERPERLVVIGGGPIGCELAQSFARLGSQVTLLHKNERVLDREDPETSRIVGCALERDGVRVLTKARIEKVSRAGSIKTVHLAGGEQVACEAILLAAGRVPNVEGLGLEAAGVRYGKGGVEVDDRLCTSNPRIYACGDICLPWKFTHAAEASARIALENALFGGTLVLGQKKTSALTMPWCTYTDPEIAHVGLGEDEARKRGIAFDTIRLPLAESDRALTDGEEDGFIAVLLKQGSDKILGATLVARHAGEMISEITLAMVAGKGLATLSQVIHPYPTQAEIIRKVADAYESRSLERLRPFTEKWLAWLR

SEQ ID NO: 43124 - protein, 555 aa, Geobacillus kaustophilus HTA426
MKKTWWKEGVAYQIYPRSFMDANGDGIGDLRGIIEKLDYLVELGVDIVWICPIYRSPNADNGYDISDYYAIMDEFGTMDDFDELLAQAHRRGLKIILDLVINHTSDEHPWFIESRSSRDNPKRDWYIWRDGKDGREPNNWESIFGGSAWQYDERTGQYYLHLFDVKQPDLNWENSEVRQALYDMINWWLDKGIDGFRIDAISHIKKKPGLPDLPNPKGLKYVPSFAAHMNQPGIMEYLRELKEQTFARYDIMTVGEANGVTVDEAEQWVGEENGVFHMIFQFEHLGLWKRKADGSIDVRRLKRTLTKWQKGLENRGWNALFLENHDLPRSVSTWGNDGEYWAESAKALGALYFFMQGTPFIYQGQEIGMTNVQFSDIRDYRDVAALRLYELERANGRTHEEVMKIIWQTGRDNSRTPMQWSGAPNAGFTTGTPWIKVNENYRTINVEAERRDPNSVWSFYRQMIQLRKANELFVYGTYDLLLENNPSIYAYTRTLGRDRALIIVNVSDRPSLYRYDGFRLQSSDLALSNYPVRPHKNATRFKLKPYEARVYIWKE

SEQ ID NO: 43125 - protein, 445 aa, Fusobacterium nucleatum subsp. vincentii ATCC 49256
MFSKKMNKLISRVPVSIKVTAWFTAVIIFLFGIVLSSVILLEDRYINNTSTEELVSAVEKIYENPDEFENFDDGIYYIKYNADNEIIAGKIPKDFDLALAFSIEDINTYQIENKKFLYYDTRLKNTGDWIRGIYPLSKFQNNISKIWNIGFYYIAPFLIILVIFIGYRIVKNAFKPVKKISETALEIKKSKNFSRRIELDNSEDEIHKMAYTFNEMLDTVEETFIHEKQFSSDVSHELRTPITVILAQSDYALDYVETLDEAKESFEVINRQAKKMTNLINQIMELSKMERQNKIEKDKINFSNIILQLLEDYRTLLENNNIELITNIEKDLRIYGNKLMLERLFVNLFTNAMKFTKTTINVSLNRINKEVILQIKDDGIGITKEDQKYIWDRFFQTSDSRNKDKNKGSGLGLSMVNRIVQLHLATIDVESEVGKGTCFIVKFPI

SEQ ID NO: 43126 - protein, 207 aa, Olimarabidopsis pumila
MATFEDGSDLEAIQKHLFEDLLVCDGFMGDFDFDASFVSGLWCIEPQVPKQEPDSPVLDPDSFVNEFLQVEAESSPSSPELNTSPLSTYETDQSVKKAERFEEEEEARHYRGVRRRPWGKFAAEIRDPAKKGSRIWLGTFESDVDAARAYDCAAFKLRGRKAVLNFPLDAGKYEAPANSGRKRKRSDVQEELQRTQSNSSSSSCDAF

SEQ ID NO: 43127 - protein, 358 aa, Saccharomyces cerevisiae [sequence omitted]

SEQ ID NO: 43128 - protein, 735 aa, Oryza sativa (japonica cultivar-group)
MGRGGIGGAGLVAAVAKADVENTDSTRGFVKDVKRIIIKVGTAVVTGPNGRLAMGRLGALCEQVKQLNFEGYEVILVTSGAVGVGRQRLKYRKLVNSSFADLQNPQMDMDGKACAAVGQSVLMAIYDTLFSQLDVTSSQLLVTDRDFMDPSFGNQLRETVNSLLDLKVIPVFNENDAISTRRQPYEDSSGIFWDNDSLARLLAQELKADLLIMLSDVEGLYSGPPSDPQSKIIHTYVHEQHGKLISFGEKSRVGRGGMQAKVAAAFTASSKGIPVVIASGFAIDSIIKVMRGEKIGTLFHREANQWGCSKEATAREMAVAARDCSRHLQKLSSEERKKILLDIADALEANEDLITSENQADLDLAQDIGYDKSLVARMTIKPGKIKSLAGSIREIADMEDPISHTLKRTEVAKDLVFEKTYCPLGVLLIIFESRPDALVQIASLAIRSGNGLLLKGGKEAMRSNTILHKVITGAIPDVVGKKLIGLVKNKDEIADLLKLDDVIDLVIPRGSNKLVSQIKAATKIPVLGHADGICHVYIDKSADMDMAKRIVLDAKVDYPAACNAMETLLVHKDLNRTEGLDDLLVELEKEGVVIYGGPVAHDTLKLPKVDSFHHEYNSMACTLEFVDDVQSAIDHINRYGSAHTDCIITTDGKAAETFLQQVDSAAVFHNASTRFCDGARFGLGAEVGISTGRIHARGPVGVDGLLTTRCILRGSGQVVNGDKGVVYTHRELPLQ

SEQ ID NO: 43129 - protein, 341 aa, Salmonella typhimurium LT2
MKVKAVFINKPGEVETRWVDYPHKKENEVLIKVDAAGICGSDIGAFRGTNPLVTYPRIIGHEVTGIVLQEGAGMPDNIKEGDRVIVDPYIYCGHCYPCSVGRTNCCENLNVIGVHVDGAMQEVVTHPAHLIHKIPDNVPSEMAPLAEPLTIALHALHRANVKAGEYVAIIGAGAIGLMAALSARHYKATPILIDIVEERLRYAQKLGVPYVLNAADDQVIDAIKNITHGTMAQVVIEASGANSAIRNTLDLASFAGRISFTGWPKQETSLPTNLITYKELDLRGSRTSAGEFDEALRMLSTLEINPQDVVSKVVNLDEIPDAVKELDRYPERYLKINAVFH

SEQ ID NO: 43130 - protein, 378 aa, Debaryomyces hansenii CBS767
MNFKITAIILLILGRCLLIGANDFELLEACTSLDDPNCVAEAQGIHKPTQQFLAGGQENLQVSSDPPIVQYYDSGLKFSVRKRFDNPSILSTFEVLYGRAEVELKASHGSGIISSFYLQSKNLDEIDVAETFGSNPYAFQTNFFIKGNTSTHDRGGYHEMDVPPMDEFHKYGIEWTEDKIVWLLDGEVIRVVTNDHPQGFPHAPMYIKFSLWAGGDELNEPGTIDWSGGRTNYEELPYTMYIKNLHVVDYSTGFQHRYGDSLEDWITNDNSDNKWASRNRFEITENAFRDFDSSVRSKNDKDSKYERTPKEKTTPSVGKPKIVSSEKYQQATPSDTKIEETNQNNTIAATSIGVSNRNRWIIMLEAVAAELLVLLLVL

SEQ ID NO: 43131 - protein, 402 aa, Pyrobaculum aerophilum str. IM2
MSVAGRRLDNVYLVAFSRTAFTRFSRKEPQRDDFWDLRPEEIAAVPVRALLEKTGVRPEDVEELLTGTALPVGEQWLYGGRHVVFAAKLPYTIPAAHIDRQCASSITTVGYGAMEIATGMADIVIAGGVEKMSKTPMYENPHIEINPKFLTDDEYVRLYNLPIGYVMGLTAERLAEISGIKREEMDAWSLRSHKRAAEAYEKGYFKDEIVPVAVEREGQRKIVDRDQSIRPDTSLEALAKLPPAFKPDGVITAGNSSPLNSGAAYVMLASGEAVKKYGLQPMAKIRAVAFAGVPPEVMGMGPVPASRKALEKAGLTVKQIGRWEINEAFAVVTLYAIRELGIDPELVNTRGGAIAIGHPLGATGARIIGTLARQMQLDGVDYGVATLCVGGGQGAAVVLERV

SEQ ID NO: 43132 - protein, 542 aa, Listeria monocytogenes
MLHLSLLFKFHRFFKAFSSFFHIWGLLWKYINAKFAERKEDMDEKEKNLNENSENESTPKREVEDTLHTPESAQPVQETPIVEGVTPEGEKFAGATEDAAEASSTNAFFEEASNKESEPARPAPGPRRAGTTGGGAVPPTNRVNNGGSGNGNGEPPKRGKHFIGYFLTALIGVIIGGLIIFFVAWDNGDNADTTSNSNNKATKVEKVSVDTTSDVTKAVDKVQDAVVSVLNYQSSSSLDGTTTSEQEASSGSGVIYKKANGKAYIVTNNHVVADANKLEVTFTNGKKSEAKLLGTDEWNDLAVLEIDDKNVTTVAAFGDSDSLKLGEPAIAIGSPLGTEFSGSVTQGIISGLNRAVPVDTNGDGTEDWEADVIQTDAAINPGNSGGALINIEGQVIGINSMKISMENVEGISFAIPSNTVEPIIEQLETKGEVERPSLGVSLRDVDTIPETQQKNILKLPDSVDYGAMVQQVVSGSAADKAGLKQYDVIVELNGQKVTNSMTLRKILYGNDVKIGDKVKVKYYRDGKEKSTDIKLEAAKTTT

SEQ ID NO: 43133 - protein, 563 aa, Cryptococcus neoformans var. neoformans JEC21
MVCVISDPDWWRQAVVYQIYPRSFADANGDGIGDLKGITARVPYLKALGVDAIWLSPFYPSALRDGGYDVADYRDVDPKIGTLEEFDEMTAAFQKVGIRVIVDIVPNHSSDDHEWFQAALKAGKGSPERERYIFRDGLGPNKDQPPTDWICSFGGSAWSPSGMNDGQWYFHWFDSSQPDWNWENPDVKADFLKTLKFWGDRGVSGFRIDVAHGLAKDMSEPLPNWEQLTKLTHQKLTNGNSELDHPLLDRKEVHDIYRSWREVFNQFNPPLMAVAEAWVAPDQKPLYASSEGLGQTFSFDILLCNFDAEEYRQCIKSSLAGSKKSDSTTTWVLSNHDVMRHPTRFGLPNVPNANHAMTTDTYNKFLKTKLTDPKVDIEQGLRRAKAATLMILALPGSTYLYQGEELGLQEVVEIPDEERQDPIFIRTKGEEVGRDGCRVPIPWVADEKNFGYGPGKRAHLPQPAWFKDYAVDVEEKDANSVLSLYRRALGLRKGLQSAEELEWVENPNKEVLHFRRPGGWEVVVNIGKDSVDLPKGSVLISSSNNALKGGSIPGETTVWLKSA

SEQ ID NO: 43134 - protein, 456 aa, Escherichia coli
  misc_feature (345)..(345): Xaa can be any naturally occurring amino acid
  misc_feature (363)..(363): Xaa can be any naturally occurring amino acid
  misc_feature (418)..(418): Xaa can be any naturally occurring amino acid
  misc_feature (430)..(430): Xaa can be any naturally occurring amino acid
  unsure (1)..(456): unsure at all Xaa locations
SRLVVVSNRIAPPDEHAASAGGLAVGILGALKAAGGLWFGWSGETGNEDQPLKKVKKGNITWASFNLSEQDLDEYYNQFSNAVLWPAFHYRLDLVQFQRPAWDGYLRVNALLADKLLPLLQDDDIIWIHDYHLLPFAHELRKRGVNNRIGFFLHIPFPTPEIFNALPTYDTLLEQLCDYDLLGFQTENDRLAFLDCLSNLTRVTTRSAKSHTAWGKAFRTEVYPIGIEPKEIAKQAAGPLPPKLAQLKAELKNVQNIFSVERLDYSKGLPERFLAYEALLEKYPQHHGKIRYTQIAPTSRGDVQAYQDIRHQLENEAGRINGKYGQLGWTPLYYLNQHFDRKLLXKIFRYSDVGLVTPLRDGXNLVAKEYVAAQDPANPGVLVLSQFAGAANELTSALIVNPYDRDEVAAALDRALTXSLAERISRHAEXLDVIVKNDINHWQECFISDLKQIVPR

SEQ ID NO: 43135 - protein, 150 aa, Cryptococcus neoformans var. neoformans JEC21
MAPKKVRAPQEAAVSLGPQVAEGENVFGVAHIFASFNDTFVHVTDLTGKETISRVTGGMKVKADRDESSPYAAMLAAQDVAAKCKEVGITALHVKLRATGGTGTKQPGPGGQAALRALARAGMRIGRIEDVTPTPSDSTRRKGGRRGRRL

SEQ ID NO: 43136 - protein, 344 aa, Shewanella sp. ANA-3
MAVFNHVSFDEHEQVVFCHDKESGLKAIVAIHNTNLGPAVGGCRMWNYQSDDEALTDVLRLSRGMTYKNALAGLTMGGGKSVIIADPKRPDREALFRAFGRFINSLGGRYYSAEDVGTTTADIMIAHQETPYMAGLEGKSGDPSPFTALGTYLGIKAAVKHKLGLDSLKGLKIAVQGVGHVGYYLCKHLHEEGAELIVTDIHQASLDKVATDFGAIVVAPQDIYAQDVDVYAPCALGATLNDVTLPQLKAKIVAGCANNQLAEVRHGEQLKEMGILYAPDYVINAGGIINVSFEKDYDAAKSEAKVREIYNTLLKIFTKADAENRTTAAVADEMARAIYQAAKA

SEQ ID NO: 43137 - protein, 273 aa, Ashbya gossypii ATCC 10895
MSRGVLLEALARNRQPKVITFDAYNCLFSTRLPVAEQYSAVGRRHGVDVAPSVLAARFPAGMLFRETSARHPDYGKYTGLSVQGWWTLVIQRLFKPAEVGEKMVAEILQRFQGHGAYKVFPDALWLLEELRVRRPEVVVGVLSNSDPTMRQVLLNLGLGSYFTDAIYLSYDLGAKKPERRAFDAALERILERNPQLLGDLGAEELRAACWHVGDEKSADLCGATGAGWNGILVDRQDIYGQLGQGSAVALGLNQFVVPDFYTVGKLFGLAYNI

SEQ ID NO: 43138 - protein, 354 aa, Bacillus anthracis str. A2012
MESMFNKIFLIVALIGVPLSVLGKTLHWPQTIMFAVYCITIIALAGFMGRATESLAIVSGPRIGGLLNATFGNAVELIISIFALQAGLIEVVLASLTGSVLGNLLLVGGLSFFIGGLKYKRQSFNVYDARHNSALLIFAVVVAFVIPEIFSMKMDAGKTYQLSIGVSIIMIIMYLAALLFKLVTHRGVYQHKSDEVAHEEEPEWSKGKALLILAIATIAVAYVSEALVHTFETVAKSFGWSELFIGVIIVAIVGNAAEHASAIIMAYKNKVNIAVEIAVGSTLQIAMFVAPVLVLLSMFFAQRMPLVFTIPELVSMITAVFLTIAISNDGDTNWFEGGTLLAAYVIMGIGFYLL

SEQ ID NO: 43139 - protein, 699 aa, Cryptococcus neoformans var. neoformans JEC21
MAIPRPLVNSIRSFATRTIPTRKFNLRKSSKMVAAASVSHPSELTVPNKTAHAFDKSTLDALLARRFFFAPSFEIYGGVAGLYDYGPTGSALQANILDAWRKHYIIEEDMLELDTTIMTLSDVLKTSGHVDKFADWMVKDVKNGEIYRADHLVEGVLEARLKGDKEARGVKEEEKKEEEDDKKKKKKKIVKTEAVKLDDNTVAEYEYLLAQIDNYTGPELGDIIRKHKITNPTTGNEVSEPVEFNLMFESNIGPTGHIKGYLRPETAQGHFVNFARLLEFNNGKVPFASAQIGKSFRNEIAPRQGLLRVREFTMAEIEHYVDPLDKRHARFNEVKDVVLTLLAKGVQSEGRTEIVKKTVGEAVAEGIVDNETLGYFLGRTQLFLTKIGIDPARLRCRQHMANEMAHYATDCWDFEIQSSYGWIECVGCADRSAYDLTVHSVRTKQPLRVQQRLDQPRTVEKLECTFDAKAFGMKFKKDATMIKETLLGLEKEKLQCIKDELENGSSNVQCADGKSYEITPDLVKINPITVTEHMREFIPNVIEPSFGIGRILYCVLEHTYWAREQDAARGVLSLPALVAPIKCLIVSISQDAQLRSKIHEVSREMRKRGIASRVDDSSATIGKKYARNDELGTPFGCTVDFATIQNGTMTLRERDSTSQLIGPIEDVISVVDQLVKGVLDWEGASQKLEAYSGVQDVDA

SEQ ID NO: 43140 - protein, 371 aa, Pyrococcus horikoshii OT3
MGKCLHSQNLNLHRHFFNSFSPKINPGEGNMSERLKVGVIGCGNIFNLAHKPALRSLRTIAKVVAVMDINEEAAKKAGKELNAKVFTSLDEFLEQDMDVVEVLTPTYTHAEIAIKALKAGKHVIVEKPIALTSEEAEKMIKEAEEQGLKLFVGHVRRFDKRWTQIKEVIKTRNILPMQIRKIEVQHLPFPADYWYWDESKSGGVIIDLGVHVTDFLRWFFESEPVEVFAVGKAIRGEARVNKTYDHVVMFIKFEGNKTGIGEVSWSYPMTPKYGVFYHHLDIIGKNGRIRYTPLDTPVVGVIKSSFEMPRFSPMLSTFPQAFEAELRHFFECIKSNCEPVVTARDALIALQIAEKARESIKKGEPVKVEVN

SEQ ID NO: 43141 - protein, 477 aa, Methylocystis sp. SC2
MSVQATHSGSARIDPRYDHAALAAARESDRFSLHTKHLNEMWVRVLKTIGYDVGFTRGLGPYLWDRKGDRYLDLLSGWGVFALGRNHPAVRDALVSVLDGELANLVQLDVSVLAGVLAEKLLGYAPWLEKVFFANSGAEAVEAAIKFARAATGRPGILHCAHSFHGLTYGSLSMNGDDIFKKGFGPLLPNAREVAFDDLDALERALAGRDVAAYFVEPIQGKGVNIPQEGYLLGAQALCRKYGTLFVADEIQTGIGRTGRFFAIDHYPGVEPDMIVVAKALSGGHVPVGAVLTRKWIFDKVFDRMDRAVVHGSTFSKNDLAMAAGVATLDVLKNERVIENAAKTGDRLLASFQRMAGGYELVADVRGKGLMIGVEFGPPKSFKLKAAWNLLETVNSGLFCQLISIPLFRDHKVLTQVAGHGNHTIKLLPPLTISDEDCDWIEQSFDAVIADAHKAPSAVWSLGKTLAEHAIKARMSG

SEQ ID NO: 43142 - protein, 266 aa, Glycine max
  misc_feature (230)..(230): Xaa can be any naturally occurring amino acid
  unsure (1)..(266): unsure at all Xaa locations
MDIEQKQSELIDHFVKRASAASDAAALSSVLVEATSHPSLFAFSEILALPNLLQLEATENSAYLDMLRLFAHGTWNDYKSNADRLPQLIPDQILKLKQLTVLTLAETYKVLPYDQLMQELDVTNVRELEDFLINECMYAGIVRGKLDQLRRCFEVQFAAGRDLRPDQLGNMIQTLSNWLSTSENMLVSIQEKIKWADAMSEIDKKHRKDVEEKVEEVKKSIFKKLHTVSXADIDFRGHEEICSESGGVMDYEEDRSRPKRRRHPIS

SEQ ID NO: 43143 - protein, 389 aa, Triticum aestivum
AYLGDSIEQVCTKKQAGTGPEFPGYRRPTRPELEVVEGMKLDRGYISPYFITNRKTQKCELEDPLILIHDKKVSNMHAVVKVLEMALKKQKPLLIVAEDLESEALGTLIINKLRAGIKVCAVKAPGFGENRKANLQDLAILTGGEVITEELGMNLENFDPEMLGTCKKVTVSKDDTVILDGAGDKKNIEERADQIRSAIEQSTSDYDKEKLQERLAKLSGGVAVLKIGGASEAEVSEKKDRVTDALNATKAAVEEGIVPGGGVALLYASKALDKLQTANFDQKIGVQIIQNALKTPVYTIACNAGVEGAVVVGKLLEQENTDLGYDAAKGEYVDMVKVGIIDPLKVIRTALVDAASVSSLMTTTEAIIVEVPKEEKEAPAMGGMGGMDY

SEQ ID NO: 43144 - protein, 391 aa, Kluyveromyces lactis NRRL Y-1140
MAAPANLYPGLNDISDVLEEVPLDVSRYMTLLYEIDAKCVNIIPELNKCIKGFLGGRNVPDESKVPLRVINQWFQELIPSLEEKMHVSSIAYDSLERLTDRLELAYEVAISNQEIPEKLRLGNDNHPAMHLHRELMAKVESNVMTKSQQALKSESRREAMAAKKTTGGTAVQGGNAAGTANSGSVGSTAGSTSTSGTGASTAVAGSEPVVAAVGSHGNAPNQGANTQTNGHNRSSTMAGHKNGNAHNHNHNDNSHSHADDIQPANTKKRRNNNGTTTVSTSSSNNNNSSANSTAAQRRNKKRVNTTAANNGVTGSNTTAVNAVNASNKYQNRPKINEYGEALYCYCNQVAYGEMVGCDGENCQLEWFHLPCIGLETLPKGKWYCDDCLKKN

SEQ ID NO: 43145 - protein, 389 aa, Salmonella typhimurium LT2
MTDTTILQNNTHVIKPKKSVALSGVPAGNTALCTVGKSGNDLHYRGYDILDLAEHCEFEEVAHLLIHGKLPTRDELNAYKSKLKALRGLPANVRTVLEALPAASHPMDVMRTGVSALGCTLPEKEGHTVSGARDIADKLLASLSSILLYWYHYSHNGERIQPETDDDSIGGHFLHLLHGEKPTQSWEKAMHISLVLYAEHEFNASTFTSRVIAGTGSDVYSAIIGAIGALRGPKHGGANEVSLEIQQRYETPDEAEADIRKRVENKEVVIGFGHPVYTIADPRHQVIKRVAKQLSEEGGSLKMYHIADRLETVMWETKKMFPNLDWFSAVSYNMMGVPTEMFTPLFVIARVTGWAAHIIEQRQDNKIIRPSANYTGPEDRPFVSIDDRC

SEQ ID NO: 43146 - protein, 384 aa, Xanthomonas campestris pv. vesicatoria str. 85-10
MNDTATAGFKPKKSVALSGTAAGNTALCTVGRSGNDLHYRGYDILDLATTSEFEEIAYLLVHGKLPNSGELRGYKAKLRSLRGVPAAVKTALEQLPPSAHPMDVMRTGVSVLGCLQPEKDDHNHPGARDIADKLMASLGSMLLYWYHYSHNGKRIEVETDDDSIGGHFLHLLHGFAPKDSWVRAMHTSLILYAEHEFNASTFASRVIAGTGSDMYSAIAGGIGALRGPKHGGANEVAFEVQKRYDAPDEAEADIKARVERKEVVIGFGHPVYTVSDPRNKVIKEVARELSDEQGSRKMYDIAERLESVMWDIKKMFPNLDWFSAVSYHMMGVPTAMFTPLFVLARTAGWSAHIIEQRMDGKIIRPSANYTGPEDQVFVPLDQRS

SEQ ID NO: 43147 - protein, 610 aa, Zea mays
  misc_feature (520)..(520): Xaa can be any naturally occurring amino acid
  unsure (1)..(610): unsure at all Xaa locations
METLLAGNPANGVAKPTCNGVGALPVANSHAIIATPPAAATLAPAGATLGRHLARRLVQIGASDVFAVPGDFNLTLLDYLIAEPGLTLVGCCNELNAGYAADGYARSRGVGACAVTFTVGGLSVLNAIAGAYSENLPVVCIVGGPNSNDYGTNRILHHTIGLPDFSQELRCFQTITCYQAIINNLDDAHEQIDTAIATALRESKPVYISVSCNLAGLSHPTFSRDPVPMFISPRLSNKANLEYAVEAAGGFLNKAVKPVMVGGPKIRVAKAREAFAAVADASGYPFAVMPAAKGLVPEHHPRFIGTYWGAVSTTFCAEIVESADAYLFAGPIFNDYSSVGYSLLLKREKAGIVQPDRMVVGDGPAFGCILMPEFLRALAKRLRRNTTAYDNYRRIFVPDREPPNGKPNEPLRVNVLFKHIKGMLSGDSAVVAETGDSWFNCQKLRLPEGCGYEFQMQYGSIGWSVGATLGYAQAAKDKRVIACIGDGSFQVTAQDVSTMLRCGQKSIIFLINNGGYTIEXVEIHDGPYNVIKNWDYTGLVNAIHNSEGNCWTMKVRTEEQLKEAIATVTGAKKDCLCFIEVIVHKDDTSKELLEWGSRVSAANSRPPNPQ

SEQ ID NO: 43148 - protein, 266 aa, Oryza sativa
MGLPEQPSGSSGPKAELPVAKEPEASPTGGASADHADENNESGGGEPREGAVVAAPNRRPRGRPPGSKNKPKPPIFVTRDSPNALRSHVMEVAGGADVADAIAQFSRRRQRGVCVLSGAGTVANVALRQPSAPGAVVALHGRFEILSLTGTFLPGPAPPGSTGLTVYLAGGQGQVVGGSVVGSLIAAGPVMVIASTFANATYERLPLEEEEEGSGPPMPGGAEPLMAGGHGIADPSALPMFNLPPSNGLGGGGDGFPWAAHPRPPY

SEQ ID NO: 43149 - protein, 113 aa, Pelargonium zonale
WSKYGQKMAKGNPCPRAYYRCTMAAGCPVRKQVQRCAEDRTILITTYEGNHNHPLPPAAMAMASTTSSAARMLLSGSMPSADGIMNSNFLTRTLLPCSSSMATISASAPFPTV

SEQ ID NO: 43150 - protein, 397 aa, Oceanobacillus iheyensis HTE831
MSVYRKVLEYEDQLIEWRREFHRFPELSFEEFHTSKRIVEILQTMNHIQIEKGLGTPTSVIATITTGEGPVVALRADMDALPIQEQTHTPYESQNPGVMHACGHDAHTAILLGAAKVISVLAQSKAWEGTIKLIFQPAEEAQDEHGLSGSPYLLQAGVYDQVEAAFALHMCPWKKTGQLLINDGFSMASVDEFEATIYATGGHGGYPEKSTDPIWMLSLVLPGLYGIISRRIAAAEKGVISVGEIQAGNATNIIPAKASIRGTIRSYTPTIRDQLERELHQVFQMVHSLGGEYRLNVSRGEPALYNDPYLNQIVRHSVRKIQTHIDLFEDNFGMGGEDFGYVSQKLPATMFFLGCALEEDYSRDLHTPVFDIDESSLVLGVTILVESALARLKQATI

SEQ ID NO: 43151 - protein, 352 aa, Cochliobolus heterostrophus
MPPAGSGSSRKISFNVSEQYDIQDVVGEGAYGVVCSALHKPSGQKVAIKKITPFDHSMFCLRTLREMKLLRYFNHENIISILDIQKPRNYETFTEVYLIQELMETDMHRVIRTQELSDDHCQYFIYQTLRALKAMHSANVLHRDLKPSNLLLNANCDLKVCDFGLARSAASTEDNSGFMTEYVATRWYRAPEIMLTFKEYTKAIDVWSVGCILAEMLSGKPLFPGKDYHHQLTLILDVLGTPTMEDYYGIKSRRAREYIRSLPFKKKIPWKAIFPKTNDLALDLLERLLAFNPVKRISVEDALKHPYLEPYHDPDDEPGADPIPEEFFDFDKNKDNLTKEQLKLLIYQEIMR

SEQ ID NO: 43152 - protein, 128 aa, Pseudomonas putida KT2440
MAYSEKVIDHYENPRNVGKMNAEDPDVGTGMVGAPACGDVMRLQIKVNEQGVIEDAKFKTYGCGSAIASSSLATEWMKGKTLDEAETIKNTQLAEELALPPVKIHCSVLAEDAIKAAVRDYKQKKGLI

SEQ ID NO: 43153 - protein, 221 aa, Arabidopsis arenosa
MDSSLKTQEPQVVDTPETTPSPIAQEPPQVVDKPVVVPSPIAQEPDNDVPAPGNEFAEFAAGCFWGVELAFQRIPGVTVTEVGYTQGISHNPSYEDVCTNTTNHAEVVRVQFDPKECTYETLLDLFWSRHDPTTLNRQGKLLGAQYRSGIYFYTPEQEKLARESLEKEQTKLEDKIVTEILPAKKFYKAEEYHQQYLVKGGMHGNAQSPAKSCKDPIRCYG

SEQ ID NO: 43154 - protein, 150 aa, Hordeum vulgare subsp. vulgare
MSIVRRSNAFDPFADLWADPFDTFRSIVPAFSGNSETAAFANARVDWKETPEAHVFKADLPGVKKEEVKVEVEDGNVLVVSGERTKEKEDKNDKWHRVERSSGKFVRRFRLPEDAKVEEVKAGLENGVLTVTVPKTEVKKPEVKAIEISG

SEQ ID NO: 43155 - protein, 202 aa, Arabidopsis arenosa
MNILNRLGLGSSGQTNMNPSPIAQGNDGDAPSPGNQFAQFGAGCFWGVELAFQRVPGVTQTEVGYTQGIVDKPSYEDVCSGTTGHAEVVRVQYDLNDCSYESLLDLFWSRHDPTTLNRQGNDVGTQYRSGIYFYTPEQEKLARESLERHQQQMERKIMTEILPAKKFYRAEEHHQQYLSKGGRFGLGQSTAKGCNDPIRCYG

SEQ ID NO: 43156 - protein, 430 aa, Thermobifida fusca YX
MATHLKSHELFNRARSVIPGGVNSPVRAFKAVGGTPPFMVSGKGPYLTDADGNTYVDLICSWGPLILGHAHPAVVEALAKAAAQGTSYGAPTEAEVELAEEIVSRTPVEKVRLVNSGTEATMSAIRLARGATGRAKVVKFAGNYHGHVDALLAAAGSGVATFALPDSPGVTGASAADTIVLPYNDIAAVEAAFAEAGDEIACVIAEACPANMGVVPPRDGFNAKLREITARHGALLILDEVLTGFRVSPSGWYGLEGVAPDLMTFGKVMGGGLPAAAFGGRADLMDQLSPEGSVYQAGTLSGNPLATAAGLATLRNATPEVYAHIDAAAARVSAAVSEALTAEGVPHRIQHGGNLFTVFFTDTEVVDFDGARAQNTARYAAFFQAMLEQGVYLPPAAFEAWFFSAAHDDAALDRVVSALPAAAKAAAQVA

SEQ ID NO: 43157 - protein, 303 aa, Arabidopsis thaliana
MNWLPEAEAEDDFKGLLSGDFFDDLINHLDVPLDDIDTTNGEGDWVDRFQDLEPPPMDMFPTLPSDLTSCGSGMAKAPRVDIQRNIPALKQSYSSEALSSTLHQSSAPPEIKVSKLFQSLSPVSVLENSYGSLSTHNNGSQRLAFPVKGMRSKRKRPTTLRLSYLFPSEPRKPEKSTPGKPESECYFSSEQHAKKKRKIHLTTRTVSSTLEASNSDGIVRKCTHCETTKTPQWREGPSGPKTLCNACGVRFRSGRLVPEYRPASSPTFIPAVHSNSHRKIIEMRRKDDEQFDSSMIRAVISRG

SEQ ID NO: 43158 - protein, 667 aa, Haloarcula marismortui ATCC 43049
MIYMRGRPRSSVHCLFVGAGSIAAEYAAELADSPLSLAGVCDLEEDRATALAAAHDCPAFTDLDTALSAVDAPLVVNLTNHAAHAPVTRTALEAGRHVYSQKPLALDEAAAAELLALAQDRNLALGCAPGTPDAPSQRRAGQMLADGRMGPVQLGYAHAHVGRVTDWHDRPGSFLSIGPLYDGGVYPLALLVSWFGPVKSVQTATTLDSWPEREPERPSAPSHVEAMLSFDGGLTVRLTASFYAPHRSREFYGLELHGDDGSLYLRGTGAMADSTTAVQYGRIGREYIDAPAQHPTQPYRYLDPVESLAASVTRGTPSRMTGRRGAHIVAVCNAIETAAETGESETVSDYGTAADSTPPPTVTPDRDWDGSREQAIRLPAIGFGCSRYRDGTYIDRADSIAAALDAGYRLLDSAELYGNEHRIGRILAAPGAPDRRRVFILGKVWRTNHRRKHMLTACRSSLDELGIDAFDCYALHWPEALAHRGSLTRLAEKSVARQEALTFPKNDRGDIETDSVSLQRAWENLEALHERGWTRTLGLCNVSQTQLETVIETGTVRPALVQVERHPYQPQTDLIEYCHERGIRVVAHSPLSAPGLLDEPVLAAIAEEYGLSPAGVVLAWNVTQGVVPIPSSTTPSHIVENLAAAGQRLDAEACARIEALRQPDFER

SEQ ID NO: 43159 - protein, 182 aa, Zea mays; identical to SEQ ID NO: 924

SEQ ID NO: 43160 - protein, 356 aa, Medicago sativa
MSLLSDLINLDLSETTEKIIAEYIWIGGSGLDLRSKARTLPGPVTDPSQLPKWNYDGSSTGQAPGEDSEVIIYPQAIFKDPFRRGNNILVMCDAYTPAGEPIPTNKRHAAAKIFSHPDVVAEVPWYGIEQEYTLLQKDINWPLGWPVGGFPGPQGPYYCGAGADKAFGRDIVDSHYKACLYAGINISGINGEVMPGQWEFQVGPSVGISAGDEIWVARYILERITEVAGVVLSFDPKPIKGDWNGAGAHTNYSTKSMREDGGYEVILKAIEKLGKKHKEHIAAYGEGNERRLTGRHETADINTFLWGVANRGASIRVGRDTEKAGKGYFEDRRPSSNMDPYVVTSMIADTTILWKP

SEQ ID NO: 43161 - protein, 396 aa, Listeria monocytogenes str. 1/2a F6854
MRTQLMNMLQERKDEITQIRRHLHEHPELSFHETETANFIQDFYKGKDVEVATEVGNGHAVVVTIKGEKPGKTIALRADFDALPIEEQTELPFKSKNPGVMHACGHDGHTAYLLVLADCLIQLKENIPGTIKIVHQHAEETPPGGAKSVVESGILDDVDQIFGIHVFPFGESGQVYYHSGYAMAGRTYFKLKIQGVGGHGSSPHMANDAIVAGAYFVTAIQTVVSRRLNPFDTGVITIGSFDGKGSFNVIKDAVELEGDVRYMNTENRDKIDAEIHRIVAGIEAMFGVTVELTYTNDYPPLYNDPAVTEQVVASLQKGVGEYLTGISEYDMLSGSEDFAYYLQKIPGVFFYIGAKPKNTSIAYFNHHPKFDIDEDALLVAAKSVADVVLDYYKLNG

SEQ ID NO: 43162 - protein, 607 aa, Cryptococcus neoformans var. neoformans JEC21
MPPRRQSQASQTKGKQPAQETQDDSDEETQGGRSGPLTDADIESRAGMLVRLALFQEYKRIPIRRTEVAKQILPDNTRAFPLVFARAQTILRDTFGCELYEIRARGKGESTEDPSQTQAMTQTQKKGKGKGRQPNRGLDAIDEEEEEEDEEEEDATITQKVKRETGTKVYILQNILPGKIIEAMAEPAPLPHGIEVEGDDDDSGALLQWDKGDGGIIGHVGLLGIRTLILSLVLCHNRIINDDHLHALLRRLNLHRETVLPYASKDTTDPHLTLDKYLELLAKYQYLEKIKNPGPMGQAEGGTVEWKWGSREAEFSSKAAAKFMEEIMLGKEGESDSEEEDEDQPRRRGRGAPRERASRPQKRQKLRDDIIKAAGGVPLKPRHSAHYGQRQHPHQHLHPQQNYNHQHASMSEHGQEEYPPVPLQTGPMIAPHQDLHSFLESFWTRQMDTVEGETPDWKSYNLPLARIKKVMKSDEEVKMISAEAPIMFSKACEIFISELTCRAWLVAESHKRRTLQKSDVAAAIAYSDMFDFLIDIVPRDDGGVGGGGSGGGVGGSGTVTGAGSVVADEGMERDEDDPEGDEGEGEGEGFDGQEEEGDLYSEYVQGD

SEQ ID NO: 43163 - protein, 286 aa, Arabidopsis thaliana
MEKNSFKLSNPLEMRMAESTRIRAKYPERVPVIVEKAGQSDVPDIDKKKYLVPADLTIGQFVYVVRKRIKLGAEKAIFVFVKNTLPPTASDLATVAVSAANRSPTFVNYTGKKGLMRWDDDDDDDDEDSSEESSSSSASDSNVDNTEIGEKKKKRKSKKPIARFAKKDKKAFDYESLQQHGYKAVGLSDIPAPMEKQDWSWTTGKDKQRVEEVKESYQEREATRAAAVTGGETIANAQLRNDRKNLSFSQKEKKKRDLGQASRGKNYVEEEKRQLRESGVYSGFDS

SEQ ID NO: 43164 - protein, 282 aa, Ashbya gossypii ATCC 10895
MAPTFGVTHAMQLKQYQEQVAQQLLENTKHLESLTHPGSKVHFPVDVETFPEPDMRLRVFFFDIDNCLYKRSTKIHDLMQVSIQQYFKHQLCLGDDEARELNHTYYRQYGLAIRGLVKHHQIDALDYNRMVDDALPLQNILQPDPELREMLLRLRTSGKVDKLWLSTNAYKNHGLRCVRLLGIADLFDGITYCDYSKEDLICKPDPLAFDKARRESGLGAYSNAYFVDDSGNNIRTSLELGILNCAHVVEREVDEDLGNSPRGCKIISQITDIPEAFPELFA

SEQ ID NO: 43165 - protein, 471 aa, Glycine max
  misc_feature (175)..(175): Xaa can be any naturally occurring amino acid
  misc_feature (203)..(203): Xaa can be any naturally occurring amino acid
  unsure (1)..(471): unsure at all Xaa locations
MKKQVQGPIPNACLSESSRGARWSLNGMTALVTGGTRGIGHAIVNDLAAFGAAVHTCSRNQTELKKCLQEWQTQGFQATGSVNNVGTNFRKPTVEYSAEEYSELMTVNLDSGYHLCQLVYPLLKASVKGSIVFISSVAGVLSKNLACEWANDNIRSNCVVPWATRTPLVEHVICXQNQKFVEDILSRTPLKSIAEAEEVSSLXRSSINRGARWSLNGTTALVTGGTRGIGHAIVSDLAAFGAAVHTCSRTQTELNKCLQEWQSLGFQVTGSVCDVSSPSQREKLIEEVTSILNGKLNIYVNNVGTNFRKPTIEYTAEEYSQLMTVNLDSSFHLCQLAYPLLKASENGSIVFISSVAGVVSLGTGAVYAASKAAINQLTKNLACEWAKDNIRSNCVVPWATRTPLVEHLLRDQKFVDDIMSRTPIKRIAEPEEVSSLVTFLCLPAASYITGQVICVDGGLTVNGFQPSMRIT

SEQ ID NO: 43166 - protein, 395 aa, Listeria monocytogenes str. 1/2a F6854
MKEKLFQKLDEKRDRMIEIRRYLHEHPELSFQEENTAKYIADFYKEMDCDVRTHVGGNGVVVTIDTGKPGKTLAIRADFDALPIQEETGLAFASKNPGVMHACGHDGHTAYMLILGETLIEMKQELTGKLVILHQHAEETPPGGAIQMIQDGALDGVDNVLGIHVMSTMKTGEVFYREGAIQTGRSYFKLKVQGQGGHGSSPHLANDAIVAASEFVVAVQTVISRRLNPFDVGSITIGSFDGKGSFNVIKDAVELEGDVRSMSEEARNIIQKEITRIVSGIEAMFGVTCELDYKNDYPVLNNDEALTDFVVKSIKGVKIPEITDVVRCEPQPPSEDFAYYAKERPSSFFYVGAMPADGHFYPHHHPKFDINEDALLIASKAMGACVVDYLKGENN

SEQ ID NO: 43167 - protein, 183 aa, Streptomyces avermitilis MA-4680
MTTTSRAQGATVWLAGLPSAGKTTIGRILAGRLRSQGHRVEVLDGDEIRRFLSAGLGFSRADRHTNAQRIGLVAEVLARNGVLAVVPVIAPYADSREAVRKRHEASGTPYLEVHVATPVEVCSERDVKGLYARQAAGRLKGLTGVDDPYEPPVDPALTLETQGQTPEESAGAVYAVLAARGLV

SEQ ID NO: 43168 - protein, 497 aa, Brassica napus
MELSSSPLPPHVMLVSFPGQGHVNPLLRLGKLLASKGLLVTFVTTESWGKKMRTANKIQDRALKPIGKGYLRFDFFNDGLPEDDDASRTNLTILRPQLELVGQQEIKNLVKRYKEVMKQPVTCLINNPFVSWVCDVAEDLQIPCAVLWVQSCACLASYYYYNHKLVDFPTETDPKIDVQIPCMPVLKHDEIPSFIHPFSPYSGLREVIIDQIKRLHKPFAVLIDTFYSLEKDIIDHMTNLSRTGFVRPLGPLYKMAKTLICDDIKGDMSETRDDCMEWLDSQPVSSVVYISFGTVAYVTQEQISEIALGVLNADVSFLWVIRQQELGVNKERHVLPEELKGKGKVIEWCSQEKVLAHPSVVCFVTHCGWNSTMEALSSGVPTVCFPQWGDQVTDAAYMIDVFKTGVRLSRGETEERVVPREEVAERLREVTKGEKATELKKNALKWKEEAEAAVARGGSSDRNLDEFVEKLGVKPVAKQNGSLNQNGSIQKLLLQKS

SEQ ID NO: 43169 - protein, 279 aa, Erwinia carotovora subsp. atroseptica SCRI1043
MWNYSEKVKDHFFNPRNARVVEQANAVGDVGSLSCGDALRLMLRVDPGTETIQEAGFQTFGCGSAIASSSALTELIIGRTLHEAEQVTNQQIADYLDGLPPEKMHCSVMGQEALRAAIANYRGETLEDDHEEGALICKCFAVDEGQIRRAVVANGLTTLEEVINYTKAGGGCTACHEKIELALAEIIEEQAALPEKFKVPEVETSAWRLVADVVAELRPYIQADGGDMALLNVSDHQVTVSLSGSCQGCMMTDMTLAWLQQKLVERTGRYMEVVAAQAA

SEQ ID NO: 43170 - protein, 1032 aa, Listeria monocytogenes str. 4b F2365
MFFTKDKLRGRLDEVALYRYEKTYPIRNFQAAEDMDGEIAARPNNVLYDNELTIGENWSGRDRYVWLKTTITFPDTKTDTRLIGYFDFGNTGDGHNSGFESLLFVNGEPYQGVDQNHREVLFPDSFAGKKVELVFRLWSGLEGGGTPTIQTHQLKEAFIGYLNLVIDDLYFTSKATLKTLDQLEEKNPTYAPLLQAINRAYLAIDWSTPGSEQNLASMATANQILQAALEKMPKNFPIKVAAVGHTHIDVAWLWRLKHTREKAARSFSTVLHLMEDYPEYLFLQSQPQLYAYIKEDYPEIYAKIKTKISEGNWEADGGMWLEADCNIPSGESLVRQMLYGQKFLREEFGKPSSFLWLPDVFGYSWALPQILRKSGIKTFMTTKISWNQYNRMPHDTFQWRGIDGTEILTHFITAPEKNSRISTYNGKMTARELVGLWDKYQDKEVNQELLLAYGYGDGGGGVNREMLEMRRRYDTMPGIPEVKPKSATSYFNDLHETINTTDQYVHTWNGELYFEYHRGTYTSQAFTKKMNRKIELGLRNSEWLSVLANLKQGTSYPTEKLAGIWQILLRNQFHDIIPGSSIKEVYDDALIEYTEAMTENNTLISNQLTNLTTDADEKITLWNSSTWSRPQYIEISPDNQSNHLAFYDENNAPLPAQKLVNNTWLIQHPNIPALGATTISVKETANILEQPSFHYKNNQLETPFYQIKWNKAGQFTSIFDKKNNRQVIAENARGNVFQLFEDKPMWHDAWDIDLFYQEKQKEISALDSVEITENGPLQFTMKQVLHSEKSQITQWIHFYHESPEIRFETEVDWRDRNQLLKVAFPVAVHASEASYDIQFGNVKRPTHWNTSWDYARFETVGHQWADLSEKNYGVSLLNDSKYGYDIKDSTIRLTLLKAAGYPDPDADLGIHQFTYSLYPHQGDFLDGETVQAAWELNNPIFTSKGEIETFSLFQVTNPYVMIDSIKQAEDGDGIILRLHEFAGTHGEVTITSGYPITSITECNLLEENETSLSNPTFAVAPFEIKTYRIHLA

SEQ ID NO: 43171 - protein, 264 aa, Ashbya gossypii ATCC 10895
MCLTEPGDDKRKAASVFRQLRTRLAAGATVISRDFLFRLVISNRKTVAHRLALTQIYIQLHDTLIRTHTGEHVDTMTFDTPPPAAPVSPSLKFSPQKHKLLTLAAGCFWEQEHMLRKHLGHKIVDLVAGYANGNVPTDTKGVTYERVCVGNTNFAEVVQVAFDPEVLGLSELCDFFFRMHDPTTLNAQGPDVGTQYRSALYAHSDEDLSQVRQILERWQPRWANCIKTEVALAESFYDAEEYHQRYLTNNPTGYQCPTHYLRNV

SEQ ID NO: 43172 - protein, 383 aa, Bifidobacterium longum DJO10A
MSEHIDIDHELITIRHYLHAHPERSFREFGTSIYLTDQLKAHGIEILHNPLETGVVGLIQGEAGPGPRIGLRADIDGLPIVEDSGLEFSSVNEGVMHGCGHDLHMTGLLGAAFWLAEHRDKFAGSIKILFQPSEETGQGARAMIDAGLVDDVEAIIGTHNNPNYAPGQLAIGVEPMMAGCVKFRVTLHAQGTHAGYPYKGTGPIEALASIILSLQTIVSRNVTPFHPLVLSVTEVHGGHVWNVVPAEAGFQGTVRYFHKSDGNLVGRRFKEVVEHTAEAYGISADVVWDDFQDPLVSDPGLAKAVAADVNDYAQLEPIRQSMAGEDFCEFAKVTLPVFAFVGSNGQEGCADWHSPHFVGLDESIPTFVNFYVNTALRVLNELR

SEQ ID NO: 43173 - protein, 671 aa, Glycine max
MSTTKCNKLSSTSPTIHQRRLTRQRKLRYTSDKDAALHSTTSLPASPLPSFKSASSSDHWSSSAVPQPLPRPDSPWIRRHDHHHLGSPPFEHPAFSFRRRAVDHDAVRSLRSASNLGRPSFDPVTPNAKYDLRVNIPPARVLAGNTSSCKDHRELSHDHDSENVYNLRLHFADKSAPNSIFSSPVTSPRRSSNVDFYDILKVSPAKTAQSPDRSPLRSPGSHLNQEGSQLHKFSSRVWPENNHVDANPHPLPLPPKASPQTAHSPPPPQPPPPHLTTENSPSMKGQWQKGKLIGRGSYGSVYHATNLETGASCALKEVDLFPDDPKSADCIKQLEQEIRILRQLHHPNIVQYYGSEIVGDRLYIYMEYVHPGSLHKFMHEHCGAMTESVVRNFTRHILSGLAYLHGTKTIHRDIKGANLLVDASGSVKLADFGVSKILTEKSYELSLKGSPYWMAPELMKAAIKKESSPDIAMAIDIWSLGCTIIEMLTGKPPWSEFEGPQAMFKVLHKSPDLPESLSSEGQDFLQQCFRRNPAERPSAAVLLTHAFVQNLHDQDVQVHSQGQNCPRGDPGPGDDSRRHSPGNSSRNSRGVGSASIRAWFFNKTHNLIGVTSKKYVSEDSNHVTSSRDSPCSMTEMNNPQSPMKSSALNYMTVTNPSNIPLSAVMKIIRNI

SEQ ID NO: 43174 - protein, 544 aa, Vibrio sp. Ex25
MTPAELKRLYHIAKVQLEYGLDELLPDHQLTKAPLLLRKSLFWIKNKHPEKPLGERLRLALQELGPVWIKFGQMMSTRRDLFPPHIADPLALLQDQVAPFDGELAKKQMEQALGGPLENWFTEFDIKPLASASIAQVHTARLKDSNQEVVLKVIRPDIRPVIDSDLKLMHRMARIVAGAMPEARRLKPVEVVREYEKTLLDELDLRREAANAIQLRRNFEGSEELYVPEVFPDFSNETVMVSERIYGIQVSDIDGLKANGTNMKLLAERGVSVFFTQVFRDSFFHADMHPGNVFVKPEHPENPMWIGLDCGIVGTLNSEDKRYLAENFLAFFNRDYRRVAELHVDSGWVPADTNVDEFEFAIRIVCEPIFAKPLCEISFGHVLLNLFNTARRFNMEVQPQLVLLQKTLLYVEGLGRQLYPQLDLWETAKPFLEEWMMNQVGPQALVNAIKDRAPFWAEKLPELPELLYDSLKQGKAMNQRMDQLYQGYRQSKRQQATGKFLFGVGATLVVCSAILVNNAFEQLSLASGIAGVTFWLLSWRAYRQ

SEQ ID NO: 43175 - protein, 141 aa, Pseudomonas putida KT2440
MAVQRTFSIIKPDAVAKNVIGKITTRFEEAGLKIVASKMKQLSKAEAEGFYAEHSERGFFGDLVAFMTSGPVVVQVLEGENAIAKNRELMGATNPKEAAAGTIRADFAESIDANAVHGSDSEAAAAREIAYFFAATEVTTR

SEQ ID NO: 43176 - protein, 158 aa, Xanthomonas campestris pv. vesicatoria str. 85-10
MNIVRYPQFPTHALQNEIKHVFDRFFEQNGDTDESAVVTAQWVPRVDIKEEPNHFVLYADLPGIDPSQIEVQMDKGILSIKGERKSESSTETERFSRIERRHGSFHRRFALPDSADADGITAAGHNGVLEIRIPKRPAATPRRIQVGNGQSTSGSTVQ

SEQ ID NO: 43177 - protein, 501 aa, Oryza sativa
MVVSVAATDSDTAQPVQYSTFFASRYVRDPLPRFRMPEQSIPREAAYQIINDELMLDGNPRLNLASFVTTWMEPECDKLIMDSVNKNYVDMDEYPVTTELQNRCVNMIAHLFNAPIKEDETAIGVGTVGSSEAIMLAGLAFKRKWQNKRKEQGKPCDKPNIVTGANVQVCWEKFARYFEVELKEVKLSEGYYVMDPVKAVEMVDENTICVAAILGSTLTGEFEDVKLLNNLLTEKNKETGWDVPIHVDAASGGFIAPFLYPELEWDFRLPLVKSINVSGHKYGLVYPGVGWVIWRSKEDLPEELIFHINYLGTDQPTFTLNFSKGSSQIIAQYYQLIRLGFEGYKNIMQNCMENTAILREGIEATGRFEILSKEAGVPLVAFSLKDSGRYTVFDISEHLRRFGWIVPAYTMPANAEHVAVLRVVIREDFSRSLAERLVSDIVKILHELDAHSAQVLKISSAIAKQQSGDDGVVTKKSVLETEREIFAYWRDQVKKKQTGIC

SEQ ID NO: 43178 - protein, 407 aa, Streptomyces avermitilis MA-4680
MMPEAVIVSTARSPIGRAFKGSLKDLRPDDLTATIIQAALAKVPELDPKDIDDLMLGCGLPGGEQGHNLGRIVAVQMGMDHLPGCTITRYCSSSLQTSRMALHAIKAGEGDVFISAGVEAVSRSVKGNSDSLPDTHNPLFAEAEARTAAVAESAGASWHDPREDGLIPDAYISMGQTAENLARIKGVTRQDMDEFGVRSQNLAEEAIKNGFWEREITPVTTPDGTVVSKDDGPRAGVTLEGVQGLKPVFRPDGLVTAGNCCPLNDGAAALVIMSDTKARELGLTPLARIVSTGVTGLSPEIMGLGPVEASKQALRRAGLTIDDIDLVEINEAFAAQVIPSYRDLGIDLDKLNVNGGAIAVGHPFGMTGARITGTLINSLQFHDKQFGLETMCVGGGQGMAMVIERLS

SEQ ID NO: 43179 - protein, 207 aa, Arabidopsis arenosa
MASFQESSDLEAIQSHLFEDLLVCDGFMGDFDFDASFVSGLWCIEPQVPKQEPDSPVLDPDSFVNEFLQVEGESSSSSPELNSSSSSTYETDQSVKKAERFEEEEEARHYRGVRRRPWGKFAAEIRDPAKKGSRIWLGTFESDVDAARAYDCAAFKLRGRKAVLNFPLDAGKYEAPANSGRKRKRSDVQEELQRTQSNSSSSSCDAF

SEQ ID NO: 43180 - protein, 130 aa, Zea mays
  misc_feature (42)..(42): Xaa can be any naturally occurring amino acid
  unsure (1)..(130): unsure at all Xaa locations
MGRLFLMHLDGNVYSCKHCRTQLGVASDIISKAFHCRHGKAXYLFHKVANVTSGVKEDRMMMTGMHTVSDIFCVGCGSIVGWKYEAAHEKSQRYKEGKFILERYKVSGPDGSQYWIPQDPHLGGSDADDI

SEQ ID NO: 43181 - protein, 76 aa, Arabidopsis thaliana
  misc_feature (44)..(44): Xaa can be any naturally occurring amino acid
  unsure (1)..(76): unsure at all Xaa locations
LKALAEDCNQPYYFKLEKALCAEHEFRSLTDPSTKTRGDWASTXMMDSEGTARKGVEGSCMAVKDFTRGDNMPQRH

SEQ ID NO: 43182 - protein, 573 aa, Cryptococcus neoformans var. neoformans B-3501A
MSSSNSTVRVALRGGAILNNPRFNKGSAFTHQERSEFALRGRLPYAVDSLEIQVKRAYEQYKSRETNILKNSFLQSMKAQNWTLFYALLQAHLVEMFPIVYTPTEADAIADYSHLFRRSEGLYLTPPGEKNMEEDFLDACEGRELELIVVSDGEAILGIGDQGSGGIGISGAKAVIYSLIAGVDPAKCLAITLDVGTNNQDLLNDPLYIGYREKRLRDDPYDQFVDKFVGLVKKHQPECLLHFEDFGVTNAERLLRRYRDQHSIFNDDIQGTGAVTLAAVQAAISVTKSSLKDQRIVIYGSGSAGLGIARQLRDAIALDSSGSPSEAAKQFWLIDKHGLIKKSLGKDKIRSEIEDEFIRDEGDWGEGETGLKEVVKKIKPTILVGTSTQAGAFTEEVVKEMSKHVDRPIIFPLSNPTRLCEAQPKDVSEWSKGKALMSTGSPFDPVDISDSGEKYIVAECNNALIYPGLGLGSILAKSSKMTDKMIIAGAQRLGQLAPALVKKNANKSLLPDFGDAQKVNFEVALAVLEQAMEDGVARAKDIPEDKDERRKWAENNRWSPGYPNFKYDPEGLK

SEQ ID NO: 43183 - protein, 836 aa, Emericella nidulans
MANRDINDFGGFDDRQLPAIRSPDYIESNEESHIAHMATYTSSVPVGDYAYTMHNSMLAYDTANEGNSVSVSLGSESAFAYDVSTYPSSTTALNYDLNQFASLHSHAPGSDNASTYSSAQRHYWTQPHTSGGMVSSTQTLLSHPAQPSRAAEPSAAQKIPPGQLQDINPFPQASVSATSHRPIQPKSLAGKGARSEASRSSTPYPNVYSRSGYDMMGILAEVVSRDNPRIDLGPVDLSCAFVLCDLTMEDSPIVYVSHAFERLTGYNEKEIVGRNCRFLQSPDAKVEKGEPRKFVDSHTVSRLRSAVDRRSEIQVSIINYRKGGQPFLNLVTMIPVRWNAKDYYVGFQVDLVERPEAVTRRNSDGTYMIDYHRSQLPAYVVPAADMYRDGHVPTAMLSPRQVSVILNDFVKGQSVAVNLFHHMLVENTDDLIFVLSFEGEFLYLSPSCQTVLEYKPNDLCGKTLSAICHPSDIGPVTRDMRTCTTGDPISILYRIRRKESGYTWFENHGGWHITQRGRQFMVLVGRLIPMYSPIQLANVESGGLAENDIWAKLSLSGIILFMSSKSRAVLGQPSDDLIGKRLQDFLVTDNFHSEPAVQQALETSRHNQQATFTHRIRHRKGHIISAQITLYPGDIVYGASKPAFLIAHLRFPRELQLQASTTEDQSNSQSQSQTSSDTGPGDYKTPQNQQQTAESHQKPHPNFPQPPTSSATLAVPSSASPNSAEPPTELGMHLFEELNPTRGSNWHFDVRELEKQNRHLTDEAQRLLARRRKRKRKQSAAAMEKSCAMCGTRTTPEWRRGPSGNRDLCNSCGLRWAKQVRSAAAVHSQAKSGGEG

SEQ ID NO: 43184 - protein, 143 aa, Medicago sativa
DPFSLDVWDPFKDFPFTNSALSASSFPQENSAFVSTRIDWKETPEAHVFKADLPGLKKEEVKVEIEDDRVLQISGERNVEKEDKNDQWHRVERSSGKFMRRFRLPENAKMDQVKAAMENGVLTVTVPKEEIKKPEVKSIEISS

SEQ ID NO: 43185 - protein, 338 aa, Debaryomyces hansenii CBS767
MASKAATTATTIVSSPSIAPLKYSKDRKVGEGTYAVVYLGNQISTKRKIAIKEIKTGLFKDGLDMSAIREVKYLQELRHPNVIELVDVFLTTNNLNLVLEFLPCDLEVLIKDTSIVFKPSDIKSWLLMTLRGIHHCHRNFILHRDLKPNNLLLAPDGELKIADFGLARSLGNADELLTSNVVTRWYRAPELLFGARHYTVAVDIWSIGIIFAELMLRTPYLPGKDDTDQIDVTFRALGTPTEQIWPNVSNLPLYNALRVYPPPSRQELRNRFSAATEKALDLLILMTQLDPNRRCDLTQALLHEYFLEFPRATEPLQLPKKSNGKEEDSEPENKKRKL

SEQ ID NO: 43186 - protein, 802 aa, Arabidopsis thaliana
MNFGSLFDNTPGGGSTGARLLSGLSYGNHTAATNVLPGGAMAQAAAAASLFSPPLTKSVYASSGLSLALEQPERGTNRGEASMRNNNNVGGGGDTFDGSVNRRSREEEHESRSGSDNVEGISGEDQDAADKPPRKKRYHRHTPQQIQELESMFKECPHPDEKQRLELSKRLCLETRQVKFWFQNRRTQMKTQLERHENALLRQENDKLRAENMSIREAMRNPICTNCGGPAMLGDVSLEEHHLRIENARLKDELDRVCNLTGKFLGHHHNHHYNSSLELAVGTNNNGGHFAFPPDFGGGGGCLPPQQQQSTVINGIDQKSVLLELALTAMDELVKLAQSEEPLWVKSLDGERDELNQDEYMRTFSSTKPTGLATEASRTSGMVIINSLALVETLMDSNRWTEMFPCNVARATTTDVISGGMAGTINGALQLMNAELQVLSPLVPVRNVNFLRFCKQHAEGVWAVVDVSIDPVRENSGGAPVIRRLPSGCVVQDVSNGYSKVTWVEHAEYDENQIHQLYRPLLRSGLGFGSQRWLATLQRQCECLAILISSSVTSHDNTSITPGGRKSMLKLAQRMTFNFCSGISAPSVHNWSKLTVGNVDPDVRVMTRKSVDDPGEPPGIVLSAATSVWLPAAPQRLYDFLRNERMRCEWDILSNGGPMQEMAHITKGQDQGVSLLRSNAMNANQSSMLILQETCIDASGALVVYAPVDIPAMHVVMNGGDSSYVALLPSGFAVLPDGGIDGGGSGDGDQRPVGGGSLLTVAFQILVNNLPTAKLTVESVETVNNLISCTVQKIRAALQCES

SEQ ID NO: 43187 - protein, 299 aa, Nostoc punctiforme PCC 73102
MWDYTDKVLELFYDPKNQGEIEETGEAGVKVATGEIGSIACGDALRLHLKVEVESDKILDARFQTFGCTSAIASSSALTEMVKGLTLDEALKVSNKDIADYLGGLPEAKMHCSVMGQEALEAAIYNYRGIPLATHDDDDEGALICSCFGISESKIRRVILENHLTDAEQVTNYVKAGGGCGSCLANIDDIIRSVQQEYASPALNNYGVQVATEIVTSKERSLTNVQKIALIQKVLDEEVRPVLIADGGDVELYDVEGDRVKVVLQGACGSCSSSTATLKIAIEARLQDRVSKSLVVEAV

SEQ ID NO: 43188 - protein, 158 aa, Medicago sativa
MSLIPSFFGGRRSNVFDPFSLDVWDPFKDFPFNNSALSASFPRENSAFVSTRVDWKETPEAHVFKADLPGMKKEEVKVEIEDDRVLQISGERSVEKEDKNDQWHRLERSSGKFMRRFRLPENAKMDQVKAAMENGVLTVTVPKEEVKKPEVKTIDISG

SEQ ID NO: 43189 - protein, 565 aa, Salmonella typhimurium LT2
METTTKKARSLYIPYAGPVLLEFPLLNKGSAFSVEERRNFNLSGLLPEVVESIEEQAERAWLQYQGFKTEIDKHIYLRNIQDTNETLFYRLVQNHLEEMMPVIYTPTVGAACERFSEIYRRARGVFISYPNRHNMDDILQNVPNHNIKVIVVTDGERILGLGDQGIGGMGIPIGKLSLYTACGGISPAYTLPVVLDVGTNNQQLLNDPLYMGWRHPRITDDEYYAFVDEFIQAVKQRWPDILLQFEDFAQKNAMPLLTRYRDEICSFNDDIQGTAAVTVGTLIAASRAAGSQLSEQKIVFLGAGSAGCGIAEQIIAQTQREGLSEDAARQNVFMVDRFGLLTDRMPNLLPFQAKLVQKCDNLQHWDTENDVLSLLDVVRNVKPDILIGVSGQTGLFTEEIIREMHKHCPRPIVMPLSNPTSRVEATPQDIIAWTEGNALVATGSPFSPVIWKDKVYPIAQCNNAYIFPGIGLGVIASGASRITDEMLMSASETLAKHSPLVNNGEGLVLPALKDIQVVSRAIAFAVGKMAQQQGVAVKTSAEALQQAIDDNFWKPEYRDYRRTSI

SEQ ID NO: 43190 - protein, 448 aa, Pseudomonas syringae pv. phaseolicola 1448A
MNMFEASDVPVASQLKLDAHWMPYTANRNFQRDPRMVVAAHGSYLTDDKGRKIYDGLSGLWTCGAGHTRKEIQEAVSRQLGILDYSPGFQFGHPLSFQLAEKITELTPGNLNHVFYTNSGSECADTAVKMVRAYWRLKGQATKTKMIGRARGYHGVNVAGTSLGGVNGNRKMFGQLMDVDHLPHTLLASNAYSKGMPEAGGIALADEMLKLIELHDASNIAAVIVEPMAGSAGVIVPPQGYLKRLREICDQHNILLIFDEVITGFGRTGSMFGADSFGVTPDLMCIAKQITNGAIPMGAVIASSEIYQTFMNQPTPEYAVEFPHGYTYSAHPVACAAGLAALELLQRENLIQQAAEIAPHFESVLHGIKGAKNVVDIRNYGLAGAIQIAPRDGDAIVRPFEAGMRLWKAGFYVRFGGDTLQFGPTFNSQAQDLDRLFDAVGETLNLID

SEQ ID NO: 43191 - protein, 273 aa, Triticum aestivum
  misc_feature (90)..(90): Xaa can be any naturally occurring amino acid
  misc_feature (198)..(198): Xaa can be any naturally occurring amino acid
  unsure (1)..(273): unsure at all Xaa locations
MLLLNPASEAAAAALDSIRQQLLEEPARPAYCRSASFGSLVADQWSESLPFRPNDADDMVVYGALRDAFSCGWLPDGSFAAVKPEPLPSXRRSYDGSCLGSFLASPPGLDAPWAEEEAEVAATASRGKHFRGVRQRPWGKFAAEIRDPAKNGARVWLGTFDSAEDAAVAYDRAAYRMRGSRALLNFPLRIGSEIAAAXAAAGQKRPSPQPASPDSPPPSSSAPGSSKRRKRGEAAAESMSMALVPPPPVQAPVQLTLPVQPWLATGAVQQLVS

SEQ ID NO: 43192 - protein, 364 aa, Cryptococcus neoformans var. neoformans JEC21
MQTAVSDKQLHIGVSSPLDTPSFRPNTPPLEHPAQSSAKITEPGIDGLPELDLRNPISSLLKLGTKRAHVKAEHSAGAAALVQGDLGLEEYIRWLAALWRIYDVLELGLQENSSNPVLAPTYDPALLARAAPLAADINYLLTLLPKDKTAVETNVSLNEPATPLPPFPLPSFIAPIFNDPPRPLTNYLSHVRTLSASPVTAPGLLAHAYVRYLGDLSGGQFIGARVKKSFDLPGDDGTKFYQFDFQKGGNAQGDESRAETKKRLAEVKDWYRRGMDEGVGEDQRLKADLIEEANLAFSLNTDLFSIIQVPAKDSKKAESGAVATENRPQTRAELLTQSAWFLAAALFGVFLNIYVGPLLSKLFA

SEQ ID NO: 43193 - protein, 744 aa, Emericella nidulans
MATSITAGLQKAQQAVQDTATKNKKIVDISHDTVNVHTDQEQRTDFGVAITDPDHWLRVTNETHSGPSLLEDHIARERIHRFDHERIPERVVHARGTGAYGNFTLKESIEDLTYAGVLTDTSRNTPVFVRFSTVQGSRGSADTVRDVRGFAVKFYTDEGNWDIVGNNIPVFFIQDAIKFPDFVHAVKPEPHNEVPQAQTAHNNFWDFVYLHPEATHMFMWAMSDRAIPRSYRMMQGFGVNTFSLVNKEGKRHFVKFHWIPHLGVHSLVWDEALKLAGQDPDFHRKDLMEAIDNKAYPKWDFAIQAIPEEDQDKFEFDIFDATKVWPEEQVPLRVVGELELNRNIDEFFPETEQVAFCTSHIVPGIDFSDDPLLQGRNFSYQDTQISRLGVNWEEIPINRPVCPFLNHNRDGAKRHRITKGTVNYWPNRFEANPPASDKGFKSHPAPITGRKRRDLTPKFKEYHNQAQLFYNSLSEVEKVHVKKAFSFELDHCDDPIVYERLAGQRLAEIDLPLAQAVAEMVGAPIPTKALRDNHGKTSVRLSQFDFTPKAPGIISRRIAIIIGDGYDKIAFNGMKAAILAAASAPLRHWHQTSAIYAQGEDKNSSKGVIPDHMYDGMRSTMFDATFIPGGSHIETLQKNGQIRYWIAETFGHLKALGAMGEAAQLVKEVLGNVMGVQIAGADSAEPVEWYGVVTARGPESAESLSEGFKVLKDAGDFTSKFFYQISQHRNWQRELDGLASTVAF

SEQ ID NO: 43194 - protein, 229 aa, Zea mays
MDSEHWISRLAAAKRFYAAQLGHSDRAGMDELEMDEEVRPEFPCPYCYEDHDVGSLCAHLEEEHPFEPQAAACPVCSEMVTKDMVNHITTQHGYLFKNRRRLRRFIIPGSQALSLLSRDLREAHLQVLLGGGGQRSSDNSSSSSATNISADPLLSSFGLGFPTSDAEQASKSTVSIPDDATTVKKAPAQARKLSIDSSLTSEERELKRKQARVRATFVQDLLLFTLFGD

SEQ ID NO: 43195 - protein, 489 aa, Candida glabrata CBS138
MSLTNADETVTYDALIVGAGVIGPCVATALARKGKKVLIVEREWSQPDRIVGELMQPGGLRALRSLGMIQSINNIDAYPVTGYTVFYNGEHVDIPYPYKADLKPVEKLPGLVRDGNDKVLEDATVHKKDFEDDERERGVGLVHGRFLNNLRNICAAEPNVTRLQGNVVEILKDKKNEVVGAKVDVDSRGKVDFKAHLTFVCDGIFSRFRRELHPDHVPTVNSSFVGMSLYHAHMPHDMHGHVILGDKHMPILVYQISPEETRILCAYNAPKVPTDLKSWMTKDVQPYIPKTLRPSFDDALAQGKFKPMANSWLPARQNDVTGLCVIGDALNMRHPLTGGGMTVGLNDVVLLIKKIGDLDFSDREKVLDELLDYHFERKNYDAVVNVLSISLYSLFAADSKNLKALQKGCFKYFQRGGDCVNLPVAFLAGVLPKPLLLTRVFFAVAFYTIYLNMEERGFLGLPMALLEGIMILITAIKVFTPFLVRELIG

SEQ ID NO: 43196 - protein, 155 aa, Linum usitatissimum
IIAGTFRAFSRETFKSLRERIKEVIGAQAAVHRCTSEVDFDGSEHPTIPPTINDEGVYELATRVSRDVVGESNTKVSPSFMGSEDFAFYLDRVPGSFMFLGIRNEKLGAIYPPHNPYFFLDEDALPVGAAVHASFAHSFLSNSTTSSSSYCEKKK

SEQ ID NO: 43197 - protein, 231 aa, Escherichia coli O157:H7 EDL933
MFRKLAAECFGTFWLVFGGCGSAVLAAGFPELGIGFAGVALAFGLTVLTMAFAVGHISGGHFNPAVTIGLWAGGRFPAKEVVGYVIAQVVGGIVAAALLYLIASGKTGFDAAASGFASNGYGEHSPGGYSMLSALVVELVLSAGFLLVIHGATDKFAPAGFAPIAIGLALTLIHLISIPVTNTSVNPARSTAVAIFQGGWALEQLWFFWVVPIVGGIIGGLIYRTLLEKRN

SEQ ID NO: 43198 - protein, 333 aa, Ustilago maydis 521
MSACLILAGLLALTCCRLDSSQDQRALAIIGAAIFVERILAGQTVQHRSSRLGLWQLAHTRAFSKHHRRLPFVSRSLPYTSTMPFSTPAQPSCSAASPLRLRYIDASTAQKIDEDLMSASGGFSLDQLMELAGLSCAQAVFECYPPTKYPNVLVACGPGNQGGDGLVAARHLYHFGYEPVVWYPKQGKTELFSRLKVQLHNLGLPFVSQDDFQDALEEADVVLDSIFGFNFKGDVREPFRAPLEILKYESRIEFEARKKMPPIVSVDIPSSWHVELAPKLGALAFAGRHFLGGRFLPEDLEAKFDLQLPDYPGTEQVIEITGAKPLQTQEADL

SEQ ID NO: 43199 - protein, 679 aa, Craterostigma plantagineum
MAKTTPSSPSAAAAAELVVKSVNTIRFLAIDAVENVKSGHPGMPMGCAPMGHVLFDEFMKFNPKNPYWFNRDRFVLSAGHGAMLLYGLLHLAGYDSVKVEDLKGLRQWGSKTPAHPENFETPGVEVTTGPLGQGVGSAVGLALAEKHLGARYNKPDFEMVDHYTYMILGDGCQMEGISNEASSLAAHWGLGKLIALYDDNHITIDGDTDLAFTEDVGKRFEALGWHVLTVANGNDGYDEIREAIKVAKSVTDKPTLIKVATTIGFGSPNKANTYGVHGNALGPKEAEATRQNLGWPYETFHVPDDVKKHWSRHISEGAELESAWNAKFAEYEKKYPKEAAELKSIITGELPLGWEKALPTYTPESPGNPTRTLSHQNLNAVAAVLPGLIGGSADLTASNMAFLKSSGDFQKETPTGRNLKFGAREHGMGAICNGVALHSPGLVPFSATYFVFTDYMRAAIRIAALSKARVVYIMTHDSIGLGEDGPTHQPVEHLASFRAMPNILVLRPADGNETAGAYKVAVENAGRPSILSLSRQKLPQLPGTSVEGVGRGGYVISDNSKDGEKPEVILMGTGSELEIAARAGEELRKEGKKVRVVSLVSWELFGEQSKEYKEMVLPSEVTARVSVEAGSTFGWERFVGLKGRAVGIDRFGASASAERLYKEFGITVEAVVAAAKELC

SEQ ID NO: 43200 - protein, 386 aa, Citrus sinensis
WIPRAAGIRLRVPLLHLSNFQINDWPELSTKRYALMVLMLPSDSARQWHVHELELVEVVADQVAVALSHAAILEESMRARDLLMQQNIALDSARREAETAIRARNDFLAVMNHEMRTPMHAIIALSSLLQETELTPEQRLMVETILKSSNLLATLINDVLDLSRLEDGSLQLQIGTFNLHAVFREVLNLIKPIASVKKLLVALNLAPDLPEYAVGDEKRLMQTLLNVVGNAVKFTKEGNISITGFVAKSESLRDSRAPEFFPVPIENHFYLRVQVRDSGSGISPQDIPNLFTKFAQNQAIALRNSSGSGLGLAICKRFVNLMEGHIWIESEGLGKGCTAIFIVKLGIPEHSNDSNLSFIPKMPVHGQTNFPGLKVLVMDENGVSRQ

SEQ ID NO: 43201 - protein, 412 aa, Oryza sativa
  misc_feature (145)..(145): Xaa can be any naturally occurring amino acid
  unsure (1)..(412): unsure at all Xaa locations
MAFAGDARIVVVAVAVAVAAFVLVGVAAEGKGEGGGGGGVGVCFERIFSFGDSLTDTGNFLLSVPEDFPDPARSLPYGQTFFGRPSGRYSDGRNLLDFFAEAFGLPFVPPYLAGGDFRQGANFAVGGATALNGLFFRDRGVEPTXTPHSLDEQMQWFKKLLTTVSSSESELNDIMTKSLFLVGEVGGNDYNHLIVRGKSLDELHELVPKVVGTISSAITELIKLGAKKLVVPGNFPIGCVPLYLSIFPSQKEDYYDEKTGCIKWLNEFTEYHNRLLQEELEKLRNLYPDVSIIYADYYGAALNIFLAPLQFGFTVPLNSCCGSDAPYNCSPSILCGHPGSVVCSDPSKYTSWDGLHFTEATYKIIIQGVLGSYANPPLSETCRGGAYKVSQLHQCTDNPTNTVTYDSMSSFI

SEQ ID NO: 43202 - protein, 337 aa, Campylobacter fetus
MKKILFVVATIFMALFLNAKENDMRNLKDIYLAGGCFWGTQAYFDKIRGVIKTDVGYANGKSDKTDYHSLHYSGHAETVHITFDENIVSLAEILAHYFRIIDPFSVNKQGNDVGSQYRTGIYYNDSSLKNSISEFIKHEQTKYDKKIAVEVEPLKNYVLAEDYHQKYLDKNPGGYCHVDLSLADKPLYNESKFKAPSKDELKAKLSDLQYSVTQEKATERPYSSEYDKFDKKGIYVDIVSKKPLFSSSDKFDAGCGWPSFTKPITTDALGYNRDLSHGMERVEVTSNLANSHLGHVFTDGPKDKGGLRYCINGASLKFIPLEDMEKEGYKDYIIYVK

SEQ ID NO: 43203 - protein, 749 aa, Glycine max
MENTDPCRHFLKDVKRIIIKVGTAVVTRQDGRLAVGKLGALCEQIKELNSLGYEIILVSSGAVGLGRQRLRYRKLINSSFADLQKPQVELDGKACAAVGQNSLMALYDVLFSQLDVTSAQLLVTDNDFRDKDFRMQLSETMKSLLALKVIPIFNENDAVSTRKAPYEDSSGIFWDNDSLSALLALELKADLLILLSDVEGLYSGPPSDPRSKLIHTYIKEKHQSEITFGDKSRVGRGGMTAKVKASIHAAEAGIPVIITSGYAAENIIKVLQGQRIGTLFHKDAHKWAPVKEVDAREMAVAARDCSRRLQALSSEERKQILLKIADALEAHQNEIRIENEADVADAKEAGYEKSLVARLLASLANNIRIIANMEDPIGRVLKRTEGLILEKTSSSLGVLLIVFESRPDALVQIASLAIRSGNGLLLKGGKEAKRSNAILHKVITEAIPDIVGSKLIGLVTSRAEIPELLKLDDVIDLVIPRGSNKLVTQIKSSTKIPVLGHADGICHVYVDKSADLEMARRIVLDAKIDYPAGCNAMETLLVHKDLVEKGWLNSIIIDLRTEGVTLYGGPKASPLLNIPMARMLHHEYNSLACTVEIVDDVYAAIDHINLYGRHATLYFLIIAHTDSVVAEDHEVANVFLRQVDSAAVFHNASTRFSDGARFGLGAEVGISTSRIHARGPVGVDGLLTTRWILKGSGQIVDGDKASGAKVVQFSGGGIFMLSGAAAFTFKMLYKGIAILPNVRKLMFIV

SEQ ID NO: 43204 - protein, 318 aa, Medicago sativa
MATENKILILGPTGAIGRHIVWASIKAGNPTYALVRKTPGNVNKPKLITAANPETKEELIDNYQSLGVILLEGDINDHETLVKAIKQVDIVICAAGRLLIEDQVKIIKAIKEAGNVKKFFPSEFGLDVDRHDAVEPVRQVFEEKASIRRVIEAEGVPYTYLCCHAFTGYFLRNLAQLDATDPPRDKVVILGDGNVKGAYVTEADVGTFTIRAANDPNTLNKAVHIRLPKNYLTQNEVIALWEKKIGKTLEKTYVSEEQVLKDIQESSFPHNYLLALYHSQQIKGDAVYEIDPAKDIEASEAYPDVTYTTADEYLNQFV

SEQ ID NO: 43205 - protein, 101 aa, Brassica napus
  misc_feature (99)..(99): Xaa can be any naturally occurring amino acid
  unsure (1)..(101): unsure at all Xaa locations
MAQLPPKIPTMTTTTTPHWPDFSSQKLPSIAATAAATVATAGQQNPTWMDEFLDFSSTRRGTHRRSISDSIAFLEAPSSGVGNHHFDRFDDEQFMSMFXDD

SEQ ID NO: 43206 - protein, 96 aa, Leptospira interrogans serovar Copenhageni
MASIKPLGDRVLVEPRQEAEEKIGSIFVPDTAKEKPQEGKVVEIGSGKYEDGKLIPLEVKVGDTVLYGKYSGTEIKSEGKEYLIIRESDILAVVKK

SEQ ID NO: 43207 - protein, 550 aa, Thermus thermophilus
MNGSADAGPRPRKYVFITGGVVSSLGKGILTSSLGALLRARGYRVTAIKIDPYVNVDAGTMRPYEHGEVFVTADGAETDLDIGHYERFLDMDLSRGNNLTTGQVYLSVIQKERRGEYLSQTVQVIPHITDEIKERIRKVAEEQKAEIVVVEVGGTVGDIESLPFLEAIRQFRFDEGEGNTLYLHLTLVPYLETSEEFKTKPTQHSVATLRGVGIQPDILVLRSARPVPEEVRRKVALFTNVRPGHVFSSPTVEHLYEVPLLLEEQGLGRAVERALGLEAVIPNLSFWQEAVRVLKHPERTVKIAIAGKYVKMPDAYLSLLEALRHAGIKNRARVEVKWVDAESLEAADLEEAFRDVSGILVPGGFGVRGIEGKVRAAQYARERKIPYLGICLGLQIAVIEFARNVAGLKGANSTEFDPHTPHPVIDLMPEQLEVEGLGGTMRLGDWPMRIKPGTLLHRLYGKEEVLERHRHRYEVNPLYVDGLERAGLVVSATTPGMRGRGAGLVEAIELKDHPFFLGLQSHPEFKSRPMRPSPPFVGFVEAALAYQERA

SEQ ID NO: 43208 - protein, 539 aa, Arabidopsis thaliana
MRPSCASSSSSSASPSLRLSSVTVAVDKATSELLRTPDWTIIIAICDSLNSNRWQCKDAIKAVKRRLQHKSSRVQLLTLTAMLKNCGDFVHSHIAEKHLLEDMVKLVRKKGDFEVRNKLLILLDTWNEAFSGVACKHPHYNWAYQELKRCGVKFPQRSKEAPLMLEPPPPVTQSSSSSSMNLMSIGSFRRLDETMATEIESLSLSSLESMRNVMDLVNDMVQAVNPSDKSALKDELIVDLVEQCRSNQKKLIQMLTTTADEDVLARGLELNDSLQVVLARHDAIASGVSLPLLLQAPEPRETSSSLKTCGAAALESADSESSSSSSSSESETDEVEDVKDDFIQLAKRHALLNALHSDEEEETLLLGNDNEKTAEAEAKTQCKDLALFDTTTTTTTKSEQDIIELLSLTLSTTALPSPQTQPQTQHPSFFADDNILMNSYVVPWAQSQEEPQVPKMTQFAPSGPQFQPWPLQQQQPYSYGYPQPQWSGGQVNSNDTTFWSQGGNENMVFERNLQVSNSFPARATGTSGAATAATVDRQP

SEQ ID NO: 43209 - protein, 546 aa, Leptospira interrogans serovar Copenhageni
MAKDIEYNETARRKLLEGVNKLANAVKVTLGPKGRNVVIDKKFGAPTITKDGVTVAKEIELEDPLENMGAQMVKEVSTKTNDVAGDGTTTATILAQSIINEGLKNVTAGANPMSLKKGIDKAVTAAVESIQKRAVKIENKKDIANVASISANNDNTIGNLIADAMDKVGKDGVITVEEAKSIETTLDVVEGMQFDRGYISPYMVTDAESMVATLNDPFILIYDKKISSMKDLIHILEKVAQAGKPLVIISEEVEGEALATIVVNTLRKTISCVAVKAPGFGDRRKSMLEDIAILTGGQVISEDLGMKLENTTLQMLGRANKVTVDKENTTIIEGKGQTKEIQGRIGQIKKQIEDTTSEYDREKLQERLAKLAGGVAVIHVGAATEVEMKEKKARVEDALSATRAAVEEGIVPGGGLTLLKAQEAVGSLKLDGDEATGAKIIFRALEEPIRMITSNAGLEGSVIVEHAKAKKGNEGFNALTMVWEDMIQAGVVDPAKVVRSALQNAASIGSMILTTEVTITDKPDKDAPNPMAGMGGGGMGGMGGMM

SEQ ID NO: 43210 - protein, 101 aa, Oryza sativa (indica cultivar-group)
MESDCQFLVAPPQPHMYYDTAAAAVDEAQFLRQMVAAADHHAAAAGRGGGDGDGGGGGGGGGGERKRRFTEEQVRSLETTFHARRAKLEPREKADVARELG

SEQ ID NO: 43211 - protein, 242 aa, Malus x domestica
MEFPNQAPESSSQKKLGRGKIEIKRIENTTNRQVTFCKRRNGLLKKAYELSVLCDAEVALIVFSNRGRLYEYANNSVRATIDRYKKAYADPTNSGSVSEANTQFYQQEASKLRRQIREIQNSNRHILGEALSSLNAKELKNLEGRLEKGISRIRSKKNEMLFSEIEFMQKRETELQHHNNFLRAKIAENEREEQQHTHMMPGTSYDQSMPSHSYDRNFLPAVILESNNNHYPHQVQTALQLV

SEQ ID NO: 43212 - protein, 675 aa, Zea mays
GAVETLQGKAATGELLEKSVNTIRFLAIDAVEKANSGHPGLPMGCAPMGHVLYDEVMRYNPKNPYWFNRDRFVLSAGHGCMLQYALLHLAGYDSVKEEDLKQFRQWGSRTPGHPENFETPGVEVTTGPLGQGIANAVGLALAEKHLAARFNKPDSEIVDHYTYVILGDGCQMEGIANEACSLAGHWGLGKLIAFYDDNHISIDGDTEIAFTEDVSTRFEALGWHTIWVKNGNTGYDDIRAAIKEAKAVTDKPTLIKVTTTIGFGSPNKANSYSVHGSALGAKEVEATRQNLGWPYDTFFVPEDVKSHWSRHTPEGAALEADWNAKFAEYEKKYADDAATLKSIITGELPTGWVDALPKYTPESPGDATRNLSQQCLNALANVVPGLIGGSADLASSNMTLLKMFGDFQKDTAEERNVRFGVREHGMGAICNGIALHSPGFVPYCATFFVFTDYMRGAMRISALSEAGVIYVMTHDSIGLGEDGPTHQPIEHLVSFRAMPNILMLRPADGNETAGAYKVAVLNRKRPSILALSRQKLPHLPGTSIEGVEKGGYTISDNSTGNKPDLIVMGTGSELEIAAKAADELRKEGKTVRVVSFVSWELFDEQSDEYKESVLPAAVTARISIEAGSTLGWQKYVGAQGKAIGIDKFGASAPAGTIYKEYGITVESIIAAAKSF

SEQ ID NO: 43213 - protein, 285 aa, Brassica napus
MAKDVEGAEGFAARDYEDPPPTPFFDAEELTKWSLYRAVIAEFVATLLFLYVTVLTVIGYKISSDTKAGGDECGGVGILGISWAFGGMIFILVYCTAGISGGHINPAVTFGLFLARKVSLIRAVLYMVAQCLGAICGVGFVKAFQSAYYVRYGGGANSLADGYSTGTGLAAEIIGTFVLVYTVFSATDPKRNARDSHVPVLAPLPIGFAVFMVHLATIPITGTGINPARSFGAAVIYNESKPWDDHWIFWVGPFIGAAIAAFYHQFVLRASGSKSLGSFRSAANV

SEQ ID NO: 43214 - protein, 122 aa, Arabidopsis thaliana
MKTNREEQMIKLFGIPLSDKPRWQQFLICSSGFFFGYLVNGICEEYVYNRLKFSYGWYFTFAQGLVYIALIYMYGFRTKQMVNPWKTYVKLSGVLMGSHGLTKGSLAYLNYSAQIMFIITKV

SEQ ID NO: 43215 - protein, 601 aa, Zea mays
LNSIPAPANATPSALIRSRRRRHSRARPMDSARSWLQKLQPRDKDRERGAKTPAPASPNGGAGNSARMAAAAGEEALSSATKQKVAAAKQYIENHYKSQMKSLQERKERRWMLERKLADADVSEEEQNNILKDLEKKETEYMRLRRHKMGVDDFELLTIIGRGAFGEVRLCREKATSNVYAMKKLKKSEMLRRGQVEHVRAERDLLAEVDSPYIVKLYCSFQDDEFLYLIMEYLPGGDMMTLLMRKDTLTEDESKFYVAETILAIESIHKRIYIHRDIKPDNLLLDRSGHLKLSDFGLCKPLDSSCFPNLSDLDYAAGKSTNPSSDGDKQSSNSTAPRRTQQEQLLHWQKNRRMLAYSTVGTPDYIAPEVLLKKGYGMECDWWSLGAIMFEMLVGYPPFYSEDPMSTCRKIVNWRSHLKFPEEASLSLEAKDLISKLLCNVDQRIGTKGAHEIKAHPWFAGVEWEKLYQMEAAFIPEVNDELDTQNFEKFEETAPPMQTSSKAGPWRKMLSSKDVNFVGYTYKNFEIVNDPELPGIAELKKTNNKPKRPTIKSLFETADSEDQPSDGSFLNLLPTQLELPESLEPSPHSSISSEDSQARNR

SEQ ID NO: 43216 - protein, 269 aa, Buchnera aphidicola str. Bp (Baizongia pistaciae)
MNNRYYQLNKNLIPYKLGCYIPFVVLGDPSIEISLEIIYSLIKNGADGLELGIPFSDPLADGPIIQQANLRAFSANITLTKCFEMLFKIRTHNPKIPIGILIYANLIFKLGIQKFYSICSKIDIDSVLIADVPIEESFEFEQHSIKNNIDSIFVCPPDASKNFLKKLSKHSTGYIYLLSRSGVTGIDMKITPPLKNFVKELKKLTSIPIIQGFGISNENQIKNIILSGVSGVICGSVIIQIIANNLNNKKIMLKKIKKLSNRFKKATII

SEQ ID NO: 43217 - protein, 510 aa, Glycine max
  misc_feature (336)..(336): Xaa can be any naturally occurring amino acid
  unsure (1)..(510): unsure at all Xaa locations
MTDAKPDKPLMASSSRNLPDFKKSVKLKYVKLGYHYLITHGMYLCLSPLVVLIAAQLSTFSLRDLYDLWEHLQYNLISVILCLTLLVFLSTLYFLTRPRPVYLVNFSCYKPEESRKCTKKIFIEQSRLTSSFTEENLEFQRKILERSGLGENTYLPEAVLNIPPNPSMKEARKEAETVMFGAIDELLAKTAVKPKYIGILIVNCSLFNPTPSLSAMIVNHYKLRGNIKSYNLGGMGCSAGLISIDLAKDLLQANPNSYALVISMENITLNWYFGNDRSKLVSNCLFRMGGAAVLLSNKSSDRRRSKYRLVTTVRTHKGADDKCFSCVTQEEDANGXVGVTLSKDLMAVAGDALKTNITTLGPLVLPTSEQLLFFATLVAKKIFKMKIKPYIPDFKLAFEHFCIHAGGRAVLDELEKNLQLSPWHMEPSRMTLYRFGNTSSSSLWYELAYTEAKGRIKKGDRTWQIAFGSGFKCNSAVWKALRTINPSKEKSPWIDEIDQFPVDVPRVSSI

SEQ ID NO: 43218 - protein, 405 aa, Photobacterium profundum SS9
MTFVDNISHAVETLVQSSDTLFILLGAIMVLAMHAGFAFLEVGTVRQKNQVNALVKIIADFGFSAIAYFFIGYWVAYDVTFFSSAEQLSAINGYELVKFFFLMTFAAAIPAIISGGVAERARFYPMLVASFFIVAFVYPFFEGIMWNGNYGFQNWLTETFGFGFHDFAGSVVVHAVGGWIALVAVAMLGIRNGRYRGGRLIAFAPSNIPFLALGAWILTIGWFGFNVMSAQTMGSISGLVAVNTLMAMVGGILTSLFVGKNDPGFIHNGPLAGLVAVCAGSDLMHPIGALVTGAIAGALFVWLFTYIQNRLHLDDVLGVWPLHGVCGAWGGIAAGIFGSEAFGGLGGVSLASQVIGTLAGIAIAVIGAFIVYGIIKKTVGLRLTDEDEYKGADLAIHKIGSVSDD

SEQ ID NO: 43219 - protein, 311 aa, Isatis tinctoria
MAIAFKSGVCFLQSAKPQIGIRHSSPDSSLSFKRLTPIAALSTSSPTLGLADTFKELKKQGKVAFIPYITAGDPDLSTTAEALKVLAASGSDIIELGVPYSDPLADGPVIQAAATRALENGTNLDNILDMLDKVLPQVSCPVSLFTYYNPILKRGLGKFMSSIRDVGVQGLVEPDVPLEETEMLRKEALNNNIELVLLTTPTTPTERMKRIVDASEGFIYLVSSIGVTGARASVSGKVQSLLKDIKEATDKPVAVGFGISQPEHVKQIAGWGADGVIVGSAMVRLLGDAKSPTEGLKELERLTKSLKSALL

SEQ ID NO: 43220 - protein, 158 aa, Xanthomonas axonopodis pv. citri str. 306
MNIVRYPQFPTHALQNEIKHVFDRFFEQNGDTDESAVVTAQWVPRVDIKEEVNHFVLYADLPGIDPSQIEVQMDKGILSIRGERKSESSTETERFSRIERRYGSFHRRFALPDSADADGITAAGRNGVLEIRIPKRPAATPRRIQVGNGQNTSGSTVQ

SEQ ID NO: 43221 - protein, 511 aa, Streptomyces coelicolor A3(2)
MSASTSRTLPPEIAESVSVMALIERGKAEGQIAGDDVRRAFEADQIPATQWKNVLRSLNQILEEEGVTLMVSAAEPKRTRKSVAAKSPAKRTATKAVAAKPVTSRKATAPAAPAAPATEPAAVEEEAPAKKAAAKKTTAKKATAKKTTAKKAAAKKTTAKKEDGELLEDEATEEPKAATEEPEGTENAGFVLSDEDEDDAPAQQVAAAGATADPVKDYLKQIGKVPLLNAEQEVELAKRIEAGLFAEDKLANSDKLAPKLKRELEIIAEDGRRAKNHLLEANLRLVVSLAKRYTGRGMLFLDLIQEGNLGLIRAVEKFDYTKGYKFSTYATWWIRQAITRAMADQARTIRIPVHMVEVINKLARVQRQMLQDLGREPTPEELAKELDMTPEKVIEVQKYGREPISLHTPLGEDGDSEFGDLIEDSEAVVPADAVSFTLLQEQLHSVLDTLSEREAGVVSMRFGLTDGQPKTLDEIGKVYGVTRERIRQIESKTMSKLRHPSRSQVLRDYLD

SEQ ID NO: 43222 - protein, 479 aa, Arabidopsis thaliana
MTMIALNREVETQSLKKLSLKSVRRAREIFSPVHGQFPQPDPESKRIRLCHKIQVAFGGVEPASKPTRIADHNSEKTAPLKALALPGPKGSKELRKSATEKALVVGPTLPPRDLNNTGNPGKSTAILPAPGSFSERNLSTAALMERMPSRWPRPEWHAPWKNYRVLQGHLGWVRSVAFDPSNEWFCTGSADRTIKIWDVATGVLKLTLTGHIGQVRGLAVSNRHTYMFSAGDDKQVKCWDLEQNKVIRSYHGHLHGVYCLALHPTLDVVLTGGRDSVCRVWDIRTKMQIFVLPHDSDVFSVLARPTDPQVITGSHDSTIKFWDLRYGKSMATITNHKKTVRAMALHPKENDFVSASADNIKKFSLPKGEFCHNMLSLQRDIINAVAVNEDGVMVTGGDKGGLWFWDWKSGHNFQRAETIVQPGSLESEAGIYAACYDQTGSRLVTCEGDKTIKMWKEDEDATPETHPLNFKPPKEIRRF

SEQ ID NO: 43223 - protein, 419 aa, Bradyrhizobium sp. BTAi1
MTVYAGPVFEMAANQFNVIADHLGIPADERDRLLLPKRAITVSCPIHKDDGTIAVYEGYRVQHLLTMGPTKGGTRFAPTVDIGEVAALAIWMSWKCALVGLPYGGAKGGVTVDLSKLSRRELESLSRRYMQEMIPFVGPHTDVMAPDMGTNEQVMAWFMDTYSMYQGQTVTEIVTGKPVFSGGTLGRREATGRGVAHVSRRVMDVLGIDPAKSTVVVQGFGNVGSYAALGFHQMGMKVIAVSDHTGALHDARGLDIPALMAHASKHGSIAGFSTELAFDPKEILTLACDILVPAAVERVIDAKVAANLKCRVIAEAANGPTTPDADLVLDQRRKEIFLIPDILCNSGGVIVSYFEWVQDLQQLFWEEEEVMRREYQILDRAFERMVTRAKADDISHRTAAMAIGVEKVRNAKNTRGLFP

SEQ ID NO: 43224 - protein, 316 aa, Triticum aestivum
  misc_feature (248)..(248): Xaa can be any naturally occurring amino acid
  misc_feature (262)..(262): Xaa can be any naturally occurring amino acid
  misc_feature (268)..(268): Xaa can be any naturally occurring amino acid
  misc_feature (274)..(274): Xaa can be any naturally occurring amino acid
  unsure (1)..(316): unsure at all Xaa locations
MQIFVKTLTGKTITLEVESSDTIDNVKAKIQDKEGIPPDQQRLIFAGKQLEDGRTLADYNIQKESTLHLVLRLRGGMQIFVKTLTGKTITLEVESSDTIDNVKAKIQDKEGIPPDQQRLIFAGKQLEDGRTLADYNIQKESTLHLVLRLRGGMQIFVKTLTGKTITLEVESSDTIDNVKAKIQDKEGIPPDQQRLIFAGKQLEDGRTLADYNIQKESTLHLVLRLRGGMQIFVKTLTGKNITLEVEAXGTIDNGKGQIQDRXGIPPDXQRLMFXGKQPEDGRTLADTNPEGVHLHLVSGFGGIKFCQTFMQDIPWG

SEQ ID NO: 43225 - protein, 428 aa, Pichia anomala
PGDFNLSLLDKIYEVEGLRWAGNANELNAAYAADGYSRVKGLSAIITTFGVGELSALNGIAGSYAEHVGVLHIVGVPSISSQAKQLLLHHTLGNGDFTVFHRMSSNISQTTAFIKDINSAPAEIDRCIREAYVFQRPVYLALPANLVDDLVSSDLLSTPIDLSLKPNDPESENEVVSTVLELIKKADNPVILVDACASRHSALAETKDLMDLTQFPTFVTPMGKGAVDEQHPRFGGVYVGTLSKPDVKAQVENADLILSVGALLSDFNTGSFSYSYKTKNIVEFHSDHIKIRNATFPGVQFQSVLQNLNSKIAPVVKGYKPYPVPSLKLTTSPASPETPLTQEWLWTKLSSWLREGDVVITETGTSAFGIVQTRFPSNTTGISQVLWGSIGYSVGAALGAVAGAEEVDKEKRVILFVGDGSLQLTVQE

SEQ ID NO: 43226 - protein, 336 aa, Lotus corniculatus
MGSVPETVCVTGAAGFIGSWLVMRLMERGYMVRATVRDPANMKKVKHLLELPEAKTKPTLWKADLAEEGSFDEAIKGCTGVFHVATPMDFESKNPENEVIKPTINGVLDIMKACQKAKTVRRLVFTSSAGTLNVIEHQKQMFDESCWSDVEFCRRVKMTGWMYFVSKTLAEQEAWKFAKEHGIDFITIIPPLVVGSFLMPTMPPSLITALSPITGNEAHYSIIKQGQYVHLDDLCLAHIFLFEHPESEGRYICSASEATIHDIAKLINSKYPEYNIPTKFKNIPDELELVRFSSKKIKDMGFEFKYSLEDMYTGAIDTCKEKGLLPKAAENPSNGK

SEQ ID NO: 43227 - protein, 404 aa, Debaryomyces hansenii CBS767
MVHIKKSLLALSAIIALSSATSTSSTCNPISSSNCPADKALATDLSEDFSSNSTQFEVTSTESGVSFGDDGLTLTIAKRLDNPALKSKFYIMFGRVEVHMKAANGTGIVSDFYLQSDDLDEIDIEFLGGDDTQFQSNYFSKGDTTTYDRGEYHTVLGDSPQTGFHNYTIDWTEEECVWYLDGEAVRTLKNSSSEGYPQTPMYLMTGAWAGGDSSNAAGTIEWAGGETDYSEAPFSMTIKKLIVSDYSTGKEYSYGDQSGDWTSIKAKDGEINGRIDKVNIEGGDDSSSSSTESSTSASSTSASDSSSSSDSNASKTASSSGSSTTSGSSTTSDKRVNSSEAVSTSLEAEATTVSSTSTSGSSKKASTSSPATASVSEKSSDNSASGFTISSMMIGVSILMSILV

SEQ ID NO: 43228 - protein, 210 aa, Thermobifida fusca YX
MTLPNSLCRIACATILGPRGSEHGTVRHAARQDSPVGSSDGQGAEARLRDMKIYQSELRTLEGEPFRLPQTQLLLIVNVASKCGLTPQYSGLERLQEAYAYRGFSVIGVPCNQFGGQEPGDAQEIRLFCATTYGISFPILEKMEVNGPNRHPLYVELTKARDSQGLAGDVQWNFEKFLVAPGGRVLYRFRPQVEPEDPEIIRAIEENLPN

SEQ ID NO: 43229 - protein, 295 aa, Triticum aestivum
  misc_feature (249)..(249): Xaa can be any naturally occurring amino acid
  misc_feature (261)..(261): Xaa can be any naturally occurring amino acid
  misc_feature (284)..(284): Xaa can be any naturally occurring amino acid
  misc_feature (292)..(292): Xaa can be any naturally occurring amino acid
  unsure (1)..(295): unsure at all Xaa locations
MASAAYLDDIDAEVIDPPKIEMLDVTELVGDLIEHSPKPNVIVSSNVRELLECPVCLVAMYPPIHQCSNGHTICSGCKPRVHNRCPTCRSELGNIRCLALEKVAASLEVPCKFQNFGCVGIYPYYCKLKHESQCQYRPYTCPYAGSECTVTGDIPYLVNHLKDDHKVDMHSGSTFNHRYVKSNPHEVENATWMLTVFSCFGQYFCLHFEAFQLGMAPVYIAFLRFMGDDAEAKNYTYSLEVGGINRKMXWQGIPRSIRDSXQEIRDSTRLTSANMACALRGHRXTKLRSRAXGRQ

SEQ ID NO: 43230 - protein, 563 aa, Zea mays
TRTAWHAINTKSMFTVYYKPRTSPSEFIIPYDQYMESVKNNYSIGMRFRMRFEGEEAPEQRFTGTIVGCENLDPLWPDSSWRYLKVRWDEPSTIPRPDKVSPWKIEPPPPPPLNPLPLSRGKRPRQNAPPPSPESSVLTKEGATKIDTDSAQTPHQNSVLQSQEQMSFRNNLTESTDSDSTVQKQMMWSPSPNGKVHTNFQPRPAMDNWMPLGRRETDFKDTRSAFKDARTASQSFGDTQGFFMQAYDDSRHRLSFNNQFQDQGSAHRFADPYFYMPQQPSLTVESGTRTQTANNDLRFWSERNSMYGNPSDQQQGFSFGQNTSSWLNQPLPQVEQSRVVRPHATVAPFDLEKTREGSGFKIFGFQVDTTNPSPVQLSSPLSAIREHVVQTRPSAPVNELQPVQIECLPEVSVSTAGTAAENIQQVQQSSKDIQSKSQGASTRSCTKVHKQGVALGRSVDLSKFTDYGELKAELDKMFEFEGELVSANRNWQIVYTDNEGDMMLVGDDPWDPLLTSREFCNIVRKIYIYTKEEVQKMNSKSSVPRKEEPPAAGEGCAAAAANE

SEQ ID NO: 43231 - protein, 526 aa, Anaplasma phagocytophilum
MSNTVVTGEVLDKSIREVVRILEDAVGCTAGPKGLTVAISKPYGSPEITKDGYKVMKSIKPEEPLAAAIASIITQSASQCNDKVGDGTTTCSILTAKVIEEVSKAKAAGSDIVSIKNGILKAKEAVLTALMSMRREVEEDEIAQVATLSANGDKNIGSKIAQCVKEVGKDGVITVEESKGFKDLEVEKTDGMQFDRGYLSPYFVTNAEKMLVEFENPYIFLTEKKINLVQSILPILENVARSGRPLLIIAEDVEGEALSTLVLNKLRGGLQVAAVKAPGFGDRRKDMLGDIAVIVGAKYVVNDELAVKMEDIALSDLGTAKSVRITKDATTIIGSVDSSSESIASRTNQIKAQIENSSSDYDKEKLRERLAKLSGGVAVLKVGGSSEVEVKERKDRVEDALHATRAAVEEGVVPGGGAALLYALSSLDGLKGKNDDEQWGIDIIRRAACAPIKRIIKNSGSEEAPCVIQHLLKQNDKELIYNVDTMNYANAFTSGVMDPLKVVRIAFDLAVSLAAVFMTLNAVVVD

SEQ ID NO: 43232 - protein, 331 aa, Desulfovibrio vulgaris subsp. vulgaris str. Hildenborough
MTVSGCCSNVLVCGGAGYIGSHMVRALVEHGYVPIIFDNLSTGHAESVGDVDLVRGDLLDRQALRRLFAEHSFDAVMHFSAKSLVGESMTDPGIYFVNNVVGTINLLEAMREAGVSRLVFSSSAAVFGNPLTARIAEDHPRQPVNPYGRSKLMIEQALRDYANAYGMRSVSLRYFNAAGADEAGDIGESHKPETHLIPNVLRAALGTGPELKIFGDDYDTPDGTCVRDYIHVADLCDAHLRALSYMQLKPGAHAFNLGNGNGFSVKQVVEAAWRVTGRDVPHSMAPRRPGDPAWLVADSTLAERELGWKPSFTDIDAIIDSAWRWHQKPRY

SEQ ID NO: 43233 - protein, 418 aa, Archaeoglobus fulgidus DSM 4304
MKLDKSRKLYAEALNLMPGGVSSPVRAFKPHPFYTARGKGSKIYDVDGNAYIDYCMAYGPLVLGHANEVVKNALAEQLERGWLYGTPIELEIEYAKLIQKYFPSMEMLRFVNTGSEATMAALRVARGFTGRDKIVKVEGSFHGAHDAVLVKAGSGATTHGIPNSAGVPADFVKNTLQVPFNDIEALSEILEKNEVAALILEPVMGNSSLILPEKDYLKEVRKVTAENDVLLIFDEVITGFRVSMGGAQEYYGVKPDLTTLGKIAGGGLPIGIFGGRKEIMERVAPSGDVYQAGTFSGNPLSLTAGYATVKFMEENGVIEKVNSLTEKLVSGIADVLEDKKAECEVGSLASMFCIYFGPTPRNYAEALQLNKERFMEFFWRMLENGVFLPPSQYETCFVSFAHTEEDVEKTVEAVSESL

SEQ ID NO: 43234 - protein, 634 aa, Oryza sativa
  misc_feature (288)..(288): Xaa can be any naturally occurring amino acid
  unsure (1)..(634): unsure at all Xaa locations
MPSVLVDRATNDMLIGPDWAMNLEICDTLNRDPGQAKDVVKSIKKRIAHRNAKVQLLALTLLETMIKNCGDIVHMQVAEKDILHEMVKIVKKRPDFHVKEKILTLIDTWQEVFGGVRARYPQYYAAYQELLRAGAVFPQRSNGSVPIFTPPQTQPLQNYPASLRSAQQEPPGSSVPDLPSLSLAEIQNARGIMDVLSEMLNALDPSNREGLRQEVIVDLVDQCRSYKQRVVELVNTNSNEELLSQGLSLNDDLQRVLAKHDAIAAGVAVRLEKTKSLQTKIDSSPPAXPGTSKAPVQSSSGTASASNQSTLALPAPASSSSPKAPAAPVPVIDLLSGDDYIKPEPANSLALVPVTEYSAADQNVLALADMFEQNNANRSNNNLTNSFNTSAPNSNFPASQAYPAPVQPALPQHPVAYSNGVSSNAIVPYYDDQNGGLPPPPWEIQQSMDNPPQPTQLGQMPLQPGQPVGMHPQSPHSGQFGQGSFMSPQQMANGQLGGTQPRQSPQPQSAPNLQYGGMMMYPNSMQVNQGAGMYSQPMFGGQFYGMSHHHQMYAVQMAGYGFGQQPGAYYIPNAAYAYVSANELTQRMNAVSVQEGNSHGGAMASRPEDSLFGDLVSIAKMKQNKPAAGKVGGL

SEQ ID NO: 43235 - protein, 302 aa, Bradyrhizobium sp. BTAi1
MGRVVVAGSINMDVVATAERHPRIGETVAGHSVMYFPGGKGANQAVSAAKLGAPTSLIGRLGRDAFGEQLRAFLASQGIDLTAVKDSAGAATGTALITLAKADNTIVVIPGANAEVSPEDVAQVALTASDVAVSQFEIPQATIVAFFRQARAAGATTILNPAPASAFDSALFALIDVLVLNETELGFLTGIALGDTPTLPQVSDAVRALDPRDDQTVCVTLGARGAVAVTGSKARLVEGRAVTAVDTTGAGDCFVGALAARLSQGAPIADAIGYANIAASISVQRMGAGPSMPTAEEVGALL

SEQ ID NO: 43236 - protein, 247 aa, Arabidopsis thaliana
MEGIQHPIPRTVEEVFSDFRGRRAGLIKALSTDVQKFYHQCDPEKENLCLYGLPNETWEVNLPVEEVPPELPEPALGINFARDGMQEKDWISLVAVHSDSWLISVAFYFGARFGFGKNERKRLFQMINELPTIFEVVSGNAKQSKDLSVNNNNSKSKPSGVKVAKMSSPPPKEEEEEEDESEDESEDDEQGAVCGACGDNYGTDEFWICCDACEKWFHGKCVKITPAKAEHIKHYKCPTCSNKRARP

SEQ ID NO: 43237 - protein, 258 aa, Bacillus cereus ATCC 10987
MGVEKIKAAFENGKKAFIPYVMGGDGGLEKLKERIRFLDEAGASIVEIGIPFSDPVADGPTIQRAGKRALDSGVTVKGIFQALIEVRKEVQIPFVLMTYLNPVLAFGKEQFIENCIEAGVDGIIVPDLPYEEQDIIAPLLRTANIALIPLVTVTSPIERIEKITSESEGFVYAVTVAGVTGVRQNFKEEIHSYLEKVKSHTHLPVVAGFGISTKEHVEEMITICDGVVVGSKVIELLENEKREEICELIQATKQKEEA

SEQ ID NO: 43238 - protein, 307 aa, Zea mays
PAGEMPSSLSVRGTAASQTHRFIHRRQSPPVTPRAHSPHTMSDLHPPEHQVAGHRASASKLGPLIDGSGLFYKPLQAGDRGEHEVAFYEAFSAHAAVPARIRDTFFPRFHGTRLLPTEAQPGEPHPHLVLDDLLAGFEAPCVADIKIGAITWPPSSPEPYINKCLAKDRGTTSVLLGFRVSGVRVVGPEGAVWRTERPEVKAMDTAGVRRVLRRYVSSVADEGMDCALAAAVYGGKGGVLSQLRELKAWFEEQTLFHFYSASILLGYDAAAVAAGGGGGGVTVKLVDFAHVAEGDGVIDHNFLGELC

SEQ ID NO: 43239 - protein, 502 aa, Pseudomonas sp. Y2
MTRSLTMNSSLSAIDGLRLPHQMLIGGQWVSAQSGKTLNVYNPATGDILTEVPDGDVEDVNAAVESAAGTLRSDTWRRMPPSARERILLRLADLLEVHGDELARLETLNNGKLLIYSKLMEVGASAQWLRYMAGWATKLTGSTLDLSLPLPPEVRSRASTQRVPVGVVAAIIPWNFPLLMAVWKIAPALACGNTVVLKPAEETPLTALRLAELAMEAGLPAGALNVVTGRGETAGDALVRHPKVAKVAFTGSTEVGRIIGSACGRSLKAVSLELGGKSPVIVLADCDPQEAAEGAAAAIFFNHGQVCTAGSRLYVHESIYEDVIQRLAVIGESIVVGSGLEQGVHMGPMVSKKHHENVLRHIRNGIEDGADLICGGTEAPCAQGFFVKPTIFANREKKDIRLLSQEVFGPVLVATPFSDIAEVVNEANRSVYGLGASIWTNDLSAALRINDELEAGTVWVNTHNMVDPNLPFGGFKDSGVGREHGAAAIEHYTTTRSLVIAY

SEQ ID NO: 43240 - protein, 204 aa, Viburnum acerifolium
YDKPVKGRKINWMKAGILESNQILTVSPYYAKELVSGEDKGVELDNILRKTGILGIVNGMDVQEWNPFTDKYTGIKYDATTVMNAKPLIKEALQAEVGLPVDKDIPVIGFIGRLEEQKGSDILVEAISQFIGENVQIIVLGTGKKAMEKQLEQLEIEYPDKARGVAKFNVPLAHMIIAGADFILVPSRFEPCGLIQLHAMRYGT

SEQ ID NO: 43241 - protein, 488 aa, Glycine max
MGVITVSTSAARTPLRLNTRLISHQQEKIPLPLETAKKHQKRVGKTSESLKRVRAVSTVETSPCTLDVDYNEAAAKLENIYKLSPVSDTCNVEDIDSKIERVLRRRKKVSEERDDGNCDNVVRNQNKKAKRLSLDKRIALKNNAKEEVIDQTQKKRNVKNRVQNIDVLIRDYSASTDLVSMDWKKMKIPPVLPSSEHAWLFKLMQPMKALLQAKEDLKEVDKEITGGELADATNMSIIQVRKAIEVGRAARNKLIKHNLRLVLFVINKYFQDFASGPRFQDLCQAGVKGLITAIDRFEPKRRLQLSTYSLFWIRHSIVRSITLSSFTRVPFGLERVRVDIQRTKLKLTFELQRSPTEEELVERIGISLERYHEVMKASKPILSLHSRHITTQEEYINGITDVDGVNGDNRRQLAVLRLALDDVLDSLKPKESLVIRQRYGLDGKGDRTLGEIAGNLNISREIVRKHEVKALMKLKHPARLDYLRRYVV

SEQ ID NO: 43242 - protein, 384 aa, Buchnera aphidicola str. Bp (Baizongia pistaciae)
MNWNKRINHKLNMHIFNKKFRVKVAVQKNNNRIINVNGMQYINFSSNDYLGLRNNARIVQAWKTAATRYGIGSTGSSLITGYSTIHQSLEEKLAKWLDYPKAILFISGYTANTAIISTLIQKNDRIFMDKLSHSSILEPSYNSSGKCYRFIHNNPSSLMNKFYSSSGKNPLIITEGIFSMDGDIAPLSIISSFSKKIKGLLMVDDAHGIGVSGYNGKGSCEQHRVKPDILTITFGKAFGISGAAVLCSNNIAEYLWQFSKHLMFSTAMPIAQAYAIRQALYCIQHADKLRRKLQENINFFLKNSQCLSHLLKCSHTAIQPIIIGDNEETMILSDQLKSKGIWVNAIRPPTVPNKSSRLRITLNALHTKEDIEQLIESIYKLYDR

SEQ ID NO: 43243 - protein, 419 aa, Pyrococcus horikoshii OT3
MKAVILAAGKGERLRPLTDDRPKPILKIANKPIIEYILENLDPFVDEFIIVVKYKKEKIIETLGDEFHGKPITYVVQGDEEGTARAIYSAKDAIIDEEFFAINGDIYFEQEAIRGLLHTYRKMKADGGIVVKKFENLSQLGLVEVKNNLVKKIIEKPGKMEGFANLGIYIFNSEVFDFIEETEKSERGEYEITDTINIMIERGKRIVYFEYKGFWSDIGRPWDLLEVNEYILKTKLKHNIRGTVEEGATIIPPVEIGEGTIVRSGSYIIGPVKIGKNCRIGPNCFIRPYTSIGDNCHIGNAVEVKNSIIMDNSNAPHLNYVGDSIIGENTNLGAGTITANLRHDNKTVKVEIKGNLEDSGRRKLGAIIGHNVKTGINVSIYPGRKIGSGALVGPGVIVDKNIPPGVLVVAKQEKMVTKR

SEQ ID NO: 43244 - protein, 204 aa, Viburnum carlesii
YDKPVKGRKINWMKAGILESDQILTVSPYYAEELVSGEDKGVELDNILRKTGILGIVNGMDVQEWNPLTDKYTGIKYDSTTVMNAKPLIKEALQAEVGLPVDKDIPVIGFIGRLEEQKGSDILVEAISQFIGENVQIIVLGTGKKAMEKQLEQLEREYPDKARGVAKFNVPLAHMIIAGADFILVPSRFEPCGLIQLHAMRYGT

SEQ ID NO: 43245 - protein, 204 aa, Viburnum clemensiae
YDKPVNGRKINWMKAGILESDQMLTVSPYYAEELVSGEEKGVELDSILHKTGILGIVNGMDVEEWNPLTDKYTGIKYDATTVMNAKPLIKEVLQAEVGLPVDKDIPLVGFIARLEEQKGSDILLEAISQFICENVQILVLGTGEKAMEKQLEQLEIEYPDKARGVAKFNVPLAHMIIAGADFRLVPSRFEPCGLIQLHAMRYGT

SEQ ID NO: 43246 - protein, 218 aa, Neisseria meningitidis MC58
MAFTLMRRAMIRKMPYTEDMRPGDTANPYGASKAMVERMLTDIQKADPRWSMILLRYFNPIGAHESGLIGEQPNGIPNNLLPYICQVAAGKLPQLAVFGDDYPTPDGTGMRDYIHVMDLAEGHVAAMQAKSNVAGTHLLNLGSGRASSVLEIIRAFEAASGLTIPYEVKPRRAGDLACFYADPSYTKAQIGWQTQRDLTQMMEDSWRWVSNNPNGYDD

SEQ ID NO: 43247 - protein, 579 aa, Photobacterium profundum SS9
MFIKWRDTMTVGKYLRWKDEAGNDFRPVALTGTELLNDRNLNKSTAFSYEEREAFQLVGLLPPKVQTFDDQLNRVYDGFRNASTDIEKYLFLRALQDRNETLFYALLSRHVEEMTPIIYTPTVGKACQEFSHRYQKARGLYITEDSVDQMGDMARHFTGKDIKIIVVTDSQGILGLGDQGVGGMGIPIGKLSLYTLGAGIHPAHCLPIALDVGTDNQDLLDDPMYLGMPRKRMRGEEYKIFIRKFVKQIQQHFPKAVLQWEDFSKSNAFDNLSDYEDDLPSFNDDIQGTGAVVLAGILGAVKIKEEKLADQTYVVYGAGAGGVGVADQIYAGLLKEGCSHSAAREKIFVLDSQGLVFDDREGLDEYKKRYAKPRELANNWQTKELGKVSLTELIDNHRVTVLLGTSGIGGAFKAEHVQKMMEYTKRPMVFPLSNPTANCEALPEDVYQWSDGQVIVATGSPFSDVNYNGREYRIGQGNNVFIFPGVGLASIVSGTPKITLDMFTMASYALADCISDDDLAAGCVFPRISKLKEVSMVVATRILENMQTTEPNSPLRGKNIQQELAMHMWEPAYLPYRRV

SEQ ID NO: 43248 - protein, 333 aa, Buchnera aphidicola str. Bp (Baizongia pistaciae)
MTIKIGINGFGRIGRVLFRLAQLRSNIEILAINDLINVQYIAYMLKYDSIHGNFNGKIVIKNETLFVNGKKIRITNEKDPKNLMWGDLNIDVVIESTGIFLTTEDSYKHIQAGAKKVIITSPPKDNTPMFVRGVNFNEYVGQKIVSNASCTTNCLAPLAKVINDEFEIVEGLMTTVHATTATQKTVDGVSYKDWRGGRSALQNIIPSTTGAARAVGKVLPELNGKLTGIAFRIPTANVSVVDLTVRNKKIATYEDICQIIKYASNHDMKEVIGYTEDHVVSSDFNGNTLTSIFDAKAGLSLNNNFIKLVSWYDNECGYSSKVLDLSEFISTFS

SEQ ID NO: 43249 - protein, 284 aa, Escherichia coli
MIENEFGEVSVDDQLIGDRAMQIKTLTNGCICCSRSNELEDALLDLLDNLDKGNIQFDRLVIECTGMADPGPIIQTFFSHEILCQRYLLDGVIALVDAVHADEQMNQFTIAQSQVGYADRILLTKTDVAGEAEKLRERLARINARAPVYTVTHGDIDLGLLFNTNGFMLEENVVSTKPRFHFIADKQNDISSIVVELDYPVDISEVSRVMENLLLESADKLLRYKGMLWIDGEPNRLLFQGVQRLYSADWDRPWGDEKPHSTMVFIGIQLPEDEIRAAFAGLRK

SEQ ID NO: 43250 - protein, 324 aa, Brucella melitensis 16M
MNIAIIGTGFVADYYMTTLRNYPELSLRGVYDRSPERLKAFVAHYNVPAYESYEALLADPDVQIVVNLTTPESHFAVSHAALCAGKHVYSEKPLAMDFDDAKALLELARQSGLTLAAAPANGLSDAHKLVSSLIKTIGTPRLVYAEMEDGPVFRDKWSTWRSQSGAPWPGLHEFEIGCTLEHAGYALSWLVSLFGPVESVSAFSAITFPDKGPGTEHLHMAPDFSVGCLVFKSGLVARLTSGLAMPKDRSLTVVADKGSIVVDDLWDNRSAVRLERVEEKRRFFARLFANLERRLGKFLSWKPGVGRKIAYPKTGKYALPSFPS

SEQ ID NO: 43251 - protein, 204 aa, Viburnum cylindricum
YDKPVKGRKINWMKAGILESDQILTVSPYYAKELVSGEDKGVELDNILRKTGILGIVNGMDVQEWNPLTDKYTGIKYDATTVMNAKPLIKEALQAEVGLPVDKDIPVIGFIGRLEEQKGSDILVEAISQFISENVQIIVLGTGKKTMEKQLEQLEIEYPDKASGVAKFNVPLAHMIIAGADFILVPSRFEPCGLIQLHAMRYGT

SEQ ID NO: 43252 - protein, 390 aa, Streptomyces coelicolor A3(2)
MSVNRTAAAATPVEVPRGLAGVVVADTEVGDVRGLEGFYHYRQYSAVELARSRGFEDVWHLLVHGELPDARTGAAFAAETAALRRLPDAVRAALPAIAEAGAGSGPLAGMRTGLSLLGAALGFRPVYDLSVDQRRQDTLVAAAAVPTLLTALHRLGRGLEPVEPREDLSYAANYLYMLTGQEPDEACTRAIEQYLISTIDHGFNASTFTARVIASTGADVAACLAGAVSALSGPLHGGAPSRALDTLDAIGTPDRIDAWIRERVLAGDRIMGFGHAVYRTEDPRSRMLREVAQSFGGPRVEFAVEVERQVEAILAELKPGRELHTNVEFYAGVVMELCGLPREMFTPTFAAARVVGWSANILEQASDSKIIRPAARYVGPGAPVGVPAVA

SEQ ID NO: 43253 - protein, 328 aa, Arabidopsis thaliana
MLIMSGLMSFGELEDQFGQISDTTMEEKIPFLQMLQCIEHPFTTTEPNQFLQSLLQIQTLESKSCLTLETNIKRDPGQTDDPEKDPRTENGAVTVKEKRKRKRTRAPKNKDEVENQRMTHIAVERNRRRQMNEHLNSLRSLMPPSFLQRGDQASIVGGAIDFIKELEQLLQSLEAEKRKDGTDETPKTASCSSSSSLACTNSSISSVSTTSENGFTARFGGGDTTEVEATVIQNHVSLKVRCKRGKRQILKAIVSIEELKLAILHLTISSSFDFVIYSFNLKMEDGCKLGSADEIATAVHQIFEQINGEISSKLAVFYDDIIIGHMKV

SEQ ID NO: 43254 - protein, 925 aa, Arabidopsis thaliana
MRLRHQGGQYLARGMEPVYWSNKVDSTHDLYDNYTLGSYQNNSYNILAHTGFGYDHEFQIYEINSNSWRIIDATLDFKLGYIGRGVSLKGKTYWIASGEEEKRLGKFLISFDYTTERFERLCLPNKYPCYATLALSVVREEKLSMLSQRGIKSKAEIWVTNKIGETQVVSWSMVLALDLQPKRCIGESGSFLVDEKKRVVVCCDNIRDQGKTTFDSNLPRYHRQKKKGRMIIVFDVESMRLPVTVKATKPSFLVIWIRYSSAASSPTVSLNPSGRLQQTLAGSVEVKGKSLHSGKFSTVKLNPEIAGAGRFFEFRSRFIPASIEFAQESPLCTTLLKDELKIRTVEHLLSALEAKGVDNCRIQIESESSDDREVEVPIFDGSAKEWVDAIQGVGINAAQNHDGESVEKMVAHVNKPVYVCKNDTFVAAFPALETRITCGIDFPQVPAIGCQWFSWRPIHESSFAKDIASSRTFCVYEEVERMREAGLIKGGSLDNAIVCSAEHGWMNPPLRMRRRRCDLQPKRTRMCDLQPKRTSMCDLPPKLVGEKILTRIPITSLRAVRSTCKLWNALTKDRVLVRFHLRRSKEEEEDTMDLSIKQVDLLNQVEISRVYHCDGLLLCVAKDNSRVVVWNPYLGQTRWIRPRTESNIGDSYALGYDINRNHKILRMVQTRNVSVYRYEIYDLRSNSWRVLEVTPNGEMDPNHPLYGVSVKGNTYFFAHEDSSSGEIDEDGDIIDLEDFLLCFDFTTETFGLRLPLPFHSTIDATVTLSCVRDQQLAVLYHNEGLHSDDRFTTVEFWVTTSIEPNSVSWSKFLTVDMRPLALTGVRFDNDMGATFFIDEDEKVAVVFDLDGYLSTESARYHTAFISGKDGFFKPVTLGVAPNVGEPCPRTGHIPTTYRPPLVCSSTYLPSLVQVNQQRKRKERHV

SEQ ID NO: 43255 - protein, 502 aa, Solanum melongena
MDLSKYRPSSAYDTPFLTTNAGGPVYNNVSSLTVGPRGPVLLEDYHLIEKLATFDRERIPERVVHARGASAKGFFEVTHDVSHLTCADFLRAPGVQTPVICRFSTVVHERGSPESIRDIRGFAVKFYTREGNFDLVGNNVPVFFNRDAKSFPDTIRALKPNPKSHIQENWRILDFFSFLPESLHTFAFFYDDVCLPINYRHMEGFGVHAYQLINKAGKAHYVKFHWKPTCGVKSMTEEEAIRVGGTNHSHATKDLYDSIAAGNYPEWKLFIQIMDPEDVDKFDFDPLDVTKTWPEDILPLMPVGRLVLNRNIDNFFAENEQLAFNPGHIVPGVYYSEDKLLQTRIFAYADTQRHRIGPNYMQLPVNAPKCAHHNNHRDGAMNFMHRDEEVDYLPSRFDPCRPAEQYPIPSCVLTGRREKCVIPKENNFKQAGERYRTWEPDRQDRYINKWVESLSDPRVTHEIRSIWISYLSQADKSCGQKVASRLLSSLQCEEDEENSWKC

SEQ ID NO: 43256 - protein, 415 aa, Arabidopsis thaliana
MEKVVDLFGVGEANSQKLLEGGKDLSEIQQGLFIGSVAEANNKDFLKSSNITHVLTVAVALAPPYPDDFVYKVIEVVDRSETDLTVYFDECYSFIDQAIQSGGGVLVHCFMGMSRSVTIVVAYLMKKHGMGFSKAMELVRSRRHQAYPNPGFISQLQQFEKSIQEPIFHAKSYPLTNGNWFRLVIKENDGIITNEKFVINIGTPEENLDQLSIMSHIAVERNRRRQMNEHLKSLRSLTPCFYIKRGDQASIIGGVIEFIKELQQLVQVLESKKRRKTLNRPSFPYDHQTIEPSSLGAATTRVPFSRIENVMTTSTFKEVGACCNSPHANVEAKISGSNVVLRVVSRRIVGQLVKIISVLEKLSFQVLHLNISSMEETVLYFFVVKIGLECHLSLEELTLEVQKSFVSDEVIVSTN

SEQ ID NO: 43257 - protein, 383 aa, Arabidopsis thaliana
  misc_feature (1)..(1): Xaa can be any naturally occurring amino acid
  misc_feature (15)..(15): Xaa can be any naturally occurring amino acid
  misc_feature (85)..(85): Xaa can be any naturally occurring amino acid
  misc_feature (87)..(87): Xaa can be any naturally occurring amino acid
  misc_feature (159)..(159): Xaa can be any naturally occurring amino acid
  misc_feature (190)..(190): Xaa can be any naturally occurring amino acid
  misc_feature (228)..(228): Xaa can be any naturally occurring amino acid
  misc_feature (284)..(284): Xaa can be any naturally occurring amino acid
  unsure (1)..(383): unsure at all Xaa locations
XEESRESPAEHGYYXPAEWDSHAQTWIGWPERQDNWRHNALPAQRVFAGVAKAISKFEPVTVCASPAQWENARKQLPEDIRVVEXSXNDSWFRDSGPTFIVRKRPVKLSSLNRNIAGIDWNFNAWGGANDGCYNDWSHDLLVSRKILALERIPRFQHSXILEGGSIHVDGEGTCLVTEECLLNKNRNPHXSKEQIEEELKKYLGVQSFIWLPRGLYGDEDTNGHIDNXCCFARPGVVLLSWTDDETDPQYERSVEALSVLSNSIDARGRKIQVIKLYIPEPLYXTEEESSGITQDGEAIPRLAGTRLAASYVNFYIANGGIIAPQFGDPIRDKEAIRVLSDTFPHHSVVGIENAREIVLAGGNIHCITQQQPAEPTSVAENGH

SEQ ID NO: 43258 - protein, 494 aa, Azoarcus sp. EbN1
MNATRKAARLRVLFATPECAPWAKTGGLGDVSASLPAALAALGLDVCVLLPGYPSVRQAARNARKVADIRSAHGLPSARLLRGRLPSGVPALVLDCPSLYRREGGPYQDGEGVDYTDNALRFGLLSHVAARLASAASPLVWRADILHCNDWPTALAPAYLKLGLPGAAPSLIVVHNLAFQGIFPLDVAERLGLPPESLKSEGVEYWGKLSFLKAGLYYADRIVAVSPTYAREIRTEAHGCGMQGLLETRANRLAGILNGIDMDAWNPRTDPHLDTNYDADTLEDKAPNKRALQAELGLAADDDALLLGMVTRLTDQKGIDLVLDALPELLARPVQLALLGGGDARFEQAWRQRAAARPDRIAAVIGFDERLAHRIEAGADAFVMPSRFEPCGLNQMYSQRYGTPPIVRATGGLVDSVGDFSVDGLHRGEASGFLFAEATPAALVEAVDRALKVFADRVAWRTLCCNGMARDFSWGGSAGRYARLYVAMRAAAAA

SEQ ID NO: 43259 - protein, 154 aa, Castanea sativa
MALSLFGGRRSNVFDPFSLDIWDPFEGFSAVANVPPSARETTAFATARIDWKETPEAHIFKADLPGLKKEEVKVEVEDGNVLQISGERSKEHEEKNDKWHRVERSCGKFLRRFRLPENAKVEQVKANMENGVLTVIVPKEEQKKTEVKSIEISG

SEQ ID NO: 43260 - protein, 154 aa, Glycine max
KDAREGDDNLSTVHHELHFTVQECIDALGEVIYHIETYDVTTIRASTPMFLMSRKIKSLGVKMVISGEGSDEIFGGYLYFHKAPNKKEFHEETCRKIKALHLYDCLRANKATSAWGVEARVPFLDKSFISVAMDIDPQWKMIKRDSVQIEKWVT

SEQ ID NO: 43261 - protein, 510 aa, Magnaporthe grisea 70-15
MAQDSVEGPADAALQALIIKNAKQTRDIFTDITSRKRIKLVDPATPTDGDLDRDTLALRFNSEYADLRELPPALAARQVAAAGGRKKPGARKAAAAGPPADTPEEEKSRKLIEGIPTRGANPRSQNGTGAAQSSALVLKGRGTGTEGQGGQEQRQQQKQNDRGPPVIGQQLTLARAQELNMQLKPEWHRPWKLMRVISGHLGWVRALAVEPDNKWFASGAGDRTIKIWDLASGRLRLTLTGHISTVRGLAVSPRHPYLFSCAEDKMVKCWDLETNKVIRHYHGHLSGVYTLALHPTLDVLVTGGRDGVARVWDMRTRSNIHVLSGHTGTVSELVCQEADPQVITGSLDSTVRMWDLAAGKTMGVLTHHKKGVRALATHPTEFTFASGSAGSIKQWKCPEGAFMQNFEGHNSIINTLSVNDQNVFFSGADNGSMSFWDWKTGHRFQSLDTTAQPGSLQAESGIFTSTFDQSGSRLICGEADKTIKIWKEDMEATPETHPLDWKPTLGRRKF

SEQ ID NO: 43262 - protein, 321 aa, Bacillus clausii KSM-K16
MSKPTVFLARSLPDAALNHISQFCHLRIWDESKPLTREALAHELADVDGAMLTGIGADTELVKHASKLKVISTATVGYDGFDVAGLAEQNIYVTNTPYVLDETVADLLFGLILSGARRIAPLHEQVKAGNWTKQTTAQSLYGQDVYNQTLGIVGMGRIGEKIVHRAKEGFGMKILYHNRSSRPEVEKKYGAKKVELHELLEQADVVVIMVPLTEATKHLIGKEELSKMKETAILVNGARGAVIDEAALIEALKQKTIFGAALDVFEVEPLPPGHPLLELDNVTLTPHIGSATAATREAMALRAAENLVAGALGQKPRDALS

SEQ ID NO: 43263 - protein, 568 aa, Arabidopsis thaliana
MEHYEVLEQIGKGSFGSALLVRHKHEKKLYVLKKIRLARQTGRTRRSAHQEMELISKIRNPFIVEYKDSWVEKGCYVCIVIGYCKGGDMAEAIKKANGVEFSEEKLCKWLVQLLMALEYLHASHILHRDVKCSNIFLTKDQDIRLGDFGLAKILTSDDLASSVVGTPSYMCPELLADIPYGSKSDIWSLGCCMYEMTALKPAFKAFDMQGLINRINRSIVAPLPAQYSTAFRSLVKSMLRKNPELRPSASDLLRQPLLQPYVQKVLLKLSFREHDTLPSESERRSSYPQQRKRTSGKSVSFGPSRFGVDQEDSVSSVKPVHTYLHRHRPVDLSANDTSRVVVRRPAVSSVVSNSSKYVPVRSNQPKSGGLLKPAVVTRRASLPISQKPAKGTKDSLYHPNIGILHQLNSPDVSVNSPRIDRIKFPLASYEEMPFIPVVRKKKGSSRGSYSPPPEPPLDCSITKDKFTLEPERETKSDLSDQNATAGASSRASSGASRRQRFDPSSYRQRAEALEGLLEFSARLLIDERYDELNVLLKPFGPGKVSPRETAIWLSKSFKESSPSNLEED

SEQ ID NO: 43264 - protein, 409 aa, Streptomyces glaucescens
MSAPAPVVVTGLGIVAPNGTGTEEYWAATLAGKSGIDVIQRFDPHGYPVRVGGEVLAFDAAAHLPGRLLPQTDRMTQHALVAAEWALADAGLEPEKQDEYGLGVLTAAGAGGFEFGQREMQKLWGTGPERVSAYQSFAWFYAVNTGQISIRHGMRGHSSVFVTEQAGGLDAAAHAARLLRKGTLNTALTGGCEASLCPWGLVAQIPSGFLSEATDPHDAYLPFDARAAGYVPGEGGAMLVAERADSARERDAATVYGRIAGHASTFDARPGTGRPTGPARAIRLALEEARVAPEDVDVVYADAAGVPALDRAEAEALAEVFGPGAVPVTAPKTMTGRLYAGGAALDVATALLSIRDCVVPPTVGTGAPAPGLGIDLVLHQPRELRVDTALVVARGMGGFNSALVVRRHG

SEQ ID NO: 43265 - protein, 330 aa, Bacillus licheniformis ATCC 14580
MGNNRHEAVGLTDEQAIDMYKTMLLARKLDERMWLLNRSGKIPFVISCQGQEAAQVGAAFALDRENDYVLPYYRDMGVVLAFGMTAKDLMLSAFAKAEDPNSGGKQMPSHFGQKKNRIVTGSSPVTTQVPHAVGVALAGRLDKKDIATFVTFGEGSSNQGDFHEGANFAAVHKLPVIFMCENNKYAISVPYEKQVACENISDRAVGYGMPGVTVDGNDPLEVYKAVKEARERAGRGEGPTLIETISYRLTPHSSDDDDRSYREREEVAEAKKNDPLNKFAQYLKEAGLLDDQSEKQISDEITKIVNEATDYAEHAPYADPEDALRHVYAE

SEQ ID NO: 43266 - protein, 411 aa, Saccharomyces cerevisiae
MDATTPLLTVANSHPARNPKHTAWRAAVYDLQYILKASPLNFLLVFVPLGLIWGHFQLSHTLTFLFNFLAIIPLAAILANATEELADKAGNTIGGLLNATFGNAVELIVSIIALKKGQVRIVQASMLGSLLSNLLLVLGLCFIFGGYNRVQQTFNQTAAQTMSSLLAIACASLLIPAAFRATLPHGKEDHFIDGKILELSRGTAIVIPIVYVLFLYFQLGSHHALFEQQEEETDEVMSTISRNPHHSLSVKSSLVILLGTTVIISFCADFLVGTIDNVVESTGLSKTFIGLIVIPIVGNAAEHVTSVLVAMKDKMDLALGVAIGSSLQVALFVTPFMVLVGWMIDVPMTLNFSTFETATLFIAVFLSNYLILDGESNWLEGVMSLAMYILIAMAFFYYPDEKTLDSIGNSL

SEQ ID NO: 43267 - protein, 478 aa, Buchnera aphidicola str. Bp (Baizongia pistaciae)
MNVNLMWFRNDLRLSDNSALHFSCRNNASTVLALFIATPKQWERHCLAPKKKMLIYKNIVALKKKITELGIIFYYYESTDYLESTNYIIEFCKIHKVTSIFFNLEYEFYERQRDKIIKKKLKKNNIIINCFHDSVLITPGSIKNSYGKMYKKFSYFKYKCIKQLQLNIPSCFPKPQNKNLHDHYSLDFTIPIFHTYLEKFDANIFPIGEDIVYEKLKFFIKYAFNKYNFDQEIFELNSTSMLSAHLSIGVISPRQCVTLLFKEYPDIIHKLEECKWINELLWREFYQHLLYFYPNIGQNQSLYHWENRIKWDNNLYYLNLWKQGNTGYPIIDAGMRQLKQLGWISNRLRMITASFLVKNLLIDWRKGEEYFMSQLIDGDFASNNGNWQWIASVGTDSMPYFRIFNPMLQSKKFDINAKFIRKYIPELSNVSTYNIHNPCDNNKTNKIHSKYPQPIINYYHSKKKTLLVFKHAKCSNKL

SEQ ID NO: 43268 - protein, 473 aa, Bacillus licheniformis ATCC 14580
MATEYDLVILGGGTGGYVAAIRASQLGLKTAVVEKQKLGGTCLHKGCIPSKALLRSAEVYRTAKKADEFGVVIPEVGLRFSQVQSRKQKIIDQLHNGVKHLMKKGKIDVYEGIGRILGPSIFSPMPGTVSVEMANGDENEMLIPKNVIIATGSRPRSLPGLELDGENVLSSDEALELEQLPASMLIVGGGVIGIEWASMLNDFGVDVTVIEYADRILPTEDADISREMQAQLAKKGITMITGAKVLPDTLEKGDAVSIQAEKDGEKQSYSAEKMLVSVGRQANIEGIGLENTDIQVENGFIVTNSMYQTKESHIYAIGDVIGGLQLAHVASHEGITAVEHIAGENPHAIDYSLVSKCIYSSPEAASVGLTEGEAKAQGKSVKVGKFPFQAIGKALVYGETDGFVKIVADRETDDILGVHMIGPHVTDMISEAGLAKVLDATPWEVGQTIHPHPTLSEAIGEAALAVDGKAIHF

SEQ ID NO: 43269 - protein, 289 aa, Brassica napus
MSLFDTHNTWAFVFGLMGNVISFSVFLSPVPTFYRVWKKKTTEGFQSLPYVVALFSATLWLYYATQKKDVFLLVTINSFGCFIETIYISIFLAYAPKKARMLTVKLLLLMNFGGFCLILLLCQFLAKGTTRAKIIGGICVGFSVCVFAAPLSIIRTVIKTRSVEYMPFSLSLTLTISAVVWLLYGLALKDIYVAFPNVIGFALGALQMILYVVYKYCKTPPHLGEKEVEAAKLPEVTLDMLKLGTVSSPETITAVRQANKCTCGNDRRAEIEDGQNAKNGKQSSSATAT

SEQ ID NO: 43270 - protein, 204 aa, Viburnum dilatatum
YDKPVKGRKINWMKAGILESDQILTVSPYYAKELVSGEEKGVELDNILRKTGILGIVNGMDIQEWNPLTDKYTGIKYDATTVMNAKPLIKEALQAEVGLPVDKDIPVIGFIGRLEEQKGSDILVEAISQFIGENVQIIVLGTGKKAMEKQLEQLEIEYPDKARGVAKFNVPLAHMIIAGADFILVPSRFEPCGLIQLHAMRYGT

SEQ ID NO: 43271 - protein, 364 aa, Bacillus licheniformis ATCC 14580
MELFRYMEQYDYEQLVFCQDKQSGLKAIIAIHDTTLGPALGGTRMWTYESEEAAIEDALRLARGMTYKNAAAGLNLGGGKTVIIGDPRKDKNEEMFRAFGRYIQGLNGRYITAEDVGTTVEDMDIIHDETDFVTGISPAFGSSGNPSPVTAYGVYKGMKAAAKAAFGTDSLEGKTVAVQGVGNVAYNLCRHLHEEGAKLIVTDINKEAVERAVAEFGARAVDPDDIYSQECDIYAPCALGATINDDTIPQLKAKVIAGAANNQLKETRHGDQIHDMGIVYAPDYVINAGGVINVADELYGYNSERALKKVEGIYGNIERVLEISKRDRIPTYLAADRLAEERIERMRQSRSQFLQNGHHILSRR

SEQ ID NO: 43272 - protein, 217 aa, Pyrococcus horikoshii OT3
MVKAVLFDIDGTLLSEKPLIMFILPQVYDELANKLNISRMEARRIFLSEIEKRKGKYEWHDWNFFFRLFSLPFKYEDFIMKYPTKIEVFPGVVEVLKYLKERGYRLGIVTSGPRYQVLKLKVSGIYRYFDVVVTRDDVGSIKPEPRIFLAALEKLKISPKDAVMVGDSLEQDILGAKGVGMKSVWINVGGENGYNLPDFEISSILQLPEVIEDESDI

SEQ ID NO: 43273 - protein, 411 aa, Saccharomyces cerevisiae
MDATTPLLTVANSHPARNPKHTAWRAAVYDLQYILKASPLNFLLVFVPLGLIWGHFQLSHTLTFLFNFLAIIPLAAILANATEELADKAGNTIGGLLNATFGNAVELIVSIIALKKGQVRIVQASMLGSLLSNLLLVLGLCFIFGGYNRVQQTFNQTAAQTMSSLLAIACASLLIPAAFRATLPHGKEDHFIDGKILELSRGTAIVILIVYVLFLYFQLGSHHALFEQQEEETDEVMSTISRNPHHSLSVKSSLVILLGTTVIISFCADFLVGTIDNVVESTGLSKTFIGLIVIPIVGNAAEHVTSVLVAMKDKMDLALGVAIGSSLQVALFVTPFMVLVGWMIDVPMTLNFSTFETATLFIAVFLSNYLILDGESNWLEGVMSLAMYILIAMAFFYYPDEKTLDSIGNSL

SEQ ID NO: 43274 - protein, 204 aa, Viburnum elatum
YDKPVKGRKINWMKAGILESDQILTVSPYYAEELVSGEDKGVELDNVLRKTGILGIVNGMDVQEWNPLTDKYTGIKYDATTVMNAKPLIKEALQAEVGLPVDKDIPVIGFIGRLEEQKGSDILVEAIPQFIGENVQIIVLGTGKKAMEKQLEQLEGEYPDKARGVAKFNVPLAHLIIAGADFMLVPSRFEPCGLIQLHAMRYGT

SEQ ID NO: 43275 - protein, 318 aa, Pimpinella brachycarpa
MMVQQRDELGLSLSLSFPGSSHEQNKSNTTNNKHNQMPHASTPLELNLMPSQPLNLLHNNTTTWTHPASHDRKMEACRVDRRSLLTGIDVNRIPAMTVDMEEETGVSSPNSTISSLSGNKRSLVNERSELANGDEILESSRSDDEDGDNSRKKLRLTKDQSAILEESFKEHNTLNPKQKIALAKRLGLRPRQVEVWFQNRRARTKLKQTEVDCEFLKRCCQTLTEENRKLQKEVQELRALKSSPQFYMQMTPPTTLTMCPSCERVGGLQSATTTLSAGPSITQAEPLRSHPMSSNHHRLPFNPWASPQRPLDALHPRS

SEQ ID NO: 43276 - protein, 382 aa, Phanerochaete chrysosporium
MAFGSLLAFVALAAITRAAPTAESAVCPDGTRVTNAACCAFIPLAQDLQETLFQGDCGEDAHEVIRLTFHDAIAISQSLGPQAGGGADGSMLHFPTIEPNFSANNGIDDSVNNLLPFMQKHDTISAADLVQFAGAVALSNCPGAPRLEFMAGRPNTTIPAVEGLIPEPQDSVTKILQRFEDAGNFSPFEVVSLLASHTVARADKVDETIDAAPFDSTPFTFDTQVFLEVLLKGTGFPGSNNNTGEVMSPLPLGSGSDTGEMRLQSDFALARDERTACFWQSFVNEQEFMAASFKAAMAKLAILGHSRSSLIDCSDVVPVPKPAVNKPATFPATKGPKDLDTLTCKALKFPTLTSDPGATETLIPHCSNGGMSCPGVQFDGPA

SEQ ID NO: 43277 - protein, 232 aa, Buchnera aphidicola str. Bp (Baizongia pistaciae)
MKVYKLVLMRHGESIWNELNKFTGWHDVDLSNRGVQESLKAAKLLKKHGFYFDYAYSSVLKRSIHTLWNIIKFLDQSWIPVKKSWRLNERHYGALEGLNKDDVIQKYGNDKVQQWRRSFNIAPPKISYLEKKKLAHDSRYNNINFDILPYCESLKLTTQRVLPYWLNEIFPRFQKNTKIIIVAHGNSLRALIKYLNNINDIDILNLNIATGFPIIYEFNSEFKPIQYYYLKQ

SEQ ID NO: 43278 - protein, 331 aa, Desulfovibrio vulgaris subsp. vulgaris str. Hildenborough
MKVYYEKDANLEALKGKTVAIIGYGSQGHAHAQNLRDSGISVIVGQRPGGANYALAKEHGFEPVSAAEAAAKADLIMILLPDQVQAAVYEAEIKPNLKAGDALLFAHGFNIHFGQIEPPKDVDVFMIAPKGPGHLVRRTYTEGGGVPCLVAVHQDATGKAMEKALAYAKGVGGSRSGVIETTFREETETDLFGEQAVLCGGLSSLIKAGFETLVEAGYQPEIAYFECLHEVKLIVDLIYEGGLERMRYSISDTAEYGDYVTGKRIVTEETKKEMKKVLRDIQDGTFARNFILEAKAGYPGFKATRRLEAEHQIEKVGGELRGMMPWLKKKV

SEQ ID NO: 43279 - protein, 394 aa, Staphylococcus aureus subsp. aureus MRSA252
MNSIIELTDYYSSNNYAPLKLVITEGKGGKVWDTDGKQYIDCISGFSVANQGHCHPTIVKAMTEQASKLSIISRVLYSDNLGKWEEKICHLAKKDKVLPLNSGTEAVEAAIKIARKWGSDVKGITDGQVEIIAMNNNFHGRTLGSLSLSNHDAYKSGFHPLLQGTKTVDFGDIEQLTQAISPNTAAIILEPIQGEGGVNIPPKGYIQAVRQLCDKHQILLIADEIQVGLGRTGKWFAMEWEQVVPDIYILGKALGGGLYPVSAVLANNDVMRVLTPGTHGSTFGGNPLAIAISTAALDVLKDEQLVERSERLGSFLLKALLQLKHPSIKEIRGRGLFIGIELNTDAAPFVEQLIKRGILCKDTHRTIIRLSPPLVIDKEEINQIVAAFQDVFKN

SEQ ID NO: 43280 - protein, 499 aa, Neisseria meningitidis MC58
MFKKYQYLALAALCAASLAGCDKAGSFFGADKKEASFVERIEHTKDDGSVSMLLPDFAQLVQSEGPAVVNIQAAPAPRTQNGSGNAENDSDPIADNDPFYEFFKRLVPNMPEIPQEEADDGGLNFGSGFIISKDGYILTNTHVVTGMGSIKVLLNDKREYTAKLIGSDVQSDVALLKIDATEELPVVKIGNPKDLKPGEWVAAIGAPFGFDNSVTAGIVSAKGRSLPNESYTPFIQTDVAINPGNSGGPLFNLKGQVVGINSQIYSRSGGFMGISFAIPIDVAMNVAEQLKNTGKVQRGQLGVIIQEVSYGLAQSFGLDKAGGALIAKILPGSPAERAGLQAGDIVLSLDGGEIRSSGDLPVMVGAITPGKEVSLGVWRKGEEITIKVKLGNAAEHIGASSKTDEAPYTEQQSGTFSVESAGITLQTHTDSSGGHLVVVRVSDAAERAGLRRGDEILAVGQVPVNDEAGFRKAMDKAGKNVPLLIMRRGNTLFIALNLQ

SEQ ID NO: 43281 - protein, 280 aa, Mycobacterium tuberculosis H37Rv
MRIALAQIRSGTDPAANLQLVGKYAGEAATAGAQLVVFPEATMCRLGVPLRQVAEPVDGPWANGVRRIATEAGITVIAGMFTPTGDGRVTNTLIAAGPGTPNQPDAHYHKIHLYDAFGFTESRTVAPGREPVVVVVDGVRVGLTVCYDIRFPALYTELARRGAQLIAVCASWGSGPGKLEQWTLLARARALDSMSYVAAAGQADPGDARTGVGASSAAPTGVGGSLVASPLGEVVVSAGTQPQLLVADIDVDNVAAARDRIAVLRNQTDFVQIDKAQSRG

SEQ ID NO: 43282 - protein, 470 aa, Escherichia coli
MTRYQHLATLLAERIEQGLYRHGEKLPSVRSLSREHGVSISTVQQAYQTLETMKLITPQPRSGYFVAQRKAQPPVPPMTRPVQRPVEITQWDQVLDMLVAHSDSSIVPLSKSTPDVETPSLKPLWRELSRVVQHNLQTVLGYDLLAGQRVLREQIARLMLDSGSVVTADDIIITSGCHNSMSLALMAVCKPGDIVAVESPCYYGSMQMLRGMGVKVIEIPTDPETGISVEALELALEQWPIKGIILVPNCNNPLGFIMPDARKRAVLSLAQRHDIVIFEDDVYGELATEYPRPRTIHSWDIDGRVLLCSSFSKSIAPGLRVGWVAPGRYHDKLMHMKYAISSFNVPSTQMAAATFVLEGHYHRHIRRMRQIYQRNLALYTCWIREYFPCEICITRPKGGFLLWIELPEQVDMVCVARQLYRMKIQVAAGSIFSASGKYRNCLRINCALPLSETYREALKQIGEAVYQAME

SEQ ID NO: 43283 - protein, 685 aa, Arabidopsis thaliana
MDQQDHGQSGAMNYGTNPYQTNPMSTTAATVAGGAAQPGQLAFHQIHQQQQQQQLAQQLQAFWENQFKEIEKTTDFKNHSLPLARIKKIMKADEDVRMISAEAPVVFARACEMFILELTLRSWNHTEENKRRTLQKNDIAAAVTRTDIFDFLVDIVPREDLRDEVLGSIPRGTVPEAAAAGYPYGYLPAGTAPIGNPGMVMGNPGEESKVFMSIDPFLNEKFRDEPERRMYKLRVNNVIAFIYKKRYLVVIYLLRKGAASMATNNDFGAFIEKVTISPTSTSSSPPSLQGLTFAIKDIFDVEGRVTGFGNPDWLRTHSAATSTAPVVSSLLEAGATALGITIMDEMAYSINGENAHYGTPRNPIAFDRVPGGSSSGSAVAVAARLVDFSIGTDTGGSVRVPASYCGIFGFRPSHGAVSTVGLTPMAQSFDTVGWFARDTATLKRVGCVLLQQHHLNPIEPSQLIIADDCFKLCSVPHDLLVQPLVGSVEKSFGGNTVVKKVNLGEYIGQNVPSLKHFMTSDDVTTQQEFCIPSLMALSSSMRLLQRHEFKINHGAWISSVKPEFGPGISERIEEAIRTSDEKIDHCRSVKSELITALSTLLGEKGVLVIPTVPGPPPHLQANVAALESFRSRAFSLLSIAGVSGFCQVSIPLGLHENLPVSVSLVAKYGSDGFLLSLVDSLAAFI

SEQ ID NO: 43284 - protein, 259 aa, Lycopersicon esculentum
MANKLRLEGKVAIITGAASGIGEASARLFVEHGARVVVADIQDELGQKVVDSIGSDKASYRHCDVTDEKQVEETVAYAVEKYGTLDIMFSNVGTLNFCSVLDMDVLAFDETMAINVRGSALAVKHAAKVMVDKKIRGSIICNASLEGILAGAASLAYIASKHAVVGIIKAAARELGPHGIRVNGVSPYGIATPLVTKAYGLDAALLEEAIYGNGHLKGVKLSTMHVAQSALFLASDESAYTSGQNLAVDGGLSSILKLQ

SEQ ID NO: 43285 - protein, 204 aa, Viburnum farreri
YDKPVKGRKINWMKAGILESDQILTVSPYYAEELVSGADKGVELDNILRKTGILGIVNGMDIQEWNPLTDKYTGIKYDVTTVMNAKPLIKEALQAEVGLPVDKDIPVIGFIGRLEEQKGSDILVEAISQFIGENVQIIILGTGKKAMEKQLEQLEIEYPDKARGVAKFNVPLAHMIIAGADFILVPSRFEPCGLIQLHAMRYGT

SEQ ID NO: 43286 - protein, 317 aa, Photorhabdus luminescens subsp. laumondii TTO1
MTDKLTSLRKLTTVVADTGDIAAMKLYQPQDATTNPSLILNAAQIPEYRKLIDEAIAWAREQSDSREQQIVDASDKLAVNIGLEILKLIPGRISTEVDARLSYDSERSVAKAKRLIKLYNEAGISNDRILIKLASTWQGIRAAEQLEKEGINCNLTLLFSFAQARACAEAGVYLISPFVGRILDWYKANSDQKEFAPHEDPGVISVTEIYQYYKQHGYDTVVMGASFRNSGEILELAGCDRLTIAPALLKELSEAQGEVERKLGYAGEIKARPEPLNEAQFYWEHHQDAMATEKLADGIRKFAIDQGKLEKMISDLL

SEQ ID NO: 43287 - protein, 360 aa, Shewanella sp. MR-4
MTIKETLLYLGKAVLFGLIMAAMFLLVTHYFDNKNLGSSLLQNRGNNTVELSFAKAVRRAAPAVVNIYSLSIDQSRPLNSGSLQGLGSGVIMSKEGYILTNYHVIKKADEIVVALQDGRKFTSEVVGFDPETDLSVLKIEGDNLPTVPVNLDSPPQVGDVVLAIGNPYNLGQTITQGIISATGRNGLSSGYLDFLQTDAAINAGNSGGALIDTNGSLIGINTAAFQVGGEGGGHGINFAIPIKLAHSIMGKLIKNGRVIRGALGISGEPINPVIAQILNLPDLKGVVIMSVDPNGPAARAQLQPRDVIIKYDGEDVPGVEMLMDRIAETTPGKKIMMTVIRQGKEQVLPVIIDEKVVVDN

SEQ ID NO: 43288 - protein, 167 aa, Desulfovibrio desulfuricans G20
METVTERAVLAGGCFWGMQELIRKLPGVLATRTGYTGGNVPNATYRNHHGHAEAVEIIFDPAVLSYRSLLEYFFRIHDPTTADRQGNDIGSSYRSAVFHTTQQQRETALATIRDINASGVWPAEVVTQVEPVSDFWEAEPEHQDYLQRVPGGYTCHYERRGWVLPPR

SEQ ID NO: 43289 - protein, 592 aa, Bacillus anthracis str. 'Ames Ancestor'
MAETLAKRGPDDNKVWIKGNVAFGHKRLIVVDPEGGKQPMTCLKDEANYAICYNGELYNTEDIRKELLRRGYTFKGHSDTEVLLASYIEWKEECVDHLNGIYAFAVWDEQKEQVFIARDRLGVKPLFYKYDSGRLLFGSELKAILAHPDVKAEVTLEGLSEIFGLGPSRTPGHGIYTGIKELRPGHAMTFSKNGLCIWRYWNVESKKHEDSFEETVEKTRFLLQDAITRQLVSDVPLCTFLSGGVDSSAITAIAAKEYEKSGKGQLHTYSVDYEDNDKYFKANAFQPNSDAPFIHLMTETFQTIHHRCVISNEQLAQYLTEAVLVRDLPGMADIDSSLLWFCREIKQDFVVGLSGECADEIFGGYPWFYREDDLQSSAFPWMRSTEAREQLLKKEWRNKLNLQQYVQQRYEESIQEVPILDGESPLEAKRRQLFYLNMVWFMTTLLDRKDRMSMGASLEVRVPFADHRLVEYAWNIPWEMKMYKNREKGLLRKALEGLLPNDILYRKKSPYPKTHNPHYTKAVTVWIQDLLTDKGSILHELFDKEQLSGLIESGGSAFQTPWYGQLMTGPQLLAHLAQIHVWFKEYGVNIKE

SEQ ID NO: 43290 - protein, 354 aa, Brassica napus
  misc_feature (118)..(118): Xaa can be any naturally occurring amino acid
  misc_feature (173)..(173): Xaa can be any naturally occurring amino acid
  misc_feature (180)..(180): Xaa can be any naturally occurring amino acid
  misc_feature (186)..(186): Xaa can be any naturally occurring amino acid
  unsure (1)..(354): unsure at all Xaa locations
MAASSLHTSISPRSFLPLSKPSPKPQRSQVFLRNKQRSCVSCALINDETDVIPVKSHDDGSVVVMSNETERDVNEPVVVGQLSFEGFPSSSPAAATRPDKSRESEEMDKMIDRSINAXIVLAAGTYAITKLLTIDHDYWHGWTLFEILRYAPQHNWLAYEEALKRNPVLAKMXISGVVYXSVGDWXIAQCYEGKPLFEIDRARTLRSGLVGFTLHGSLSHFYYQFCEELFPFQDWWVVPAKVAFDQTVWSAIWNSIYFTVLGFLRLESPLSIFKELKATFLPMLTAGWKLWPFAHLITYGLVPVEQRLLWVDCVELIWVTILSTYSNEKSEARISESVIENPSSSTTPIDPSKE

SEQ ID NO: 43291 - protein, 488 aa, Bacillus anthracis str. 'Ames Ancestor'
MNPNNRLTTNQGAPVGDNQNSRTAGRRGPVLLEDYHLVEKLAHFDRERIPERVVHARGAGAHGVFVTKNSMKKYTKAAFLQNEGTETPVFVRFSTVIHGQGSPETARDPRGFAVKFYTEEGNYDIVGNHLPVFFIRDAIKFPDMVHSLKPAPDTNIQTPDRYWDFMTLSPESTHMMTWVFSDYGTPASYREMEGFGVHSFKWINAEGKIVYIKYHWKPQQGVRNLSAKEVQEVQGKDFNHATRDLFDAIEKGNYPKWDLHVQVMQLEETDSLDFDPLDPTKVWPEDRFPLMEVGTMTLNRNPKNFFAEVEQVAFSPSATVNGIEPSEDKLLQGRLFSYPDTQRYRLGANYLQIPVNCPYAAVHNQQRDGAMQINQNPSTINYEPSRHAENPVEDPAYRDSTMKVEGYVSREKIDKPNDFKQAGERYRSFSKEEQDNLIANLTSDLKDVNERTKLLAVCNFFRADQEYGMRLAQALNVDITQYVGNAPK

SEQ ID NO: 43292 - protein, 213 aa, Oceanobacillus iheyensis HTE831
MKFFIDTANIDDIRAANSLGILAGVTTNPSLVAKEGVSFHDRLREITKEVSGSVSAEVISEDAEGMIEEGKELAAIAPNITVKVPMTLEGLKAVKVFSELNIKTNVTLIFNANQALLAARAGATYVSPFLGRLDDIGQDGMTLISAIAEIFDRHSVSTEIIAASIRHPLHVTDAALNGAHIATIPYKVLEQLVKHPLTDQGIQKFLDDWNSQK

SEQ ID NO: 43293 - protein, 96 aa, Allochromatium vinosum
MNIRPLHDRVVVRRMEEERLSAGGIVIPDSATEKPIQGEIIAVGHGKILDNGSVRALDVKVGDSVLFGKYSGTEVKLDGKEFLVMREEDIMAVVEG

SEQ ID NO: 43294 - protein, 546 aa, Allochromatium vinosum
MSAKDVKFGGDARVRMMEGVNILANAVKVTLGPKGRNVVLEKSFGAPTVTKDGVSVAKEIELKDKFENMGAQMVKEVASKTSDIAGDGTTTATVLAQAMVREGLKAVAAGMNPMDLKRGMDKAVEAATEELKKLSKPCPRPMAIAQVGTISANSDDSIGTIIAEAMEKVGKEGVITVEDGTSLQNELDVVEGMQFDRGYLSPYFINNQQSQSAELDAPYILLYDKKISNIRDLLPVLEGVAKAGKPLLIIAEDVEGEALATLVVNTIRGIVKVCAVKAPGFGDRRKAMLQDIAILTGATVISEEVGLSLEKATLTDLGTAKRVQVGKDETTIIDGSGSEIDIKARCEQIRAQVEETSSDYDREKLQERLAKLAGGVAVIKVGAATEIEMKEKKARVEDALHATRAAVEEGIVPGGGVALVRAIAAVKDLKGANHDQDVGIAIARRAMEEPLRQIVANAGEEPSVILHKVAEGTGNFGYNAANGEYGDMVEMGILDPTKVTRSALQNSCSVAGLMITTEAMIADEPKDDAPAMPGGGMGDMGGMGMM

SEQ ID NO: 43295 - protein, 404 aa, Azoarcus sp. EbN1
MIAGKSVLAFVMAGGEGSRLHPLTAERSKPSVPFNGRHRIVDFVLSNLVNSEIYSIYLLVQYKSQSLIEHTRRAWVMSPLLPHHFVTVVPPQMQHGPEWFQGTADSVYQNLHLVELVKPDLVVVFGADHVYRMDLRQMIEFHIATQADATVAALPVPLEHTSSFGIIRTDSAGRIRDFREKPESAEPMPGRPGHALASMGNYVFSADLLVDALRRAHSRGGHDFGKNLLPAMAERNRVMAYDFTTNRMRGIRDYEEPAYWRDVGTIDAYYDANFDTLGEFPKFCMSNPHWPIYANPDQTEAAQVHDGHIRTASLGAGVVIRRAVIERSLLRREVVVEEGAEVVDSIIMDRSVIGKGARVRRAIIDQYNFVPPGMKIGYDPEADRQRFHISESGVVVVGKGQLKP

SEQ ID NO: 43296 - protein, 276 aa, Zea mays
  misc_feature (253)..(253): Xaa can be any naturally occurring amino acid
  misc_feature (270)..(270): Xaa can be any naturally occurring amino acid
  unsure (1)..(276): unsure at all Xaa locations
QSNPAPSHLAGKSPPTDRSEGHLVLLLKMQIFVKTLTGKTITLEVESSDTIDNVKAKIQDKEGIPPDQQRLIFAGKQLEDGRTLADYNIQKESTLHLVLRLRGGMQIFVKTLTGKTITLEVESSDTIDNVKAKIQDKEGIPPDQQRLIFAGKQLEDGRTLADYNIQKESTLHLVLRLRGGMQIFVKTLTGKTITLEVESSDTIDNVKAKIQDKEGIPPDQQRLIFAGKQLEDGRTLADYNIQKESTLHLVLRXLRGGMQIFVKTLTGKTXTLEVES

SEQ ID NO: 43297 - protein, 436 aa, Pantoea agglomerans
MPLLNEYIRQLLPEMTQWRRDLHHYAESGWVEFRTASKVAEQLHQLGYDLTLGRDAVDADSRMGLPDEITLANAFQRAREQGAPEPWLSAFEGGFTGIVATLDTGRPGPTLAFRVDMDALDLNEDTDGHHRPFREDFASCNPGMMHACGHDGHTAIGLGLAHVLKQYADRLHGVIKLIFQPAEEGTRGARAMVAAGVVDDVDYFTAIHIGTGVPAGTVVCGSDNFMATTKFDALFTGVAAHAGGKPEDGRNALLAAAQAAIALHAIAPHSAGASRVNVGVMQAGTGRNVVPSGALLKVETRGETEDINRYVFERAREVIHGAAAMYGASVELRLMGAATSSAPSPGWVHYLREQAARVPGVEQAIDRIAAPAGSEDATLMMARVQQHNGLASYMVFGTELSAGHHNEQFDFDENVMAIAVETLALTALNFPWQRGV

SEQ ID NO: 43298 - protein, 323 aa, Fusobacterium nucleatum subsp. vincentii ATCC 49256
MSILVCGGAGYIGSHVVKYLLEKNEDVVVVDSLITGHVDAVDEKAHLELGDLKDEEFLNRVFEKYQIDGVIDFAAFSLVGESVGEPLKYFENNFYGTLCLLKVMKNHNVNKIVFSSTAATYGEAENMPILETDRTEPTNPYGESKLAVEKMFKWCANAYGLKYTALRYFNVAGAYPSGEIGEAHTCETHLIPLILQVALGQREKISIYGDDYPTPDGTCIRDYIHVMDLADAHYLALNRLRDGGDSQIFNLGNGEGFSVKEVIEVTRKVTGHPIPAEVSPRRAGDPARLIASSKKAIDVLKWKPKYNKLEQLLKLLGTGIKSS

SEQ ID NO: 43299 - protein, 232 aa, Thermotoga maritima
MGSDKIHHHHHHMEKTVIYLLEDGYVDFVVEKIRTKMEKLLEEKDKIFVVLAGGRTPLPVYEKLAEQKFPWNRIHFFLSDERYVPLDSDQSNFRNINEVLFSRAKIPSGNVHYVDTSLPIEKACEKYEREIRSATDQFDLAILGMGPDGHVASIFDLETGNKDNLVTFTDPSGDPKVPRVTLTFRALNTSLYVLFLIRGKEKINRLTEILKDTPLPAYFVRGKEKTVWFVGK

SEQ ID NO: 43300 - protein, 427 aa, Arabidopsis thaliana
MANKISETASKMDDYEVVEQIGRGAFGSAFLVIHKSERRKYVVKKIRLAKQTERCKLAAIQEMSLISKLKSPYIVEYKDSWVEKDCVCIVTSYCEGGDMTQMIKKSRGVFASEEKLCRWMVQLLLAIDYLHNNRVLHRDLKCSNIFLTKENEVRLGDFGLAKLLGKDDLASSMVGTPNYMCPELLADIPYGYKSDIWSLGCCMFEVAAHQPAFKAPDMAALINKINRSSLSPLPVMYSSSLKRLIKSMLRKNPEHRPTAAELLRHPHLQPYLAQCQNLSPVFKPVVSKSEHNTNENRTGLPPKTKSAKTPIKHNQESEETEKKNKDTSSSSKDKERPAKSQEMSVISTLTLLREFQKKSPKSEERAEALESLLELCAGLLRQEKFDELEGVLKPFGDETVSSRETAIWLTKSLMNVKRKQNDDETNI

SEQ ID NO: 43301 - protein, 522 aa, Saccharomyces cerevisiae
MKFSAGAVLSWSSLLLASSVFAQQEAVAPEDSAVVKLATDSFNEYIQSHDLVLAEFFAPWCGHCKNMAPEYVKAAETLVEKNITLAQIDCTENQDLCMEHNIPGFPSLKIFKNSDVNNSIDYEGPRTAEAIVQFMIKQSQPAVAVVADLPAYLANETFVTPVIVQSGKIDADFNATFYSMANKHFNDYDFVSAENADDDFKLSIYLPSAMDEPVVYNGKKADIADADVFEKWLQVEALPYFGEIDGSVFAQYVESGLPLGYLFYNDEEELEEYKPLFTELAKKNRGLMNFVSIDARKFGRHAGNLNMKEQFPLFAIHDMTEDLKYGLPQLSEEAFDELSDKIVLESKAIESLVKDFLKGDASPIVKSQEIFENQDSSVFQLVGKNHDEIVNDPKKDVLVLYYAPWCGHCKRLAPTYQELADTYANATSDVLIAKLDHTENDVRGVVIEGYPTIVLYPGGKKSESVVYQGSRSLDSLFDFIKENGHFDVDGKALYEEAQEKAAEEADADAELADEEDAIHDEL

SEQ ID NO: 43302 - protein, 666 aa, Saccharophagus degradans 2-40
MATTRILLVEDDEDDYVIARDVLEEISFLDIELIRAANVSAAYDYLKQNNFDLCLLDYQLGAFNGIEVLKHARASGFSAPIIMLTGQADSKLDEQALDAGAADYLNKSEIGTGRFIRSIRYALARRDVERERVERLKAEAENESKNRFLAHLSHELRTPLTSILGYTELLLNSDKGAQAAVELDVIYRNGKHLLNLLNDVLDLSKIAADRLEINTSKVDVGSLIVDVYTLLRVNAIDKGLNITLASTTPIPTIITSDSTRLRQIIINVVSNAIKFTDEGEINIALSMDDHAGKEKLCVVVKDTGIGIPADKLEEIFSPFSQVADVISKSVGGSGLGLAISSTLAKMLGGEIVVESKIGEGSRFSIYIDVGDVSNVEREWLRFDKQASTAPKKLEYSLEGKVLVVDDLRDIRSLVGHIISQVGVKAEYAANGARAIAVIESAQQAGKPFDLVLMDIHMPEMDGKQAVTLLRNKGYSLPIVALTAASMRGSYEQLEICGFNGMLSKPVDIDKLFQVLNSYLIRKENAKPPHVSLVAESPAAMPSKSSTELSILLVEDDPDAANAVAELMGHLGAQVSVVNSVKHGCEQLQAKKWDAVLVDKNLTDGSGFSVITKIGEQGVSTYVAVVSGDEISLAAHPELSINEVLLKPLQLSALKQLVANIRGYAGA

SEQ ID NO: 43303 - protein, 153 aa, Lilium longiflorum
MQIFVKTLTGKTITLEVESSDTIDNVKAKIQDREGIPPDQQRLIFAGKQLEDGRTLADYNIHKESTLHLVLRLRGGMQIFVKTLTGKTITLEVESSDTIDNVKAKIHDKEGIPPTTRLIFAGTAEDGRTLADYNIQKESTLHLVLRLRGGATC

SEQ ID NO: 43304 - protein, 492 aa, Oryza sativa (japonica cultivar-group)
MDPYKHRASSGSNSTFWTTNSGAPVWNNNSALTVGERGPILLEDYHLIEKLAQFDRERIPERVVHARGASAKGFFEVTHDISHLTCADFLRAPGVQTPVIVRFSTVVHERGSPETLRDPRGFAVKFYTREGNFDLVGNNMPGFFIRDGMKFPDMVHAFKPSPKTNMQENWRIVDFFSHHPESLHMFSFLFDDVGIPLNYRHMEGFGVNTYTLINKDGKPHLVKFHWKPTCGVKCLLDDEAVTVGGTCHSHATKDLTDSIAAGNYPEWKLYIQTIDPDHEDRFDFDPLDVTKTWPEDIIPLQPVGRMVLNKNIDNFFAENEQLAFCPAIIVPGIHYSDDKLLQTRIFSYADTQRHRLGPNYLMLPVNAPKCAYHNNHHDGSMNFMHRDEEVNYFPSRFDAARHAEKVPIPPRVLTGCREKCVIDKENNFQQAGERYRSFDPARQDRFLQRWVDALSDPRITHELRGIWISYWSQCDASLGQKLASRLNLKPNM

SEQ ID NO: 43305 - protein, 546 aa, Staphylococcus aureus subsp. aureus MRSA252
MKQRIGAYLIDAIHRAGVDKIFGVPGDFNLAFLDDIISNPNVDWVGNTNELNASYAADGYARLNGLAALVTTFGVGELSAVNGIAGSYAERIPVIAITGAPTRAVEQAGKYVHHSLGEGTFDDYRKMFAHITVAQGYITPENAATEIPRLINTAIAERRPVHLHLPIDVAISEIEIPTPFEVTAAKDTDASTYIELLVSKLHQSKQPIIITGHEINSFHLHQELEDFVNQTQIPVAQLSLGKGAFNEENPYYMGIYDGKIAEDKIRDYVDNSDLILNIGAKLTDSATAGFSYQFNIDDVVMLNHHNIKIDDVTNDEISLSSLLQQLTDISYTNNASFPAYHRPTSPDYTVGTEPLTQQTYFKMMQNFLKPNDVIIADQGTSFFGDYDLALYKSNTFIGQPLWGSIGYTLPATLGSQLADKDRRNLLLIGDGSLQLTVQAISTMIRQHIKPVLFVINNDGYTVERLIHGMYEPYNEIHMWDYKALPAVFGGKNVEIHDVESSKDLQEVFNTINGHPDVMHFVEVKMSVEDAPKKLIDIAKAFSQQNK

SEQ ID NO: 43306 - protein, 500 aa, Saccharomyces cerevisiae; identical to SEQ ID NO: 781

SEQ ID NO: 43307 - protein, 670 aa, Zea mays
MEANPKNTFTIKVEDGKPGKDGRLAVGPVFRSVLAKDGFPQLEPDMKTSWDVFRVAAVKYADNRMLGWRPFKDGVPGPYLWKSYKEIYDEVLQAGSALQKLGVQPGSRVGIYGANCPQWIVAMQACNGYSLVCVPLYDTLGAGAVDYIIDHAEIDVVFIQDKKIKEILSPNCKSAKRLKALVAFTSATTEQNKEADQIGIKMYAWDDFLKVGKDNPRQPCPPQASDICTVMYTSGTSGQPKGVMLTHESHAMYVKGVDLFMDQFDDKMTTDDVFLSFLPLAHILDRMIEEYFFHKGASIGYYHGDLNALRDDIVELKPTLLVGVPRVYERIYEGILKAIAELRPLRRVIFNALYNRKLASMKAGYSHKTASPFADMLAFRKVKARLGGRLRLLISGGAPLSNEIEEFMRVTTCAYFIQGYGLTETLGPSTVCYIDDMALVGSAGVPATYTEIRLEEVPEMGYDPLGVPSRGEICIRGKSLFAGYYKSPELTNEAIVDGWFHTGDIGEMTPDGILKVIDRKKNIFKLSQGEYVAVEYLEKVYGFPPLVEDIWVYGDSFRSSLVAVVNPHQENTMKWAESNGYKGSFDEICKLEGLKEYILKELAAVAQKNKLRGFEYIKGVVLDPVPFDIERDLVTATMKKKRKNMLNYYQSEIDTIYKKLEAQKNAARTK

SEQ ID NO: 43308 - protein, 204 aa, Viburnum japonicum
YDKPVKGRKINWMKAGILESDQILTVSPYYAKELVSGEDKGVELDNILRKTGILGIVNGMDIQEWNPLTDKYTGIKYDATTVMNAKPLIKEALQAEVGLPVDKDIPVIGFIGRLEEQKGSDILVEAISQFIGENVQIIVLGTGKKAMEKQLEQLEIEYPDKARGVAKFNVPLAHMIIAGADFILVPSRFEPCGLIQLHAMRYGT

SEQ ID NO: 43309 - protein, 186 aa, Desulfovibrio desulfuricans G20
MPCLPVPFFPPRILDLPTRVLIAIEYTHHPLAPQENPMPQKYRKTPEALAALTDEQRRVTQENGTERPFSNAFHDHTAAGLYVDIVSGEPLFSSLDKFDSGCGWPSFSRPVELNIVEKKDTSHGLVRTEVRSKHADSHLGHVFTDGPEHLTGLRYCINSAALRFIPADKLEEEGYGEYAHLFTTRE

SEQ ID NO: 43310 - protein, 450 aa, Ralstonia eutropha JMP134
MNLLHDLRRIAHLAAPVLVGQLAVIAFGVMDTVMAGRASASDLAAVGLGGSIYITVYISLMGVLQALAPIAGQLYGAGRSDEIGSEVRQAAWLGLALSVPGVLLLAFPEPLLAFAKAPPELVGKASQYLHIGAFGLPAALGFRIYSALNNALSRPVMVTMLQIVGLALKVPLNAWFINGGFGVPAMGGPGCALASTLISWTWCIAGLLILRYSAVYRSLKIFSAWSWPVATQLRALLRLGVPMGLTYLIEITSFTLMSIFITRMGTVMLAGHQIIANLGAVAYMLPLSLAIATSTLVAQSIGARDMAGASRLAWRGICLAAALAMLTGCLLWLLRETVLHAYTKDGAVVAAALPLVLFIAFYQAFDAVQVMTAFILRAYKIALIPTLIYAGSLWGIGIGGGYVLGFGLIDTLPPFTRGASGFWIANSASLAVAGFFLVRYFMRISAAERH

SEQ ID NO: 43311 - protein, 204 aa, Viburnum kansuense
YDKPVKGRKINWMKVGILESDQILTVSPYYAKELVSGEDKGVELDNILRKTGILGIVNGMDVQEWNPFTDKYTGIKYDATTVMNAKPLIKEALQAEVGLPVDKDIPVIGFIGRLEEQKGSDILVEAISQFIGENVQIIVLGTGKKAMEKQLEKLEIEYPDKARGVAKFNVPLAHMIIAGADFILVPSRFEPCGLIQLHAMRYGT

SEQ ID NO: 43312 - protein, 322 aa, Gossypium hirsutum
SINGWCLTSSSSSTTTSSFSARRRPTLRPSVVASLNSSPSPPTLIQDRPVFAAPVPLLTPREEMGNKSYDEAIEALKKLLSEKGELKAEAAARVDQITAELNTTSADGKPSDSSVERLKEGFVYFKKEKYEKNPALYGELAKGQSPKYMIVACSDSRVCPSHVLDMQPGEAFVVRNVANMVPPYDQIKYAGIGSAIEYAVLHLKVQEIVVIGHSACGGIKGLMSFPLDGNNSTDFIEDWVKIGIPAKAKVLAEHGGEPLGVQCTHCEKEAVNVSLGNLLSYPFVRDGLVKKTLGIKGGYYDFVKGSFELWSLQFQLSSSLSV

SEQ ID NO: 43313 - protein, 479 aa, Buchnera aphidicola str. Bp (Baizongia pistaciae)
MIRRFRRTKIVATLGPSTDNHIILENMIKSGVNVFRLNFSHGTREEHIYRAKLVTSIAKRLNCHIALLGDLQGPKIRICKFQDKKVFLKVNNYFILDANLNENLGTSERVGIDYKNLPKDVKKCDILLLDDGKIQLKVINIVDQEIFTKIIIGGVLSNNKGINKLGGGLSARILTKKDKRDIITSIDIGVDYLAVSFPRYGSDLDHARKCAVKFGSKAKIIAKIERAEAVKDLKIIDEIILASDAIMVARGDLGVEIGESELAGIQKTLIRRARQLNRVVITATQMMESMINNPMPTRAEVMDVANAVLDGSDAVMLSAETASGKYPIETIKVMSKVCMGAEKMPSINVSQHRIHDKFHDIEEAIAMSAMYAANHLSGITAIITMTESGKTSLMTSRITSGLPIFALSSHIQTLKLTALYRGVTPIFFNSSKEGVSAANEVINLLVKRGFLEPGNLVIITQGDIMGKVGKTNTSRILKV

SEQ ID NO: 43314 - protein, 319 aa, Gossypium hirsutum
GWCLTSSSSTTTTSSFSARRRPTLRPSVVASLNSSPSPPTLIQDRPVFAAPIPLLTPREEMGNKSYDEAIEALKKLLSEKGELKAEAAARVDQITAELNTASADGKPSDSSVERLKEGFVYFKKEKYEKNPALYGELAKGQSPKYMIVACSDSRVCPSHVLDMQPGEAFVVRNVANMVPPYDQIKYAGIGSAIEYAVLHLKVQEIVVIGHSACGGIKGLMSFPFDGNNSTDFIEDWVKIGIPAKTKVLAEHGGEPLGVQCTHCEKEAVNVSLGNLLSYPFVRDGLVKKTLGIKGGYYDFVKGSFELWSLQFQLSSSLSV

SEQ ID NO: 43315 - protein, 204 aa, Viburnum lantanoides
YDKPQKGRKINWMKAGILESDPILTVSPYYAEELVSGEDKGVELDNILRKTGILGIVNGMYVQEWNPLTDKYTGIKYDATTVMNAKPLIKEALQAKVGLPVDKDIPVIGFIGRLEEQKGSDILVEAISQFIGENVQIIVLGTGKKAMEKQMEQLEIEYPDKARGVAKFNVPLAHMIIAGADFILFPVDLSLVVSSSYTRCAMEP

SEQ ID NO: 43316 - protein, 535 aa, Oceanobacillus iheyensis HTE831
MTKYIFVTGGVVSSLGKGITAASLGRLLKNRGLSVTIQKFDPYINVDPGTMSPYQHGEVFVTQDGAETDLDLGHYERFIDINLNKYSNITTGKVYSSVIRKERRGDYLGGTVQVIPHITNEIKDQVFRAGEATGADVVITEIGGTVGDIESLPFLEAIRQIKSDVGRDSVMYVHCTLVPYIKAAGEMKTKPTQHSVKELRSLGIQPDAIVLRTEMAISKDMKEKIALFCDIDDKSVIEMRDADTLYQVPIALQEEKLDQITCNHFGLDCPEADMEEWKGLVNKVRNLSKTTHIGLVGKYVELPDAYLSVVESLKHAGYDYDTDVKIHWINSELLSEEQIKEELSKVDGVLVPGGFGDRGIDGKIEAIRYARENNIPFFGICLGMQLASVEFARNVVGLSQAHSAEINPHTPHPVIDLLPEQKDIEDLGGTLRLGAYPCKLVDGTKAKEAYDGADVIEERHRHRYEFNNVYRDQMAEKGFVFSGTSPDGRLVETIEVKDHPWFVACQFHPEFTSRPTRAQSLFKGFIGASVDYRKG

SEQ ID NO: 43317 - protein, 144 aa, Glycine max
  misc_feature (37)..(37): Xaa can be any naturally occurring amino acid
  misc_feature (91)..(91): Xaa can be any naturally occurring amino acid
  unsure (1)..(144): unsure at all Xaa locations
PEYVHEEEAQQIAPEVHDVGENYTYSEPQQQVVSDNXWGEEPLPEEPPSFSNEMAVAPEEPVQAPPVPLPHVDEPVCEPVKKTYASILKTXKAAPGIPVAQHVPVSKTSHPTTESNQTQHSVMASSMGTEKPRSDVFGEGASHD

SEQ ID NO: 43318 - protein, 522 aa, Arabidopsis thaliana
MVVSADCRISLSAPSCIRSSSTGLTRHIKLGSFCNGELMGKKLNLSQLPNIRLRSSTNFSQKRILMSLNSVAGESKVQELETEKRDPRTVASIILGGGAGTRLFPLTKRRAKPAVPIGGAYRLIDVPMSNCINSGINKVYILTQYNSASLNRHLARAYNSNGLGFGDGYVEVLAATQTPGESGKRWFQGTADAVRQFHWLFEDARSKDIEDVLILSGDHLYRMDYMDFIQDHRQSGADISISCIPIDDRRASDFGLMKIDDKGRVISFSEKPKGDDLKAMAVDTTILGLSKEEAEKKPYIASMGVYVFKKEILLNLLRWRFPTANDFGSEIIPFSAKEFYVNAYLFNDYWEDIGTIRSFFEANLALTEHPGAFSFYDAAKPIYTSRRNLPPSKIDNSKLIDSIISHGSFLTNCLIEHSIVGIRSRVGSNVQLKDTVMLGADYYETEAEVAALLAEGNVPIGIGENTKIQECIIDKNARVGKNVIIANSEGIQEADRSSDGFYIRSGITVILKNSVIKDGVVI

SEQ ID NO: 43319 - protein, 230 aa, Hevea brasiliensis
MQIFVKTLTGKTITLEVESSDTIDNVKAKIQDKEGIPPDQQRLIFAGKQLEDGRTLADYNIQKESTLHLVLRLRGGMQIFVKTLTGKTITLEVESSDTIDNVKAKIQDKEGIPPDQQRLIFAGKQLEDGRTLADYNIQKESTLHLVLRLRGGMQIFVKTLTGKTITLEVESSDTIDNVKAKIQDKEGIPPDQQRLIFAGKQLEDGRTLADYNIQKESTLHLVLRLRGGDY

SEQ ID NO: 43320 - protein, 541 aa, Sinorhizobium meliloti
MAAKEVKFTSDARDRMLRGVDIMANAVRVTLGPKGRNVVIDKSFGAPRITKDGVSVAKEIELEDKFENMGAQMLREVASRTSDIAGDGTTTATVLAQAIVREGAKAVASGMNPMDLKRGIDLAVEAIVKELRNNARKVSKNAEIAQVATISANGDAEIGRYLAEAMEKVGNEGVITVEEAKTAEIELEVVEGMEFDRGYLSPYFITNQEKMRVELEDAYILLHEKKLSNLQAMIPILESVIQSGKPLLIIAEDVEGEALATLVVNKLRASLKIAAVKAPGFGDRRKSMLEDIAILTGGTVISEELRIKLENTTMDTLGRAKRIMVDKETTTIVDGAGSKEDIGGRVAQIKAQIEDTTSDYDREKLQERLAKLAGGVAVIRVGGSTEVEVKEKKDRVDDALHATRAAVEEGILPGGGVALLPVVSALNGLATANDDQRVGIEIVRRAIEAPVRQIAENAGAEGSIIVGKLREKQDFAFGWNAQTGEFGDLFQMGVIDPAKVVRTAVQDAASIAGLLVTTEAMIAEKPKKDGQPQMPPGGMDF

SEQ ID NO: 43321 - protein, 370 aa, Shewanella sp. MR-4
MTNANVDATQLTTKPSQDGFYMPAEWAAQQAVWMIWPYRPDNWRSAGAYAQATFAKVADAIGGATPVYMGVPQAFLAEAQKVMPSHVTLVEIDSNDCWARDTGPTVVVNAEGECRGVDWGFNAWGGHNGGLYFPWDKDEQVAAQMLKQHGFARYSAPLILEGGSIHVDGEGTCMTTAECLLNANRNPDLTKEQIEALLRDYLNVKQFIWLEEGVYMDETDGHIDNMCCFARPGEVILHWTDDETDPQYPRSKAALDVLQNTVDAQGRKLKIHLLPQPGPLYCTEEESKGVTEGTGVPRTAGERLAGSYVNFLITNDRIVFPLLDPATDDIAAQKLQDIFPEHKIVGVPAREILLGGGNIHCITQQIPSGK

SEQ ID NO: 43322 - protein, 545 aa, Sinorhizobium meliloti
MAAKEVKFGRSGREKMLRGVDILADAVKVTLGPKGRNVVIDKSFGAPRITKDGVSVAKEIELEDKFENMGAQMVREVASKTNDIAGDGTTTATVLAQAIVREGAKAVAAGMNPMDLKRGIDLAVAEVVKDLLAKAKKINTSDEVAQVGTISANGEKQIGLDIAEAMQKVGNEGVITVEEAKTAETELEVVEGMQFDRGYLSPYFVTNPEKMVADLEDAFILLHEKKLSNLQAMLPVLEAVVQTGKPLLIIAEDVEGEALATLVVNKLRGGLKIAAVKAPGFGDRRKAMLEDIAILTGGTVISEDLGIKLESVTLDMLGRAKKVSITKENTTIVDGAGQKSDIEGRVAQIKAQIEETTSDYDREKLQERLAKLAGGVAVIRVGGATEVEVKEKKDRIDDALNATRAAVQEGIVPGGGVALLRSSVKITVKGENDDQDAGVNIVRRALQSPARQIVENAGDEASIVVGKILEKNTDDFGYNAQTGEYGDMIAMGIIDPVKVVRTALQDAASVASLLITTEAMIAELPKKDAPAMPGGMGGMGGMDMM

SEQ ID NO: 43323 - protein, 350 aa, Oryza sativa
  misc_feature (190)..(190): Xaa can be any naturally occurring amino acid
  unsure (1)..(350): unsure at all Xaa locations
MASAKAMAQDEHHFVLKSGHAIPAVGLGTWRAGSDTAHSVQTAITEVYSAYLPYLAIYMRRSVQHTNQVAMASKPILSVFANNLIVNHLQAGYRHVDTAAQYGIEQEVGKGLKAAMEAGINRKDLFVTSKIWCTNLAPERVRPALKNTLKDLQLDYIDLYLIHWPFRLKDGAHQPPEAGEVLEFDMEAVXRKMERLVTDGLVKDIGVCNFSVTKLNRLLQSANIPPAVCQMEMHPGWKNNKIFEACKKHGIHVTAYSPLGSSEKNLAHDPVVEKIANKLNKTPGQVLIKWALQRGTSVIPKSTKDERIKENMQVFGWEIPEEDFQVLCGIKDEVRIDLVHPVCSVWACRL

SEQ ID NO: 43324 - protein, 539 aa, Lactobacillus acidophilus NCFM
MASWWKNAVVYQVYPKSFQDSNGDGIGDLQGIISRLDYLEKLGIDAIWLSPVYQSPGVDNGYDISDYEAIDPQYGTMADMDELISKAKEHHIKIVMDLVVNHTSDQHKWFVEAKKGKDNQYRDYYIWRDPVDEHEPNDLKSAFSGSAWKYDERSGQYYLHFFADQQPDLNWQNTELRQKIYNMMNFWLDKGIGGFRMDVIELIGKDPDKNIRENGPMLHPYLQEMNKATFGKRDVMTVGETWNATPKIAEEYSDPDRHELSMVFQFENQSLDQQPGKEKWDLKPLDLGELKKVLVKWQTKIDFDHAWNSLFWENHDIPRVISRWGNDQEYRVQCAKMFAIILHMMHGTPYIFNGEEIGMTNCPVKNIDEVEDIESINMYNERLAEGYDEEELIHAINVKGRDNARRPMQWNDEKNAGFSEVDPWLSVNPNYKDINVENALADPNSIFYTYQKLIKLRHENPIVVDGDFSLVSNTQDAVLAYYRILNDKKWLVVANLSNEEQNFVSNDQIETILSNYPERNNVQNITLKPYEAFISKVIE

SEQ ID NO: 43325 - protein, 275 aa, Glycine max
FLVLSLPFWWRTEIFSLSQHNLSLAIQNETTFVPPPSTARSVSMRDMGTEMTPIASQEPSRTGTPVRATTPMRSPNSSRPSTPPRASPASTLTDLHSDNLNLNMNELSEKELQMKTRREIMVLGTQLGKMNIAAWASKEEEDKDASTSLKTKAELPKSVVEARAAAWEEAEKAKYMARFRREEMKIQAWENHQKAKTEAKMRKIEVEVERIQGKAQDKLTNKLAAARHKAEEKRAAAEANRNHQAAKTEEQAEYIRRTGHVPSSYLSFSCCNWCS

SEQ ID NO: 43326 - protein, 101 aa, Sinorhizobium meliloti
MAFRPLHDRILVRRVESEEKTKGGIIIPDTAKEKPQEGEVLAVGPGARGEQGQIQPLDVKVGDRILFGKWSGTEIKIDGEDLLIMKESDVMGIIEARAPRR

SEQ ID NO: 43327 - protein, 141 aa, Zea mays
  misc_feature (52)..(52): Xaa can be any naturally occurring amino acid
  unsure (1)..(141): unsure at all Xaa locations
MALAEADDGAVVFGEEQEALVLKSWAVMKKDAANLGLRFFLKVFEIAPSAKXMFSFLRDSDVPLEKNPKLKTHAMSVFVMTCEAAAQLRKAGKVTVTGFALLETIKEALPADMWSLEMKKAWAEAYSQLVAAIKREMKPDA

SEQ ID NO: 43328 - protein, 1116 aa, Debaryomyces hansenii CBS767
MGTPELMKILEDPVLFQENHEKIRNDILKHIKSQNVTIKTLTNELDTSKSANKAFKQALSEIGTVVISVAMGDLSKKVEIHTVESDPEILKVKITINTMMDQLQAFANEVTKVATEVANGELGGQAKNEGSVGIWRSLTDNVNIMALNLTNQVREIADVTRAVARGDLSRKINVHAQGEILQLQMTINSMVDQLRTFAFEVSKVARDVGVLGILGGQALIEGVEGIWKELTDNVNAMALNLTTQVRNIANVTTAVAKGDLSKKVTADCKGEILDLKLTINQMVDRLQNFALEVTTLSREVGTLGILGGQANVQDVEGAWKAVTENVNLMATNLTNQVRSIATVTTAVAHGDLSQKIDVHAQGEILQLKNTINKMVDSLQLFASEVSKVARDVGINGKLGIQAQVSDVDGLWKEITSNVNTMASNLTSQVRAFAQITAAATDGDFTRFITVEASGEMDALKTKINQMVLNLRESIQRNTAAREAAELANSAKSEFLANMSHEIRTPLNGIIGMTQLSLDTELTQYQREMLSIVHNLANSLLTIIDDILDISKIEANRMTVEQIDFSLRGTVFGALKTLAVKAIEKSLDLTYQCDSSFPDNLIGDSFRLRQVILNLAGNAIKFTKKGRVSVSVKKSTRIIEDKERLLLEFCVSDTGIGIEKDKLGLIFDTFCQADGSTTRKFGGTGLGLSISKQLIHLMGGEIWVTSDYGEGSNFYFTVSVAPSAIRYTRQTEQLLPFGGHYILFISTEHTKDELGDIKNGALELGLNPVIVDNIKDGNLTEPVRYDIIMIDSIETAKNLRLLPEVKYIPLVLLHHSIPELNMRVCIDLGISSYGNTPCTISDLASALIPALESRSIAQNTDESASYNILLAEDNLVNQKLAVKILEKQGHHVEVVENGLEAFEALQKTKYDVVLMDVQMPVMGGFEATEKIRQWEKKSNPIDSLSFRTPIIALTAHAMLGDREKSLAKGMDDYVSKPLKPKLLMQTISKCIHNIKQLKELSKQNNSNRTSDFAKNLKKSSIEGSEIPNSNLLNIGSSPTSNSTYNGLSTSLASDGATFASPKMKKSISNDVFVNGRPGKLSMDNRSVTESAISLKPKSPKSDSMDLDNSSPRIEYLD

SEQ ID NO: 43329 - protein, 541 aa, Sinorhizobium meliloti
MAAKEVKFQTDARERMLRGVDVLANAVKVTLGPKGRNVVIDKSFGAPRITKDGVSVAKEIELEDKFENMGAQMLREVASRTNDLAGDGTTTATVLAQAIVREGAKAVASGMNPMDLKRGIDLAVDAVVKELKNNARKISKNSEIAQVGTISANGDTEIGRYLAEAMEKVGNEGVITVEEAKTAETELEVVEGMQFDRGYLSPYFITNQDKMRVELEDPYILIHEKKLSNLQAMLPVLERVVQSGKPLLIIAEDVEGEALATLVVNKLRGGLKVAAVKAPGFGDRRKAMLEDIAILTGGTVVSEDLGIKLESVTLDMLGRAKKVSIEKENTTIIDGAGSKADIEGRTAQIRAQIEETTSDYDREKLQERLAKLAGGVAVIRVGGSTEVEVKEKKDRVDDAVHATRAAVEEGILPGGGVALLRAVKALDGLKTANNDQRVGVDLVRRAIEAPVRQIAENAGAEGSIIVGKLREKTEFSYGWNAQTNEYGDLYAMGVIDPAKVVRTGLQDAASVAGLLVTTEAMIAEKPKKEAAPAFRPRGMDF

SEQ ID NO: 43330 - protein, 147 aa, Medicago truncatula
MSFTDKQEALVNSSYEAFKQNLSGYSVFFYTVILEKAPAAKGLFSFLKDSAGVQDSPQLQAHAEKVFGLVRDSASQLRATGGVVLGDAALGAIHIQKGVVDPHFVVVKEALLKTIKEAAGDKWSEELSTAWEVAYDALATEIKKAMS

SEQ ID NO: 43331 - protein, 203 aa, Synechococcus sp. PCC 7002
MFKILKQVGDYAKDAAQAAKYIGQGLSVTFDHMRRRPVTVQYPYEKLIPSERFRGRIHFEFDKCIACEVCVRVCPINLPVVDWEFDKSIKKKTLKHYSIDFGVCIFCGNCVEYCPTNCLSMTEEYELATYDRHELNYDNVALGRLPYKVTQDPMVTPLRELAYLPQGVIDPHDLPQGSQRAGEHPEDILERLQAEKQQETADQ

SEQ ID NO: 43332 - protein, 146 aa, Medicago truncatula
MGFTEKQEALVNSSWELFKQNPGNSVLFYTIILEKAPAAKGMFSFLKDTAGVQDSPKLQSHAEKVFGMVRDSAVQLRATGGVVLGDATLGAIHIQKGVVDPHFVVVKEALLKTIKEVSGDKWSEELSTAWEVAYDALAAAIKKAMG

SEQ ID NO: 43333 - protein, 483 aa, Pyrococcus horikoshii OT3
MITMKIEDVYIWDINARWLGVTPYQLMENAGASVARVIEEKFGKNLKIAVFCGTGNNGGDGFVAARHLSYENDVTVFLIGEEVKIRSEEAKLNWNILKNLDFVKIKVLKDSSQIRELDLSEFDIIVDALLGAGTRGKPREPIKSAIEKINEYSGKVKIVSIDLPSGYPSEIRVKADFAVTFQWDKEEFKDFKRIIAKIGYPKELKYLVGPAHVKFAYKRKGEHKGQNGKLLIIGGSENYYGAPVLAASAAKHLVDLVFLLLPQNAARRVNDPDLIVREVDGLNFTPEHIKSALELVEKVDAIVIGPGIGVREETKEFVKGIIERVEKPIVVDADGLKIIAEFKDILKGKEIVLTPHAGEFKLLFGEKVPEDLVEKGKVVMRRAKEIGATILLKGKYDVISDGKVWLYNKTGNRGMTTGGTGDVLAGTVGAFLALGNKALKAAAAGAFLVGFAGDLVMEEKGEAFTARDVAEKIPIALKKIIEF

SEQ ID NO: 43334 - protein, 294 aa, Saccharomyces cerevisiae
MKTLVHVASVEKGRSYEDFQKVYNAIALKLREDDEYDNYIGYGPVLVRLAWHISGTWDKHDNTGGSYGGTYRFKKEFNDPSNAGLQNGFKFLEPIHKEFPWISSGDLFSLGGVTAVQEMQGPKIPWRCGRVDTPEDTTPDNGRLPDADKDAGYVRTFFQRLNMNDREVVALMGAHALGKTHLKNSGYEGPWGAANNVFTNEGYLNLLNEDWKLEKNDANNEQWDSKSGYMMLPTDYSLIQDPKYLSIVKEYANDQDKFFKDFSKAFEKLLENGITFPKDAPSPFIFKTLEEQGL

SEQ ID NO: 43335 - protein, 547 aa, Rhodopseudomonas palustris CGA009
MAAKDVKFSGDARDRMLRGVDVLANAVKVTLGPKGRNVLIEKSFGAPRITKDGVTVAKEVELEDKFENMGAQMVREVASKTNDLAGDGTTTATVLAQAIVREGAKAVAAGMNPMDLKRGIEIAVAAVVKDIQKRAKPVASSAEIAQVGTISANGDAPIGKMIAQAMQKVGNEGVITVEENKSLETEVDIVEGMKFDRGYLSPYFVTNAEKMTVELDDAYILLHEKKLSGLQSMLPVLEAVVQSGKPLLIIAEDVEGEALATLVVNRLRGGLKVSAVKAPGFGDRRKAMLEDIAILTGGQLISEDLGIKLETVTLKMLGRAKKVVIDKENTTIVNGAGKKPEIEARVSQIKAQIEETSSDYDREKLQERLAKLAGGVAVIRVGGATEVEVKEKKDRVEDALNATRAAVQEGIVPGGGVALLRAKKAVGRISNDNPDVQAGINIVLKALEAPIRQIAENAGVEGSIVVGKILENKTETFGFDAQTEEYVDMLAKGIVDPAKVVRTALQDASSVASLLVTTEAMVAELPKADAPAMPAGGGMGGMGGMGF

SEQ ID NO: 43336 - protein, 338 aa, Candida albicans SC5314
MSVSKSATTVFVSGASGFIAQNVIKQLLANGYKVIGSVRSESKGKELTDIIQSNDFQFAAIPDISAVGAFDDVLKSNSQISVFIHTASPVTYSAKDVQNELIKPAVEGTRNALNAIKSYGPQIKRVVVTSSFTAIASGKDFDHDKYYTEKDWNPVTIEQALSNPEAAYAYAKKMAEKTVWDFVETESPTFKVTVVNPTVVFGPQAFGVKDKSKLNLSIEMINDILTLKPDDEIPPYASRCIDVRDVAKAHLVAFEKEEAINQRLVLINQPFSNDLLAYIIKKSFPVINIPEGNLERSRECIAKSCIKTDLTKTQEILGFDYVPVEKTILDTIQQLYDA

SEQ ID NO: 43337 - protein, 98 aa, Rhodopseudomonas palustris CGA009
MAKINFRPLHDRVVVKRIDAETKTKGGIIIPDSAKEKPQEGQVIAVGPGGRDETGKLTPIDVKVGDRVLFGKWSGTEIKLDGEELLIMKESDIMGVVG

SEQ ID NO: 43338 - protein, 450 aa, Geobacter metallireducens GS-15
MSPQLIDERLAGIYQDVLKRNPGEVEFHQAVAEVLESLGPVVTKHPEYLERKIIERIAEPERQIIFRVPWQDDKGQVHINRGFRVEFNSALGPYKGGLRFHPSVYLGIIKFLGFEQIFKNSLTGMPIGGGKGGSDFDPKGKTDDEVMRFCQSFMTELYRHIGEHTDVPAGDIGVGGREIGYMFGQYKRITNRWEAGVLTGKGLKFGGSLVRPEATGYGATYFINEALKVRKDSFDGKTCLVSGSGNVAIYTIEKIHQLGGKCIACSDSNGVIIHEKGLDVELIKQLKEVERRRIADYATYHKDAKYIANGNIWDIPCQVAMPSATQNEINGKDAKTLVKNGCIAVGEGANMPTTPEGIKVFIEAQIAYGPGKAANAGGVATSALEMQQNAQRDSWSFEETEKKLEKIMVGIHKLCYETAEEYGDKGNYVTGANIAGFIKVADAMVAHGLV

SEQ ID NO: 43339 - protein, 204 aa, Viburnum lentago
  misc_feature (83)..(83): Xaa can be any naturally occurring amino acid
  unsure (1)..(204): unsure at all Xaa locations
YDKPVKGRKINWMKAGILESDQILTVSPYYAEELVSGEDKGVELDNILRKTGILGIVNGMDVQEWNPLTDKYTGIKYDATTVXNAKPLIKEALQAEVGLPVDKDIPVIGFIGRLEEQKGSDILVEAIPQFIGENVQIIVLGTGKKAMEKQLEQLEREYPDKARGVAKFNVPLAHMIIAGSDFILVPSRFEPCGLIQLHAMRYGT

SEQ ID NO: 43340 - protein, 204 aa, Viburnum lobophyllum
YDKPVKGRKINWMKAGILESDQILTVSPYYAKELVSGEDKGVELDNILRKTGILGIVNGMDVQEWNPLTDKYTGIKYDATTVMNAKPLIKEALQAEVGLPVDKDIPVIGFIGRLEEQKGSDILVEAISQFIGENVQIIVLGTGKKAMEKQLEQLEIEYPDKARGVAKFNVPLAHMIIAGADFILVPSRFEPCGLIQLHAMRYGT

SEQ ID NO: 43341 - protein, 395 aa, Methanosarcina mazei Go1
MTDKIINSGNLEAGYDSVIDKDSKYVMQTYGRQPLVLSKGKGAVVQDIYGKEYIDCVAGIAVNNVGHCHPTVVKAIQAQAEKLIHVSNLYYTEIQAEFAETLASITGMECVFFCNSGAEAVEAAMKLARVATGKSAFVAAEHSFHGRTIGALSVTHKSMYRDPFMPPVSSKTSFVPYSDADAIRKAISEDTAAVVLEPIQGEGGVNVPDPGYLKEVREICDETGTLLIFDEVQTGFGRTGTWFCKEQFGVEPDIMSMAKAIGGGFPMGAIAARSGLSFGRGQHASTFGGGPLACAAALASIQAIKEEKLLERSKEMGAYFTKKLSGMARDDIVEVRGKGLMIGVEIKYPCGKFVDFAREHGVLVNCTSDSVLRLVPPLVITKEQIDSVVDVLEQA

SEQ ID NO: 43342 - protein, 204 aa, Viburnum melanocarpum
YDKPVKGRKINWMKAGILESDQILTVSPYYAKELVSGEDKGVELDNILRKTGILGIVNGMDVQEWNPLTDKYTGIKYDATTVMNAKPLIKEALQAEVGLPVDKDIPVIGFIGRLEEQKGSDILVEAISQFIGENVQIIVLGTGKKAMEKQLEQLEIDYPDKARGVAKFNVPLAHMIIAGADFILVPSRFEPCGLIQLHAMRYGT

SEQ ID NO: 43343 - protein, 142 aa, Brassica rapa subsp. pekinensis
RQVTFCNRRNGLLKKAYELSVLCDAEVTLIVFSSRGRLYEYSNNSVKGTIERYKKAISDNTNTGTVAEINGQYYQQESAKLRQQIISIQNSNRQLMGETIGSMSPKELRNLEGRLDRSINRIRSKKNELLFAEIDYMQKREL

SEQ ID NO: 43344 - protein, 204 aa, Viburnum molle
YDKPVKGRKINWMKAGILESDQILTVSPYYAKELVSGEDKGVELDNILRKTGILGIVNGMDVQEWNPLTDKYTGIKYDATTVMNAKPLIKEALQAEVGLAVDKDIPVMGFIGRLEEQKGSDILVEAISQFIGENVQIIILGTGKKAMEKQLEQLEIEYPDKARGVAKFNVPLAHMIIAGADFILVPSRFEPCGLIQLHAMRYGT

SEQ ID NO: 43345 - protein, 284 aa, Arabidopsis thaliana
MDRSTFILSLLFTLTVSTTTLFSPVFAGTFDTEFDITWGDGRGKVLNNGELLTLSLDRASGSGFQTKKEYLFGKIDMQLKLVPGNSAGTVTAYYLKSKGDTWDEIDFEFLGNLTGDPYTMHTNVYTQGKGDREQQFHLWFDPTADFHTYSVLWNPHHIVFMVDDIPVREFKNLQHMGIQYPKLQPMRLYSSLWNADQWATRGGLVKTDWSKAPFTASYRNFRADACVSSGGRSSCPAGSPRWFSQRLDLTAEDKMRVVQRKYMIYNYCTDTKRFPQGFPKECRH

SEQ ID NO: 43346 - protein, 515 aa, Daucus carota
MENGTKELNKPQPPSSAAMQLQTPVQKIPTATWKLVLVAAIAAGVQFGWALQLSLLTPYVQLLGIPHKWAAYIWLCGPISGMLVQPIVGYYSDHCQSSFGRRRPFIASGAGCVAISVILIGFAADISYKAGDDMSKTLKPRAVTVFVIGFWILDVANNMLQGPCRALLADLCSGDTRRMRSANAFYSFFMAVGNILGYAAGSYNNLYKLFPFSKTHACDLYCANLKSCFIISIALLIIITVVALSVVRENSGPPDDADAAEEPPSSGKIPVFGELLGALKDLPRPMLLLLIVTCLNWIAWFPFILFDTDWMGREIYGGTAGQGKLYDQGVRAGALGLLLNSVVLGLTSIAVEYLVRGVGGVKILWGFVNFILAIGLVMTVVVSKVAQHQREHSANGQLLPPSAGVKAGALSLFSILGIPLSITYSIPFALASIYSSGSGAGQGLSLGVLNLAIVVPQMIVSVLAGPFDSLFGGGNLPAFVVGAISAAISGVLAIVLLPKPSKDAASKLSLSGTYH

SEQ ID NO: 43347 - protein, 204 aa, Viburnum nudum
YDKPVKGRKINWMKAGILESDQILTVSPYYAEELVSGEDKGVELDNILRKTGILGIVNGMDVQEWNPLTDKYTGIKYDATTVMNAKPLIKEALQAEVGLPVDKDIPVIGFIGRLEEQKGSDILVEAIPQFIGENVQIIVLGTGKKAMEKQLEQLEIEYPDKARGVAKFNVPLAHIIIAGADFILVPSRFEPCGLIQLHAMRYGT

SEQ ID NO: 43348 - protein, 380 aa, GIBBERELLA ZEAE PH-1
MVLIKSFVLGALAATVAAKSAVIELLPSNFDDIVLKSGKPTLVEFFAPWCGHCKKLAPVWEDLANTYESAKGKVQIAKVDADAHRELGKRFGIQGFPTLKFFDGKSAKPEEYKSGRDLESLTTFIAEKTGVKSKKKLEMPSEVTYLNDATFSKTVGSDKHILVAFTAPWCGHCKTLAPTWEDLAATFANDKNVVIAKVDAEAPNSKATAEQQGVKSYPTIKWFPAGSKEAVAYESGRTEQAFVDWINEKAGTHRVVGGGLDNVAGTVESLDTLVAKITGGATIAEIAAEVKKEVEGLTDAAQKTYAEYYVRVFDKLSSNNDWVSKELGRLDGILAKGGLAPSKRDQIQQKTNVLRKFVLKKADEKVEQVKEKVEEVKDEL

SEQ ID NO: 43349 - protein, 756 aa, Shewanella sp. MR-4
MQLNSLGFPRIGRRRELKFALEKYWRGESTQAELHEVAKELRRTHWQWQVAAGIEQVPVGDFAFYDQVLTLSATLNAIPDRHRGEGAIDLDTLFRVARGRAPTGTDAPASEMTKYFNTNYHYLVPELKQDQVFSIAYEQFFDEVAEAQALGYQAKPVLLGPVSYLYLAKTVGQDFDKLSLLPNLLKAYADILARFAAQGVTWVQLEEPVLALELAADWQAAISEAYQALKTAQVKILLTSYYGSISHHQALVSALPVAGLHLDLVTAPEQLALFANALRPDQILSAGVVNGRNVWAAEVDLIVERIGSVARDLGARLWIGTSCSLLHSPVDLEVETTLTPTLRQQLAFAKQKLLELANVRQLLLAPESVAAKEIVNTCVARREAKAQAADAKVIARVAALIPADYERVSEFTERQAVQQRKYRLPLLPTTTIGSFPQTPAIRGLRSRWRKGELSDAQYTEQLQQVTRDTIDRQLKLGIDVLVHGEAERNDMVEYFGEQLEGVGFTKNGWVQSYGSRCVKPPLIYGDVSRPKAMTVEWAEFAQSLTDKPVKGMLTGPVTILHWSFAREDISRDTIATQLALAIRDEVVDLQNAGIGIIQIDEPAFREGLPLKQSEWQAYLDWAVNAFKLSAAGVVDETQIHTHMCYSEFNDTIAAIAAMDADVITIETSRSRMELLNAFEDFEYPNEIGPGVYDIHSPNTPSVEAMVHLIEKAAQKVPVRQLWVNPDCGLKTRTWDEVEPALKNMVDATRELRRRLG

SEQ ID NO: 43350 - protein, 231 aa, Papaver nudicaule
MGRGKIEIKRIENSTNRQVTYSKRKNGILKKAKEITILCDAHVSLVIFSSTGKMNEYCSSPLIKQLDRYQKASGNKLWDAKHEYLSAEVDRVKKENDNMQIELRHLKGEDLTPLNPRELIPIESALDDGIVGVKAKIKEHYRALKKRTRMLEEDNKRLLTRLSQQQMEIHGRVEMDTMENTGYNNNNQKADGTRDYPAHNDNHHQVPFGFQVPPMQPNLTTVTTTTTTNNK

SEQ ID NO: 43351 - protein, 949 aa, Arabidopsis thaliana
MRLRHQGGQYLARGMEPVYWSNKVDSTHDLYDNYTLGSYQNNSYNILAHTGFGYDHEFQIYEINSNSWRIIDATLDFKLGYIGRGVSLKGKTYWIASGEEEKRLGKFLISFDYTTERFERLCLPNKYPCYATLALSVVREEKLSMLSQRGIKSKAEIWVTNKIGETQVVSWSMVLALDLQPKRCIGESGSFLVDEKKRVVVCCDNIRDQGKTTFDSNLPRYHRQKKKGRMIIVFDVESMRLPVTVKATKPSFLVIWIRYSSAASSPTVSLNPSGRLQQTLAGSVEVKGKSLHSGKFSTVKLNPEIAGAGRFFEFRSRFIPASIEFAQESPLCTTLLKDELKIRTVEHLLSALEAKGVDNCRIQIESESSDDREVEVSKEWVDAIQGVGINAAQNHDGESVEKMVAHVNKPVYVCKNDTFVAAFPALETRITCGIDFPQVPAIGCQWFSWRPIHESSFAKDIASSRTFCVYEEVERMREAGLIKGGSLDNAIVCSAEHGWMNPPLRFDDEACRHKILDLIGDLSLVSRGGNGGLPVAHIVAYKNEEEEVRSSTEENENVRSSTEENEYVRSSTEAGRGEDPHEDSDNISESGAIHLQIMERFNQRSGSGKEEEEDTMDLSIKQVDLLNQVEISRVYHCDGLLLCVAKDNSRVVVWNPYLGQTRWIRPRTESNIGDSYALGYDINRNHKILRMVQTRNVSVYRYEIYDLRSNSWRVLEVTPNGEMDPNHPLYGVSVKGNTYFFAHEDSSSGEIDEDGDIIDLEDFLLCFDFTTETFGLRLPLPFHSTIDATVTLSCVRDQQLAVLYHNEGLHSDDRFTTVEFWVTTSIEPNSVSWSKFLTVDMRPLALTGVRFDNDMGATFFIDEDEKVAVVFDLDGYLSTESARYHTAFISGKDGFFKPVTLGVAPNVGEPCPRTGHIPTTYRPPLVCSSTYLPSLVQVNQQRKRKERHV

SEQ ID NO: 43352 - protein, 167 aa, Zea mays
MAGSTRAAHKAFLLCNYTLLGAASACIFLTLSLRLAPSACGLLLVFLHALTAVFAAAGCSGSFTDGGAGAGRAHAAHTAGAVLTAIFQGAAALLAFTRTADFLAELRSYVREEDGEVILKLIGGLGTAIFVLEWAALALAFALRLDDDGNEEIDGEHCKSWASAYHV

SEQ ID NO: 43353 - protein, 808 aa, Triticum aestivum
  misc_feature (520)..(520): Xaa can be any naturally occurring amino acid
  unsure (1)..(808): unsure at all Xaa locations
MAAKLTRLHSLRERLGATFSSHPNELIALFSRYVHQGKGMLQRHQLLAEFDALFESDKEKYAPFEDILRAAQEAIVLPPWVALAIRPRPGVWDYIRVNVSELAVEELTVSEYLAFKEQLVDEHASSKFVLELDFEPFNASFPRPSMSNSIGKRVQFLNRHLSSQLFQDKESLYPLLNFLKAHYYKGTTMMLNDRIQSLRGLQSALRKAEEYLVSIPEDTPSSEFNHRFQELGLEKGWGDTAKRVHDTIHLLLDLLEAPDPASLEKFLGTIPMMFNVVILSPHGYFAQSNVLGYPDTGGQVVYILDQVRALENEMLLRIKQQGLDITPKILIVTRLLPDAVGTTCGQRLEKVIGTEHTDILRVPFRTDNGILRKWISRFDVWPYLETYTEDVANELMREMQTKPDFIIGNNSDGNLVATLLAHKLGVTQCTIAHALEKTKYPNSDIYLDKFDSQYHFSCQFTADLIAMNHTDFIITSTFQEIAGSKDSVGQYESHIAFTLPDLYRVVHGIDVFDPKFNIVXPGADMTVYFPYTETDKRLTAFHSEIEELLYSDVENDEHKFVLKDRNKPIIFSMARLDRVKNMTGLVEMYGKNAHLKGFGKLVIVAGDHGKESKDREEQAEFKRMYSLIEEYKLKGHIRWISAQMNRVRNGELYRYICDTKGAFVQPAFYEAFGLTVIEVHECGLPTIATCHGGPAEIIVNGVSGLHIDPYHSDKAADILVNFFEKCSEDPSYWDKMSEGGLKRIYEKYTWKLYSERLMTLTGVYGFWKYVSNLERRETRRYLEMFYALKYRSLAAAVPLAVDGESSDN

SEQ ID NO: 43354 - protein, 225 aa, Zea mays
SNPQTLSTFFPCSIRAAASPATAAMARRRKTDAPPRLDEADRTLYSTFCGAANSLSQLYAQAMAQQKLNFHAGERHALEKLYQWILRKHDEEARLTVAEIMSHIQHEIDYVGTDAHVSPRVPQHPQIANPFANSVVPPGTGLYGQSAAGFAPRPSVTDQSKNTIFSNALSSPVRRSLQNSHTTQGAGNGGRNAEANLAGANREANSTSSNDTSMDMVSDTNEFYQ

SEQ ID NO: 43355 - protein, 337 aa, Sinorhizobium meliloti
MRVYYDRDADLNLIKSKKVAIIGYGSQAAHALNLKDSGAQNVAIALKSGSATAKKAEADGFKVMTVAEAAAWADLMMMATPTSCRPTSTRPTSPETSATARQSPLRTASTSTSASSSRRLGRRRNDRSEGPGHTVRGEYQKGGGVPCLVAVHQDASGNALDLALSYACGVGGGRSGIIETNFKEECETDLFGEQVVLCGGLVELIRAGFETLVEAGYAPEMAYFECLHEVKLIVDLIYEGGIANMNYSISNTAEWGEYVTGPRIITEDTKAEMKRVLKDIQTGKFTSEWMQEYRSGAARFKGIRRVNDSHQIEEVGAKLRAMMPWIGKNKLVDKAKN

SEQ ID NO: 43356 - protein, 396 aa, Pseudomonas syringae pv. tomato str. DC3000
MSFDLRTRLDARRTAHLYRQRPLLQSPQGPHVIVDGQPLLAFCNNDYMGLANHPEVIAAWQAGAERWGVGGGASHLVIGHSTPHHELEEALAELTGRPRALLFSNGYMANLGAVTALVGQGDTVLEDRLNHASLLDAGLLSGARFSRYLHNDAGSLNARLEKAVGDTLVVTDGVFSMDGDIADLPALAQAAKAKGAWLMVDDAHGFGPLGANGAGIVEHFGLSMEDVPVLVGTLGKSFGTSGAFVAGSEELIETLIQFARPYIYTTSQPPALACATLKSLQLLRSEHWRREHLASLIGQFRRGAEQLGLQLMDSFTPIQPIMIGDAGRALRLSQLLRERGLLVTAIRPPTVPAGSARLRVTLSAAHSEADVQLLLEALEQCYPLLDASESTEPVHA

SEQ ID NO: 43357 - protein, 551 aa, Triticum aestivum
  misc_feature (104)..(104): Xaa can be any naturally occurring amino acid
  misc_feature (291)..(291): Xaa can be any naturally occurring amino acid
  misc_feature (326)..(326): Xaa can be any naturally occurring amino acid
  misc_feature (391)..(391): Xaa can be any naturally occurring amino acid
  unsure (1)..(551): unsure at all Xaa locations
MRAYPGEQIEQVCTKKQAGTAPEFPGYRRPTRPPPTPPPSRPHRPPPTQAPGSPPVPTMDPYKHRPTSGANSGYWTTNSGAPVWNNNNALTVGQRGPILLEDYXLIEKLAQFDRERIPERVVHARGASAKGFFEVTHDVSQLTCADFLRAPGVQTPVIVRFSTVVHERGSPETLRDPRGFAVKFYTREGNFDLVGNNMPVFFIRDGMKFPDMVHAFKPSPKTNMQENWRIVDFFSHHPESLHMFTFLFDDVGIPLNYRHMDGFGVNTYTLISRDGKAHLVKFHWKPTCGVXCLLDNEAVTVGGTCHTHATKDLTDAIAAGNYPEWXKLFIQTIDADHEDKFDFDPLDVTKTWPEDIIPLQPVGRMVLNKNIDDFFAENEQLAFCPAVTVPXIHYSDDKLLQTRIFSYADTQRHRLGPNYLMLPVNAPKCAHHNNHHDGLMNFMHRDEEVNYFPSRFDPTRHAEQYPIPPRVLSGCREKCIIEKENNFKQAGERYRSFDPARQDRFLQRWVDALTDARVTHEIQGIWVSYWSQCDASLGQKLASRLKIKPSM

SEQ ID NO: 43358 - protein, 267 aa, Thermotoga maritima MSB8
MGSDKIHHHHHHMKEVFDLRGRVALVTGGSRGLGFGIAQGLAEAGCSVVVASRNLEEASEAAQKLTEKYGVETMAFRCDVSNYEEVKKLLEAVKEKFGKLDTVVNAAGINRRHPAEEFPLDEFRQVIEVNLFGTYYVCREAFSLLRESDNPSIINIGSLTVEEVTMPNISAYAASKGGVASLTKALAKEWGRYGIRVNVIAPGWYRTKMTEAVFSDPEKLDYMLKRIPLGRTGVPEDLKGVAVFLASEEAKYVTGQIIFVDGGWTAN

SEQ ID NO: 43359 - protein, 481 aa, Burkholderia fungorum LB400
MSYRTEEVAYVQPAQPAASAQAAQATQQRSTAEYRALDAAHHIHPFSDMGALNRTGSRVIVKAQGVYLWDSDGNKVIDGMAGLWCVNVGYGRKELADAAYRQMMELPYYNTFFKTTHPPVIELSALLAELAPEPFNHFFYCNSGSEGNDTVLRIVHHYWATQGKHAKKFVISRKNGYHGSTIAGGTLGGMGYMHEQMPSKVENIVHIDQPYFFGEAQGNLTPEEFALARAQQLEAKILEIGADNVAAFIGEPFQGAGGVIFPASTYWPEIQRICRKYDILLVADEVIGGFGRTGEWFAHQYFGFEPDLITLAKGLTSGYIPMGAVGLHDRVAKAIIENGDFNHGLTYSGHPVAAAVAVANLKLLRDEKIVERVKTDTGPYFQKKLRDTLGNHPIIGEISGAGLVAGLQLAQDPKTRKRFANGGDVGTICRDFCFNGNLIMRATGDRMLLSPPLVINKLEIDEIVSKAKKAIDATAQQLGIS

SEQ ID NO: 43360 - protein, 303 aa, Glycine max; identical to SEQ ID NO: 1137

SEQ ID NO: 43361 - protein, 310 aa, Zea mays
MAAAAGGGAVRALSQKEQDIQMMLAADVHLGTKNCDFQMERYAFKRRTDGIYIINLGKTWEKLQLAARVIVAIENPQDIIVQSARPYGQRAVLKFAQYTGAHAIAGRHTPGTFTNQLQTSFSEPRLLILTDPRTDHQPIKESALGNIPTIAFCDTDSPMRYVDIGIPANNKGRNSIGCLFWLLARMVLQMRGTILPGHKWEVMVDLFFYRDPEEAKEQEEEAAVAPEFAAITDYQGADQWGGDQWTSDVTAPPVAPTGADWGAAPAPVPTGDGWDQAGAPAPVVDGTVPLVVAPTGWDQAAPPPTAQGWE

SEQ ID NO: 43362 - protein, 281 aa, Triticum aestivum
  misc_feature (212)..(212): Xaa can be any naturally occurring amino acid
  misc_feature (223)..(223): Xaa can be any naturally occurring amino acid
  misc_feature (236)..(236): Xaa can be any naturally occurring amino acid
  unsure (1)..(281): unsure at all Xaa locations
NKFVQKSRLVPVRNSRDIVDPRVRQVAKVMPARDAVVKVFCVHTEPSFSMPWQRKRQYSSSSSGFIIGGRRVLTNAHSVEHYTQVKLKKRGSDTKYLATVLAIGNECDIAMLTVDDDEFWKGVLPLEFGLLPALQDAVTVVGYPIGGDTISVTSGVVSRIEILSYVHGSTELLGLQIDAAINSGNSGGPAFYDQGKCVGIAFSISLNPKMQXNIGLWFYPTPXLLKPFHSKTYEKXSGEYPRFPLYLGIKWAKKWKIPGSPLRQMGMKFLHQRGCSVFQKN

SEQ ID NO: 43363 - protein, 594 aa, Vibrio vulnificus YJ016
MVFIHFDLKQKIKNWRVIDFTLWRLGSSGIFSSRPEEIRFPHSTNFRLNMTTNYIFVTGGVVSSLGKGIAAASLAAILEARGLKVTMMKLDPYINVDPGTMSPTQHGEVFVTEDGAETDLDLGHYERFIRTKMTKRNNFTAGRVYSDVLAKERRGDYLGATIQVIPHITNDIKDRVINGSQGHDVAIVEVGGTVGDIESLPFMEAIRQLAVEIGRERAMFMHLTLVPYLAAAGEVKTKPTQHSVKELLSIGIQPDILVCRSDRMIPANERKKIALFCNVPEKAVISMKDVDSIYKIPQLIKSQGLDDLVCARFGINAPEADLSEWEQVIYEEANPTGEVTIGMVGKYIELPDAYKSVNEALKHAGLKNRLSVNIKYVDSQDVETKGVEVLQGLDAILVPGGFGDRGIEGKILAAKYARENKVPYLGICLGMQVALIEYARNVAGMEGAHSTEFNKDTKYPVVGLITEWVDSEGNVEERTESSNLGGTMRLGSQLCHLAKGTKARELYGSDTIHERHRHRYEVNNNLRPQIEKAGLKVSGLSADKKLVEMIENPNHPWFVAAQFHPEFTSTPRDGHPLFSGFIKAAGENARGELK

SEQ ID NO: 43364 - protein, 359 aa, Staphylococcus aureus subsp. aureus MRSA252
MMTIKVGIIGCGGIANGKHMPSLQKVENVEMIAFCDVDISKAACAAEAYGTDNAKVYDDYKALLKDDTIDVIHVCTPNDSHCEITVAGLHAGKHVMCEKPMAKTTAEAQKMIDTAKSTGKKLTIGYQNRFRPDSQFLYKSAQRGDLGDIYFGKAHAIRRRAVPTWGVFLDEEAQGGGPLIDIGTHALDLTLWMMDNYEPESVMGSTFHKLNKQHDAANAWGSWNPDEFTVEDSAFGFIKMKNGATIILESAWAINSLEVDEAKCSLSGTKAGADMKDGLRIHGEDMGTLYTKHVELENKGVDFYEGNEVDEAEEEAKAWIDAVVNDTEPVVKPEQAMVVTKILEAIYQSAKSGKAIYFE

SEQ ID NO: 43365 - protein, 346 aa, Staphylococcus aureus subsp. aureus MRSA252
MTKLKVGVIGVGGIAQDRHIPALLKLKDTVSLVAVQDINTVQMIDVAKRFNIPHAVETPSELFKLVDAVVICTPNKFHADLSIEALNHGVHVLCEKPMAMTTEECDRMIEAANKNCKLLTVAYHYRHTDVAITAKKAIESGVVGKPLVARVQAMRRRKVPGWGVFTNKALQGGGSLIDYGCHLLDLSLWLLGKDMVPHEVLGKTYNQLSKQPNQINDWGTFDHTKFDVDDHVTSYMTFANRASMQFECSWSANIKEDKVHVSLSGEDGGINLFPFEIYEPRFGTIFESKANVEHNEDIAGERQARNFVNACLGIEEIVVKPEEARNVNALIEAIYRSDLDNKSIQL

SEQ ID NO: 43366 - protein, 204 aa, Viburnum plicatum
  misc_feature (183)..(183): Xaa can be any naturally occurring amino acid
  unsure (1)..(204): unsure at all Xaa locations
YDKPVKGRKINWMKAGILESDQILTVSPYYAEELVSGEDKGVELDNILRKTGIIGIVNGMDVQEWNPLTDKYTGIKYDASTVMNAKPLIKEALQAEVGLPVDKDIPVIGFIGRLEEQKGSDILVEAISQFIGENVQIIVLGTGKKAMEKQLEQLEIEYPDKARGVAKFNVPLAHMIIAGADFXLVPSRFEPCGLIQLHAMRYGT

SEQ ID NO: 43367 - protein, 310 aa, Oryza sativa
  misc_feature (296)..(296): Xaa can be any naturally occurring amino acid
  unsure (1)..(310): unsure at all Xaa locations
MADPSKLQITPCGMLVQGNQINFTKLYLHHTPAGPEQNQSAVTSNDKKTGLGCIVVNNWSVYDGIGSDAKLVAYAKGLHVFAGAWHNSFSLVFEDERLKGSTLQVMGLIVEEGDWAIVGGTGQFAMATGVILKKMQEQKQYGNIIELTIHGFCPLLKGSQCPVTKIGPWGSSHEGTVQDITESPKRLESITLYHGWSVDSISFTYLDHAGEKHKAGPWGGPGGDPIMIEFGSSEFLKEVSGTFGPYEGSTVITSINFITNKQTYGPFGRQEGTPFSVPAQNNSSIVGFFGRSGKYXMQLVSTCSRSNLSK

SEQ ID NO: 43368 - protein, 204 aa, Viburnum prunifolium
YDKPVKGRKINWMKAGILESDQILTVSPYYAEELVSGEDKGVELDNILRKTGILGIVNGMDVQEWNPLTDKYTGIKYDATTVMNAKPLIKEALQAEVGLPVDKDIPVIGFIGRLEEQKGSDILVEAIPQFIGENVQIIVLGTGKKAMEKQLEQLEREYPDKARGVAKFNVPLAHLIIAGSDFILVPSRFEPCGLIQLHAMRYGT

SEQ ID NO: 43369 - protein, 150 aa, Brassica napus
MADDEEPPMAVQIQPDIPVGKTLSAEESSEAVSVGVTVITGYLGAGKSTLVNYILNGKHGKKIAVILNEFGEEIGVERAMINEGEGGALVEEWVELANGCICCTVKHSLVQALEQLVQRKDRLDHILLETTGLANPAPLASILWLDDQLE

SEQ ID NO: 43370 - protein, 204 aa, Viburnum rafinesquianum
YDKPVKGRKINWMKAGILESDQILTVSPYYAKELVSGEDKGVELDNILRKTGILGIVNGMDVQEWNPLTDKYTGIKYDATTVMNAKPLIKEALQAEVGLAVDKDIPVMGFIGRLEEQKGSDILVEAISQFIGENVQIIVLGTGKKAMEKQLEQLEIEYPDKARGVAKFNVPLAHMIIAGADFILVPSRFEPCGLIQLHAMRYGT

SEQ ID NO: 43371 - protein, 204 aa, Viburnum rufidulum
YDKPVKGRKINWMKAGILESDQILTVSPYYAEELVSGEDKGVELDNILRKTGILGIVNGMDVQEWNPLTDKYTGIKYDATTVMNAKPLIKEALQAEVGLPVDKDIPVIGFIGRLEEQKGSDILVEAIPQFIGENVQIIVLGTGKKAMEKQLEQLEREYPDKARGVAKFNVPLAHLIIAGADFILVPSRFEPCGLIQLHAMRYGT

SEQ ID NO: 43372 - protein, 140 aa, Picrophilus torridus DSM 9790
MIMERCLILVKPDGVERNLIGEVISRFERKGLAIKALKMMRVTREQAEDHYSVHRLKPFFDDLVSYLTSGPIVAMIVEGNNAIASSRMLAGATDGSKAAPGTIRGDFSLDIERNIVHASDSLESYEHEYKIFFNENEIMD

SEQ ID NO: 43373 - protein, 423 aa, Schizosaccharomyces pombe
VSWNYFINYFVTFPLELTTCAITFRYWTDINSAAWISIFLVVIIIVNLFGVRAYGEVEFILSTVKVVATFGFIILAIIINCGGVPTDHRGYIGGSIIKHKPFRHGFKGFCSVFTTAAFSFSGTEVIGLAAAEVDNPQKALPHAVKQVFWRIAIFYVVSLILIGLLISPDDPNLMGNGSTSVSPFVLAIKEANIKGLPSVFNAVIIISVVSVTNSSTYTAGRTLHGMANLKQAPSFFKYTDRLGRPLLAMIVVLLFGFFAYINEADKNGNDVSDTVFNWLLALSGLSNFFTWGSICLCHIIFRLAFKKQGHSLKELGFVSPMGIWGSCIGLFFNILCLMAQFYVSLFPIGGKPNANDFFQGYLAAPVTLAFFIGYKIYDRSHIPSLDKLDITTGLKTYENLDEEEDEPTTASKRIFKKISSVFC

SEQ ID NO: 43374 - protein, 255 aa, Andropogon gerardii
  misc_feature (219)..(219): Xaa can be any naturally occurring amino acid
  misc_feature (251)..(251): Xaa can be any naturally occurring amino acid
  unsure (1)..(255): unsure at all Xaa locations
CELDNIMRLTGITGIVNGMDVSEWDPSKDKYIAVKYDVSTAVEAKALNKEALQAEVGLPVDRKIPLVAFIGRLEEQKGPDVMAAAIPQLMEEDVQIVLLGTGKKKFERMLMSAEEKYPDKVRAVVKFNAALAHHMMAGADVLAVTSRFEPCGLIQLQGMRYGAPCACASTGGLVDTIIEGKTGFHMGRLSVDCNVVEPADVKKVATTLMRAIKVVGTPXYEEMVKNCMIQDLSWKGPAKNWENVLLSLGVXGGEP

SEQ ID NO: 43375 - protein, 204 aa, Viburnum sargentii
YDKPVKGRKINWMKAGILESDQILTVSPYYAEELVSGEDKGVELDNILRKTGILGIVNGMDVQEWNPLTDKYTGIKYDATTVMNAKPLIKEALQAEVGLPVNKDIPVIGFIGRLEEQKGSDILVEALSQFISKNVQIIVLGTGKKAMEKQLEQLEIEYPDKARGVAKFNVPLAHMIIAGADFILVPSRFEPCGLIQLHAMRYGT

SEQ ID NO: 43376 - protein, 326 aa, Ralstonia eutropha JMP134
MAKVVRMYETGGPEVLRYEDMDVGEPGPGQVRIRHVAVGLNYADTYFRNGTYPVPLPAGMGVEAAGVVQAIGPGVTNVAVGDRVTYTGFINTLGAYSTERLVPAAPLIRLPETIGFETAAAMTMRGLTSAYLMRRIYNFKAGDTILLHAAAGGVGLIVSQWAKLLGLTVIGTVSSEAKAEVARAHGCDYIINYSHEDVAKRVRELTDGVGVSVVFDSVGKNTFMASLDSLKRRGTLVCVGTASGPIPPFDPVLLAMKGSLFLTRPALADYIGDPAEKAELAGEIFGHVGAGRIKIEINQRYALEDAVQAHRDLESRKTTGSSIFVI

SEQ ID NO: 43377 - protein, 733 aa, GIBBERELLA ZEAE PH-1
MAPSTSSKARSESNATVISSVTATTATKGAALKSLPSPKDLSHLFSIITRNRDQSEIKAFYKFMQIPGISNFAGGMPNAQYFPFETLEAQISKPDRWQPTANYPEQVEEPAPEPAPPAPTSGLHGFISHINKKGKNIIHKDNNKEADSHKKPTRIIIPKFVNETDPAKRVDLTTALQYGQVTGYPPLLSFIKQFTNKVLYPDIPYKGGVDVILNNGSTDGFSKVLQLLVDPWYEGLHPTSERQGMLCETFVFGNIITQVKPLGINIVPIEIDDQGMVVEGPGGLREVLENWDPENGLLPHFLYTVTMGDNPSSGVVGIRRRREIYALASKFDIIIVEDDPYWFLQFPSAALHEAKARGYGKPQDTQAPKPAIKSGYEFIDSLARSYLSMDIDGRVIRLDTFSKTIAPGARLGYITAQPAIIERLTRIAETGAGQPSGFVQALVAQTLLGPQSSTLQKFFYLPQSKKPTFTGWKLDGWVRWLEGLRGEYERRMIRMCKTLEENAFQLNSSTPSSPDSDWNIITKTRLMDFDWPRGGMFLWVRVHFEKHPLYQAKVGRKSLPTIDGPALSKAFLIHSTRAPHLVLGSPGTMFSATPQIRDERGWRRTTDTAYMSKLPVSIYLAQICDSLMDTRECTDSFSHKEVPSLSLYLGYRSRIIEYRHSLILKEGIDKSRPQSQPKQLCLQPKFQSRPQQGIPPAQLPFVSAALIVVVGLGYVDRQLNGLKWVILLFSYLV

SEQ ID NO: 43378 - protein, 255 aa, Arundinella hirta
  misc_feature (199)..(199): Xaa can be any naturally occurring amino acid
  misc_feature (253)..(254): Xaa can be any naturally occurring amino acid
  unsure (1)..(255): unsure at all Xaa locations
CELDNIMRLTGITGIVNGMDVSEWDPSKDKYIAVKYDVSTAVEAKALNKEALQAEVGLPVDRKIPLVAFIGRLEEQKGPDVMAAAIPQLMEEDVQIVLLGTGKKKFERMLMAAEDKYTDKVRAVVKFNAALAHHIMAGADLLAVTSRFEPCGLIQLQGMRYGAPCACASTGGLVDAVIEGKTGFHMGRLSVDCNVVEPXDVQKVVTTVKRALKVVGTPAYEEMVKNCMIQDLSWKGPAKNWENVLLSLGVAGXXP

SEQ ID NO: 43379 - protein, 413 aa, Vibrio cholerae O1 biovar eltor str. N16961
MMSSIIPSHPNLTWMCFMFEKVVAAPADPILGLTEEFKKDPRTDKINLGVGIYKNEAGETPVLATVKKAEAALLESEKTKSYLTIEGTAEYGLAVQKLLFGANSDIVTQKLAKTAQAPGGTGALRVAGEFIKRQLGDVKVWISNPTWANHHGVFNAAGLETTQYAYYDAKAKDKDFAAMLADLEQAEKGDVVLLHGCCHNPTGIDPTEQEWEVLAKLVADKGLLPLFDFAYQGFASGVEEDAAGLRIFAKYNSEILVASSFSKNFGLYNERVGAFTLVAPSTTVAETAFSQVKAIIRSIYSNPPAHGAAVVTYILNNPELRAEWEAEVAEMRERIQEMRVLFVNTLKEVGVDADFSFIERQNGMFSFSGLSKEQVARLKSELGIYIVGSGRISVAGMTKSNMLPLCQGIAAVM

SEQ ID NO: 43380 - protein, 702 aa, Xanthomonas campestris pv. vesicatoria str. 85-10
MAKSPSKSAQVPALAPANTTVDGSRGTGDELHQKAGGTHPQLTTNQGIPVGDNQNSLRATPRGPTLLEDFILREKITHFDHERIPERIVHARGSAAHGYFELTKSLSQYTTAKIFTEVGEKTPLFTRFSTVAGGAGSVDTPRDVRGFAVKFYTKEGNWDLVGNNIPVFFIQDAMKFPDLIHAVKMEPDRGFPQAASAHDTFWDFISLTPESMHMVMWAMSDRTIPRSLRMIEGFGIHSFRFLNDKGESTFVKFHWRPKLGLQSTIWDEAVKIAGADQDFHRRDLFEAIQNGDFPEWELGVQLFTEAQAATFPFDHLDSTKVIPEELVPLQIVGRMVLDRWPDNFFAETEQVAYCPANIVPGIDFSNDPLLQGRLFSYLDTQLSRLGGPNFHQIPINAPKCPFANNQRDGHMQMSVPKGRVAYEPSSLQADAPREALRGFPSHATAAEEGTKGRVRAERFADHYSQARLFFRSQTAPEQAHIASALVFELSKVETAHVREAIVGHLRHIDQELAQRVADGMGMTALPPAPPAAVAPIDMPLSPALQVIGKMKDTLKGRTVGILIHDGSDAAAIKAVRKAAEAAGATVKIVAPKLGGAKLSDGKPLAADGQLAGTPSVVFDAVAVLLSSEAAKLLTRESAALDFVSFAWAHLKAIAFDEGAQLLLKAGNVGKDAGVVPAADTKAFITAAKTRQWAREPKVRMLA

SEQ ID NO: 43381 - protein, 470 aa, Desulfovibrio desulfuricans G20
MRTKIIATVGPASSGRETLSRLIQAGVRIFRLNFSHGDASQFVDLIALMRQLEAEYQTPITLLQDLSGPKIRIGELPDGALTLAKDDRILLGIPGKAAADGLPFVPFTHKTILDGMEPGDRVVLSDGGLQFHVESKVGPDLFCLVANNSGIITSRKGLALPGKPIHLAALTEKDKKDLQDGLRMGVDAVALSFVQTPEDVAEAKALIKAAGRNVPVIAKLERRNAVDRLEEILEVTDIVMVARGDLGVECPLPELPAMQKRIIRACNRKAKPVIVATQMLLSMVNSPSPTRAETTDVANAVLDGADCVMLSEETAMGNFPVETVQFMRQIVRAAEELHLEQSSVLPPLDEQKTPDFLAYSACLLADKTCAGAIVAHSMSGSAARVLSARRPRQTIHALTPDDEALRFLNFSWGVWPHKVDETLPGHLERAELFVDNAPQFEDGAEVVITAGQPKPGEKPRGTNLVKIYRK

SEQ ID NO: 43382 - protein, 244 aa, Arundinella nepalensis
CELDNIMRLTGITGIVNGMDVSEWDPSKDKYIAVKYDVSTAVEAKALNKEALQAEVGLPVDRKIPLVAFIGRLEEQKGPDVMAAAIPQLMEEDVQMVLLGTGKKKFERMLMAAEDKYPDKVRAVVKFNAALAHHIMAGADLLAVTSRFEPCGLIQLQGMRYGTPCACASTGGLVDTVIEGKTGFHMGRLSVDCNVVEPADVQKVETTVKRALKVVGTPAYEEMVKNCMIQDLSWKGPAKNWENV

SEQ ID NO: 43383 - protein, 762 aa, Vibrio vulnificus YJ016
MSFRIKTIIGIACIEIIMLMLLVFSAMNFMRQSNQEQFIQKANATSQMFARASKDALLSLDLATLDDLTQEILSLPDILYVDIRNNDQQLAFAGALPKVSADWQADDHVSLGDLVFDVSEKITVDGLTYGEIRMGFNTTAIQTALDEASKAIVLIAVLEIILVALFSYFLGSYLSQNLYQLTRAAERVANDGPGFQLQLKAKDEIGKVAAAFDSMSHNLATSYQELEQARTQAELANESKSRFLASMSHEIRTPMNGVLGLLGILGETKLDNHQQNLVHTAKESGELLLSIINDILDFSRMEANTLILYPRPFELKSCVEEIVNSFEPLAKTKGLYLSLTFNDECDYVVVGDSNRYRQVLLNLLGNAVKFTQKGSVSLHVTTQNEGDKLYIRCEINDTGIGIAPDAMAILFEEFTMVDQGYSRTREGSGLGLAICKRLAQLMEGEINVESEVGKGSCFVFSVEMPLAEHDTVTQQAQPDNDSVCTLLQGKRILVAEDNTANQMVIKAMFERLGVAIDLANDGYEAVSMASNHHYDIIFMDISMPGKDGMQACKEIRQLPDAKQAATPIIALTAHALYGDKEKFLRSGMNGYLSKPLRSRHLIEELNKILSASNHHDTATKPLETEKTNHMQITLTSEKNTTAPLVDELIIQQMIRDTSAEVMPMLIEHYIEESERRLVKIDQAIAHSDFQQLEFELHTLGSSSLALGNRRLSNLARKLERLCVAKEYDAVMEDASGIAQLAHDSLSALNERKQLGFVEPNSI

SEQ ID NO: 43384 - protein, 215 aa, Zea mays
MEIGDDDCPPLAVELPPQTASPPFPASSSASASAPVGVTVITGYLGAGKSTLVNYILSGQHGKRIAVILNEFGEEIGVERAMINEGQGGAVVEEWVELANGCVCCTVKHSLVQALEQLVQTKERMDHILLETTGLADPAPLVSILWLDDQLESSIRLDSIITVIDAKNFRRQIDEHTNSSSFPEAFHQIAFADVVILNKIDLVKDDLEDLERQIH

SEQ ID NO: 43385 - protein, 359 aa, Nicotiana sp.
MGICDPIHQLGMWDDFNSSFPSTSATMILEVDKCLEDQIPIMEKRLDNETEDTSHGTVGTSNRYEPETSKPVEKVLRRLAQNREAARKSRLRKKAYVQQLENSKLKLIQLEQELERARKQGMCVGGGVDASQLSYSGTASSGTAVFDMEYGHWVEEQTRQTNDLRIALHSQIGEAELRIIVDGYLNHYFDLFRMKATAAKADVLYIMSGMWKTSAERFFMWIGGFRPSELLKVLTPHLELLTEQQLREVCNLTQSCQQAEDALSQGMVKLHQILAEAVAAGRLGEGNYTLPQMGPAIEKLEDLVRFVNQADHLRQETLQQMSRILNTCQAAQGLLALGEYFERLRVLSSQWATRLREPT

SEQ ID NO: 43386 - protein, 53 aa, Pseudomonas syringae pv. tomato str. DC3000
MDIIRIIFAILLPPVGVFMQVGFAGAFWLNILLTLLGYIPGIIHAIYIIVSRK

SEQ ID NO: 43387 - protein, 313 aa, Arabidopsis thaliana
ALFKKKFGKVYGSIEEHYYRFSVFKANLLRAMRHQKMDPSARHGVTQFSDLTRSEFRRKHLGVKGGFKLPKDANQAPILPTQNLPEEFDWRDRGAVTPVKNQGSCGSCWSFSTTGALEGAHFLATGKLVSLSEQQLVDCDHECDPEEEGSCDSGCNGGLMNSAFEYTLKTGGLMREKDYPYTGTDGGSCKLDRSKIVASVSNFSVVSINEDQIAANLIKNGPLAVAINAAYMQTYIGGVSCPYICSRRLNHGVLLVGYGSAGFSQARLKEKPYWIIKNSWGESWGENGFYKICKGRNICGVDSLVSTVAATTS

SEQ ID NO: 43388 - protein, 203 aa, Glycine max
MGLFLSRNLACKFIYPFLFSNKVSKDLFPKQLDNMISLVSTRTGRHLQRYDKGCLEMNRCIPYRYKNNGTQDKELEVLVISAQKGHGMQFPKGGWETDESMEQAALRETIEEAGVVGSVEGKLGKWYYKSKRQPIMHEGYMFPLLVKKELDNWPEMNTRKRRWMTVDEAKEICPYAWMKEALDELVRRQTQLHSKKDGDMSRL

SEQ ID NO: 43389 - protein, 952 aa, Picrophilus torridus DSM 9790
MVNIKRKLDDIIALSFNYIKSINKVEINGNYVDIPLKLNVQPDTEITMKFSLELKNSNKSLKNFIVFLTSGTGIVYINDREEQALDSGHRLIIFDTNDNNLEIKIRINPRGLFGSNQWNFSINEIYYGKINFDDYSYGIYLKNIYELIEKYYPEINGEIKKVIINFPYTPNVKQISCIEAISDEKYKEYEEISDFYSYPVFNGMISDLNANKYDLNPLKEKIKDIIKNINKKDTKDILAIGHCHIDVAWLWPYSETRKKVYKSFLNVLKLNKKYEFTFAQSTSLFYEWIEDTDIFNDIKNMIKMKKWIPVGGMYVESDTNLLSGEALARQFLYGQRYFIEKFGFKCNIGWLPDSFGFSFQLPQILKNAGINIFITHKMKWNDVNDFPYDVFIWKGLDGTEINVSLINLTYNGSMKYKEIMDGWKLFKNKDKSMIYLYGYGDGGGGPTQEMLELMNYANKYKIFNINKNPNIADIENIFHGHLPVYNDELYLEYHRGVYTTNSHIKNYIASLSQELIIYDFLNAFNLLYNNKDNSESLIKSWKALLKSQFHDVLPGSANYYAYLEAFNELKDAENRIKNIINGNNKYLFNFTQFKYSGFVEINNNVFNINIKPYSIIKLEEHKNEKHNIYLEKHDDYYIIKNRYFDLKINNDGTFSLSKNGELLIKNGNMIRVINDVPEKFDAWNIDYNDLKEPSLVHPKCVKIEVKNTDNFIIINITRSFLNESYVINEITIGNSDDIKIKNKIYMEAREKLIKSCYEFPDYVKSVKCGIPFGSITRNETKERFEFPVLDWINCPENSGIYFTSKTIHGYSLIDGILGISLARYPIYPDPFTETIVENEYYIHVGNDNPYMIVAKTIKKPMLIDFNPDKIPLNEQLIDIKPDNVIIEALKVSEDKNGIIIRLFESKGIETKVDLKMNYKFKIYESDLTELNKKPLESISMRPFEIKTLFLEF

SEQ ID NO: 43390 - protein, 337 aa, Zymomonas mobilis
MQDHNQVNKEKPVLVTGVSGFVGSAVARSLAQQGYKVRGMVRATSPKTNIRDFPGEIVFGDLDDPPSLKRTLSGCGALIHVAADYRLWAADPNEIIRHNRLHTQAIMTAALYLGIERVIYTSSVATLAPGHGKPSDENSPLTPENAIGAYKRSKVEAERLVEKMIAEQGLPAVIVNPSTPIGPRDVKPTPTGRIIIEAATGKMPAYVNTGLNLAHVDDVADGHVKALEKGVIGERYILGGADVPLSVMLAEIARQVGRKPPKVALPRWPLFPLAWGAEAFAKITKKEPFITSDALRMAGYHMYFSSEKAKRDLGYKSRPWQHAISDAIEWFRAEGML

SEQ ID NO: 43391 - protein, 261 aa, Zea mays
  misc_feature (79)..(79): Xaa can be any naturally occurring amino acid
  misc_feature (98)..(98): Xaa can be any naturally occurring amino acid
  misc_feature (229)..(229): Xaa can be any naturally occurring amino acid
  unsure (1)..(261): unsure at all Xaa locations
MRSPVPLPSQEQEPASSPPPSHVHVQRRELAMGAAPPPPPPSSSSWGTDAAYLLFRGETLLPDGARASLYGVALAYCFXGLSAVTARFFKSIEQIMRXSREVVVGVDPRTGAPVVRRDKVWNYTIADIALLAFGTNFPQISLATIDAIRNLGQLTAGGLGPGTLIGSMAFDLFLIHAVCVVMPRAGSKMKISDLGIWLVELFWSFWAYIWLYVILEVWTPRVITLWEAXLTVLQYGLLLLHAYAQDKRWPFVLIPLYDPDS

SEQ ID NO: 43392 - protein, 312 aa, Streptococcus pneumoniae TIGR4
MAEIYLAGGCFWGLEEYFSRISGVLETSVGYANGQVETTNYQLLKETDHAETVQVIYDEKEVSLREILLYYFRVIDPLSINQQGNDRGRQYRTGIYYQDEADLPAIYTVVQEQERMLGRKIAVEVEQLRHYILAEDYHQDYLRKNPSGYCHIDVTDADKPLIDAANYEKPSQEVLKASLSEESYRVTQEAATEAPFTNAYDQTFEEGIYVDITTGEPLFFAKDKFASGCGWPSFSRPISKELIHYYKDLSHGMERIEVRSRSGSAHLGHVFTDGPRELGGLRYCINSASLRFVAKDEMEKAGYGYLLPYLNK

SEQ ID NO: 43393 - protein, 186 aa, Triticum aestivum
  misc_feature (115)..(115): Xaa can be any naturally occurring amino acid
  unsure (1)..(186): unsure at all Xaa locations
VTLQNKFVQKSRLLPVRNSRDIVDPRVRAPQPPPAAVAAASQQTAAQQQQQLQVFWAEQYREIEATTDFKNHNLPLARIKKIMKADEDVRMIAAEAPVVFARACEMFILELTHRXGWAHAEENKRRTLQKSDIAAAIARTEVFDFLVDIVPRDEAKDAEAAVAAGMPHPAAGMPAADMGYYYVPQQ

SEQ ID NO: 43394 - protein, 153 aa, Methanosarcina mazei Go1
MRWPAKRSFSGPARWDPFEEIKRTQERLNQLFEDFMPMEEWGGGKVYTPAIDIKEEDDKLLVTTDLPGINKEDVEINLKEDMLEISAKSGKEKESEEEGYLRRERAYTQFYRAVRLPSSVREEGACAKMDNGVLTIMLPKAKIEEPKKKIEIE

SEQ ID NO: 43395 - protein, 399 aa, Burkholderia pseudomallei K96243
MSKQLQDAYIVAASRTPIGKAPRGAFKNTRPDELLVHAIKSAIAQVPEFDTKLIEDAIVGCAIPEAEQGLNVARMGALLAGLPNTVGGVTVNRFCASGITALAMAADRIRVGESDALLAAGVESMSMVPMMGNKPSMSPHIFDRSEDFGIAYGMGLTAERVAEQWKVSREDQDAFSVESHRKAIAAQQAGEFKDEIAPYAIVERFPNLATGEIDTKTREIALDEGPRAETSLEGLAKLKTVFANKGSVTAGNSSQTSDGSGALLVVSEKVLKQFNLTPLARFVSFAVRGVPPEIMGIGPKEAIPAALKAAGLKQDDIDWIELNEAFAAQSLAVIRDLGLDPSKVNPLGGAIALGHPLGATGAIRAATVVHGLRRRNLKYGMVTMCVGTGMGAAGIIERL

SEQ ID NO: 43396 - protein, 394 aa, Staphylococcus aureus subsp. aureus MRSA252
MQEAYIVAYGRSAAAKAKQGALFHERPDDVAAKVLQGVLKRIDGKFNKNMIEDVIVGTAFPEGLQGQNIARTIALRTGLSDTVPGQTVNRYCSSGLQTIAIAANQIMAGQGDILVAGGVELMSAVPMGGNEPTNNPTLQYDDIGASYPMGLTAENVASQFDVSREDQDAYAVRSHQRAYDAQRDGRFKDEIIPIQVNSVEYTNVGPKVHTNIFDQDEFIRPDTTMEALAKLRTVFKADGTVTAGTSAPLSDGAGFVVLMSGDKVKELGVTPIARFVGYKAVGVDPKIMGIGPAYAIPEVLSLSNLSVEDIDLIELNEAFASQTIASIKEVGLDISRTNVNGGAIALGHPLGATGAMLTARLLNEMGRRPDSRYGMVTMCIGVGMGAAAIFEYVR

SEQ ID NO: 43397 - protein, 233 aa, Bartonella henselae str. Houston-1
MPKIDLIIFDCDGVLVDSEYLAAQIGSQLLKKIGYEISPEELSARYAGLIFPDILKKVEQETGKPTSAHLIDQMSDLFRAQIKTELRAIDGIKEAIEAIQSHYPYCICSNARSTEIKEMLTIVDLYDFFDNKDKIFSAPEVGTKKTKPAPDVFLFAAQQLRVKPKNTIVIEDSIHGVHAATAAGMRVIGFTGGSHSYLGHSNALVEAGAETAIAKHAHLLEVLEAMAVWQDLP

SEQ ID NO: 43398 - protein, 1416 aa, Geobacter metallireducens GS-15
MKIIRLFISSTFRDMHAERDWLNRVVFPELRSRCRRRGAEFVGVDLRWGVTEEESRQRGALSVCLDEIEHCDLFLGLLGERYGWVPPPEKVPAELFAAVRDSGQLSEEEITLVDACYQWDRTTLPARFRLRRDAAISPETADTLTRLWQRAGLLGAGESATALEMRHGALNRSLAQGKALIFLRSEGIHRHSAFPPACIPIFTEPETEAQQRLSRLREELRAAAGPNLIVRQYRAGFGGFRIDPLFLPAAEAGSALQDGVIKPEEWGIISEKARQAVATHGTIALTGMEEFGTRVLNDLWWAIEPLLKNGKRPEITGQSWHTRFARERAARCLGRDDGIALVMGYIQDQGDQSPYILTGLPGCGKSTLMAACVERLREKSPDMVVIPWFVGAAPGSTEVTAMLRSLCEQLRRACRLDLEPSPDPDKLRLQLPAFLAAAGAVRPVALFIDALNQLDPLGGSHGLDWFPRTLAPTVRVVASTLAGPCLDRLTERLPADHLVILPPLPADSRATLAEEHLARRGKRLSATQQALLLDTAARPDAALPLYLVAALEELCCHGDFETLTERIAALPPTVTELFDQILERLERDHGADLATAALSAVAVSRDGLLEPEIIDLIRDGGEATSPLFWTRFYRALEPFLRPSGEEGGGGLIGFFHEQLRFAAFRRYLAMDPPAALPSSQFRQAHERLAGYFRAGARKNGADGEWNPEHPRPLAELPFHLAGAGKEAVLRSLIFDFAWLQTKLQALDVAALLADLNLLPPEPAIAHLAHALRLSTSVVAVDKSQFAGQLTGRLLSRQEPELRALITQAGAHRGNGWLKPATPSLYQAGGAIERILGTHTHPVRGVAITPDGRRAISAADDATLRVWDLASGAELMVLKGHESEVLAVAVFPDGRRIASGSRDATVRLWDTETGECLLILRGHTLPVSSLAAAPDGSWLASGSWDNVVRLWDPETGQERGIIWGHTYGINALAVTPDGQTLLSASFDRTIKAWNPANGELRRAFEGHSRQVLAVAVTPDGRQFVSGSEDCTLKRWDLAEGTELWTYYGHTDGVSSVTVSPDGREIVSGSWDFTLRRWDLEQPRAREVLRGHTFKVSAAAITPDGATAVSAAQDTTLKVWNLAGATASPPLTGHGATVTAAVFTPSGNRFVTASWDRKIKVWGAATGAEIFSLTGHETWVRDVAITPDGRRAVTASHDRTVRVWDLEERRELWVFRGHDAEVWSVVVTPDGRRAFSAGQDATLREWDLETFQPLGVTGLPSPARVTDVSPDGTLLALVAHFPTFIIRDLRAGSLRPYPPLHRDQVNDCVFLPDGLRVLTASSDRTLKLWHLTTGQVMYTLRGHNREIWSVSVTPDGRRAVSASDDRSLILWDLEALKPLATFTGDGALVPAAITPDGKTVVTGDEAGAVHLLRAEGVR

SEQ ID NO: 43399 - protein, 416 aa, Synechocystis sp. PCC 6803
MVKMQIPSCFSTMVFTLPQPTNLPSTNVRLPIQALHGQLIQWRRQFHQYPELGFQEQLTAAHIAETLTKLEIPHTPGIAKTGIMATVDSGKPGPVLAIRADMDALPVTEENEVDYRSLHPGKMHACGHDGHTAIALGTAQYLAAHRDSFRGQVKFFFQPAEEGPGGAKPMIEAGVLENPAVDAIVGLHLWNDLPVGTVGIKPGPVMAAVEHFECQLFGQGGHGAMPHQTVDTLVISAQIVMALQGIVARNLNPLQSAVVTVGQLQSGTAFNVIPDSAYFRGTVRYFDPSFAGYFAQRIEEIIKGICQSHGANYQFTYENIYPPVVNDRRLADLVRSAAADVLLTDDHLQPDYQTLAGEDMSFFLQAVPGCYFFLGSANGDLGLAYPHHHPRFNFDEAVLPVGVELFVRCVERFCNA

SEQ ID NO: 43400 - protein, 659 aa, Schizosaccharomyces pombe
MEYYTSKEVAEWLKSIGLEKYIEQFSQNNIEGRHLNHLTLPLLKDLGIENTAKGKQFLKQRDYLREFPRPCILRFIACNGQTRAVQSRGDYQKTLAIALKKFSLEDASKFIVCVSQSSRIKLITEEEFKQICFNSSSPERDRLIIVPKEKPCPSFEDLRRSWEIELAQPAALSSQSSLSPKLSSVLPTSTQKRSVRSNNAKPFESYQRPPSELINSRISDFFPDHQPKLLEKTISNSLRRNLSIRTSQGHNLGNFGQEILPRSSRRARPSELVCPLSSLRISVAEDVNRLPRIDRGFDPPLTVSSTQRISRPPSLQKSITMVGVEPLYQSNGNEKSSKYNVFSESAHGNHQVLSFSPGSSPSFIEQPSPISPTSTTSEDTNTLEEDTDDQSIKWIRGALIGSGSFGQVYLGMNASSGELMAVKQVILDSVSESKDRHAKLLDALAGEIALLQELSHEHIVQYLGSNLNSDHLNIFLEYVPGGSVAGLLTMYGSFEETLVKNFIKQTLKGLEYLHSRGIVHRDIKGANILVDNKGKIKISDFGISKKLELNSTSTKTGGARPSFQGSSFWMAPEVVKQTMHTEKTDIWSLGCLVIEMLTSKHPYPNCDQMQAIFRIGENILPEFPSNISSSAIDFLEKTFAIDCNLRPTASELLSHPFVS

SEQ ID NO: 43401 - protein, 703 aa, Xanthomonas axonopodis pv. citri str. 306
MAKSPSKSAQVPAVSPAASATPDVSRGTGDELHQKAGGTHPQLTTNQGIPVGDNQNSLRATPRGPTLLEDFILREKITHFDHERIPERIVHARGSAAHGYFELTKSLSQYTTAKIFTEVGEKTPLFTRFSTVAGGAGSVDTPRDVRGFAVKFYTKEGNWDLVGNNIPVFFIQDAMKFPDLIHAVKMEPDRGFPQAASAHDTFWDFISLTPESMHMIMWAMSDRTIPRSLRTIEGFGIHSFRFLNEKGESTFVKFHWRPKLGLQSTIWDEAVKIAGADQDFHRRDLFEAIQRGDFPEWELGVQLFTEAQAETFPFDHLDSTKVIPEELIPLQIVGRMVLDRWPDNFFAETEQVAYCPANIVPGIDFSNDPLLQGRLFSYLDTQLSRLGGPNFHQIPINAPKCPFANNQRDGHMQMGVPKGRVAYEPSSLQADAPREALRGFPSHATPAEEGAKGRVRAESFADHYSQARLFFRSQTAPEQAHIASALVFELSKVETAHVREAIVGHLRHIDQELAQRVADGMGMTALPPAPPAAVAPIDMPLSPALQVIGKMKDTLKGRTVGILIHDGSDAAAIKAVRKAAEAAGATVKIVAPKLGGAKLNDGKQLAADGQLAGTPSVVFDAVAVLLSSEAAKLLTRESAALDFVSFAWAHLKAIAFDEGAQLLLKAGNVGKDAGVVPAADTKAFIAAAKTRQWAREPKVRMLA

SEQ ID NO: 43402 - protein, 174 aa, Lycopersicon esculentum
NCVGFVCPEYFKSDFVYRTLWLQDSPSEDITSILYDVFDYFEDVREQHGKVFVHCCQGVSRSTSLVIAYRMWREGQSFDDAFEYVKAARGIADPNMGFACQLLQCQKRVHASPLSPSSLLRMYRVAPHSPYDPLHLVPKMLNDPSPAALDSRGAFIIHIPSSVYVWIGKKCEAI

SEQ ID NO: 43403 - protein, 455 aa, Geobacillus stearothermophilus
AIETETLVVGAGPGGYVAAIRAAQLGQKVTIVEKGNLGGVCLNVGCIPSKALISASHRYEQAKHSEEMGIKAENVTIDFAKVQEWKASVVKKLTGGVEGLLKGNKVEIVKGEAYFVDANTVRVVNGDSAQTYTFKNAIIATGSRPIELPNFKFSNRILDSTGALNLGEVPKSLVVIGGGYIGIELGTAYANFGTKVTILEGAGEILSGFEKQMAAIIKKRLKKKGVEVVTNALAKGAEEREDGVTVTYEANGETKTIDADYVLVTVGRRPNTDELGLEQIGIKMTNRGLIEVDQQCRTSVPNIFAIGDIVPGPALAHKASYEGKVAAEAIAGHPSAVDYVAIPAVVFSDPECASVGYFEQQAKDEGIDVIAAKFPFAANGRALALNDTDGFLKLVVRKEDGVIIGAQIIGPNASDMIAELGLAIEAGMTAEDIALTIHAHPTLGEIAMEAAEVAL

SEQ ID NO: 43404 - protein, 146 aa, GIBBERELLA ZEAE PH-1
MSYPDQRSNDEWRAVLNKEEQFRILREKGTEAPGSGTFDKHYPDEGVYTCAGCEAPLYKATHKFKSGCGWPAYFDSIPGAVVRHEDRTFGMARTEIVCSNCGGHLGHVFKGEGYDTPTDERHCVNSVSLNFSPNDKIVKDKPESKA

SEQ ID NO: 43405 - protein, 521 aa, Lactococcus lactis
MKERQELGLIGLLPPTVQTIEEQAEQTYEQYLTKPSDLEKRHFLMEIFNTNRTLFYYLFNKHIVEFNPVVYDPTIADTIENYSHLFVDPQYAAYLDINHPENITETLKNAAGDREIRLIVVTDAEGILGIGDWGTQGVDISVGKLMIYTAAAGIDPASVLPVVIDAGTNRKELLEDHLYLGNHQERIYGDQYYSFVDQFVETAESIFPKLYLHWEDFGRSNAATILNNYKTKIPTFNDDIQGTGIVVLGGIFGSLDITGEKLTDQVYLCYGGGSAGAGIAGRVHAEMVSEGLSEEEAYKHFFMIDQQGLLFDDMEDLTPAQKPFAKKRADYKDAGDMTDLLNVVKTVKPTILVGTSTNPGAFTKEVVEAMCANTERPVIFPISNPTKKMETTAEQVIEWSDGKAFVATGVPSGTISYKGVDYQIGQANNSLIYPGLGLGMLASEAKLLTDEMIGAAAHSLSGLVDPGKPGAPVLPPFEFVADVSIKVAEAVAKKAQEQGLTESKETDMAKAVRDLKWYPEY

SEQ ID NO: 43406 - protein, 250 aa, Panax ginseng
MPIHEIAVGRYEEFRHPGALKAAAAEFFSTLIFVFAGQGSGLAFSKLTDGGATTPSGLVSAALAHAFGLFVAVSVGANISGGHVNPAVTFGAFIGGNLTLIRGILYIIAQLLGSTVACLLLSFATGGSPISAFALSGVSVWSAFVFEIVMTFGLVYTVYATAIDPKKGELGIIAPIAIGLIVGANILAGGAFTGASMNPAVSFGPALVSWDWTNHWVYWAGPIVGGGVAAVVYELIFISSSHEPLPVADY

SEQ ID NO: 43407 - protein, 363 aa, Arabidopsis thaliana
MKKGGFSNNLKLAIPVAGEQSITKFLTQSGTFKDGDLRVNKDGVRIISQLEPEVLSPIKPADDQLSLSDLDMVKVIGKGSSGVVQLVQHKWTGQFFALKVIQLNIDEAIRKAIAQELKINQSSQCPNLVTSYQSFYDNGAISLILEYMDGGSLADFLKSVKAIPDSYLSAIFRQVLQGLIYLHHDRHIIHRDLKPSNLLINHRGEVKITDFGVSTVMTNTAGLANTFVGTYNYMSPERIVGNKYGNKSDIWSLGLVVLECATGKFPYAPPNQEETWTSVFELMEAIVDQPPPALPSGNFSPELSSFISTCLQKEPNSRSSAKELMEHPFLNKYDYSGINLASYFTDAGSPLATLGNLSGTFSV

SEQ ID NO: 43408 - protein, 94 aa, Clostridium difficile
MNIKPFGDRVVIKKVEAEEKTASGIVLPGAAKEQPQIAEVVEVGPGGIVEGKEIKMELTVGDKVIFQKYSGTEVKIEGQEYTILRQSDVLAVIE

SEQ ID NO: 43409 - protein, 488 aa, Candidatus Blochmannia floridanus
MPQLLRRTKIIATLGPATDQKNTLEKIIISGVNIVRLNFSHGNSSEHFFRANKVRKLANQLHKYIAILGDLQGPKIRISTFQTNNIYLQSGDDFLIDSTLKNSHNNQKYVGVNYKELPQDVSPGDYLLLDDGKIQLKVIKIQNTQIFTKVVIGGLLSNNKGINKLGGGLSAKVLTNKDKLDIITAAKIGVDYLAISFPRNSMDLNFARKLITDAGSNAKIISKIERAEVVKSDDTIDDIIKASDAVMIARGDLGIEIGEPQLVGIQKKIIQRAHLLNRAVITATQMMESMIINSVPTRAEIMDVANAVLDGTDAVMLSAETATGQYPSETVSSMADVCLGAEKTLNNTNNQLIFINQLQKKINNTKEAIAASTMHIANCLSKIRAIISITDWEHIVLLLSRFNSQLPIFALSKHIHILNIVTLYKGVIPIYFNRTGNNIIDARQASNLLRDQGFLTPGELVIIIQDNIVNQSNINNVTHILTIEEQCK

SEQ ID NO: 43410 - protein, 592 aa, Arabidopsis thaliana
MNGTTSSINFLTSDDDASAAAMEAFIGTNHHSSLFPPPPQQPPQPQFNEDTLQQRLQALIESAGENWTYAIFWQISHDFDSSTGDNTVILGWGDGYYKGEEDKEKKKNNTNTAEQEHRKRVIRELNSLISGGIGVSDESNDEEVTDTEWFFLVSMTQSFVNGVGLPGESFLNSRVIWLSGSGALTGSGCERAGQGQIYGLKTMVCIATQNGVVELGSSEVISQSSDLMHKVNNLFNFNNGGGNNGVEASSWGFNLNPDQGENDPALWISEPTNTGIESPARVNNGNNSNSNSKSDSHQISKLEKNDISSVENQNRQSSCLVEKDLTFQGGLLKSNETLSFCGNESSKKRTSVSKGSNNDEGMLSFSTVVRSAANDSDHSDLEASVVKEAIVVEPPEKKPRKRGRKPANGREEPLNHVEAERQRREKLNQRFYSLRAVVPNVSKMDKASLLGDAISYINELKSKLQQAESDKEEIQKKLDGMSKEGNNGKGCGSRAKERKSSNQDSTASSIEMEIDVKIIGWDVMIRVQCGKKDHPGARFMEALKELDLEVNHASLSVVNDLMIQQATVKMGSQFFNHDQLKVALMTKVGENY

SEQ ID NO: 43411 - protein, 540 aa, Clostridium difficile
MAKEIKFSEETRRALEAGVNKLADTVKVTLGPKGRNVILDKKFGSPLITNDGVTIAKEIELEDRFENMGAQLVKEVATKTNDVAGDGTTTATVLAQAIIREGLKNVTAGANPILLRKGIQKAVTVAVEELKNQSRIVETQEAISQVASISAGDEEVGKLIAEAMEIVGKDGVITVEESQTMNTELDAVEGMQFDRGFVSAYMVTDVDKMEAVLNDPYILITDKKISNIQELLPVLEQIVQQGKKLLIIAEDVEGEALSTLVVNKLRGTFDVVAVKAPGFGDRRKEMLQDIAILTGAQVISEELGYDLKEADLSMLGRASSVKVTKESTTIVDGSGDKKAIEDRVTQIKHQVEQTTSDFDREKLMERLAKLAGGVAVVKVGAATEVELKERKLRIEDALNATRAAVEEGIVAGGGTAFVSVIPAIGTLIESLEGEVKLGAQIVKKALEEPLRQIAINAGLEGAVIVQNVVNSEAETGFDALNEKYVNMIEAGIVDPTKVSRSALQNAASIASTFLTTEAAVADLPEKEDAGMPGTGMDGMY

SEQ ID NO: 43412 - protein, 221 aa, Bacillus cereus E33L
MLKKAIAEFIGTFVLVLFGTGVAVIGGGIEGIGTLGIAMAFGLSIVAMAYSIGTISGCHINPAVSVAMFINKRMNAMELCYYVLAQILGGLLGTATLVTILQSAKTPLDNLGQNGFGTLGLSGAFLVEFILTFVFILVIVAVTGKKGSSSLAGLVIGFTLVLVHLLGIPLTGTSVNPARSIAPALFVGGEALSQLWVFIVAPILGGIVAAIVGKFILNTEK

SEQ ID NO: 43413 - protein, 528 aa, Nicotiana plumbaginifolia
MGNCCVKPGKSAEKKKNKKNKPNPFSIDYGASGGGVKLVVLKEPTGQNIHDKYDLGRELGRGEFGVTYLCTEVDTGDKYACKSISKKKLRTAVDIDDVRREVEIMKHLPKHPNIVTLKDTYEDDNAVHIVMELCEGGELFDRIVARGHYTERAAAGILRTVVEVVQMCHRHGVMHRDLKPENFLFGNKKETAPLKAIDFGLSVFFKPGERFNEIVGSPYYMAPEVLKRNYGPEVDVWSAGVILYILLCGVPPFWAETEQGVAQAIIRSVIDFKRDPWPKVSDNAKDLVKKMLDPDPSRRLTAERVLEHPWLQNIKKAPNVSLGETVKARLKQFSVMNKLKKKALTVIAEFLSAEEVAGMRDAFEMMDTGKKGQINLGELKDGLQKLGHQTSDVDLQILMEAADVDGDGSLNYAEFVAVSVHLRKMANDEHLHKAFSFFDKNQSGYIEIEELRCALSDEDDNTSEEVINAIMHDVDTDKDGRISYEEFAAMMKAGTDWRKASRQYSRERFNSLSLKLMRDGSLQLENKA

SEQ ID NO: 43414 - protein, 534 aa, Nicotiana plumbaginifolia
MGNCCSRGQPDDNEHTSNNDQKSNTKNDQSISNNSQQQQNNGSITPSKSPDPSSKPSKNSPIGPVLGRPMEDVRKTYSIGKELGRGQFGITHLCTHKQSGEQFACKTIAKRKLVNKEDIEDVKREVQIMHHLTGQQNIVELKGAYEDKHSVHLVMELCAGGELFDRIIAKGHYTERAAATLLRTIVQIVHTCHSMGVIHRDLKPENFLLLNKDEDSPLKATDFGLSVFYKQGDVFKDIVGSAYYIAPEVLKRRYGPEVDIWSVGVMLYILLSGVPPFWAETEHGIFNAILRGHVDFSSDPWPAISHGAKDIVKKMLTIDPKQRLTAIQVLNHPWIKEDGEAPDTPLDNAVLSRLKQFRAMNNFKKVALRVIAGCLSEEEIMGLKQMFKSMDTDNSGAITLEELKQGLAKQGTKLSDHEIEQLMEAADADGNGTIDYEEFITATMHMNRMDKEEHLYTAFQYFDKDNSGFITIEELEQALREFGMTDGKDIKEIVAEVDSNNDGRINYEEFVAMMRKGTPETAANLKKRRESFVA

SEQ ID NO: 43415 - protein, 413 aa, Zea mays
  misc_feature (357)..(357): Xaa can be any naturally occurring amino acid
  unsure (1)..(413): unsure at all Xaa locations
MAAMPGGAHGAGAADPMQVDQPLPPAAAGTAHAPADAKHAGSMIEGSDPVTGHIISTTIGGKNGEPKRTISYMAERVVGTGSFGIVFQAKCLETGETVAIKKVLQDKRYKNRELQIMRSMDHCNVVSLKHCFFSTTSRDELFLNLVMEFVPESLYRVLKHYSNMNQRMPLIYVKLYTYQIFRGLAYIHTVPGVCHRDVKPQNLLVDPLTHQVKICDFGSAKMLVKGEANISYICSRYYRAPELIFGATEYTTSIDIWSAGCVLAELLLGQPLFPAVSAVDQLVEIIKVLGTPTREEIRCMNPNYTEFRFPQIKAHPWHKIFHKRMPPEAIDLASRLLQYSPNLRCTALEACAHPFFXDDLREPHARLPNGRPFPPLFNFKQELANASPELINRLIPDHARRHLGLTLLPATGP

SEQ ID NO: 43416 - protein, 164 aa, Arabidopsis thaliana
LKDPSKPPAKAQVVGWPPVRNYRKNVMANQKSGEAEEAMSSGGGTVAFVKVSMDGAPYLRKVDLKMYTSYKDLSDALAKMFSSFTMGSYGAQGMIDFMNESKVMDLLNSSEYVPSYEDKDGDWMLVGDVPWPMFVESCKRLRIMKGSEAIGLAPRAMEKFKNRS

SEQ ID NO: 43417 - protein, 223 aa, Nocardia farcinica IFM 10152
MTGRLAAVLWDMDGTLLDSEKLWDIAVRELAVELGTEMTDEVRHALVGASGPNALRILFDGLGVDPTTEALREAADFLERRVGDLMTGPIPWRPGAADALALVRAAGLPSALVTNTIRSLTEFGLDTLGRHHFDVSVCGDEVAEGKPAPDPYLRAAELLGVDPRHCVAVEDSPTGARAATAAGCAVIVVPCEVPVPDGPGRVLRESLIGLTVDHLHQALRRVA

SEQ ID NO: 43418 - protein, 367 aa, Nostoc punctiforme PCC 73102
MTKTIVVKIGTSSLTQAETGQLALSTIATLAETLCHLRSQGHRVILVSSGAVGVGCARLGLTERPRAIALKQAVAAVGQGRLIRIYDDLFTTLQQAIAQVLLTRSDLVQRSRYLNAYNTFQELLGLGVIPIVNENDTVAIDELKFGDNDTLSALVASLIEADWLFLLTDVDRLYSADPRSVPDARPIALVSSIKELAELQIGSQGSQWGTGGMVTKISAARIAIAAGVRTVITQGRFPQNIEKIIQGELIGTHFEPQPEPTSARKRWIAYGLLPAGKLYLDEGAIAAISLAGKSLLAAGIKLVEGEFDTQDAVQLCDSNGNEIARGLVNYNSNDLQKIRGCHSREISTILGYAGAETVIHRDNLVLI

SEQ ID NO: 43419 - protein, 509 aa, Nepeta racemosa
MVSLSYFLIALLCTLPFLLFLNKWRRSYSGKTPPPSPPKLPVIGNLHQLGLYPHRYLQSLSRRYGPLMQLHFGSVPVLVASSPEAAREIMKNQDIVFSNRPKMSIANRLFFNNRDVAFTQYGEYWRQIRSICVLQLLSNKRVQSFRRVREEETSIMVEKIMQLGSSSSTPVNLSELLLSLTNDVVCRVTLGKKYGGGNGSEEVDKLKEMLTEIQNLMGISPVWEFIPWLNWTRRFDGVDQRVDRIVKAFDGFLESVIQEHKERDGDKDGDGDGALDFVDILLQFQRENKNRSPVEDDTVKALILDMFVAGTDTTATALEWAVAELIKNPRAMKRLQNEVREVAGSKAEIEEEDLEKMPYLKASIKESLRLHVPVVLLVPRESTRDTNVLGYDIASGTRVLINAWAIARDPSVWENPEEFLPERFLDSSIDYKGLHFELLPFGAGRRGCPGATFAVAIDELALAKLVHKFDFGLPNGARMEELDMSETSGMTVHKKSPLLLLPIPHHAAP

SEQ ID NO: 43420 - protein, 199 aa, Brassica napus
  misc_feature (191)..(191): Xaa can be any naturally occurring amino acid
  unsure (1)..(199): unsure at all Xaa locations
TTMISAFLLQSPPLSSISPKHHQYSLLPLTTQRFLTASHSFRLRTFSTRSIPNMQDSASVSYLSQREAAEIDETLMGPLGFSVDQLMELAGLSVATSVAEVYKPSEYSRVLAICGPGNNGGDGLVAARHLHHFGYKPSICYPKRTSKPLYTGLVTQLESLSVPFVSVEDLPEDLSKDFDVIIDAIFGFSFXGAPRPPFD

SEQ ID NO: 43421 - protein, 339 aa, Streptococcus pneumoniae TIGR4
MQEKILVTGGAGFIGTHTVIELIQAGHQVVVVDNLVNSNRKSLEVVEGITGVEIPFYEADIRDTDTLRDIFKQEEPTGVIHFAGLKAVGESTRIPLAYYDNNIAGTVSLLKAMEENNCKNIIFSSSATVYGDPHTVPILEDFPLSVTNPYGRTKLMLEEILTDIYKADSEWNVVLLRYFNPIGAHESGDLGENPNGIPNNLLPYVTQVAVGKLEQVQVFGDDYDTEDGTGVRDYIHVVDLAKGHVAALKKIQKGSGLNVYNLGTGKGYSVLEIIQNMEKAVGRPIPYRIVERRPGDIAACYSDPAKAKAELGWEAELDITQMCEDAWRWQSKHPNGFED

SEQ ID NO: 43422 - protein, 92 aa, Chlamydomonas reinhardtii
  misc_feature (42)..(45): Xaa can be any naturally occurring amino acid
  unsure (1)..(92): unsure at all Xaa locations
SAVETYKLYIYKVLKQVHPDTGISSKAMSIMNSFINDIFEKXXXXASKLSRYNKKPTVTSREIQTAVRLVLPGELAKHAVSEGTKAVTKFTS

SEQ ID NO: 43423 - protein, 431 aa, Yarrowia lipolytica CLIB122
MSYFASVPAAPADALFGLMAKYKADTFDKKVDLGVGAYRDNTGKPWVLPVVSKVDSLIVADPTANHEYLPITGLPDFTKSAAKLILGPDSPAIKENRVASCQTISGTGANHLGSLFLSRFPSSAAPPKSVFLSRSPPSPGATGDTPPRAAGGRIWISNPTWANHKQIFENVGLTVKQYPYWDPKTLGLDLKGMLNALENETRPGDIVLLHACAHNPTGVDPAREEWEKIAAVCKSKKLFPFFDSAYQGFASGDLERDAWAVQYFVSQGLELLICQSFAKNFGLYGQRAGCLHFITQTAKASENVKSQLAFLQRSEISNPPIYGARIVARVLNNPELFNEWKENLLEMANRIKSMRDALKSELIKLDTPGNWDHITNQIGMFSFTGLSPQQVDRLVNEFHVYLTKNGRISMAGLNTHNVAYVAKAFDAVVRG

SEQ ID NO: 43424 - protein, 463 aa, Yarrowia lipolytica CLIB122
MTIDTAQLRAQNTLLHDQYTFYPAHVTVKHWQLRDLIHATDMGRGMSHDSVIYPVHNTIRQLSFDGSDQPLFEFQFEPRCVRVQNGIVAAGGVYDQTCGPRRPSLGSSLSRLTRPPASSPGLFCVGNIATKETYSGEIFTGEAINNAVTLYDNATKALVCNNDHLLYFLSIGSASFAVEDQFRFTSALNHASISPDNSTVVACGDSNQVYVCNRGAYGWVKTHTIEIGSESGFSTAFHPNGVLFGVASQDGVARLYDVRKHSKPLVEVPSSRREENHGAFRCLKFSEGPEDIMFISEHSGRVHMVDLRDFSNHQVLHLPYYSRPPKSMHHYYPEEWSQRSIRSARSGRSDLSNSSSEYMAGSDISLDSEPQITPITDHATNYAPPVYSAFSAAPPSSSSSSRVSLPALNSGESRRLTYREHDISGMCWSPYDGGSLLVGTEMGITSWRVNVKSRRVFPSYDVC

SEQ ID NO: 43425 - protein, 182 aa, Brassica napus
MDKKKVAVPLVCHGHSRPVVDLFYSPITPDGFFLISASKDSHPMLRNGETGDWIGTFEGHKGAVWSSCLDNNALRAASASADNAAKLSYALTDLSASFFCALAYDASLSLHHKHIVADCAFSEDTKLLITGGFEKILRVFDLNRLDAAATEVDKSPGSIRTLTWLHSDQTILSSCTDIGGVR

SEQ ID NO: 43426 - protein, 333 aa, Ipomoea purpurea
MLELPKADTNLTVWKGVMEEEGSFDEAIAGCEGVFHVATPMDFDSKDPENEVIKPTINGVLNIINSCVKAKTVKRLVFTSSAGTLNVQPQQKPVYDETCWSDLDFIYAKKMTGWMYFASKILAEKEAWKATKEKKIDFISIIPPLVVGPFITPTFPPSLITALSLITGNEAHYSIIKQGQYVHLDDLCEAHIFLYEHPKAEGRFICSSHHTTIHGLADMITHNWPEYYIPSQFKGIEKELAVVYFSSKKLQDMGFQFKYSLEDMYRGAIETLRKKGLLPYSTKEAAAIEEEQETVPLKVEEPTAIEQKQETVPLKFEEPTAIEQKQEVVPLKA

SEQ ID NO: 43427 - protein, 312 aa, Scenedesmus vacuolatus
NGFGRIGSLVLRATLDRKDVKVVAINDPFIEGEYMAYMFKYDSVHGRYEGDVQGDKHGITINGEQIKTLAMMDPTQIPWGEVGADYVVESTGVFTTVDKCQAHLKGGAKKVVISAPSADAPMFVMGVNADKYDPKQHTVVSNASCTTNCLAPLAKVVNDTFGIKEALMTTVHATTATQKTVDGPSKKDWRGGRGASANIIPSSTGAAKAVGKVIPELNGKLTGMAFRVPTQDVSVVDLTCILEKPAKYEDIMAALKAASEGPMKGILGYTEDDVVSSDFVSDPASSTVDAKAGIMLSPTFVKLVSWYDNEWG

SEQ ID NO: 43428 - protein, 180 aa, Arabidopsis thaliana
MTTYGTNQKSSNDLAPKLEYITRGINQHKRSGLATRRPWKQMLDLGSFNFPRKLATVITRIRANTVYFQTNYTIVVLFSVFLSLIWNPFSLLVLLALLGAWLFLYFLRDEPLTVFDREIDHRIVLIIMSVITLSILFLTDAKLNIAVAIVAGALAVLSHAAVRKTEDLFQTDEETSLLNP

SEQ ID NO: 43429 - protein, 408 aa, Debaryomyces hansenii CBS767
VIGEVLLEQAYGGMRGIKGLVWEGSVLDPIEGIRFRGRTIPDIQEQLPKAPGGSEPLPEALFWLLLTGEVPSVAQTKAFSQELAARSALPKHVEELIDRSPSHLHPMAQFSIAVTALESESQFAKAYAKGVNKSEYWDYTYEDSIDLLAKLPNIAARIYRNVFHDGRLGAIDSSLDYSANLANLLGFGENKEFLELMRLYLTIHSDHEGGNVSAHTTHLVGSALSSPFLSLAAGLNGLAGPLHGRANQEVLEWLFKMRGELNGDYSKENIEKYLWETLNAGRVVPGYGHAVLRKTDPRYTAQREFALKHMPDYELFQLVSNVYEVAPGVLTKHGKTKNPWPNVDSHSGVLLQYYGLTEESFYTVLFGVSRAFGVLPQLILDRGLGLPIERPKSFSTEKYMELVKNIKA

SEQ ID NO: 43430 - protein, 580 aa, Schizosaccharomyces pombe
MNNYGVSSIGTSLTPSPTGSIDEYTSKEVKHPEDVKVDASYEKEEVGYGELEVVPERGNLFQRWYRSFLPPEDGKPQKLKRTLTARHIQMIGIGGAIGTGVWVGSKNTLREGGAASVLICYSLVGSMVLMTVYSLGELAVAFPINGSFHTYGTRFIHPSWGFTLGWNYLASFLATYPLELITASICLQFWININSGIWITVFIALLCFVNMFGVRGYGEVEFFVSSLKVMAMVGFIICGIVIDCGGVRTDHRGYIGATIFRKNAFIHGFHGFCSVFSTAAFSYAGTEYIGIAASETKNPAKAFPKAVKQVFIRVSLFYILALFVVSLLISGRDERLTTLSATAASPFILALMDAKIRGLPHVLNAVILISVLTAANGITYTGSRTLHSMAEQGHAPKWFKYVDREGRPLLAMAFVLCFGALGYICESAQSDTVFDWLLSISNLATLFVWLSINVSYIIYRLAFKKQGKSYDEVGYHSPFGIYGACYGAFIIILVFITEFYVSIFPIGASPDAGAFFQSYLCFPVVVIVFIAHALITRQKFRKLSEIDLDTGFSKYDRLEESDKGPMTAKSLAKSVLSFCV

SEQ ID NO: 43431 - protein, 338 aa, Pantoea agglomerans
QITAKRFLIATGASSTAPNIPGLDEVDYLTSTSLLELKKVPNRLTVIGSGYIGMELGQLFHNLGSEVTLIQRSERLLKEYDPEISEAITKALTEQGINLVTGATYERVEQDGDIKKVHVEINGKKRIIEAEQLLIATGRKPNTESLNLHAAGVEVGSRGEIVIDDYLKTTNSRIYSAGDVTLGPQFVYVAAYEGGLAARNAIGGLNQKVNLEVVPGVTFTSPSIATVGLTEQQAKEKGYEVKTSVLPLDAVPRALVNRETTGVFKLVADAKTLKVLGAHVVAENAGDVIYAATLAVKFGLTVGDLRETMAPYLTMAEGLKLAVLTFDKDVSKLSCCAG

SEQ ID NO: 43432 - protein, 374 aa, Magnaporthe grisea 70-15
MDSLDDELPPDLVDTSNSLTEDEKPIKVPITIVTGYLGAGKTTLLNYILTAEHGKKIAVIMNEFGDSLDIEKSLTINKDGESVEEWMEVGNGCICCSVKDTGVAAIESLMEKKGKFDYILLETTGLADPGNLAPLFWVDEGLSSTIYLDGIVTLVDAKNILRSLDDPSGKVEGHDESDAHGPVMTTAHVQISHADVIVINKSDLVSDEELETVKARIQSINGLAKLHITKQSIVPKLEGFLLDLHAYDSVEGLDSASAKGHSHLDPTISTLSIPITNLESSQVSKVDGWLRSVLWDNKLPGDEAQGKTPFEIHRVKGRLELSSGEIKLIQGVRELFEIFDGPREAAESHGGKVILIGRHLQQFDFAESLRASLS

SEQ ID NO: 43433 - protein, 322 aa, Debaryomyces hansenii CBS767
MIYRILGGIYLSSIEPLNNNVDFKHQYNVTHIISAIPGTIPNNYVHDYVHKQIDITDEETSNIIQHFPETNDFIDSCLFPPGTTTDKHHGAILIHCAQGVSRSVTLIVAYLMYRYKLTKDQALHAVKRKFAPACPNDGFQKQLQLYADLKFKVDTTSPLYRQLFIDLNIQADPSGRSLQELNMFSSTTASQSEIDKQAELRCKKCRQVLALESQIENHLSPDASSRQAQFIKRAPNSRRIISAQEASDSCSHYFVREPLIWMRSELEDKGEIEGKFNCPKCDSKVGGYSWKGSRCSCGKWMIPALHLQCAKIDNIKSIPTHR

SEQ ID NO: 43434 - protein, 787 aa, Neurospora crassa
MSSPNPRKRPAPGASPVVPLPLQQMPQQFTPGPADQVFRWNNPPDAAAAPLNSFGMISTQAPFPQPIPAPSTALARRPPSRALVTTNQFNGTTDTWASFSDDAAYPLGHNVPPMDEHDNIERLEEMAQRAKREAQAKRKQIPPFVQKLSSFLDESRNTDLIRWSDKGDSFIVLDEDEFAKTLIPELFKHNNYASFVRQLNMYGFHKRVGLSDNSMKASERKNKSPSEYYNPYFRRGHPNLLWLINKPKSGGKGNKPNKTTPKAEGEADSEEDAGGEDPYAGQNYSSAQVGRGSSGAGEVGPLHKKDLVAVKSQLDRLQQQQVAISSLLQKIRAEHTTLFQQALTFQNQHERHENSINAILNFLANVFRKSLEEQGGTQSVQDLLASIIPNAQVHNQNQMPQANVVDLGGFVNHQVHNNTSMGTPKRQQRLLPPIPQQGVAKVHSLASSASPAPVHPQYQAQQMGSVTELFDTTPGDSPSSTFMKNKLQNNPQEGMMKLIQDTNAVSASGGVDLPDMATKTHVNALSNDQRNKMLSIMAGNLPSTNGSSPAPSPTVPAVPTPTATMPPVSTIPTVPVTTAAAPPTPVVPNHAAPNALSPALGSMPPPPPFPSYSHEELDALQRLQEEQASQIDRLTSLLGPLSPSGRIPGIDEHGNPNSAAGYFDSTDIEQYLNDNAFSDPAYEFSGLPGANGTGDGASDFNFNLDDGFDLTNPTHTGATPTPNGGTATTAGTSNTGGLSVPGGGFDSGRIFEHNSPVNTPSPSAATEEISKNDLESPERDPKRRRKG

SEQ ID NO: 43435 - protein, 318 aa, Shewanella oneidensis MR-1
MLDTLLPFKRHFLSRNGNKLHYINEGQGEPVVMVHGNPSWSFYYRNLVSALKDTHQCIVPDHIGCGLSDKPDDSGYDYTLKNRIDDLEALLDSLNVKENITLVVHDWGGMIGMGYAARYPERIKRLVILNTGAFHLPDTKPLPLALWICRNTLLGTVLVRGFNAFSSIASYVGVKRQPMSKYIREAYVAPFNSWANRISTLRFVQDIPLKPGDRNYQLVSDIAASLPKFAKVPTLICWGLQDFVFDKHFLVKWREHMPHAQVHEFADCGHYILEDASDEVITHIKHFMTETETLATQVNPADSITEFESASQAPQAER

SEQ ID NO: 43436 - protein, 307 aa, Escherichia coli
MNAKVWVLGDAVVDLLPESEGRLLQCPGGAPANVAVGVARLGGNSGFIGRVGGDPFGRYMRHTLQQEQVDVSHMYLDDQHRTSTVVVDLDDQGERTFTFMVRPSADLFLVEEDLPQFAAGQWLHVCSIALSAEPSRSTTFAAMESIRSAGGRVSFDPNIRPDLWQDQALLLACLDRALHMANVVKLSEEELVFISSSNDLAYGIASVTERYQPELLLVTRGKAGVLAAFQQKFTHFNARPVASVDTTGAGDAFVAGLLASLAANGMPTDMTALEPTLTLAQTCGALATTAKGAMTALPYQRDLNRQF

SEQ ID NO: 43437 - protein, 494 aa, Magnaporthe grisea 70-15
MPPARTARGQLVSNENDENAGSTRMTRTKAKAAALNVDELALPTKQLQTKKGVAGKPAPTTRTTRNALGDVSNVTKVDAGRKAVGGKAGAVAKAAAPAGVQKSSARTAPTRSALSSKPANVTNGNAEKQSGRGTLSKRKAPAQAAANNIKEESTLEGEPARKQARVAATAAVDTKRAAPAKELKCVEPELKPTREFIRDPRLLAGEVPPGVIDLSMDDYDDPLMVAEYAEEIFSYMLNLELSSMPNPNYMDHQDDVEWKTRGILIDWLIEVHTRFHLVPETLFLAVNIVDRFLSEKVVQLDRLQLVGITAMFIASKYEEVMSPHVTNFRHVTDDGFSESEILSAERFILSTLNYDLSYPNPMNFLRRVSKADNYDTPCRTIGKYLMEISLLDHRFLQYRPSLVAASAMALSRIILDRGEWDKTISYYSGYNEDDVEPVVNLMVDYLSRPVIHEAFFKKYASKKFFKASILSRNWVEENGYLFGIDQTDVAIDQL

SEQ ID NO: 43438 - protein, 484 aa, Rhodopseudomonas palustris CGA009
MDAPRKFAGSRRSRRGVKLIPCRAFHPPAAQCMRSAMLDKIKPTSAVNAPNDLNAFWMPFTANRAFKRAPKMVVGAEGMHYITADGRKIIDAASGMWCTNAGHGRKEIAEAIKAQADELDFSPPFQFGQPKAFELASRIADLAPEGLDHVFFCNSGSEAGDTALKIAVAYQQIKGQGSRTRLIGRERGYHGVGFGGTAVGGIGNNRKMFGPLLNGVDHLPATYDRDKQAFTIGEPEYGAHFAEALEGLVNLHGANTIAAVIVEPMAGSTGVLPAPKGYLKKLREITKKHGILLIFDEVITGYGRLGYAFASERYGVTPDMITFAKGVTNGAVPMGGVITSAEIHDAFMTGPEHAVELAHGYTYSAHPLACAAGIATLDIYRDEKLFERAKALEPKFAEAVMSLKSAPNVVDIRTVGLTAGIDLASIADAVGKRGFEAMNAGFHDHELMLRIAGDTLALTPPLILSEDHIGEIVDKVGKVIRAVA

SEQ ID NO: 43439 - protein, 351 aa, Staphylococcus aureus subsp. aureus MRSA252
MKALVKTREGHGNLELLDKEVATPLDDKVKIKVHYAGICGTDIHTYEGHYKVNFPVTLGHEFSGEIVEVGADVKDFKVGDRVTSETTFYVCNECEYCESKDYNLCNHRKGIGTQVDGAFTNYVIAREESLHHIPDEVSYQSAAMTEPLACAHHGVSKIQVNSGDVAVVMGPGPIGLLVAQVLKSKGATVVVTGLDNDKVRLDKAEALHMDYVVNLQQTDLKTYINGITDGYGADVVVECSGAVPAARQGLDILRKKGFYSQIGIFKDAEITFDMEKVIQKEITVVGSRSQKPADWEPSLQLMADGLVNAEALVTKIYDISKWDEAYQHLKSGEGIKALLKPLDLDENEGEN

SEQ ID NO: 43440 - protein, 460 aa, Lactobacillus sakei subsp. sakei 23K
MTQAKKIPSSFIYFFGSFGGILFGYDIGVMTGALPFLQHDWHLENNAGVVGWITSAVMFGAIFGGALAGQLSDKWGRRKMILLSSLIFAIGSLLSAFSPNDGQVYLIAVRVFLGLAVGAASALVPAYMSEMAPARLRGRLTGINQTMIVSGMLLSYIVDYLLKGLPEQLAWRLMLGLAAVPAIILYFGVLRLPESPRFLVKHNRLDEARQVLGYIRSKDEVETELTNIQTTAGMESNVQQSTSMKTLLSGKYRYLVIAGIGVAGFQQFQGANAIFYYIPLIVEKATGKAASSALMWPIIQGVILVLGSLLFLVIADKFKRRTLLTLGGTVMGLSFILPAIMNALIPNFNPMMIVVFLCLYVAFYAFTWAPLTWVLVGEIFPLAIRGKASGLASSFNWIGSFLVGLLFPMMIASMPQEGVFAIFGVICLLGVLFIRTCVPETMGHTLEEIEAQGTNKAHKA

SEQ ID NO: 43441 - protein, 319 aa, Methanothermobacter thermautotrophicus
MKLQSTDGDRVITTVVGSYPATPREPETLRERISSFIGSYDACRPAIETAVRDQVRAGVDIISDGQVRGDMVGHFAEAMGGMMVKDGVSIIFSRITPPAGSIGSDDLIYRIKILRKLTDDESKGVKGIITGPSTMAHASKIEGFYSPQKRERAIMDMADALRVEAEHLQDAGALMIQIDEPFLSTGMVDMGTARRAVKRISGALDVDVSLHVCGDISGVIGELLTFPVDMLDLEFAGRPSNLEVLAEKWRGDKKLGFGCVDTSTEVVESTDTIKNLIERGADIAGEDNLYIDPDCGMRKLPREAAFSKLRNMVKAASEF

SEQ ID NO: 43442 - protein, 347 aa, Staphylococcus aureus subsp. aureus MRSA252
MKALKLYGVEDLRYEDNEKPVIESANDVIVKVRATGICGSDTSRYKKMGPYIQGMPFGHEFSGVVDAIGSDVTHVNVGDKVTGCPAIPCYQCEYCLKGEYARCEKLFVIGSYEPGSFAEYVKLPAQNVLKVPDNVDYIEAAMVEPSAVVAHGFYKSNIQPGMTVAVMGCGSIGLLAIQWARIFGAAHIIAIDIDAHKLDIATSLGAHQTINSKEENLEKFIENHYANQIDIAIESSGAKVTIGQILTLPKKGGEVVLLGIPYDDIEIDRVHFEKILRNELTVCGSWNCLSSNFPGKEWTATLHYMKTKDINVKPIISHFLPLEKGPETFDKLVNKKERFDKVMFTIY

SEQ ID NO: 43443 - protein, 1684 aa, Arabidopsis thaliana
SRSDTKKVFWVIYFLSNKFVAFWVFFWLSLAWQIQCLRTLRRIVNKITGSAKKKNLKESATKKPANVGDMSNKSPEVTLKSCRKALNFDLENPGDARQGDSESEIVQNSSGANSFSEIRDAIGGTNGSFLDSVSQIDKTNGLGAMNQPLEVSMGNQPDKLSTGAKLARDQQPDLLTRNQQCQFPVATQNTQFPMENQQAWLQMKNQLIGFPFGNQQPRMTIRNQQPCLAMGNQQPMYLIGTPRPALVSGNQQLGGPQGNKRPIFLNHQTCLPAGNQLYGSPTDMHQLVMSTGGQQHGLLIKNQQPGSLIRGQQPCVPLIDQQPATPKGFTHLNQMVATSMSSPGLRPHSQSQVPTTYLHVESVSRILNGTTGTCQRSRAPAYDSLQQDIHQGNKYILSHEISNGNGCKKALPQNSSLPTPIMAKLEEARGSKRQYHRAMGQTEKHDLNLAQQIAQSQDVERHNSSTCVEYLDAAKKTKIQKVVQENLHGMPPEVIEIEDDPTDGARKGKNTASISKGASKGNSSPVKKTAEKEKCIVPKTPAKKGRAGRKKSVPPPAHASEIQLWQPTPPKTPLSRSKPKGKGRKSIQDSGKARGPSGELLCQDSIAEIIYRMQNLYLGDKEREQEQNAMVLYKGDGALVPYESKKRKPRPKVDIDDETTRIWNLLMGKGDEKEGDEEKDKKKEKWWEEERRVFRGRADSFIARMHLVQGDRRFSPWKGSVVDSVIGVFLTQNVSDHLSSSAFMSLAARFPPKLSSSREDERNVRSVVVEDPEGCILNLNEIPSWQEKVQHPSDMEVSGVDSGSKEQLRDCSNSGIERFNFLEKSIQNLEEEVLSSQDSFDPAIFQSCGRVGSCSCSKSDAEFPTTRCETKTVSGTSQSVQTGSPNLSDEICLQGNERPHLYEGSGDVQKQETTNVAQKKPDLEKTMNWKDSVCFGQPRNDTNWQTTPSSSYEQCATRQPHVLDIEDFGMQGEGLGYSWMSISPRVDRVKNKNVPRRFFRQGGSVPREFTGQIIPSTPHELPGMGLSGSSSAVQEHQDDTQHNQQDEMNKASHLQKTFLDLLNSSEECLTRQSSTKQNITDGCLPRDRTAEDVVDPLSNNSSLQNILVESNSSNKEQTAVEYKETNATILREMKGTLADGKKPTSQWDSLRKDVEGNEGRQERNKNNMDSIDYEAIRRASISEISEAIKERGMNNMLAVRIKDFLERIVKDHGGIDLEWLRESPPDKAKDYLLSIRGLGLKSVECVRLLTLHNLAFPVDTNVGRIAVRMGWVPLQPLPESLQLHLLELYPVLESIQKFLWPRLCKLDQRTLYELHYQLITFGKVFCTKSRPNCNACPMRGECRHFASAYASARLALPAPEERSLTSATIPVPPESYPPVAIPMIELPLPLEKSLASGAPSNRENCEPIIEEPASPGQECTEITESDIEDAYYNEDPDEIPTIKLNIEQFGMTLREHMERNMELQEGDMSKALVALHPTTTSIPTPKLKNISRLRTEHQVYELPDSHRLLDGMDKREPDDPSPYLLAIWTPGETANSAQPPEQKCGGKASGKMCFDETCSECNSLREANSQTVRGTLLIPCRTAMRGSFPLNGTYFQVNELFADHESSLKPIDVPRDWIWDLPRRTVYFGTSVTSIFRGLSTEQIQFCFWKGFVCVRGFEQKTRAPRPLMARLHFPASKLKNNKT

SEQ ID NO: 43444 - protein, 409 aa, Ralstonia metallidurans CH34
MKRVVVTGAGAVSAIGNDWATVRERLAAGRNAIVVMPDWREIRGLNTHIAAPVPPFTLPPHYTRKLMRTMGRVSQMAVLATESALAGAGLAGHPLVTGGQMGIAYGSSTGTPSAAQDFARMMSDRTTEGVNATTYIRMMSHTAAVNIGVFFGIKGRILTTSSACTSGSHGIGYAYETIRMGRQVAMVAGGAEELDATEAAVFDTLFATSTRNDAPTATPRPFDAARDGLVLGEGACTLVLEELEHARQRGAPILAEIVGYGTNSDGVHVTQADAGTMALAMRMALDDAGVSPDRIGYVNAHGTATDQGDIAESQATHAVFGARMPISSLKSYVGHTLGACGALEAWMTIEMMRDGWFAPTINLENPDPRCAQLDYIVGEGRAIDTEYVMSNNFAFGGINTSLVLRRWSD

SEQ ID NO: 43445 - protein, 199 aa, Triticum aestivum
MEPKSTTPPPPGPVLGAPVGYPPAAVYPAAPPPGYPHAPALYAPQPPPAAVAAASQQTAAQQQQQLQVFWAEQYREIEATTDFKNHNLPLARIKKIMKADEDVRMIAAEAPVVFARACEMFILELTHRGWAHAEENKRRTLQKSDIAAAIARTEVFDFLVDIVPRDEAKDAEAAVAAGMPHPAAGMPAADMGYYYVPQQ

SEQ ID NO: 43446 - protein, 352 aa, Piromyces sp. E2
MVKVINFGGVDETVYERADFPQEKLNEIFKDDVFVVIGYGTQGRNQSRNLRDKGFKVIVGLRKGPSWDLAKEDGWVESESLFEITEACQKGTIIMYLLSDAGQKACWNTIKELVHGKTLYFSHGFSIVFKEKTGVVPPEDCDVIMVAPKGSGTTVRTLFLEGRGINSSVAVFQNWSGKAEERAYAAGIAIGSGYLYPTTFERETYSDLTGERGTLMGCIQGCFKAQFEVLIANGHTPSEAFSETVEEATQSLYPLIGKDGMDWMYDNCSTTARRGALDWMDKFYAATKPVFEELYESVRNGTEAENTLVANSKPDYRENLAKELKELRESQMWQTAVTVRSLRPENQKVEKN

SEQ ID NO: 43447 - protein, 311 aa, Bradyrhizobium japonicum USDA 110
MLIASGDALIDFVPTRNADGREAVMPAVGGSCLNVAIGMARLGAPTGFVGGISTDLFGQMIADHATASHVELGLATRSDHQTTLAFVRIVAGESHYAFYDAETATRNWTYRRGSVAFDTVEVLHVGSTTLVNDEGAAETKALIADARMSSTISFDPNCRPNLVRDKPAYLARMAEFAQSADLIKMSDVDFAYLFGDEPYQQRASTLLGQGTSLVVVTRGNNGAIAWHAGAGRIEVQAPRVEVADTIGAGDSFQAALLFALHKQGRLARQQLKVINADELRRALSFAANCAGLTCTRPGADPPWSHEITWSP

SEQ ID NO: 43448 - protein, 263 aa, Triticum aestivum
  misc_feature (94)..(94): Xaa can be any naturally occurring amino acid
  unsure (1)..(263): unsure at all Xaa locations
LCITSLYKKAGWYRSGIPGISSTHASAITLEVESSDTIDNVKAKIQDKEGIPPDQQRLIFAGKQLEDGRTLADYNIQKESTLHLVLRLRGGMQXFVKTLTGKTITLEVESSDTIDNVKAKIQDKEGIPPDQQRLIFAGKQLEDGRTLADYNIQKESTLHLVLRLRGGMQIFVKTLTGKTITLEVESSDTIDNVKAKIQDKEGIPPDQQRLIFAGKQLEDGRTLADYNIQKESTLHLVLRPRWWPVSSWQWCFCFWVCKPWCLC

SEQ ID NO: 43449 - protein, 415 aa, Picrophilus torridus DSM 9790
MEDLDPFTISRQQLQKAAKVMNLDKQALEILSYPREILQVSIPVKMDSGEVKVFTGFRVHYNNARGPTKGGIRYYEKENLSEVMALSAWMTWKTALLDLPLGGAKGGIICNPKELSQGELERLSRGYIDAIADFIGPDKDIPAPDVYTNPQIMAWMMDEYEKVMRRSSPGVITGKPLAVGGSEGRGDATAKGGMYVLREAARSIGLDLSKAKVAVQGFGNAGQYAVKFATEMFGAKVVAVSDSTGGIYAKDGVNYEKLLEHKRKDGTVMNYDGSENISEEEVLEQDVDVLIPAAIEDQIRGDNASKIKAKIILELANGPTTPEADEILYKNNVLVLPDFLSNAGGVTVSYFEWVQNVTGDYWDEETVYSKLDKKMTAATRSVLETSKRYEVDPRTAAYIIAVKKVADAMKARGWY

SEQ ID NO: 43450 - protein, 324 aa, Pseudomonas aeruginosa UCBPP-PA14
MPSRITLNANGGPEVLRLEQVQAQQPGPGEVWLEQAAIGVNPLDLGQRSGAVPIPLPSGLGLEGAGVVAALGPGVSGLAPGDRVAYATGPLGAYASARLYPAERLLKLPDTLAFEDAAALLFKGITAHYLLHATYPVGPGTRILLYGAAGAVGQLMAAWARHLGAWVIGVVSKAESVERARAAGCDEVLVFDAASLAAQVAELTAGRKVDVVYDPIGRATFEASLDSLRPRGLLVSFGATSGVPPAVEVATLNAKGSLFLTRPSLAAHTANPEEYRLRAQAVLRAHADGVIQPRVWRRYPLAEAAVAHTDLLEGRSQGALVLLP

SEQ ID NO: 43451 - protein, 545 aa, Bacteroides fragilis NCTC 9343
MAKEILFNIEARDQLKKGVDALANAVKVTLGPKGRNVIIEKKFGAPHITKDGVTVAKEIELTDAYQNTGAQLVKEVASKTGDDAGDGTTTATVLAQAIIAEGLKNVTAGASPMDIKRGIDKAVAKVVDSIKHQAEKVGDNYDKIEQVATVSANNDPVIGKLIADAMRKVSKDGVITIEEAKGTDTTIGVVEGMQFDRGYLSAYFVTNTEKMECEMEKPYILIYDKKISNLKDFLPILEPAVQSGRPLLVIAEDVDSEALTTLVVNRLRSQLKICAVKAPGFGDRRKEMLEDIAVLTGGVVISEEKGLKLEQATIEMLGTADKVTVSKDNTTIVNGAGAKENIKERCDQIKAQIAATKSDYDREKLQERLAKLSGGVAVLYVGAASEVEMKEKKDRVDDALRATRAAIEEGIVAGGGVAYIRAIESLDGLKGENDDETTGIAIIKRAIEEPLRQIVANAGKEGAVVVQKVSEGKGDFGYNARTDVYENMHAAGVVDPAKVTRVALENAASIAGMFLTTECVIVEKKEDKPEMPMGAPGMGGMGGMM

SEQ ID NO: 43452 - protein, 90 aa, Bacteroides fragilis NCTC 9343
MNIKPLADRVLILPAPAEEKTIGGIIIPDTAKEKPLKGEVVAVGHGTKDEEMVLKAGDTVLYGKYAGTELEVEGTKYLIMRQSDVLAVLG

SEQ ID NO: 43453 - protein, 280 aa, Zea mays
MEFEDRCHKVQEPKFDCLLFDLDDTLYPLSSGIADHVKKNIEDYMVEKLGIDESKIENLGNLLYKNYGTTMAGLRAIGYSFDYDEYHAFVHGRLPYDNIKPDPVLKHILKNLPIRKLIFTNGDKVHAVRALERLGLEDCFEGIICFETLNPPCPPQGDREAEIFDIAGHFARSGAAAELPKTPVLCKPNVDAMEEALRIANVNPHKAIFFDDSVRNIQAGKQIGLHTVLVGKSQRVKGADHALESIHNVREALPGLWEEAEKAEDVLYAERVAMETSVTA

SEQ ID NO: 43454 - protein, 468 aa, Medicago sativa subsp. X varia
MNMMRRLKSIASGRTSISSDPGGDSNSKRVKLDQETEKVYEGINSLGRNDREQCVDASKEASVGTSNEVSTETKTEKKSGFDELPKELHEMKIRDEKSKNNNEKDIEATTVSGNGTETGQIITTTIAGRDGQPKQTISYMAERVVGTGSFGVVFQAKCLETNEAVAIKKVLQDKRYKNRELQVMRMVDHPNIVKLKHCFYSTTEKDELYLNLVLEFVPETVYKVSKNYIRIHQHMPIIHVQLYTYQILRGLNYLHEVIGVCHRDIKPQNLLVNPQTRQLKICDFGSAKMLVPGEPNISYICSRYYRAPELIFGATEYTTAIDMWSVGCVLAELLLGQAMFLGESGVDQLVEIIKVLGTPTREEIRCMNPNYNEFKFPQIKAHPWHKLFHKRMPSEAVDLVSRLLQYSPHLRCTALAACAHPFFNDLRDPNASLPNGQPLPPLFNFTPQELVNAPEDLRQRLIPEHARS

SEQ ID NO: 43455 - protein, 98 aa, Pringlea antiscorbutica
VYTVFSATDAKRSARDSHVPILAPLPIGFAVFLVHLATIPITGTGINPARSLGAAIIYNKDHSWDDHWIFWVGPFIGAALAALYHQIVIRAIPFKSKS

SEQ ID NO: 43456 - protein, 532 aa, Mycoplasma mycoides subsp. mycoides SC str. PG1
MAKFIFVTGGVVSGLGKGITASSIGALLKASGLKVFMQKFDPYLNVDPGTMSPYQHGEVFVTKDGGETDLDLGHYERFIDEELTKLSSTTSGKIYLSVIQGERKGVNSGKTIQVVPHITDAIKQKVYQAAKQSQADVIISEIGGTVGDIESQPFIEAIRQIRLEQGKENVMFVHVVLLLWLAASKEYKTKPIQNSVKAMASLGIQPDVIVCRSDSSSPKDIKEKISLFCNVPITNIIDAIDQDSIYRVPLALAKQNLQDIIIEQLQLKAKNIDLSLWKQFNKKIDSSTEEIEISFVGKYIELQDAYLSVLESLKIAGWEFNKKIKIRWVQADKLDESNYKEVLKNSQGILVPGGFGKRGIEGMMLASRYARENDIPYLGICLGMQIATISIARDLLNWSDADSTEFNKNTTHPIFDYIKGIDRDNIGGTLRLGTMVTKLEKNSLVSKLYNSDIALERHRHRYEFNNEYKKDLESVGLRFSGIYEEKNIVEVVEMPSLKFFVASQFHPEFTSRPNKPTPLFKGFIKAIVENNK

SEQ ID NO: 43457 - protein, 444 aa, Oryza sativa (japonica cultivar-group)
MREILHIQGGQCGNQIGAKFWEVICDEHGVDATGRYAGDSDLQLERINVYYNEASGGRYVPRTVLMDLEPGTMDSVRSGPFGQIFRPDNFVFGQSGAGNNWAKGHYTEGAELIDSVLDVVRKEAENCDCLQGFQVCHSLGGGTGSGMGTLLISKIREEYPDRMMLTFSVFPSPKVSDTVVEPYNATLSVHQLVENADECMVLDNEALYDICFRTLKLATPTFGDLNHLISATMSGVTCCLRFPGQLNSDLRKLAVNLIPFPRLHFFMVGFAPLTSRGSQQYRALTVPELTQQMWDAKNMMCAADPRHGRYLTASAMFRGKMSTKEVDEQMLNVQNKNSSYFVEWIPNNVKSSVCDIPPRGLKMAATFVGNSTSIQEMFRRVSEQFTAMFRRKAFLHWYTGEGMDEMEFTEAESNMNDLVAEYQQYQDATADEEYEDEEEEAEAE

SEQ ID NO: 43458 - protein, 431 aa, Bacillus cereus E33L
MKNLDNQHNQNHIMGTLQWFIFLLANSIALPIVVGGLFHLTTEEIFYLMQRTFFVVGISSFLQGWLGHRLPIADGPAGSWVGVFTVLAYATAGQDQLHSTLQILELGMIISGVILIGLGVTGFIGRILFLFTPIVTGTFLLLLCLQLSGVFLKGMLGITATASQIDGFTAIIAFSIFLFVIILSNFGKGFVKSYAVLIGLISGWILFLIAGKVTIPSQVTHFVQLPQIFAWGLPKWNTGMAVSSFVMVCILVSNTVAAIIAINQATIQKATIEQKQLKDGTWVGGISHIISSVFSTVGVVPLPATAGFIRLTKQKYIRSFLLACMLLVVMSLFPSIIRYLASLPSAVASAVLMASFVQLIGIGLNNIKQVELNERNVTILGVAVLFGSGVMFLPSGALQSLPSVMQYIFGNGLFVGTVVSILLEQIWRIGK

SEQ ID NO: 43459 - protein, 394 aa, Arabidopsis thaliana
MAIMSDLPRDLLAEILSRVPLASLRSVRFTCKKWNDLSKDRSFLKKQIVEAKKKQLKSKEFEVIMMRNFRVYLTSVDLHNDVNPSFTPKGTLTSFSDDANQHQVDNVSSVFHCDGLLLCITKDLNFRLVVWNPYFGQTRWIQPRNSYHIKDIYAIGYDENKNHKILRLKDQYYDYDSHPRARICEFELYSFESNSWKVVLDVSPDWYIHSYHRGLSVKGNTYWYATEKHGYVNFLICFDFTTEKFGPRLPLPFNATESFTYDDVVTLSSVGEEQLALLFQSDATLMMEIWVTSKVDPTEVLWNKLFLAVDHDMIEFDYELKFVADAGSFFIDQKKNVVVVFDKDMNEHTHRGMAYIVGKNGYFKRVDIGEEAYTSCFPLVCSYVPSSVQIRQLT

SEQ ID NO: 43460 - protein, 616 aa, Pseudomonas syringae pv. tomato str. DC3000
MSGKAQQQSRIKELITLGREQKYLTYAEVNDHLPEDISDPEQVEDIIRMINDMGIPVHESAPDADALMLADADTDEAAAEEAAAALAAVETDIGRTTDPVRMYMREMGTVELLTREGEIEIAKRIEEGIREVMGAIAHFPGTVDHILSEYTRVTSEGGRLSDVLSGYIDPDDGIAPPAEVPPPVDPKAVKAEGADDDEEESADSSDEEDEVESGPDPVIAQQRFGAVSDQMEITRKALKKFGRDDKHAIAELVALAELFMPIKLVPKQFEGLVERVRGALERLRAQERAIMQLCVRDARMPRADFLRQFPGHEVDESWTDGLAKGKGKYAEAIGRLQPDIQRCQQKLSALEEETGLKIAEIKDINRRMSIGEAKARRAKKEMVEANLRLVISIAKKYTNRGLQFLDLIQEGNIGLMKAVDKFEYRRGYKFSTYATWWIRQAITRSIADQARTIRIPVHMIETINKLNRISRQMLQEMGREPTPEELGERMEMPEDKIRKVLKIAKEPISMETPIGDDEDSHLGDFIEDSTMQSPIDVATVESLKEATREVLSGLTAREAKVLRMRFGIDMNTDHTLEEVGKQFDVTRERIRQIEAKALRKLRHPTRSEHLRSFLDE

SEQ ID NO: 43461 - protein, 240 aa, Burkholderia fungorum LB400
MTLQTGTLVVLRHGQSIWNRANRFTGWSDVGLSVQGVADAQRVGERLREAGFRFDLAVTSALLRATDTLAHVLRTLEQPPPRTVRSWRLNDRHYGMLTGMEKDEAALAYGAERVRQWRRGFDLAPPALDADLHAALVRALHDDAMPHADALPRTESLRDTLRRVLPLWDECVAPALTRGQSVLMVGHGNSLRALFKQLDNIGDDAIASVEVAHAEPLVMKFDATLSVISRTPLAALAASR

SEQ ID NO: 43462 - protein, 608 aa, Glycine max
MDTKIGSLDAPKPNSNDVVSCNLTSSAAIQPCLPATVINGAGCSDSTLGGHLARRLVEIGVTDVFSVPGDFNLTLLDHLIAEPALHLVGCCNELNAGYAADGYARARGVGACVVTFTVGGLSVLNAIAGAYSENLPLICIVGGPNSNDYGTSRILHHTIGLPDFSQELRCFQTITCFQAVVNNLEDAHELIDTAISTALKESKPVYISISCNLPGIPHPTFSRDPVRFSLSPRLSNKMGLEAAVEAAAEFLNKAVKPVLVGGPKLRVATASDAFVELADACGYALAVMPSAKGQVPEHHPHFIGTYWGAVSTAFCAEIVESADAYLFAGPIFNDYSSVGYSLLLKKEKAIIVQPDRVVIANGPAFGCVLMKDFLKALAKRLKHNNTAYENYHRIFVPDGHPLKAAPREPLRVNVLFQHIQNMLSGETAVIAETGDSWFNCQKLKLPKACGYEFQMQYGSIGWSVGATLGYAQAVPEKRVIACIGDGSFQVTAQDVSTMLRCGQKTIIFLINNGGYTIEVEIHDGPYNVIKNWNYTGLIDAIHNGEGKCWTAKVFCEEELVEAIATATGPKKDSLCFIEVIVHKDDTSKELLEWGSRVSAANSRPPNPQ

SEQ ID NO: 43463 - protein, 104 aa, Sinorhizobium meliloti
MAFRPLHDRILVRRVESEEKTKGGIIIPDTAKEKPQEGEVLAVGPGARGEQGQIQPLDVKVGDRILFGKWSGTEIKIDGEDLLIMKESDVMGIIEARAAEKIAA

SEQ ID NO: 43464 - protein, 213 aa, Arabidopsis thaliana
  misc_feature (20)..(20): Xaa can be any naturally occurring amino acid
  misc_feature (31)..(31): Xaa can be any naturally occurring amino acid
  misc_feature (53)..(53): Xaa can be any naturally occurring amino acid
  misc_feature (61)..(61): Xaa can be any naturally occurring amino acid
  misc_feature (102)..(102): Xaa can be any naturally occurring amino acid
  misc_feature (128)..(128): Xaa can be any naturally occurring amino acid
  misc_feature (140)..(140): Xaa can be any naturally occurring amino acid
  misc_feature (148)..(148): Xaa can be any naturally occurring amino acid
  unsure (1)..(213): unsure at all Xaa locations
SYLLKCTSKFIVESCSVDSXEGVKLHTRIYXNPENEGEEVSDEENLVIELVHXCALLGGCXALLKGIASELASKGFKSVTFDTRGAGKSTGRATLTGFSYFXFFVSFCRWLWQNFDVLMILLFCSSAXAPIAGSAGIKYXQVLGYVSXGYPFAYFLDSLWLHKKAILSSPKPKFFLMLTQDVFTSVSQLKKKLKSAVGRTKTHLIFFFRHYQI

SEQ ID NO: 43465 - protein, 223 aa, Brassica napus
NSLSEEGKKDFEIAYSASFYPCMEILYECYEDVAAGSEIRSVVLAGRRFYDKEGLPAFPMGKIDQTRMWKVGERVRKSRPAGDLGPLYPFTAGVYVALMMAQIEILRKKGHSYSEINNDVRIESVDSLNPFMHARGVSFMVDNCSTTARLGSRKWAPRFDYNLTQQALVAVDNGAPINKDLISNFFADPVHGAIQVCAELRPTVDISVPQDADFVRPELRQSN

SEQ ID NO: 43466 - protein, 402 aa, Oryza sativa
MSHPHPLKTSTSSSVNPSWGNAKSIKEESGSPLFVESTPIPISLSPYKPNSLDLNDDHDNSVHDDGGGEKTCRRKRKKTSRLSSPPPPRRVAAEQGRGAAISIWRAEQGRGGEGILKLVIGFDCEGVDLCRHGALCIMQIAFPDAVYLVDAIEGGKELIEACKPALESEYVTKVIHDCKRDSEALYFQFGIKLHNVMDTQIAYSLLEEQEGKKRGYDEYISFVSLLADPRYCGMAYPEKEEVRTLLRQDPNFWTHRPLSEMMIRAATDDVRFLLSIHEKMMEKLSKVSLWRLSVRSELYCRCFCINDNKYADWPPLPTVPDEIEPDVYVPEVDILSVLDVPPGKMGRVIGRKGSSIMEVKASCNVEIHIGGAKGPPDRVFIIGPVQEVRKAEAILRGRMLEF

SEQ ID NO: 43467 - protein, 503 aa, Bartonella henselae str. Houston-1
MVKKTFFTTLAAVSFSAALETALFFSGCGSSLWTTKAHANSVFSSLMQQQGFADIVSQVKPAVVSVQVKSNKKKKEWFFSDFFSTPGFDQLPDQHPLKKFFQDFYNRDKPSNKSLQRSHRLRPIAFGSGFFISSDGYIVTNNHVISDGTSYAVVLDDGTELNAKLIGTDPRTDLAVLKVNEKRKFSYVDFGDDSKLRVGDWVVAIGNPFGLGGTVTAGIVSARGRDIGTGVYDDFIQIDAAVNRGNSGGPTFDLNGKVVGVNTAIFSPSGGNVGIAFAIPAATAKQVVQQLIEKGLVQRGWLGVQIQPVTKEISDSIGLKEAKGALITDPLKGPAAKAGIKAGDVIISVNGEKINDVRDLAKRIANMSPGETVTLGVWKSGKEENIKVKLDSMPEDENMKDGSKYSNEHGNSDETLEDYGLIVAPSDDGVGLVVTDVDPDSDAADKGIRPGDVIVTVNNKSVKKVSDITDTIKNAQKLGRKAILLQVRTNDQNRFVALPIFKK

SEQ ID NO: 43468 - protein, 766 aa, Nicotiana tabacum
MGAPILSDLGTEILIPVCAVVGIAFSLFQWFLVSKVTLSADKSSGAADDKNGYAAESLIEEEEGINDHNVVQKCAEIQNAISEGATSFLFTEYQYVGVFMVAFAILIFLFLGSVEGFSTKNQPCTYDSTKTCKPALATAVFSTVSFLLGAVTSVVSGFLGMKIATYANARTTLEARKGVGKAFIVAFRSGAVMGFLLAANGLLVLYITILLFKLYYGDDWEGLFEAITGYGLGGSSMALFGRVAGGIYTKAADVGADLVGKVERNIPEDDPRNPAVIADNVGDNVGDIAGMGSDLFGSYAESSCAALVVASISSFGVNHEFTAMLYPLLVSSVGILVCLLTTLFATDFFEVKAVKEIEPALKQQLVISTALMTVGIAVVTWIALPSIFTIFNFGAQKEVKSWQLFLCVGVGLWAGLIIGFVTEYYTSNAYSPVQDVADSCRTGAATNVIFGLALGYKSVIIPIFAIAVSIFVSFSFAAMYGIAVAALGMLSTIATGLAIDAYGPISDNAGGIAEMAGMSHRIRERTDALDAAGNTTAAIGKGFAIGSAALVSLALFGAFVSRAAISTVDVLTPKVFIGLLVGAMLPYWFSAMTMKSVGSAALKMVEEVRRQFNTIPGLMEGTAKPDYATCVKISTDASIKEMIAPGALVMLTPLIVGILFGVETLSGVLAGSLVSGVQIAISASNTGGAWDNAKKYIEAGVSEHARTLGPKGSDAHKAAVIGDTVGDPLKDTSGPSLNILIKLMAVESLVFAPFFATHGGLLFKLF

SEQ ID NO: 43469 - protein, 3154 aa, Burkholderia pseudomallei K96243
MPRPPMNTDNPRRAEPIAIVGMGCVFPGAAGPAAFLELLRAGRVAVRDVPPERWDAAALHDPDPDAPGRILTRRAATIDGAHGFDPEFFGLSRRDAREMDPRQRLMLKTAWWALEDAGMPGWGLAGRSVGVFLGASNGEFGGAHARLSAIGASTAAGHATSVLANRVSYLLGLTGPSLVVDTACSSSLVAVHLACAALRARECELAIAGGVSLMLRPDASVAFSRARMLAADGRSKPFSASADGYGRGEGAGAVVLKRLSDARRDGDRIVAIVLGSAVNHNGQSNGITAPSAPAQEALIRQAIEAAGVAPEQIDLVEAHGTGTLLGDPLEAKALGRVLGAIDGRAGALPIGSVKGNIGHLEAAAGIAGLIKLALALRHREILASAGFDAPNPHIDFRALNLTVPTARTPLPERARPAIGALSSFGFGGANAHLIAAAPPADQPDRHDRHDQHDSPVRHAGAQTGAPWPALLVLSAASDSALNRLAAATAACARGDRPGAWRLARASHVARSPLRRRLAVVAPDADTLAAALDRAASGGRDGVVARGAAPRRRPALAFLYAGQGAQFPGMAAGLLDGDTELRRTLEHASAITGLPIVDWLAAGGAALDRTDVTQPLMVALQVGLTRQWAAWGVAPDIVIGHSLGDYAAAVAAGALSFDAAMRVAALRGRLAATSARPGGMVAVAAGRDAVAPHLARGAAIAVDNGPAQLSVAGDAAALAETVRRLEAAGIAARPLPVSAAFHSPAMEPMLDAFRAALADVAMQPLRVPMVCNRTGAVLPAGTMLDAEFWVRHLREPVRFADGVRALAREGVALGLEIGPSAMLSRLAPLSAPTLSVVPSLARGTRDRDALLAAVGALWVAGVTPDWRAIDGPDRVHAELPLYPFDDAPFPLLADGTVAAGAIASSGAFGAREAGPAPSPPQASPSLPATPAVAAASASNAAARERALDIGAKLRDAIAEALETSPDRVDPTVPFIEMGADSLVLMAAARKIEAAFGVRIPMRAFFDELSTMEALATYLAAESPRPAAASDRAPAAPSSPGFVAQVVREQLALMRRQLDLLEGRRAAGEPEMPDDAARALRAEIARAERMGDRGEDGRREEGGSEEGRGEWHGGGKDGHGGGDGSGKGGDGSDTGRAVPAVRATRRANTVRDALSPRRQAHLDKLIGDYTRRTAGSRALAARYRDVMADSRASAGFRPSIKEMLYPIVCRSAAGATFEDVDGNRYLDLSMGFGVHLFGHAPDFVTAALRESLSRGLRLGPQADRAGEAAAVIARLSGQDRVAFVNSGSEAVMVALRLARTVTGRERVVIFRGAYHGHFDGVLADAADPADPAAGGAPLVPGVARGAVADTLVFDYGDPASVDTLAAQLGHVAAVLVEPVQSRRPDLQPAAFLRRLRALAEQAGALLIFDELITGFRIAAGGAQAHFGVKADLVAYGKILGGGLPIGALAGRADVMAAVDGGAWRYGDDSAPTAETTLFAGTFNKNPLSIDACVAVLTEIERRGDALYAQLNERSARLHARLEQALAGTPIGIARFGSVFRFVFGRNLDLFFYHLLLRGIYVWEGRTCFLSAAHTDADCDRLVVAVADAVAALRDGGMLDEGEGDHEGEVEGEGEGGPTADPAARDYAAPHADTDTHTDTLPMIRAQRQLAALAEMDPAGAVAYALPLLLALDGPLDAARLRDAVERAAARHDGLWVAMDPLSGTLRMMPPGRLTLGVQALDAAALDAQVRRQMAAPFDLKAPPLLRATLFAFADGTHALLLVGHHAALDGFSLQVLAADIAACYRGAPLPRAASLRRVLAAHRDAERDGRWAAARDGWRARLRDAPAGFDLDVAAPRPPMRALRGAREVRRIEAASARALRARAAAERTSLLAVMLAGFAWLLARHGAADVVIGVPYAGRALAGDGAQRVVGYCAHLLPIRLRAGAVDSVAALLAHTRAALIEALDHADYPFAHIVDDLALKRDPARPLLVPATFNVDRVPPALDFGEGVAARLRSPAVGAGRFDLACNVIDDGDALTVEFDHDEALYGGGRAQRLADEYLQLLEALAQGGERPLHDGAGHVARWATVVAAGRAEPLAVRWRRHLERAPQQVAVAVDGDARLSRAALDRWSDAVADAIEGAISGVRAGVIEGVIDGAVEDKIEGAAEAARASATAGPVALLLPRTEALPVAMLACWKAARAWLPIDPATPAERIAEMIRRAGCALVVRDAATAAAADGAIAPRCATLDLPPRAAAGRRAARRPWPAPNPEDVAYVLFTSGSTGRPKPVAVPHRALEWYVQGLLARLGLPSGLSCGLVSTFAADLGLTATLPALFDGGCLCIQSDAAARDPLLLAAVHRKRPVDLLKIVPSHLEALLAGAPDPLLLPRRVLVLGGERAGPGLLRRLAECAPPALRVMNHYGPTETTVGVAMGEWTRGADALRLDAPLAGAALVLLDDAGRRAPAGVRAQLYVGGPQVALGYPGCPDETAARFGARPASGVAGPLYATGDLGRLDADGTLTIVGRTDDQAKIRGYRVEPGEVAAALEGLPGVASAAVVAAEHPARGTVLVAYVAGDGAQADPASLALALHARLPDYMMPARIIPCRSLPLTANGKLDRGALPAPDWATHAPGEPASATVSSEAERVQATLVAVWRELFGRPDIGVHDEFFALGGDSILGIRMVARLHRDGLRLLASDLYRHPTIAALAPLIRPVDAQAEQGVLSGPVPLLPAQRRWLEIGAGLRPHANLSLLLELDAEVTPARVADAFARLLHQHDGLRMRARTDGGELVQTYGPPAPVPLHRVAAGHATPAALTRLQALADPAASPLVLGWLDGAPSRLLIVMHHWITDAVSCAILLDDLARLLRDPDAPLGPKTPSLRQWAQTLTERAASPDALAQLEYWTLSTSLPPPALPARSGGARGDAADGEWPGAPGAVGLTLSADETRDVTAGPAAQAGAETEDLLLAALALALGGRTGEPLLYVELEGHGRTPPDGLPEPARTIGWFTARHPAWFDLTGVPEAAAVAAVRAQRLSIPNRGADYGALRHLGPDHARDALAAGRRPAVSLNWLGQLAGIEHAPFRLVSWRPGCPLRGAERAADLPQPHALAVETMLIDGCLRIEFIYDAARFDAATIDTLAADYAAALLRLARERAAPPAPPPDSPGELDADDLAALAASR

SEQ ID NO: 43470 - protein, 540 aa, Streptococcus pneumoniae TIGR4
MSKEIKFSSDARSAMVRGVDILADTVKVTLGPKGRNVVLEKSFGSPLITNDGVTIAKEIELEDHFENMGAKLVSEVASKTNDIAGDGTTTATVLTQAIVREGIKNVTAGANPIGIRRGIETAVAAAVEALKNNAIPVANKEAIAQVAAVSSRSEKVGEYISEAMEKVGKDGVITIEESRGMETELEVVEGMQFDRGYLSQYMVTDSEKMVADLENPYILITDKKISNIQEILPLLESILQSNRPLLIIADDVDGEALPTLVLNKIRGTFNVVAVKAPGFGDRRKAMLEDIAILTGGTVITEDLGLELKDATIEALGQAARVTVDKDSTVIVEGAGNPEAISHRVAVIKSQIETTTSEFDREKLQERLAKLSGGVAVIKVGAATETELKEMKLRIEDALNATRAAVEEGIVAGGGTALANVIPAVATLELTGDEATGRNIVLRALEEPVRQIAHNAGFEGSIVIDRLKNAELGIGFNAATGEWVNMIDQGIIDPVKVSRSALQNAASVASLILTTEAVVANKPEPVAPAPAMDPSMMGGMM

SEQ ID NO: 43471 - protein, 149 aa, Glycine max
MASIQRPASSGSSEGGDPVMYERKRKRMESNRESARRSRMKKQKQLEDLTDEVSRLEGENARLAPSIKVKEEAYVEMEAANDILRAQTMELADRLRFLNSIIEIADEVGGESFEIPQIPDPLFMPWQIPHPMMATPPDMFFHGNEGLFA

SEQ ID NO: 43472 - protein, 676 aa, Vibrio vulnificus YJ016
MLSIRLMHSGADMPSRKHLANAIRALSMDGVQKANSGHPGAPMGMADIAEVLWRGHLNHNPSNPEWADRDRFVLSNGHGSMLIYSLLHLSGYELSIDDLKNFRQLHSKTPGHPEYGYAPGIETTTGPLGQGITNAVGMAMAEKALAAQFNKEGHDIVDHFTYVFMGDGCLMEGISHEACSLAGTLGLGKLIAFWDDNGISIDGHVEGWFSDDTPKRFEAYGWHVIPAVDGHNAEAINAAIEAAKADPRPTLICTKTIIGFGSPNKSGSHDCHGAPLGAEEIAAAREFLGWEHPAFEIPADVYAEWDAKAAGAAKEAAWNAKFDAYAAAYPAEAAEFKRRVNGELPAQWEEKANQIIADLQANPANIASRKASQNALEAFGKMLPEFMGGSADLAPSNLTMWSGSKSLEASDFSGNYIHYGVREFGMTAIMNGIALHGGFVPYGATFLMFMEYARNAMRMAALMKVQNIQVYTHDSIGLGEDGPTHQPVEQIASLRLTPNMSTWRPCDQVESAVAWKLAIERKDGPSALIFSRQNLAQQPRSAEQVADIAKGGYILKDSDGKPELILIATGSEVELAVKAAEQLTAEGKKVRVVSMPATDAFDKQDAAYRESVLPSDVTARIAIEAGIADFWYKYVGFDGRIIGMTTFGESAPADQLFEMFGFTVENVVNTAKELLA

SEQ ID NO: 43473 - protein, 174 aa, Campylobacter upsaliensis RM3195
MEKLEKGGVIWFSGLAGSGKSFLAEALCEKLRTKLRNVIYLDGDELRELLGHFGYDKASRLEVSFKRSRFAHFLSEQNMLVIVSAISMWDEIYEFNRKHLKNYFEIYIKCDFEELKRRDKKGLYSGALSGEIQNVVGVDIAFDAPKAHLVIDNSELNGADEKIKLILNALGFKD

SEQ ID NO: 43474 - protein, 773 aa, Bartonella henselae str. Houston-1
MAKLDACNAPTEIYADSKSSAQNHKARTKHINPLFDSSYQKLLFIEPWLRRSLPFVIVVFLVVLAAIRFVSIYDLRHTIDKNTRSTITLLAAHIANTIDRDLLAATQKGKAIALSHTYLQNILSNFQNQGLIKTGTVIAIVDQKGNILASSSPEIILGKPLQDFISESIALRSLRKHAGIMKVTIGKDAPALASFHQTENGKYGVFISEKTQEIYREWRKIFSLNITLLIGTGGVILALLYAYYNQIVRARKTDSISEKIQNRIDMAMMRGRCGLWDWNMASGRVYWSRAMYEMLGYIPQDALLSISQITAIINPNDANFFDLAQELMSGKKKHIDINVPMRHADGHYVWMRIRAEVTDEEELHLVGIAFDISEQRQLAEETAQADLRIRDAIENISESFVLWDSEGRLVMSNSKFCEYAAIPKQVLQPGIQRATVEAMARPAINEYPLKDDGTGNLTSIRQTADGCWLKINERRTQDGGLVCIGTDISELKQQQEKFEDSERRLFSFIQELKRARGNAQQRATEVEKLNKSLKAEKERAESANKAKSEFLANMSHELRTPLNAILGFSDIMLQSTFGPLGSQRYQEYMHDIYNSGNHLLTLINDILDMSKIEAGRFTLDRKNIDLEPIISEAVRTLTPQAQEKNISVSTNIAPELHAEVDGRAMKQIFLNLISNAVKFTPSGGSINVCAFKKKNNLVCRIKDTGVGIPQSAIKKLGQPFEQVENQLTKTHTGSGLGLAISRSLLELHKGKLEIISKEMKGTTVTITMPIKQS

SEQ ID NO: 43475 - protein, 468 aa, Thermobifida fusca YX
MQPGSHQNPQGDTDVPSPAPATGPRNGLSAGLTTLSLGIQHVVAMFGATFVFPLLMGLDPNLAIMMSGICTILFLLIVNGKVPSYLGSSASFVAAAVIIAADGGGPATITGAVLVTGVVLALAGFVIHLLGPNAIVRAFPPAVTGGVVMLIGFNLAPVVSESYWPYDQWTALLTMAFVILATVVLRGFLSRITVLLGLVFGFVLSWVFDRLFGMTPTPQEDGSVKDAFRVDLSGVADAPWFGLPEFHAPEFHLSAILVALPAVIALIAENAGHVKAVQEMTGNDLNPYMGRAIFADGVATALASSVGGAPTTTYAENIGVMAITRVYSTAPYYVAAVIAILIGLCPKFGALVYAIPQGVIGGITVILYGMIGLLGAKIWVENQVNFADPLVLVPIAAGLIAGIGNVSLVFTDGFQISGIALGTIVILAGYHLLHALAPRSKTHAAPSPGAPAGSGAEGGKAEQHAVQD

SEQ ID NO: 43476 - protein, 235 aa, Arabidopsis lyrata subsp. petraea
  misc_feature (96)..(96): Xaa can be any naturally occurring amino acid
  misc_feature (144)..(145): Xaa can be any naturally occurring amino acid
  unsure (1)..(235): unsure at all Xaa locations
MEEGRSSHDGESSKKIGRGKIEIKRIENTTNRQVTFCKRRNGLLKKAYELSVLCDAEVALVIFSTRGRLYEYANNSVRGTIERYKKACSDAVNPPXVTEANTQYYQQEASKLRRQIRDIQNSNRHIVGESLGSLNFKELKNLEXXLEKGISRVRSKKNELLVAEIEYMQKREMELQHNNMYLRAKIAEGARLNPEQQESSVIQGTTVYESGVSSHDQSQHHNRNYIPVNLLEPNQ

SEQ ID NO: 43477 - protein, 393 aa, Thermobifida fusca YX
MSSPERIIVVDGARTPVGSFGGAFKDVPAHELGAVAARAALQRSGIAASDIDEVVMGCIGQVGPDAYNARRVAIAAGLPESVPAYTVNRLCGSGLQAVWSGAMQIRWGAADIVLAGGDENMSRMPFYDFGARSGYRLGDRTLVDGTVAMLTDPFSNVHMGCTAEAVARKYGVSRAEQDEFALESQRRAAADAARAAFAEEITPVEVGGRKPVVVEVDEHPRPDTTLEGLARLRPVFEKDGTVTAGNASGINDGAAALVLARESVVRERGLKGLAVVESVATAAMDPQLMGYAPVLALRKLFEQTGTSPAVVDVVELNEAFAAQAVAVIRDAGLDPEKTNPYGGAIALGHPVGATGAILTLRVARDLVRRDLELGVVTMCIGGGQALAALLRRV

SEQ ID NO: 43478 - protein, 489 aa, Polaromonas sp. JS666
MNLKRPSLFRQQCHIDGQWVDASDQATLAVVNPANDEVIACVPRLTDKDVQSAIRAADKALPAWREMSAKDRSKILRRWYDLCMTHQEDLATILTTEQGKPLSEARGEIAYGSGFIEWFSEEAKRVYGDIIPAPTADRRIIVIKQPVGVVAAITPWNFPNAMITRKAGAALAAGCTIVVKPASATPFSALALADLAVEAGIPPGVFNVVTGRSDVVGGALTSSPVVRKLSFTGSTEVGKQLMAQCAGTVKKVSMELGGNAPFIVFGDADLDAAVAGVMASKFRNAGQTCVCANRIFVQDMIYDVFAAKLKVAVEAQVVGDGMQAGVNLGPLIDAAAVNKVQEHISDAIALGANVLTGGQAHALGGHFFQPTILINVSSEAKLMNEETFGPVAPLIRFSTEEEVVSMANDTPFGLAAYFYTGSYERAWRVSEALECGIVGLNEGIISTELAPFGGIKESGVGREGSKYGIEDYVEVKYICAGGLGKKRAA

SEQ ID NO: 43479 - protein, 601 aa, Neurospora crassa
MATAEIVAADASSNYDLEKHNTASTTQKHIPIEDDYEGKPTQEELDTLRRVPGSLPIIAYMICIIEFCERASYYGVQPLISNYVNRPLPQGGNGWGAPARGTQQTAGALGMGQSTSNAVTQSFSMLAYALPLVFGWLADAKTGRFKLICWGVIVFGIAHVLLIVAGAKNLLADGTSKAPFFIAVYILAFGAGMFKPNVSPLLLDQVTNTKPMIKVLKTGERVIEDPEATTERVMLWFYLMINIGGFMGVATAYSEKYIGWWLAFLIPLILYLPLPLLLWFLRKRLILHPPGGSDLPNVFRVLGVCLRRGGIKKIGRHGFWELAKPSNIAAAGLEGTYKTQWSDQFVEDVRRTFQGTGIFCFFPIQYLNDNGLGSAANFLSTMLRTDGVPNDVISNFNSLSIIATAPVLNYGLYPALRRLGIHYGPIARITTGLALSTLGGVGYTLLNYYAYKLSPCGEYGSSDCTIGTGVANISIWYLAIPFAIGGISELFVNVPAYGIAYSRAPVNMRGLVSAINLFSTAVAYIIGLACSSVVTDPYLTWDFGGPAIAGGVLTIIFYITFRHIDKEETVFSQRETIEATPVEDSSSQVGEKPSPVYSEKK

SEQ ID NO: 43480 - protein, 323 aa, Polaromonas sp. JS666
MSTHPIQKAFLCRRFTPAIEAELRQRFDLEVNLEDTVLTPSGIASRAHGAEVLFVTATEAITAEVIRKLQPGLKTIATLSVGYDHIDMAAARSLGIKVLHTPDVLSDACAEIAMLLVLNACRRGYEADRMVRSGSWPGWGPTQLLGMGLTGRRLGIFGMGRIGRAIATRARGFGLAIHYHNRTRLSHALEEGAIYHDTLDSLLGASDIFLIAAPGRPELKGFLDHDRIAKIPEGAVVINISRGDLINDDALIEALRSKHLFAAGLDVFANEPAIDPRYRSLDNIFLTPHIGSATHETRDAMGWLLIQGIEALNQSDVPDNLIS

SEQ ID NO: 43481 - protein, 395 aa, Cytophaga hutchinsonii
MSRIVVTGIGIISAIGDSLESNRSSLQKKVCGISTVELFQTRYAAILPFGEIKYTNESLKQQLNVNTLNVTRTSLLAQHAFEQAIRDSALTAAEVSSFDTAFINATTVGGMCLTDELYRDANNQSDHSPYVTSYDLASVAIYLQELHNIQGICNTINTACSSSANAIMYGARLIKQGKAKRAIVGGTDSLAKFTINGFNALHILSPEKCKPFDQNRSGLNLGEAAAFLVLETEENCKGKKAYAVLSGYANANDAYHASALSDTGDGPYEAMKQALNVANLKASDISFVNAHGTGTENNDKAESFAMQRIFHTPPPFASSKSNTGHTLGAAAAIEAVYSILSITHQELYPEINFEVPIEETGLIPLQTFRQAPVKHVMSNSFGFAGNCSSLIFSSL

SEQ ID NO: 43482 - protein, 253 aa, Physcomitrella patens
MVVPSLPAFGGQNAMLRRNIDNNTDTLISLLQGSCSPRVSMQQGYVAVPRSSESLENMMGACGQKLPYFSSFDGPSVEEQEDVDEGIDEFAHHVEKKRRLSLEQVRSLERNFEVENKLEPERKMQLAKELGLQPRQVAVWFQNRRARWKTKQLERDYETLKKAYDRLKADFEAVTLDTSALKAEVSRLKGISNDDVKPAEFVQGKCDTTSHPASPAQSERSDIVSSRNRTTPTIHVDPVAPEEAGAHLTIELG

SEQ ID NO: 43483 - protein, 192 aa, Schizosaccharomyces pombe
MPTIKCVVVGDGAVGKTCLLISYTTNKFPSDYVPTVFDNYAVTVMIGDEPYTLGLFDTAGQEDYDRLRPLSYPQTDVFLVCFSVTSPASFENVKEKWFPEVHHHCPGVPCLIVGTQIDLRDDPSVQQKLARQHQHPLTHEQGERLARELGAVKYVECSALTQKGLKNVFDEAIVAALDPPVPHKKKSKCLVL

SEQ ID NO: 43484 - protein, 249 aa, Physcomitrella patens
MVVPSLPAFGGQNAMLRRNIDNNTDTLISLLQGSCSPRVSMQQVPRSSESLENMMGACGQKLPYFSSFDGPSVEEQEDVDEGIDEFAHHVEKKRRLSLEQVRSLERNFEVENKLEPERKMQLAKELGLQPRQVAVWFQNRRARWKTKQLERDYETLKKAYDRLKADFEAVTLDTSALKAEVSRLKGISNDDVKPAEFVQGKCDTTSHPASPAQSERSDIVSSRNRTTPTIHVDPVAPEEAGAHLTIELG

SEQ ID NO: 43485 - protein, 429 aa, Xylella fastidiosa Ann-1
MSDLDKVTLNAGETSLVLPVLKPTLGNGCVDIAKLTKETGLFTYDSGFTATASCKSAITYIDGEKGVLLYRGYPIEQLAEHSSFLEVAYLLMNGELPRKDEFAKFDDEITHHTMMHESLKNFLGGFHYDAHPMAMLAASVASLSAFYHDTLDLNDLEQRRLAAIRLIAKVPTLAAAVHRYSIGWPIRYPRNNLGYVERFLHMMFEVPSEPLQLNPVVTKALDLLFILHADHEQNASTSTVRLVGSTGANPYASVAAGITALWGPAHGGANEAVLKMLEEIGDAKNVDLVIAKAKTKDKNSPFRLMGFGHRVYKHFDPRAKIIRETAHTVLGELGVNDPLLEVALKLEEVALKDDYFVQRKLYPNVDFYSGIIYKAINIPLEMFTVMFAIARTAGWVSHWLEQQVDPEMKISRPRQIYTGHSERDYKDAR

SEQ ID NO: 43486 - protein, 68 aa, Zea mays
MSTMGWKKYSHEQFGFNRFGASGPYKEVYKKFEFTPEGIAKRAKATIDFYKEVKPLRSPLDRAFQQLI

SEQ ID NO: 43487 - protein, 181 aa, Candidatus Blochmannia floridanus
MMKLKEFFINIISIFRSVYMVGMQAFSKRETYMYPDVACKLSSRYRGRIVLTRDSAGHERCVACNLCAVSCPVGCISLKKSENSEGRWYPEFFRINFSRCIFCGMCEEACPTAAIQLISDFEMSDYKRSDLVYEKSDLLISGPGKYKNYDFYQISGVKYSNKYKKESSFEEKPISVKTILP

SEQ ID NO: 43488 - protein, 462 aa, Desulfitobacterium hafniense DCB-2
MSSEKDHHVELHRGLKNRHIQMIALGGAIGTGLFYGSATTIQLVGPAIIVSYLLGGTAIFFIVRALGEMCVDQPVAGAFSYFAYKYLGDFPGFFSGWNYWFNYIAVSMAELTVVGVYINFWYPNVPQWVTALAFLVIITLINLINVEAFGEFEFWFALIKVVAILAMIAFGLVMIFFGLGEQGAVGFSNLWTHGGFLPNGVWGLLLSLVIVMFSFGGVELIGITAAEADDPKRSIPKAINQVVWRILIFYIGALTILMILYPWDQIGTSGSPFVEIFSAIGIPAAAHILNFVVLTAALSVYNSGIYSNGRMLHGLALQGNAPKFLTKVSRNGIPINGVFASSAVTLIAVILNFLVPGKVFLYLISIATIAGIFNWAMILVTQLRFRKVEAEKGREDQLQFKMPLYPISNYIALAFLAMVVVLMAYIPDMVYSLYIGPIWIIILYIGYKFLRRNPETKPPHRE

SEQ ID NO: 43489 - protein, 492 aa, Lycopersicon esculentum
MDPSKYRPSSAYDTPFLTTNAGGPVYNNVSSLTVGPRGPVLLEDYYLIEKLATFDREKIPERVVHARGASAKGFFEVTHDISHLTCADFLRAPGAQTPVICRFSTVVHERGSPESIRDIRGFAVKFYTREGNFDLVGNNVPVFFNRDAKSFPDTIRALKPNPKSHIQENWRILDFFSFLPESLHTFAFFYDDVCLPTDYRHMEGFGVHAYQLINKEGKAHYVKFHWKPTCGVKCMSEEEAIRVGGTNHSHATKDLYDSIAAGNYPEWKLFIQTMDPEDVDKFDFDPLDVTKTWPEDLLPLIPVGRLVLNRNIDNFFAENEQLAFNPGHIVPGIYYSEDKLLQTRIFAYADTQRHRIGPNYMQLPVNAPKCGHHNNHRDGAMNMTHRDEEVDYLPSRFDPCRPAEQYPIPSCVLNGRRTNCVIPKENNFKQAGERYRSWEPDRQDRYINKWVESLSDPRVTHEIRSIWISYLSQADKSCGQKVASRLTVKPTM

SEQ ID NO: 43490 - protein, 94 aa, Streptococcus pneumoniae TIGR4
MLKPLGDRVVLKIEEKEQTVGGFVLAGSAQEKTKTAQVVATGQGVRTLNGDLVAPSVKTGDRVLVEAHAGLDVKDGDEKYIIVGEANILAIIEE

SEQ ID NO: 43491 - protein, 1087 aa, Mycoplasma penetrans HF-2
MDKNRKYMNFNSVIINVNTSKKNKFILNGFNLNGLFSINEKTIMDNNIELFSEANLNVYIVIEKQYSNILKKHLVNIEKVQILLKEDFFNQKNFIKSDEKTLIVDDNFYFNQEILNNLLTNEKYSNLSTLIKLNYNTHFDYIGIFDSTSINYIDFKNNSISDDIKVLSNLVELKEKQYLPIKIYDYKTLSKMDSKYECDKGFLYFTPGPVQIREWVKEVLGEYVNHHRSLSIKEIYKEAAENIKWAFNSKKGYPIAMANTGLGAIESTFVNLLEQGDEILILSNGFFGENLIDIAKRHQLNQSLLQIKQGESFDLKEVENLIKNKKAVFMVYMDTSCGILNPVKKVGELCKDYGCLFIVDAISGILNEEFNFDEYGVTAAVSTSGKGFEVSPGLAFVCVSEQGMQISANIKKRKPKFLDWQTFKVRSLYDGLTPSTYPVNIFASLNKVCEEIKDNGGLTRLIDKKFNLNLYLSESLITLGFRHIIENENSRSNWVLVMETPNIIKANELRAYLYAMKNILIECGIADSSNRIVRLAISAAHDIEDVTQLIEAIKEYIDLKITSKGEVMKKFYITTPIYYPSGNPHIGHAFTTLIADVLTRYKKKLGYETFFITGMDEHGQKIEEKAKELNLKPQELVDKYAKVFDNLWKLLGIEYSHFIRTTAEYHKNVVQETFSELLKKDFIYLGVWKGLYCVSCEENYTKNIAVRKENDDKLYCAQLHPLIQKEEESYFLKIKQFKKYISSFLKDPNLVYPITRINELFNSFLNNDDFDDLSISRSNFSWGIQIKENPKHVVYVWLDALLNYLSGLGYRQKDDSNFQKFWNSQDAEIVQLMSKEITRFHCIYWPIMLEMLGLRKPTKYISHGWIITEQGKMSKSLGNVLDPIYFINTYGRDAFRYYLLKELSLKEDSVFSEKLLINTFNKDLANNVGNLFNRSIGMINKYRDGIIPKYSKPKLSFNIEFEKQLKQFDDEITTIIEKLNIQKILSRVIDLINECNFFIEQVKPWDLKKENNEKDLDCFLSLILNAVKRVIYYLEPVLIDGSKEALKQFNIDSSKFDIKFVTDFSSLDNQKINTPEPIYLRIESEDK

SEQ ID NO: 43492 - protein, 228 aa, Desulfitobacterium hafniense DCB-2
MSQSTGAEEGVNVFYSFELEQYLGELLPRRDDLFLEMEEQALRETIPVVTPPVGNYLSWLVKVSGASRILEVGTAIGYSTLWLAKGLAGRAGKIVTLDLNVDRATRAIEYFKRGGVAEKIQVVMGDARRILPDFPRGEFDFIFVDAAKGEYLDYLELVTPLLGDGGIMVVDNVLFRGWVVPGSEYEPKYERMVSRLREFLKLLTENPELQTSILPLGDGLAVSIRKCS

SEQ ID NO: 43493 - protein, 911 aa, Mycoplasma penetrans HF-2
MNKKNDKRLIENKSFSINEMNETINFILSLLTKVFKKHTSEKLYKIALEVKNKIKEKNNKNLFEYVQKISKKLSNLDFTYLCRYFAYHELLTNLVEDIYQANYENKWEDKYLDVDDYLVRFFKDIKKNKINVSKLKDIDISIVLTAHPTQVVRETILRLTRKIMEYLDKQSNYNSLFNIHLLDKEQNIEVLIDILWQVAILRDEKITVNNEIKNILNYFDTTFFSILPKINYKFNKLKNENYVLDESDNVCIKIGSWIGGDRDGNSFVNESSLEIAFEGQVKKVFNFYFSKLNNLYNDLLLHDSVSKISKSIYEFTKDVYLKNREREPYSKAVVKIISKLWNTLQSFGYDISSFSNFKIVDIDGKYNSTKDFLNDLYLILNSLKKNNSYEIAKRNLVDLIYSVKSFEFHLMSIDIRQNSKKHKELIDEIFSTNNIHQNYIYLSNEKKEELLLNIFEKEMIWDFDKLNDFNKSEINIFKKINQIKSLLGNNSISSYIISNTESFVDILETLFLYKIVNNTNDFNLNIVPLFETIEDISNAPLIVEKMITSPITRPIIENFWNNKIEVLLGYSDSCKDGGNFTSSWKLYTIQNELTAIVKKHNIKISFFHGRGGTIGRGGGPSYYAINSQPKDSINDKLRFTEQGEIIWAKYSNPRKGWFNLETILTATAQAIVDKTKNKYEDDEFKNNMEYLSKVSFDKYQNLVYKNQSFESVFFDITPINQISKLNIGSRPISRLNNKKLSDLRSIPWVFSWSQVRAMIPGWYGIGTALEQFINQNKKNLSILKKWYKNISFFNSLLSNIEMLLAKVNLDITKHYFDSSNNKDADAIYLDILSEYNKTLKMILLISDKKELLEDFRDLKISLEDRIPYLNILNYFQLELIRKNKLNKKNKWIQEAILISINGIATGLRNSG

SEQ ID NO: 43494 - protein, 918 aa, Arabidopsis thaliana
MAPKKDKVPPPSSKPAKSGGGKQKKKKWSKGKQKEKVNNMVLFDQGTYDKLLTEAPKFKLITPSILSDRMRINGSLARRAIRELMAKAKKMDSSYSFALGTSSSILPKLSFRNVENRFYGEKNNNNGLCKRFGSDLGSKKFRNQKFKHGVVYAVATSDNPKKAMTVKTSMFERRKVDPQNVAAIILGGGNGAKLFPLTMRAATPAVPVGGCYRLIDIPMSNCINSCINKIFVLTQFNSASLNRHLARTYFGNGINFGGGFVEVLAATQTPGEAGKKWFQGTADAVRKFLWVFEDAKNRNIENILILSGDHLYRMNYMDFVQSHVDSNADITLSCAPVSESRASNFGLVKIDRGGRVIHFSEKPTGVDLKSMQTDTTMLGLSHQEATDSPYIASMGVYCFKTEALLNLLTRQYPSSNDFGSEVIPAAIRDHDVQGYIFRDYWEDIGTIKTFYEANLALVEERPKFEFYDPETPFYTSPRFLPPTKAEKCRMVDSIISHGCFLRECSVQRSIIGERSRLDYGVELQDTLMLGADYYQTESEIASLLAEGKVPIGIGKDTKIRKCIIDKNAKIGKNVIIMNKGDVQEADRPEEGFYIRSGITVIVEKATIQDVHLQLEELKFRDIDLENNKKHSQPKPDLLLFRCVVERSLFEEANSFFFFTIHSLLALLLVVLMLLSMNLGITCELFSSDCSDSRSNFRDLLKSISPMRNSLFLGFLDSLVSRITMEGSGGDSGSMATPVQKKVHEAWRVYQYYLDKTTPHSTNRWIGTLVFFLIYCLRVYSIHGFYIISYGLGIYLLNLLIGFLSPLVDPELEVSDGATLPTRGSDEFKPFIRRLPEFKFWYSMTKAFCIAFLMTFFSVFDVPVFWPILLCYWVVLFVLTMRRQIAHMIKHKYIPFSIGKQKYSGRKSSANSGGGSRAD

SEQ ID NO: 43495 - protein, 545 aa, Bacteroides thetaiotaomicron VPI-5482
MAKEILFNIDARDQLKKGVDALANAVKVTLGPKGRNVIIEKKFGAPHITKDGVTVAKEIELADAYQNTGAQLVKEVASKTGDDAGDGTTTATVLAQAIVAEGLKNVTAGASPMDIKRGIDKAVAKVVESIKAQAETVGDNYDKIEQVATVSANNDPVIGKLIADAMRKVSKDGVITIEEAKGTDTTIGVVEGMQFDRGYLSAYFVTNTEKMECEMEKPYILIYDKKISNLKDFLPILEPAVQTGRPLLVIAEDVDSEALTTLVVNRLRSQLKICAVKAPGFGDRRKEMLEDIAILTGGVVISEEKGLKLEQATIEMLGTADKVTVSKDYTTIVNGAGVKENIKERCDQIKAQIVATKSDYDREKLQERLAKLSGGVAVLYVGAASEVEMKEKKDRVDDALRATRAAIEEGIIPGGGVAYIRAIDSLEGMKGDNADETTGIGIIKRAIEEPLREIVANAGKEGAVVVQKVREGKGDFGYNARTDVYENLHAAGVVDPAKVARVALENAASIAGMFLTTECVIVEKKEDKPEMPMGAPGMGGMGGMM

SEQ ID NO: 43496 - protein, 90 aa, Bacteroides thetaiotaomicron VPI-5482
MNIKPLADRVLILPAPAEEKTIGGIIIPDTAKEKPLKGEVVAVGHGTKDEEMVLKVGDTVLYGKYAGTELEVEGTKYLIMRQSDVLAILG

SEQ ID NO: 43497 - protein, 280 aa, Oryza sativa
DDERKKTSPQANAGRFSEDEARYFFQQLICGVSYCHFMQICHRDLKLENTLLDGSPAPRLKICDFGYSKSSLLHSKPKSTVGTPAYIAPEVLSRREYDGKTADVWSCGVTLYVMLVGAYPFEDPDDPKNFRKTIGRIMSIQYKIPEYVHVSQDCRQLLSRIFVANPAKRITIREIRNHPWFLKNLPRELTEAAQAMYYKKDNSAPTYSVQSVEEIMKIVEEARTPPRSSTPVAGFGWQEEDEQEDNSKKPEEEQEEEEDAEDEYDKQVKQVHASGEFQLS

SEQ ID NO: 43498 - protein, 175 aa, Arabidopsis thaliana
PGCRNSARGSLLFEGGSSMQELSDTVSDCCVCLQNNNIPFNILISDCGRQIFLMPQCYAEKQALGEVSPEVLETQVNPAVWEISGHMVLKRKEDYEGASEDNAWRLLAEASLSEERFKEVTALAFEAIGCSNQEEDLEGTIVHQQNSSGNVNQKSNRTHGGPITNGTAAECLVLQ

SEQ ID NO: 43499 - protein, 245 aa, Triticum aestivum
PRVRDLRGCNDEQVQAPRHEEHVQTSDSQPPLGTDDGTVDNFVNHNRIREEPGPEETAAKLRPKSQRKPGRASSKAVGTSDDHAEANLKDINASVDIDSEDGLINPHTDDTQPIFGEPSAEAAATFLLDLGKKKGKGKSVTFVLPDDYEGVAATDTNHNDIHSDENLNTLPQQAPQKHCLTEEHSDDQEYTDRESQYHEGERSDHGVEQQSTLDVGKQELSMKLRSRTEIQKVGLSEHIVDDHLD

SEQ ID NO: 43500 - protein, 605 aa, Schizosaccharomyces pombe
MSSPNNQPLSCSLRQLSISPTAPPGDVGTPGSLLSLSSSSSSNTDSSGSSLGSLSLNSNSSGSDNDSKVSSPSREIPSDPPLPRAVPTVRLGRSTSSRSRNSLNLDMKDPSEKPRRSLPTAAGQNNIGSPPTPPGPFPGGLSTDIQEKLKAFHASRSKSMPEVVNKISSPTTPIVGMGQRGSYPLPNSQLAGRLSNSPVKSPNMPESGLAKSLAAARNPLLNRPTSFNRQTRIRRAPPGKLDLSNSNPTSPVSPSSMASRRGLNIPPTLKQAVSETPFSTFSDILDAKSGTLNFKNKAVLNSEGVNFSSGSSFRINMSEIIKLEELGKGNYGVVYKALHQPTGVTMALKEIRLSLEEATFNQIIMELDILHKAVSPYIVDFYGAFFVEGSVFICMEYMDAGSMDKLYAGGIKDEGVLARTAYAVVQGLKTLKEEHNIIHRDVKPTNVLVNSNGQVKLCDFGVSGNLVASISKTNIGCQSYMAPERIRVGGPTNGVLTYTVQADVWSLGLTILEMALGAYPYPPESYTSIFAQLSAICDGDPPSLPDSFSPEARDFVNKCLNKNPSLRPDYHELANHPWLLKYQNADVDMASWAKGALKEKGEKRS

SEQ ID NO: 43501 - protein, 328 aa, Campylobacter upsaliensis RM3195
MKILITGGAGYIGSHTLRQFLNTKHEICVLDNLSKGSKIALEDLKSIREFDFFEQDLNDFKGVKDLFKREKFDAVVHFAASIEVFESMQDPLKYYMNNTANTSNLIQTCLENNVNKFIFSSTAATYGEPKSPVVSETSPLEPINPYGRSKLMSEEVLRDASRAKPEFKHCILRYFNVAGACMDFKLGQRYPKATLLIKVAAEVAAGKREKLYIFGDDYETKDGTCIRDFIHVDDISSAHLAALEYLDNNESNVFNVGYGHGFSVKEVIEAMKEVSGVDFKVELAPRRAGDPSVLISNAEKIRKLTSWKPKYDDLKLICKSSYEWEKQC

SEQ ID NO: 43502 - protein, 106 aa, Zea mays
  misc_feature (51)..(51): Xaa can be any naturally occurring amino acid
  misc_feature (97)..(97): Xaa can be any naturally occurring amino acid
  unsure (1)..(106): unsure at all Xaa locations
SLKIHPFFPLNMPIIREVVLITNPYFISHPFYKKFSGNFLCNLLGKWKESXYSCQSIPFGCLAYYLTAPSNLADVLANTFHALFYVVFILSSCALFXSKTLIEISF

SEQ ID NO: 43503 - protein, 153 aa, Thermobifida fusca YX
MALPVTRRRERLIPTQWGAFPEFEELYDRMGRLLESAFGEPIISPTTWTPFADLLEDDKSYIVEAEVPGMSKDDINIQVSGNELIISGKVEEQEKEGVRAHRRMRRYGEFEYRTVLPGEIDAEGVRAKLDNGVLTVTAPKSAHERPRHVAIES

SEQ ID NO: 43504 - protein, 391 aa, ASPERGILLUS NIDULANS FGSC A4
MSTQPAHPTLLIPGPIEFDDAVLHPSTPTNLSITSESHVAPGFVKVFGETLSMTRKLFQSTNPAAQPFVISGSGTLGWDFVASNLVEKGENALVLHSGYFADSFASCLETYGANATQLKAPIGERPSFEAIEQALKEKPYKIITITHVDTSTGVLSDIKTVAEIVRRVSPQTLVVVDGVCSVGCEEIAFDEWDLDVVLTASQKAIGCPPGLSIIMFSGRAIETFKSRKTPPSSYYSSMANWLPIMQNYENFKPSYFATPSTQLIHALHTTLSQITSRPMAERFAAHRRASDRVKAAVAELGLQQLASKVENQAHAMTAIWLPDGLAPPDVLPGLLKRGVIFAAGLHKEVATKYIRFGHMGVSIMDPARDDIEKAIAALKEAIADAKRAKGL

SEQ ID NO: 43505 - protein, 455 aa, Vigna mungo
MGNSEEKKHVAVFSFPFGSHPTPLLNLVLKLTNAAPNLQFSFIGTEHSNKSLLISKPHIPDTIKFYSISDGVPEGHVPGGHPVERVNLFLQASPQNLQKGIDMAVAHTKERVTCVISDAFVAPSLTVAQRLNVPWVPVWPPLSCSLSAHFYTELIRQTCNSAAGDTPLDFVPGLSKMRVEDLPEDVIQGAGEEETLFSKTLASLGSVLPQAEAVVVNFFEELDPPLLVNDMKSKFKYYLYVGFLTLSLPLPPLPPSDTDETGCLSWLDKQKGGSVVYVSFGTVVTPPPHEIVAVAEALEASGFPFLWSLKEHLKGVLPNGFLERTSERGKVVGWAPQTQVLGHGSVGVFVTHCGCNSVFESMSNGVPMICRPFFGDHGLTGRMVEDVWEIGVRVEGGVFTKDGLLKSLRLILVEEEGNLMKKNAVKVKKTVLDAAGAQGKAAQDFNTLVELVSRS

SEQ ID NO: 43506 - protein, 495 aa, Arabidopsis thaliana
MDLTQILLLSFLFLTISIKLLLTKSNRKPNLPPSPAYPLPVIGHLHLLKQPVHRTFHSISKSLGNAPIFHLRLGNRLVYVISSHSIAEECFTKNDVVLANRPDIIMAKHVGYNFTNMIAASYGDHWRNLRRIAAVEIFSSHRISTFSSIRKDEIRRLITHLSRDSLHGFVEVELKSLLTNLAFNNIIMMVAGKRYYGTGTEDNDEAKLVRELIAEIMAGAGSGNLADYLPSINWVTNFENQTKILGNRLDRVLQKLVDEKRAEKEKGQTLIDHLLSFQETEPEYYTDVIIKGIILALVLAGTDTSSVTLEWAMSNLLNHPEILEKARAEIDDKIGSDRLVEESDIVNLHYLQNIVSETLRLYPAVPLLLPHFSSDECKVAGYDMPRRTLLLTNVWAMHRDPGLWEEPERFKPERFEKEGEARKLMPFGMGRRACPGAELGKRLVSLALGCLIQSFEWERVGAELVDMTEGEGITMPKATPLRAMCKARAIVGKTI

SEQ ID NO: 43507 - protein, 539 aa, GIBBERELLA ZEAE PH-1
MNSNQLDPRQHPLEAIGAAIGAEEQTELQTRSSNFQGADEGPASVIAKVSGAQSGGKREDGSSDLPNNKGTPRPNPTYSKTVGGLPLVSDTFLLQKQQHFNRSKTLERVVHSCGAGAFGYFECTRDVTELTKANFLSSVGEKTPVFVRFSTATLGREFPDASRNPRGFAIKFYTKEGNYDIVGLNFPVFFCRDPIQGPDVIRSQSRNPSNFLLDHDALFDFLANNPEANHAGIMLFSDHGTPQGWRFSHGYGCHTFKWVNADGEFMYVKYHFIAKHGQKQFADSEAMQMCGEDPDYSKRDLWEAIEKGEDIEWMVHVQIMDPRQADPDTLGFDPFDATKIWPRSEFRMKELGRLVLNKNPENFHRDVEQAVFSPGSMVPGIEDSPDPLLQFRMFLYRDAQYHRVGTNLHQIPVNCPFMAKSYASPFDGPMHVDTDRAGSKQYPLNSFAHKFRPDTDEAPYEVNDNFIKYLAQVYIISVDYAQGIYNLLDEPRFEFSKVKKLGETKFAEAADDWYKEPKFRDKPGSKLVGYPPEIAVYQP

SEQ ID NO: 43508 - protein, 66 aa, Mycosphaerella thailandica
EFKEAFSLFDKDGDGQITTKELGTVMRSLGQNPSESELQDMINEVDADNNGTIDFPEFLTMMARKM

SEQ ID NO: 43509 - protein, 110 aa, Cladosporium cladosporioides
GGKAPRKQLASKAARKSAPSTGGVKKPHRYKPGTVALREIRRYQKSTELLIRKLPFQRLVREIAQDFKSDLRFQSSAIGALQESVEVYLVSLFEDTNLCAIHAKRVTIQS

SEQ ID NO: 43510 - protein, 225 aa, Novosphingobium aromaticivorans DSM 12444
MRRPVLAAALLAGIVTASCQQTAQAEGAVAAPEAAVQADEAPGRKVAIFAGGCFWGVEGVFSHVKGVTSVVSGYHGGEKKTASYDVVGTGRTGHAEAVRVTYDPAKVRYDQLLRIFFAVVTDPTQLNYQGPDDGTQYRNALVPMDKEQARVAAGYLAQLKRLDLWKRPIVTAVEPYKTFYPAEGYHQDFMANNPDHGYIRRWDAPKVQALKRMFPDLYKPAFTRN

SEQ ID NO: 43511 - protein, 130 aa, Methanosarcina acetivorans C2A
MTCDPAGGRAINAAGVQFPPVHYNGDIFLPGQANNFYTYPAVGLAVYVTRAKRATDEMFIKAARATANQRTDEQLKKGLLFPPQSSILETEVRTAVQIATLIFNRDLARVDQPEDINVWLRATLYKPQYS

SEQ ID NO: 43512 - protein, 109 aa, Davidiella tassiana
VKAPRKQLASKAARKSAPSTGGVKKPHRYKPGTVALREIRRYQKSTELLIRKLPFQRLVREIAQDFKSDLRFQSSAIGALQESVEAYLVSLFEDTNLCAIHAKRVTIQS

SEQ ID NO: 43513 - protein, 136 aa, Brassica napus
AESLNMSQKRVRNATEAVSKIFSLDRDAFPSLNGLPGETHHSYIADNRLENNPWHGYDEWALKDEVSKLISATLGEREREIIRLYYGLDKECLTWEDISKRIGLSRERVRQVGLVALEKLKHAARKSKMEAMILKN

SEQ ID NO: 43514 - protein, 170 aa, Nocardia farcinica IFM 10152
MTDTRRAILAGGCFWGMQDLIRRQPGVVSTRVGYTGGTNDHPTYRNHPGHAEAVEIVYDPERTDYRALLEFFFQIHDPTTKDRQGNDIGTSYRSAIFYLDDEQRRVAEDTIADVDASGLWPGKVVTEVTPASEFWEAEPEHQDYLLRYPNGYTCHYPRPDWKLPKRQATA

SEQ ID NO: 43515 - protein, 2260 aa, Streptomyces halstedii
MENEKKLLDYLKRATTDLREARRRLREMEEKDQEPIAIVGIGCRFPRGVESAEQLWDLVADGGEALTPFPEDRGWDTDSLYHPDPEHLGTSYTNVGAFLHDAAEFDPGFFGISPREALAMDPQQRLLLETSWEAMERAGIDPAGLRGSRTGVFTGLMYFDYGSRVHSAPEDIEGYLGNGSAGSIASGRVAYTFGFEGPAVTLDTACSSSLVAIHLAAQSLRKGECTLALAGGASVMSTPDIFVDFSRQRGLSADGRCKAFSSDADGTGWGEGVGVLLLERLSDARKNGHRILGLVRGSAVNQDGASSGLTAPNGPSQQRVIRQALANAGLSAAEVDAVEAHGTGTKLGDPIEAQALLATYGQEREEGRPLWLGSIKSNVGHTQAAAGVAGVIKMVLAMRAGVLPKTLHVSEPSPHVDWSAGAVELLTETRDWPETGRPRRAGVSSFGISGTNAHVIVEQAPMDEAMDEVAGERETPAAGSDRTVPWVISAKSADALRAQAGRLSTFLAGTEGTLTTGISSETSVAAVSADASAVGWSLVRGRSVFAHRAVVVGGEWDALLASIGELADGAEDGSGAASGSVVSGVADVSGRRVFVFPGQGSQWVGMAQGLLDSSVMFTERMTECAAALDPLVEWSLLDVVRGVEGAASLERVDVVQPVLWAVMVSLASVWRSVGVVPDAVVGHSQGEIAAAVVGGWLSLVDGARVVALRSLAIREVLAGGGGMVAVQAAEDEVAGWLEGVEGVGIAAVNGPRSVVISGTRAGLDACVELWSGRGTWVKRVPVDYASHSAEVERVRERVLADLASVTGLSGSVPMLSTMTGDWIVEGQVGAGYWVENLRRPVLFADATRRLASEGFGAFVEVSAHPVLVMGIEETIEALRSGAADGAKSGAGEESSSAVVAVGTLRRGEGGWDQFLRSLAGLFVRGAVTPDWESLLGGVRPRVDLPTYAFQRERLWLDAGVVAGDVSGLGQVVVGHPLLGAGVGVAGEGGGVLFTGRLGLGSHPWLGDHAVSGVVLLPGAAFVELVVRAGDEVGCGRLEELTLAAPLVVPERGSVRIQVVVGAGDGSGARSVGVWSSVGDEGVGGEWVCHASGLLTADVGVAPVLGGVWPPVGGVAVDVSGVYEGLALEGYEYGSVFRGLRSVWRRGDEVFAEVALGEGVGVEGFGLHPALLDAALQAAGFGSFVPESEAGSEAGSGGVRLPFSWSGVSLFASGASVGRVRLWPVGGDGFGVELFDGVGMPVARVDALVTREISAGQLGAAAGAGSLVGGESLFRVEWAPVSGVAPASAGVGGCVVVGAGSVLSGFGEVVPDLAAVSAGSAAVPGWVLVDVDAWLGADLAVGVVSGEGVPVVARGVVARVLGLVREWLGDERWVSSRLVWVTRGAVGARVLDEVSGVVSSGLWGLVRAAQSEHPDRFALLDLDSATAVDAVRDGVLGLLAAGEPQLVVREGEVLAARLTPAHTTDALIPLADHAPWRLAKDPGGSLDALTVVPAPDVLEPLTEGQVRIAVRAAGVNFRDVLMALGMVPARGTQLGGEAAGVVTAVGPGVTGIAVGDRVMGVFDGPFGPVAVADRRMVSRIPDAWSYTEAATIPLVYLTAYYGLVDLAALQQGQRILVHAATGGVGMAAVQLARHFGAEVYGTASPGKWDTLRAMGFDEAHMASSRSLDFEDHFWQTTGGEGFDVVLNSLAQEYVDASLRLQPRGGRFLEMGKTDIRDADEVAAAHEGVRYEAYDLTVFTSVDGPGAIPERIQEMLSELLALFDKGVLTPLPVTTWDVRRASAALRHMSQARHTGKIALTVPRPLDQDGTVLVTGGTGVLGSLLARHLVTEHGVRNLLLVSRRGGDAPGAAELVAELTAAGAEVSVVACDTADRAALEKLLASVPGDAPLTGVFHTAGVLDDGIVEAMTPERVDAVMRPKVDAAWHLHELTEGLDLAAFVLYSSAAGVSGDAGQSNYAAANVFLDALAQRRRAAGLPGQSLAWGLWDDRSEMTGHLGDAEIARMTEAGVLGFTAADGLAALDRAAMYDDAVLVPMKLDTATLGAGSSPVPHLFRGLVRTPVVRRAVAGNTGGDSGGGLEQRLAALTAAERTETVLELVRERVAAVLGHASADAIDPARAFKEIGFDSLTAVELRNRLNAATGLRLPATLVFDYPTPTVLSQYLLAELAPGLPAEDPVGTRLLEQIARIEAVLSEVSEVTDETSSLSDMDADARSGITARLNDILTAWNRAQRAPGHDAVAAELDDASDDEIFDFIDSTFGKS

SEQ ID NO: 43516 - protein, 405 aa, Candidatus Blochmannia floridanus
MKRVVVTGLGIISSIGNNQDEVLVSLKNGRSGITFSKELQESGMRSCVWGNIKLNIDGLIDRKIARFMSDAAIYAYLSMDQAVQDSGLSKDMIINDYTGLIVGSGGGSPRNQVLGSNGMRTRGLRGVGPYMVTKSMASGISACLATFFKIKGMSYSISSACSTSTHCVGHAFELIQSGKQVIVFAGGGEELCWEMACEFDAMGALSTKYNDIPEKASRPYDLNRDGFVIAGGGGIVVVEELTHALDRNAHIYGEIVGYGATSDGFDMVAPSGEGAIRCMQIALRNVDDSVDYLNMHGTSTQIGDIKELQALYKVFGNQHPYFSSTKSMTGHALGAAGVHEIIFTLLMLKHNFIAPSINIDQLDPYLENMKVIRKTIHQKLTVVMTNSFGFGGTNATLVMQKYSGS

SEQ ID NO: 43517 - protein, 264 aa, Escherichia coli
MKKTKIVCTIGPKTESEEMLAKMLDAGMNVMRLNFSHGDYAEHGQRIQNLRNVMSKTGKTAAILLDTKGPEIRTMKLEGGNDVSLKAGQTFTFTTDKSVIGNSEMVAVTYEGFTTDLSVGNTVLVDDGLIGMEVTAIEGNKVICKVLNNGDLGENKGVNLPGVSIALPALAEKDKQDLIFGCEQGVDFVAASFIRKRSDVIEIREHLKAHGGENIHIISKIENQEGLNNFDEILEASDGIMVARGDLGVEIPVEEVIFAQKMMI

SEQ ID NO: 43518 - protein, 328 aa, Schizosaccharomyces pombe
MRPIILQGHERPLTQIKYNHDGDLLFSCAKDKVINVWFSHNGERLGTYEGHTGAIWTCDINKSSTLMVSGAADNTMRLWDVKTGKQLYKWEFPTAVKRVEFNEDDTRILAVTEERMGYAGTVTVFRVPISESDAAAETPLYVITTRESKATVAGWSYLSKFLFTGHEDGSVSRYDAITGEFVESKQVHNSGSTITDLQFYPDRTYFITSCKDTTAKAIDVDSFEVIKTYLTDTPLNTSSFTPVQDFVILGGGQEARDVTTTAARQGKFEARFYHAILEEELGRVKGHFGPINTIAVHPKGTGYASGGEDGYVRVHFFDKNYFDFKYTL

SEQ ID NO: 43519 - protein, 146 aa, Lactobacillus acidophilus NCFM
MTKTWRLNERHYGALRGLNKDVSRKVFGVEQVLLWRRGFNSIPPAQGSPVIDRRYKLCDQHLMPRAESLHQTQNRLMPYYYDHIAPKLLNGEDQLIVAHGSSLRALIKKLENINDHDIVNLEVPNAEPIVYTMDDQLNIINKKILR

SEQ ID NO: 43520 - protein, 177 aa, Picrophilus torridus DSM 9790
MEDVCYLAGGCFWCMEAVFKDIYGINDVQPGYAGGTTVNPTYEEVCSQRTGHAETVRIRYDPEKISFDDILEIYFSVIDPTTLNRQGEDVGTNYRTAIFYINEYQKERAVNYIKNLEASGKYSKIVVSVEPYKNFYPAEDYHKNYFERHPEQGYCRVVIKPKVEKVRQKFFYKINNQ

SEQ ID NO: 43521 - protein, 425 aa, Campylobacter upsaliensis RM3195
MTNKAAFKEAFKVIAGGVNSPVRAFASVGGEPCFIAEGEGAYIKDIEGKRYIDFVQSWGPLLFGHCDKDIVKACKKALKKGTSFGAPTLSESHLAKLVLEDFKHLDKIRFVNSGTEATMSAIRLARGFTKREKILKFEGCYHGHSDSLLVSAGSGAATFNTPSSLGVLNEVAKQTLVARYNDIESVKELFEKYKGEISCVIIEPIAGNMGLVLGEQKFLEELARLCRQNGALLIFDEVMSGFRASFLGSFGVNKIKADIVTFGKVIGGGLPAAAFASRAEIMDILSPLGGVYQAGTLSGNPLAMAAGIASISKAKKDKELYKKLARLAKILTQGLSELAKEKGVPFNATFVGSMFGYFFTEDPVRNYQDALKSNLKLFAKFHQNMLKQGIYLAPSQFETGFICDKMDEKMMIKTLEAARKSFKAL

SEQ ID NO: 43522 - protein, 338 aa, Geobacter metallireducens GS-15
MKIYYDKDCNMGVLKGKKVAIIGYGSQGHAHANNLKDSGIDVVVGLRADSASVKKATEAGLTVLPTSEAVKIADVVMILLPDETQGDIYREEIGPFLKQGAYLAFSHGFNIHFGQIVPRPDVNVIMIAPKGPGHLVRHEYTKGGGVPSLIAIHHDPAGNSRDVALAYASANGGGRAGIIETSFKEETETDLFGEQAVLCGGISALIQAGFETLVEAGYAPEMAYFECLHETKLIVDLIYEGGIANMRYSISNTAEYGDLTRGPRVVTDETKKEMKRILDEIQTGQFAKEWMLENKANKPVFTALRRKGAEHQIEEVGARLRSMMSWIGASKIVDKAKN

SEQ ID NO: 43523 - protein, 173 aa, Methanosarcina mazei Go1
MVRKPGSMYRNVRQRSFTRRKYMGGVPGSQVIHYDMGDKANTTFPVKISLVAEEKCQIRHTALEAARITANRHLVADAGKMGFYMKLRVYPHEVLRENKQATGAGADRVSSGMRRAFGKNVGTAARVNSMQKLFTVAVEKQNFPAAKKALWHAGQKLPTPVRIVIDEGAELVQ

SEQ ID NO: 43524 - protein, 268 aa, Oryza sativa
MGGGGGDDALYARCLVILYLISPITVFLLRFVSAPYGKLSRPGWGPAVPAALAWFLMESPTMCLPPLVLSAAASSSALRAAALLPAALYALHYVNRTLVHPLRLLRLRRAPAPVPILVAAFAFGFNLLNAYVQARSWALDAAAPHSTATATATPAAVARCLVGLALFAWGMRTNIAADKALLRLKEAGKGYQIPRGGLFDVVTCPNYFGEAVEWLGYALVAWTPAAWAFFLYTCSNLGPRARDHRRWYVGKFGDKYPASRKAFVPYIY

SEQ ID NO: 43525 - protein, 294 aa, Nicotiana tabacum
MDQYEKVEKIGEGTYGVVYKARDRVTNETIALKKIRLEQEDEGVPSTAIREISLLKEMQHANIVRLQDVVHSEKRLYLVFEYLDLDLKKHMDSSPEFSEDPRLVKMFLYQILRGIAYCHSHRVLHRDLKPQNLLIDRRTNALKLADFGLARAFGIPVRTFTHEVVTLWYRAPEILLGSRHYSTPVDVWSVGCIFAEMVTQRPLFPGDSEIDELFKIFRVMGTPNEDTWPGVTTLPDFKSAFPKWPSKDLATIVPNLDGAGLDLLDKMLRLDPSKRITARNALEHEYFKDIGYVP

SEQ ID NO: 43526 - protein, 181 aa, Clostridium acetobutylicum ATCC 824
MSVYDFKAKTIEGKEVSLDTYKGKVLIIANTASKCGFTPQYEGLEKLYKEYKDKGLEILGFPSNQFAEQEPGDNNEVKNFCKLNYGVTFQLFEKTDVRDENAHPLFNYLTENAPFKGFDLNHPTGKMLSEVLEKNFPKFLEGNSVKWNFTKFLIDRDGNVVKRFEPTSEPSDMVKDIEKLL

SEQ ID NO: 43527 - protein, 439 aa, Synechocystis sp. PCC 6803
MCCWQSRGLLVKRVLAIILGGGAGTRLYPLTKLRAKPAVPLAGKYRLIDIPVSNCINSEIVKIYVLTQFNSASLNRHISRAYNFSGFQEGFVEVLAAQQTKDNPDWFQGTADAVRQYLWLFREWDVDEYLILSGDHLYRMDYAQFVKRHRETNADITLSVVPVDDRKAPELGLMKIDAQGRITDFSEKPQGEALRAMQVDTSVLGLSAEKAKLNPYIASMGIYVFKKEVLHNLLEKYEGATDFGKEIIPDSASDHNLQAYLFDDYWEDIGTIEAFYEANLALTKQPSPDFSFYNEKAPIYTRGRYLPPTKMLNSTVTESMIGEGCMIKQCRIHHSVLGIRSRIESDCTIEDTLVMGNDFYESSSERDTLKARGEIAAGIGSGTTIRRAIIDKNARIGKNVMIVNKENVQEANREELGFYIRNGIVVVIKNVTIADGTVI

SEQ ID NO: 43528 - protein, 146 aa, Clostridium acetobutylicum ATCC 824
MKKDDLSKKLTPLQYEVTQNNATEPPFNNEYWDNKSEGIYVDIISGKPLFTSLDKFDSGCGWPSFTKPIVKENIKANTDFSYNMKRIEIRSKDSDSHLGHVFDDGPKDKGGLRYCINSASLKFIPKEALEEEGYGEYLKLFNKKEE

SEQ ID NO: 43529 - protein, 424 aa, Thermus thermophilus HB27
MKSEPLSYLGKDGGPWEIFTEQVDRVVPYLGRLAPLAESLKRPKRVLIVDVPVRLDDGSVAYFEGYRVHHNTARGPAKGGVRYHPEVTLSEVMALAGWMTIKNAAVGLPYGGGKGGIRVDPRKLSPGELERLTRRYTSEIGILLGPDRDIPAPDVNTGEREMAWMMDTYSMNVGRTVPGVVTGKPIALGGSLGRRDATGRGVFITAAAAAEKIGLQVEGARVAIQGFGNVGNAAARAFHDHGARVVAVQDHTGTVYNEAGIDPYDLLRHVQEFGGVRGYPKAEPLPAADFWGLPVEFLVPAALEKQITEQNAWRIRARIVAEGANGPTTPAADDILLEKGVLVVPDVIANAGGVTVSYFEWVQDFNSYFWTEEEINARLERVLRNAFEAVWQVAQEKKIPLRTAAYVVAATRVLEARALRGLYP

SEQ ID NO: 43530 - protein, 331 aa, Novosphingobium aromaticivorans DSM 12444
MSDPLYDVIAIGNAIVDVMAPCEDADIARLGLAKGGMTLVDTARAKELYDAMGPAREISGGSAANTLAGLAALGANCAFIGQVADDQLGEVFAHDIRAGGIAFDTPTRADEPPTARCLIFVTPDGQRTMNTFLGASQFLPAEALDDATIAAAQVLYLEGYLWDPEEPRKAMRRAIAAARNAGRKVAFTLSDAFVISRHGDDFRALIDAGQIDILFANEHELAALTGIEDFHVGIEQLAAKVPTVVVTRSENGAHAISQGERAHVPAEPIAKVVDTTGAGDLFAAGFLYGYVRGRPLAESLTLGAICAAEIISHYGARPEADLKDLVAQRLG

SEQ ID NO: 43531 - protein, 731 aa, Streptococcus agalactiae NEM316
MSVYVSGIGIISSLGKNYSEHKQHLFDLKEGISKHLYKNHDSILESYTGSITSDPEVPEQYKDETRNFKFAFTAFEEALASSGVNLKAYHNIAVCLGTSLGGKSAGQNALYQFEEGERQVDASLLEKASVYHIADELMAYHDIVGASYVISTACSASNNAVILGTQLLQDGDCDLAICGGCDELSDISLAGFTSLGAINTEMACQPYSSGKGINLGEGAGFVVLVKDQSLAKYGKIIGGLITSDGYHITAPKPTGEGAAQIAKQLVTQAGIDYSEIDYINGHGTGTQANDKMEKNMYGKFFPTTTLISSTKGQTGHTLGAAGIIELINCLAAIEEQTVPATKNEIGIEGFPENFVYHQKREYPIRNALNFSFAFGGNNSGILLSSLDSPLETLPARENLKMAILSSVASISKNESLSITYEKVASNFNDFEALRFKGARPPKTVNPAQFRKMDDFSKMVAVTTAQALIESNINLKKQDTSKVGIVFTTLSGPVEVVEGIEKQITTEGYAHVSASRFPFTVMNAAAGMLSIIFKITGPLSVISTNSGALDGIQYAKEMMRNDNLDYVILVSANQWTDMSFMWWQQLNYDSQMFVGSDYCSAQVLSRQALDNSPIILGSKQLKYSHKTFTDVMTIFDAALQNLLSDLGLTIKDIKGFVWNERKKAVSSDYDFLANLSEYYNMPNLASGQFGFSSNGAGEELDYTVNESIEKGYYLVLSYSIFGGISFAIIEKR

SEQ ID NO: 43532 - protein, 282 aa, Waldsteinia geoides
GLPPAMAANGHRVMTVSPRYDQYRDAWDTGVTIELQVGDKIETVRFFHCFKRGVDRVFVDHPLFLEKVWGKTASKIYGPATGEDYKDNQLRFSLLCLAALEAPRVLNLNSNKYFSGPYGEDIIFVGNDWHTGLLPCYLKAKYQSKGIFMSAKVAFCIHNIAYQGRFAFADFSLLNLPDSFKSSFDFIDGYNKPVKGRKINWMKAGMLESNIVLTVSPYYAKELVSSSDKGVELDNIGRKVGVHGIVNGMDVQEWNPLTDKYTDVKYDATTVMDAKPILKEAL

SEQ ID NO: 43533 - protein, 234 aa, Enterococcus faecalis V583
MTQLFGEFFGTMILVLLGDGVCAAVNLKKSKAFASGWVVIALGWGAAVTLAVYMSGYMSPAHLNPAVTVAMAITGNFEWGMVLPYIVAQVLGGFIGGLVVWLAYLPHWNITEDKGAILGTFATGPAVRNYPANVLTEIIGTFVLVFGLLAFSQNDLAAGINPMLVGILVLGLGLSLGGPTGYAINPARDLGPRLAHQIIPVKTKGDSDWAYSWVPIVGPILGASLAAVIYLFTI

SEQ ID NO: 43534 - protein, 419 aa, Thermus thermophilus HB27
MPLKAYRPPEDPGLWDTYLEWLERALKVAGVHPTTLEYLAHPKRLVTLSLPVVMDDGKVRIFQGYRVVHDIARGPAKGGVRLDPGVTLGQTAGLAAWMTLKAAVYDLPFGGAAGGIAVDPKGLSPQELERLVRRYTAELVGLIGPDSDILGPDLGADQQVMAWIMDTYSMTVGSTVPGVVTGKPHALGGSEGRDDAAGLGALLVLEALAKRRGLDLRGARVVVQGLGQVGAAVALHAERLGMRVVAVATSMGGMYAPEGLDVAEVLSAYEATGSLPRLDLAPEEVFGLEAEVLVLAAREGALDGDRARQVQAQAVVEVANFGLNPEAEAYLLGKGALVVPDLLSGGGGLLASYLEWVQDLNMFFWSPEEVRERFETRVARVVDAVCRRAERGGLDLRMGALALALERLDEATRLRGVYP

SEQ ID NO: 43535 - protein, 381 aa, Bacteroides thetaiotaomicron
MDDKGNIQTNMGYRVQHNNAIGPYKGGIRFHASVNLSILKFLAFEQTFKNSLTTLPMGGGKGGSDFSPRGKSNAEVMRFVQAFMLELWRHIGPETDVPAGDIGVGGREVGFMFGMYKKLAHEFTGTFTGKGREFGGSLIRPEATGYGNIYFLMEMLKTKGTDLKGKVCLVSGSGNVAQYTIEKVIELGGKVVTCSDSDGYIYDPDGIDREKLDYIMELKNLYRGRIREYAEKYGCKYVEGAKPWGEKCDIALPSATQNELNGDHARQLVANGCIAVSEGANMPSTPEAVRVFQDAKILYAPGKAANAGGVSVSGLEMTQNSIKLSWSAEEVDEKLKSIMKNIHEACVQYGTEADGYVNYVKGANVAGFMKVAKAMMAQGIV

SEQ ID NO: 43536 - protein, 733 aa, Cytophaga hutchinsonii
MNDEKRLIIVAYRIPFKVTFKESGERVLQQNSGGLVSAILSLAEKGDVFGKNQKIHWFGYSTPDILQEGETQVENENFIVHPVLIEDALNDAYYEGFCNSTIWPISHYYPYLTSFNEEDYEAYVKANKIFADQINAFIRPGDMVWIQDYQLMLLPGMLRSENPDASIGYFHHIPFATFEIFRLLPKQWQTELLKGMIGADLVGFHTNDYSQYFLRSVQRVLGYDTTARDISIPNRIVRVDTFPISIDYNKFQELYNDPGVIEKRKEFLKDLSAEKNIFSVDRLDYSKGLIHRLNGFEYFLDQYPQWHTRVVLTMIVVPSRETILKYAEMKHELEEAVGRINGKYGTLGWRPVIYLYRSLSFEELGALYTLADVALITPIRDGMNLVAKEFVATRTDKKGVLILSEMAGASLELNGAILINPTDKRTLAAAIIQALTMDEQEQTQRMQMMQDRIRVYDIFKWTEDYMDQLDIIKLKQMEFEEKIINQDVLKSFKQIFDESSRRLFLLDYDGTLSPIVPDPSSSKPSVGIVDVLKKLSSDFNVNVAIISGRDKEFLNYIFDPNTILSAEHGAFLRIPGQDWELQYDYNDQWKRSVLPVFQKYTDRCAGSFIENKSTSLAWHYRNTEKEYAHIRSREFIEELENKVGIKSNLAIIDGDKVIEMKPSDVDKGIAARKICDLYQPDFILSIGDDRTDEDMFKALPDNALTIKVGVKNSSAKFTIKTQEEVMTILNTFL

SEQ ID NO: 43537 - protein, 236 aa, Triticum aestivum
AANTERPSLVVNNLFIGGALAARSKYTLQHLGITHILCLCSNEIGQSDTQFPDLFQYKNFSISDDDDANISDLFEEASDFIDQVDRVGGKVLIHCFEGKSRSATVVLAYLMLRKGFTLAKAWNLLKKVHRRAQPNDGFAKALLALDKKLHGKASMDWQQKRPEMKVCPICGKNVGLSTSSLKLHLQKAHRRLSQGSVDSAMTMEIQKSIESLRISRGGSLSPSQKLAKAFADELTF

SEQ ID NO: 43538 - protein, 325 aa, Polaromonas sp. JS666
MMSALAQPLPYRVVAIDDGYAGYDQEIRLLGEAQASFELRPCRGSEEAAILAVRGADVVLVRESSVSRRVIDAMDRCKAVIRYGIGVDNIDMAAAAARRIAVANVPDYGTDEVSTQTVALALAVVRQVVSHDREVRSGRWSTGVIKPMYRLRGRTLGLIGYGRIARMTHEKFSGFGFGRVLVNDPCPELPDGVQAADVDDICREADIISLHAPLTAQTRHIIDARRLGLMRPTAIVVNTSRGGLIDLDALYRALSEGRILGAGLDVFETEPPDPAHPLFALTNVAVTNHIGWYSEEAMRELQLKTTQEAARVLRGEAPRNWLNRW

SEQ ID NO: 43539 - protein, 164 aa, Neurospora crassa
MAASNTSSGNRSMESRTGRTKQRYNTKGERLVAGVVPLSADKYYVMLIQSTRRKGWVLPKGGWELDEECHEAAAREAWEEAGIVVQINYDLGDIQDTRPPKKNPLKEKERSLYRFFEATVTSEEPEWPEKDKRERKWYTYAEATELLKERPELQAALDLSTIKR

SEQ ID NO: 43540 - protein, 282 aa, Coluria geoides
GLPPAMSANGHRVMTVSPRYDQYKDAWDTEVTVELQVGDKIETVRFFHCFKRGVDRVFVDHPLFLEKVWGKTASKIYGPVTGEDYKDNQLRFSLLCLAALEAPRVLNLNSNKYFSGPYGEDIIFVGNDWHTGLLPCYLKAKYQSKGIYMSAKVAFCIHNIAYQGRFAFEDFSLLNLPDSFKSSFDFIDGYDKPVEGRKINWMKAGMLESNIVLTVSPYYAKELVSSSDKGVELDNIGRKVGVHGIVNGMDVQEWNPLTDKYTDVKYDATTVMDAKPILKEAL

SEQ ID NO: 43541 - protein, 449 aa, Neurospora crassa
MREIISLNVGQAGCQIANSCWELYCLEHGIQPDGYLTEERKAADPDHGFSTFFSETGNGKYVPRTIYADLEPNVIDEVRTGAYRGLFHPEHMISGKEDASNNYARGHYTVGKELIDQVLDKVRRVADNCSGLQGFLVFHSFGGGTGSGFGALLMERLSVDYGKKSKLEFCVYPAPQTATSVVEPYNSILTTHTTLEHADCSFMVDNEAIYDICRRNLGLERPNYENLNRLIAQVVSSITASLRFDGSLNVDLNEFQTNLVPYPRIHFPLVAYAPVISAAKAAHEANSVQEMTMSCFEPNNQMVKCDPRHGKYMATCLLYRGDVVPNDAHAAVATLKTKRTIQFVDWCPTGFKLGICYQPPHQVPNGDLAKVNRAVCMLSNTTAIAEAWSALSSKFDLMYSKRAFVHWYVGEGMEEGEFSEAREDLAALERDYEEVAADSMEGEDVEAEY

SEQ ID NO: 43542 - protein, 309 aa, Polaromonas sp. JS666
MKTDILALGEAMVEFNQTSEDGGRKYLQGYGGDTSNAAIAAARQGASVGYVSAVGDDVYGQMLRELWTREGVNHSGVRTDARGFTAVYFVNHDERGHHFSFFRRGSAASRMTPDQLPAERIADARFLHLSGISAAISESACDTCFAAIDIARSAGVKVSFDTNLRLKLWPLARAGAVMRELIRQADICLPSYEDVVAISGLQDPDRLADFCLELGARVVALKLGSDGALLVDGNKRIRIPPFPCRPVDATGAGDTFGGALLARLAAGDDLETAGYYAAVAAALSTEGYGAVEPIPVAGQVRAAIERQAV

SEQ ID NO: 43543 - protein, 374 aa, Nostoc sp. PCC 7120
MVSGLQANQGKIGVAIAGTGFGQKVHIPAFQAHHRTDIVAIYHRDIHKAKAIAEANNIPHAFDTIADTVNLPEVQAVSIATPPFLHYEMGKTVLQAGKHLLLEKPVTLNVAEAQELYQLAKKQGVIATVDFEFRFVPAWQLFAELLSSGYVGTPRLIRIDWLGSSRADTSRPWNWYSSKEKGGGALGSLGSHAFDYIYWLFGSVRRLNAHLTTAIPQRIDSISGELKAVETDDTCLLSLELANGTPCQVTISAAVHASRTHWMEVYGDRGTLVIGSENQKDYIHGFRVWGSQPGQPLQEIEIPPKLLFPQHYTDGRICAFLRVVDQWVQGIDQQKPIVPSLKEGIYSQLLMDLSHQSYITASWVDVPNVEDYLI

SEQ ID NO: 43544 - protein, 282 aa, Geum heterocarpum
GLPPAMSANGHRVMTVSPRYDQYKDAWDTGVTVELQVGDNIEIVRFFHCFKRGVDRVFVDHPLFLEKVWGKTASKIYGPVTGEDYKDNQLRFSLLCLAALEAPRVLNLNSNKYFSGPYGEDVIFVANDWHTALLPCYLKAKYQSKGIYMSAKVAFCIPNIAYQGRFAFADFSLLNLPDSFKSSFDFIDGYDKPVKGRKINWMKAGMLESNIVLTVSPYYAKELVSSIDKGVELDNIGRKVGVHGIVNGMDVQEWNPLTDKYTDVKYDATTVMDAKPILKEAL

SEQ ID NO: 43545 - protein, 738 aa, Oryza sativa
  misc_feature (719)..(719): Xaa can be any naturally occurring amino acid
  unsure (1)..(738): unsure at all Xaa locations
MLDLRIRFGGGSEGAGSVAFWMWIPPPHSLASEVISWRSIWRGGNTVYRPLSMELCTSSVSGSVQWSRISAFDCRTRSHGYASSSSWVCQRRRKTSFYVMNAASTGALPPTKKLIPRTNVRNISGDKPSSALEQLDIERGVCIPFRKYTPEMVLNTSNGYIYRVRNRVLGSRGSVLSLASRGVEIIWKLGLYWSALMYDFLVGRDEEIVPFRARQLRNLLCDLGPSFIKAGQVLANRPDIIREDYMNELCILQDDVPPFPNQVAFSIIEEELGQPLERLFSRISSRTIAAASLGQVYRATLRETGEDVAIKVQRPGIEPIIYRDLFLFRTLASFLNGISLQKLGCNAELIVDEFGEKLLEELDYTLEATNIEDFLENFKDDPTVKIPQVYKQYSGSRVLVMEWIDGIRCTDPQAIKEAGIDVEGFLTVGVSAALRQLLEFGLFHGDPHPGNIFAMRDGRIAYVDFGNVAVLSQQNKQILIDAVVHAVNEDYAEMANDFTRLGFLASGTDVSPIVPALEAIWQNSAGKGLADFNFRSVTGKFNQLVYNYPIRIPERFSLVIRSLLTQEGICFTLQPDFKFLEVAYPYVAKRLLTDPNPALRERLIQVLFKDGLFQWKRLENLIVLAKENVSKMSSNPALKKNSSQIERNRQMEKKLDLTDTIKDGARLFLIDAGIRRQLIMAFTEDSKLHVEELVDVYRLVEDQIDIPSVALEGGPGTQXVARDFMLSWSDSILSDRQY

SEQ ID NO: 43546 - protein, 282 aa, Geum reptans
GLPPAMSANGHRVMTVSPRYDQYKDAWDTGITVELQVGDKIETVRFFHCFKRGVDRVFVDHPLFLERVWGKTASKIYGPVTGEDYKDNQLRFSLLCLAALEAPRVLNLNSNKYFSGPYGEDVMFVANDWHTALLPCYLKAKYQSKGIYMSAKVAFCIHNIAYQGRFAFADFSLLNLPDSFKSSFEFIDGCDKPVKGRKINWMKAGMLESNIVLTVSPYYAKELVSSIDKGVELDNIGRKVGAHGIVNGMDVQEWNPLTDKYTDVKYDATTVMDAKPILKEAL

SEQ ID NO: 43547 - protein, 1533 aa, ASPERGILLUS NIDULANS FGSC A4
MDGQRQQPYVPAPPPSASQPSQAHIMPLPPPPPRYPPAQPQNVMPPPPPGPPPGSAYGTSKLTNPQLQSQSTLGWSNWGGRGIPQYLPPPPPPPMTHANQSSFARPSAVQNNNATSATYVPQPGTFGPGVGIPPFDVPSHSYDAPNTMVASERPRPPPNAPYGHGTSNASAYQLDGTIPSTPLTHTAPFSHETSHDVPSSAVPTGSPFKSVPQSASQANDLTKSSSHRHNNSNTTVGGMSASEAAVQWPLDRVLLWLAKNGFSHEWQETFKTLEIEGADFLELGHGQNGRPNLGKMHTVVYPQLAKECEANGTAFDLTRERDEGKRMRKLIRLIHDDAGPDNGGTFNKQHDFDDGHGSVPDEGPEFSPNINNVAQAPGSPSLNATNVSNSPNLKAPKYSHKPRSFTTPGSISHDSTTAELAMTEGSSTMLPRSDFSRNVLGTIGIDHQRKSPSMSSDNGVFAIPPHRPHEGSPKSGSPAAQHATLYAAPVSSATDLNAKYDARFGHNRVNSGERRYYETLKHDGSRPSPQTTQTAGDNASSYPKDHRMGFLNFFKKKSARNSDPNNPSPDDNTPDSPIYSKYHFNSSDVSVNERPLSASLSDYERMMMVRTKPAHRGKRFIFATMDGWNYRLIDTTDIDSVEKLRASICQNLGIYDWPDAQIFLTEPGQLEHDEPLNDTFLTLCQRSKSDSIGSLKLFVKTPHNVAGLGVSMPDRSAVSPTSAIPRKPLDGEAASRLSPLKPSSPQQLKPPASRLPLRDIQNSAAGTSPVDGEPDGSLQDQERKPQKSYRPTPAPLPRPDAYSETGYRRKEVINFDKPRISPYEDKKSEVLVPFRKPPSAPQESNTLSKVNSLRKKDGDRPRPHRSNQPPGIKEMMADMGMMSSLIGKPSSPNSGNTTATEDAHSSIDSAVDKSSQSTPPLTNTSYSPTTTATTTTTTTTASSSLSRSASQKRKSVGPEFDFEETQVSFQRSPALEEDSDDDSDDGLFAIPLANTKNSVKPGSPDTQARPRKPSLTVDTEAKPRTGLSVSFKSPSATRETFASSGGDASNSTAPYFIASNSPEEEKTPIRRNSLRNSFATGDVWASRPPVEGVIDQLDDFFPDIDLDAPYLDEQGTSPPSSPASKVAIDNELNRKDKQENSHHGMQPPPAPEDNTLGSSEPTMTSHGQGIVARRNVSRSGGGLTRMKSIREVAKGANQATRQRSVAASSGNKRSGDVHRRKSTKMFGAKIMQISPRRGSQLSQLDPIPQNSISSSSKPQRQPTFRIIRGQLIGKGTYGRVYLGMNADNGEVLAVKQVEINPRLAGQDTDKIKEMVAALDQEIDTMQHLEHPNIVQYLGCERGELSISIYLEYISGGSIGSCLRKHGKFEESVVKSLTRQTLEGLSYLHNQGILHRDLKADNILLDLDGTCKISDFGISKKSNDIYGNDSSNSMQGSVFWMAPEVIQSQGQGYSAKVDIWSLGCVVLEMFAGRRPWSKEEAIGAIFKLGSLSQAPPIPDDVSMNVTPAALAFMWDCFTVSNPSYSSFLRARSEV

SEQ ID NO: 43548 - protein, 406 aa, Vibrio vulnificus YJ016
MSVTASQVHGAVQTLTQSSDTLFLLLGAIMVFLMHAGFAFLEVGTVRHKNQVNALVKILADFGISTLAYFFIGYWVAYGAHFFADAETLAQGNGYELVKFFFLLTFAAAIPAIVSGGIAERARFYPVLIATFFTVGIVYPLFEGIIWNGNFGVQAWFEATFGVGFHDFAGSVVVHGVGGWIALVAVIFLGMRRGRVRAGKHTNFAPSNIPFLALGAWILCVGWFGFNVMSAQTLNGISGLVAMNSLMAMAGGIVAALIAGKNDPGFIHNGPLAGLVAVCAGSDLMHPLGALVTGSVAGVLFVYLFTYLQNKTKIDDVLGVWPLHGVCGAWGGIAAGIFGQSSLGGLGGVSFTVQLLGTLLGISVALIGAGIVYGAINRFSGLRLSQEDEFNGADLAIHKISSVNAE

SEQ ID NO: 43549 - protein, 585 aa, ASPERGILLUS NIDULANS FGSC A4
MADIATRELRQPIDIAEYLFRRLHEVGIRSVHGVPGDYNLAALDYLPKCGLHWVGNCNELNAGYAADGYARVNGIAALVTTFGVGELSAINAIAGAYSEFVPIIHIVGQPHSRSQKDGLLLHHTLGNGDYNVFSSMNKGISVTTANLNDTYDAATLIDNAIRECWIHSRPVYLALPTDMITKKIEGERLKTPIDLSLPANDPEKEDYVVDVVLKYLHAAKNPVILVDACAIRHRVLEEVHDLIEVSGLPTFVAPMGKGAVNETHRCYGGVYAGTGSNPGVREQVESSDLILSIGAIKSDFNTAGFSYRIGQLNTIDFHSTYVRVRYSEYPDTNMKGVLRKVIQRLGFIKADPVPHISNALPEHEKNSSEQRITHAWMWPMVGQWLKENDIVITETGTANFGIWDTRFPSGVTAISQVLWGSIGYSVGACQGAALAAKEQGNRRTVLWVGDGSLQLTLQEISTMIRNNLNPIIFVICNEGYTIERFIHGWDESYNDIQTWDIKGLPVAFGGKGRYKGYKVTTRDELTKLFASEEFSSAPCLQVSLCDLTHYLSDANFEQLVEVHMPREDAPASLKITAEAAASRNK

SEQ ID NO: 43550 - protein, 455 aa, Picrophilus torridus DSM 9790
MLKRFPERGIPLDEINSILDGYGKNDIKNSRGRLFTYFYDPGLKDLDDLSSILLKFYNRNGMDYHAFPSTLKIENDLISMMSDLMHGNDDTSGTFTTGGTESILLAMKAARDLFLEKKEYVPEIVAPVTAHPAFSKAAKYLGMKITRVPVNEDYIADDTINEYINDRTAAVIASAPSFPYGGIDNIKDISEIALDKNTWFHVDACVGGMILPFLKGLGLNIKDFDFKLPGVSSMSIDLHKYGFTPKGSSVVLYKNHDLRKRQIYVNADWPGYPMSNMGMQATKSAGPLAGSWATLNYLGLDGYKKLAEKTLKAYRMIRSGITDLGYKIIGRPDATIFAFTHNDKDIIDLGIKMIENGWYPQIQPGNVFIDMPDSVHLNISPVHLDVADEFLEFFNELDKNVKPRDKNSYNVNSVEKALEMIKMEKSMLFRIIRYSRPEVSEKIFLEMTDEDFTYS

SEQ ID NO: 43551 - protein, 469 aa, Xylella fastidiosa 9a5c
MFLPRPDFRIALFICFMAVSFVISRFGSEVRPTLLLALPLVLGHVSTGLIGFVLNVIAGHHSTVTLAASTIGTALLWLPMLVPMGTLISLTVLVSQLHGAERERDIGPLFRQALWLAMLLGLVMFTFLSVVPALLPLFGIVPDIVPGAAKFLHVVRWGSLAFPLYFCMRYFCEGMHCTFPTMLLGFGGLLVLVPLSYALTYGRFGFSEYGVEGLGIATVMVMWLQAVVFALYLWRSRRFAHLQLFAHLELPCWARIRDLLNIGLPIGISILMEGGLFIVTTLLIGRFGTDEIAAHQIALSVAQLCFMIPMGVAEATTVRIGHAVGRCDLLVMRRVAWAGYAIVIGTQTLSASVLLLGYDVIVAAYTDDLVVASLASKLLLFAAIFQFPDGLQMLSSGVLRGMKDTRVPMLLAMISYWGLGMPLGLGLGFALEWNSRGMWIGLIIGLTAAAVLLGWRFRVVSERMFAGIP

SEQ ID NO: 43552 - protein, 497 aa, Vitis labrusca x Vitis vinifera
MKKSSAGAPSKPTKPAWVLPYKTQDLRTLYTIGQKLGQGQFGTTFLCTDKATGHNYACKSIPKRKLFCKEDYDDVWREIQIMHHLSEHPNVVRIRGTYEDPVFVHLVMELCEGGELFDRIVQRGHYSEREAAKLIKTIVGVVEGCHSLGVMHRDLKPENFLFDTTAEDAALKATDFGLSVFYKPGETFSDVVGSPYYVAPEVLCKHYGPEADVWSAGVILYILLSGVPPFWAETETGIFRQILQGKLDFESEPWPCISETAKELLRKMLDRNPKKRLTAHEVLSHPWVVDDRMAPDKPLDSAVLSRLKQFSAMNKLKKMALRVIAEGLSEEEIGGLRELFKMIDTDNSGTITFDELKDGLKRVGSELMESEIRDLMNAADIDNSGTIDYGEFLAATVHLNKLEREENLVSAFSFFDKDKSGYITIDELQQACKEFGLSEAHLDDMIKEIDQDNDGQIDYGEFAAMMRKGNGGIGRRTMRNNLNLGDVLGIPDMRLTN

SEQ ID NO: 43553 - protein, 616 aa, Bordetella bronchiseptica RB50
MAGPWQMARNKLDLRGSAFKAVLGFTFRHWARQPWRIGLIAMLALLSALADILTPLYVGRLIDAVAGGAPADTVARNAALGAFWLLIALGVGATLLRQAIFMNIIALTLKMMHDIAGLAFHQVQRLSSDWHANTFAGSTVRKITRGMWALDLLNDTLLIALLPSLAMLAGATALLGWHWPLMGLVVGMGSLLYVAVTMALSLGYVAPAARLGNAWDTRMGGALADAVSCNAVVKAFGAEWREEARLARVTGKWRHRTRRGWVRGTINGGVQGAMLVAMQAAILGVALLLWQRGQASVGDVTFAFTTFFMLQGYLRDVGMNIRNLQRSINDMEELVSLQRQPLDVEDLPGAGPIDIGAGEIRFENVTFRYGPHEQPLYRDFSVRIAPGERVGLVGHSGSGKTTFIKLIQRLYDVDGGRITIDGQDIAAVRQASLRSQIAIVQQDPVLFHRSLAENIAYGRPGATQAEIERAARLASAHDFIMALPKGYDTLVGERGVKLSGGERQRVAIARAFLADAPILILDEATSSLDSESEVLIQRAMERLMEGRTTLVVAHRLSTVRALDRLLVMDRGRVIEEGSHEALIRLHGGVYRRLFERQALELTRGLSQWELGGAAAS

SEQ ID NO: 43554 - protein, 230 aa, Dehalococcoides sp. CBDB1
MPEHKILVVEDDATLRELLCYNLAKEGYQLECAEDGLKALSVYRLFKPALVILDVMIPGIDGFELCRLIRAESSVPILMLTARSSEADKVNGLEAGADDYLSKPFGMKELLARMKALLRRSQMQNSPAEPAGGLKIGDLEIFIERHLVIRNGVALDFSPKEFDLFSFLVQNRYRVFSREQLLEKVWGYDYPGGTRTVDVHISWLRQKIEADPSKPRHLITVRGTGYKFEE

SEQ ID NO: 43555 - protein, 175 aa, Triticum aestivum
  misc_feature (24)..(24): Xaa can be any naturally occurring amino acid
  unsure (1)..(175): unsure at all Xaa locations
MAPAVMASSATTVAPFQGLKSTAXGLPVGRRSSGSLGSVSNGGRIRCMQVWPIEGIKKFETLSYLPPLSTEALLKQVDYLIRSKWVPCLEFSKVGFVFREHNSSPGYYDGRYWTMWKLPMFGCTDATQVLNEVEEVKKEYPDAYVRVIGFDNLRQVQCVSFIAFRPPGCEESGKA

SEQ ID NO: 43556 - protein, 457 aa, Oryza sativa
MMELEKNGNILLRRYEIGKLLGQGTFAKVYHGRNIVTSQSVAIKVIDKDKIFKVGLMDQIKREISVMKLVRHPNIVQLYEVMATKSKIYFVLEYVKGGELFNKVAKGRLKEDAARKYFQQLVSAVDFCHSRGVYHRDLKPENLLVDENGNLKITDFGLSALAESRRQDGLLHTTCGTPAYVAPEVISRKGYDGVKVDTWSCGVILFVLMAGYLPFQDSNLMEMYRKIGKAEFKCPAWFSSDVRKLVSRILDPNPRSRMPITKIMETYWFKKGLDSKLILKNVETNEPVTALADVNVVFSSMGSSSSKKTEEKQDAGKLTNLNAFDIISLSEGFDLSGLFEETDKKKEARFTSSQSASAIISKLEDVASCSKLTVKKKEGGVLKMEGASEGRKGVLAIDAEIFEVTPSFHLVEIKKNNGDTLEYQHLWKEDMKPALKDIVWAWQGERQDQQPEDHGQP

SEQ ID NO: 43557 - protein, 473 aa, Nicotiana tabacum
MASRIVLQQQNRGEAVPGAVKQKKNMAPEGRNRKALGDIGNVATGRGLEGKKPLPQKPVAVKVKGANVAKVPAARKPAQKKATVKPNPEDIIEISPDTQEKLKEKMQRKKADKDSLKQKATLTSTLTARSKAACGLSKKPKEQVVDIDAADVNNELAVVEYVEDIYSFYKLAENETRVHDYMDSQPEINDRMRAVLIDWLVEVHQKFELNPETLYLTINIVDRYLAVKTTSRRELQLLGISAMLIASKYEEIWAPEVNDFVCISDKSYTHDQVLAMEKEILGQLEWYLTVPTPYVFLARFIKASLPDSEIENMVYFLAELGLMNYATIIYCPSMIAASAVYAARHTLNRTPFWNETLKLHTGFSESQLIECARLLVSYQSAAATHKLKVIYKKYSSPERGVVSLLTPAKSLLAASSSSVLSEQADLRKSTEAAATSSSKMVVVGCQRCHMYVMVTEADPRCPQCKSTTTRKMT

SEQ ID NO: 43558 - protein, 426 aa, Vibrio parahaemolyticus RIMD 2210633
MDLAFDRHHIWHPYTSTLTPLTCYPVSSANGVHIKLEDGTELVDGMSSWWSTIHGYNHPHLNQAAHQQIDQVSHVMFGGITHQPAISLCKKLLSLAPNNLEHVFLADSGSVAVEVSLKMALQYWHAKGERRPKFLTLRHGYHGDTFAAMSVTDPDNSMHSLYKGFLPEHIFAQSPTCGYWDEWKPEDLADFEHKIDSHHQELAAVILEPIVQGAGGMRIYHPEFLKGVRRLCDKYDLLLIADEIATGFGRTGKLFACEHADIQPDILCVGKALTGGYMTLSATLASKHVADTVCGGDAGCFMHGPTFMGNPLACAVATASLELIEQGDWQQQTQQIEMLFSELLPKLEEYDLVKNTRWLGAIGVVETHRPVNMETIQALFVEHGVWIRPFGNLIYMMPPFISKPEDIEKLINAIDAALQRKDCFAS

SEQ ID NO: 43559 - protein, 395 aa, Vibrio parahaemolyticus RIMD 2210633
MLHVQLKTIFSTMPAFKSRIESALAARKAQGLNRSMNVVFAGNQSILEHEGRRYINFSSNDYLGLANDQALVRAWQQGLSVYGSGSGASPMVTGFSAAHSNLEAALTEWLGFERAILFGSGFSANQALLFTLLEKSDVLIQDRLNHASLMEAGALSTAKMKRFKHNDIKHLETLFTNEGNHLVVTEGVFSMDGDCAPLKDIAEVARLRNAWLAVDDAHGIGVLGEAGGGSCELANVKPEILVVTFGKAFGMSGAAILCDQATGDFLTQFARHHVYSTAMPPAQAYALTHAVSMIQEQSWRREKLVELNEVYQTNLSDLDGFVETDTPIKPFVIGESELALQVANACRQNGIWVTAIRPPTVPKGTSRLRITLTANHSTEQVKTLSIALKQALGAL

SEQ ID NO: 43560 - protein, 126 aa, Brassica napus
  misc_feature (2)..(2): Xaa can be any naturally occurring amino acid
  misc_feature (13)..(13): Xaa can be any naturally occurring amino acid
  misc_feature (15)..(15): Xaa can be any naturally occurring amino acid
  misc_feature (35)..(35): Xaa can be any naturally occurring amino acid
  misc_feature (102)..(102): Xaa can be any naturally occurring amino acid
  unsure (1)..(126): unsure at all Xaa locations
SXRESARRSRMRXQXQLGDLINEVTVLKNDNAKIXEQVDAATRRYVEMESKNDVLRAQAVELTERLRSLNSVLEMVEEISGQALDIPEIQNPWQIPCPIMQXPIMASADMFECSEDLLIGLSVRVL

SEQ ID NO: 43561 - protein, 395 aa, Thermus thermophilus HB27
MSLDLRARVRDELERLKREGLYISPKVLEAPQEPATRVEGREVVNLASNNYLGFANHPYLKEKARQYLEKWGAGSGAVRTIAGTFTYHVELEEALARFKGTESALVLQSGFTANQGVLGALLKEGDVVFSDELNHASIIDGLRLTKATRLVFRHADVAHLEELLKAHDTDGLKLIVTDGVFSMDGDIAPLDKIVPLAKKYRAVVYVDDAHGSGVLGEKGKGTVHHFGFHQDPDVIQVATLSKAWAGIGGYAAGARELKDLLINKARPFLFSTSHPPAVVGALLGALELIEKEPERVERLWENTRYFKRELARLGYDTLGSQTPITPVLFGEAPLAFEASRLLLEEGVFAVGIGFPTVPRGKARIRNIVTAAHTKEMLDKALEAYEKVGKRLSIIR

SEQ ID NO: 43562 - protein, 246 aa, Arabidopsis thaliana
MEDGASNEVAESSKKIGRGKIEIKRIENTTNRQVTFCKRRNGLLKKAYELSVLCDAEVALVIFSTRGRLYEYANNSVRGTIERYKKACSDAVNPPTITEANTQYYQQEASKLRRQIRDIQNLNRHILGESLGSLNFKELKNLESRLEKGISRVRSKKHEMLVAEIEYMQKREIELQNDNMYLRSKITERTGLQQQESSVIHQGTVYESGVTSSHQSGQYNRNYIAVNLLEPNQNSSNQDQPPLQLV

SEQ ID NO: 43563 - protein, 437 aa, Nostoc sp. PCC 7120
MRRIGEKHMVSMPTLPLEGASPAHICPFDQACSYLEAAAKELRLDQGALEILSHPRKVVTVSIPVRLDNGDIRVLAGHRVQHSDILGPYKGGTRYHPAVTLREVSALAMLMTWKCALLGIPYGGAKGGIAIDPEHYSVGELERITRRYTSELIKDIGPSVDIPAPDVGTSAREMAWMMDTYSMNVGHAVPGVVTGKPISIGGSRGREMATGRGVMIIVREALADMGRTLEGVKVVIQGFGNVGGAAAELLYQAGAKILAVSTGAGGLFASDGLDIPALKAYAAENHRSIVGFPQAVPISNAELLTLPCDVLIPAALENQITEENVDQIQAQIVAEAANGPVTLEANRVLEGRGVTVLPDILANAGGVVVSYLEWVQGLSYLFWDEERVNREMEHLMVQAYHQVIKQSQMRQVPLRLAAYTLGVGRVAQALSDRGLYP

SEQ ID NO: 43564 - protein, 282 aa, Geum reptans
GLPPAMSANGHRVMTVSPRYDQYKDAWDTGITVELQVGDKIETVRFFHCFKRGVDRVFVDHPLFLERVWGKTASKIYGPVTGEDYKDNQLRFSLLCLAALEAPRVLNLNSNKYFSGPYGEDVIFVANDWHTALLPCYLKARYQSKGIYMSAEVAFCIHNIAYQGRFTFADFSLLNLPDSFKSSFDFIDGYDKPVKGRKINWMQAGMLESNIVLTVSPYYAKELVSSIDKGVELDNIGRKVGVLGIVNGMDVQEWNPLTDKYTDVKYDATTVMDAKPILKEAL

SEQ ID NO: 43565 - protein, 665 aa, Pseudomonas syringae pv. syringae B728a
MPSRRERANAIRALSMDAVQKANSGHPGAPMGMADIAEVLWRDYLKHNPANPSFADRDRFIMSNGHGSMLVYSLLHLTGYDLSIDDLKNFRQLHSRTPGHPEYGYTPGIETTTGPLGQGFANAVGFAAAEKTLAAQFNRPGHSIVDHHTYVFMGDGCMMEGISHEAASLAGTLQLNKLIAFYDDNGISIDGEVEGWFTDDTPKRFESYGWLVIRNVDGHDPEEIKTAIETARKSDQPTLICCKTTIGFGSPNKQGKEESHGAPLGADEIALTRAALKWNYGPFEIPADIYAEWNGKEKGLAAEAEWDQRFADYSAAFPELANDFIRRMSGQLPADFAEKSAAYVAEVNAKGETIASRKASQNALGALGPLLPEILGGSADLAGSNLTIWKGCKSITGEDPNGNYLHYGVREFGMGAMMNGIALHGGFVPYGATFLIFMEYARNAVRMASLMKKRVIYVFTHDSIGLGEDGPTHQPIEQLTSLRTTPNLDTWRPADAVESAVAWKHAIERDDGPSALIFSRQNLTHQARDEKQLSYIARGGYVLRDCAAEPELILIATGSEVGLAVQAYDKLTEQGRNVRVVSMPCTSIFEAQDAAYKQAVLPLQVSARIAIEAAHADYWYKYVGLEGRVIGMTTFGESAPAPALFEEFGFTLENVLSTAEELLED

SEQ ID NO: 43566 - protein, 623 aa, Neurospora crassa
MPSTKNANGEGHFPSRIKQFFRINSGSKDHKDRDAHTTSSSHGGAPRADAKTPSGFRQSRFFSVGRLRSTTVVSEGNPLDESMSPTAHANPYFAHQGQPGLRHHNDGSVPPSPPDTPSLKVDGPEGSQQPTAATKEELARKLRRVASAPNAQGLFSKGQGNGDRPATAELSKEPLEESKDSNTVGFAEQKPNNDSSTSLAAPDADGLGALPPPIRQSPLAFRRTYSSNSIKVRNVEVGPQSFDKIKLIGKGDVGKVYLVKEKKSGRLYAMKVLSKKEMIKRNKIKRALAEQEILATSNHPFIVTLYHSFQSEDYLYLCMEYCSGGEFFRALQTRPGKCIPEDDARFYAAEVTAALEYLHLMGFIYRDLKPENILLHQSGHIMLSDFDLSKQSDPGGKPTMIIGKNGTSTSSLPTIDTKSCIANFRTNSFVGTEEYIAPEVIKGSGHTSAVDWWTLGILIYEMLYGTTPFKGKNRNATFANILREDIPFPDHAGAPQISNLCKSLIRKLLIKDENRRLGARAGASDIKTHPFFRTTQWALIRHMKPPIVPNQGRGIDTLNFRNVKESESVDISGSRQMGLKGEPLESGMVTPGENAVDPFEEFNSVTLHHDGDEEYHSDAYEKR

SEQ ID NO: 43567 - protein, 370 aa, Cucumis melo
QMGLAENQLSFEFVEKWMKNNPQASICSVEGIDEFKDIAIFQDYHGLPEFRNAVANFMGKVRGNRVKFDPDRVVMSGGATGAHETMAFCLADPGEAFLVPVPYYPGFDRDLRWRTGVEIVPVKCESSNNFKLTREALETAYEEAEKSNIRIKGLLITNPSNPLGTVYDRQTLETAVSFINEKNIHLVCDEIYAATVFSEPGFISISEVIDNMNDVECDRNLIHVVYSLSKDMGFPGFRVGIIYSYNDAVVACARKMSSFGLVSSQTQYLIASMLLDDVFVDNFLAGSAEKLAVRHRNFTKGLAQVGIGYLKGSGGLFLWMDLRHLLKEKTLEAEMALWKVVINQVKVNVSPGSSFHCSEPGWFRVCFANM

SEQ ID NO: 43568 - protein, 282 aa, Geum reptans
GLPPAMSANGHRVMTVSPRYDQYKDAWDTGVTVELQVGDKIETVRFFHCFKRGVDRVFVDHPLFLERVWGKTASKIYGPVTGEDYKDNQLRFSLLCLAALEAPRVLNLNSNKYFSGPYGEDVIFVANDWHTALLPCYLKARYQSKGIYMSAKVAFCIHNIAYQGRFAFADFSLLKLPDSFKSSFDFIDGYGKPVKGRKINWMKAGMLESNIVLTVSPYYAKELVSSIDKGVELDNIGRKVGVFGIVNGMDVQEWNPLTDKYTDVKYDATTGDGCKAYFERSP

SEQ ID NO: 43569 - protein, 282 aa, Geum vernum
GLPPAMAANGHRVMTVSPRYDQYKDAWDTGVTTELQVGDKIEMVRFFHCFKRGVDRVFVDHPLFLERVWGKTASKIYGPVTGEDYKDNQLRFSLLCLAALEAPRVLNLNSNKYFPGPYGEDVIFVANDWHTALLPCYLKAKYQSKGIYMSAKVAFCIPNIASQGRFAFADFSLLNLPDSFKSSFDFIDGYDKPVKGRKINWMKAGMLESNIVLTVSPYYAKELVSSIDKGVELDNIGRKVGVHGIVNGIDVQEWNPLTDKYTDVKYDATTVMDAKPILKEAL

SEQ ID NO: 43570 - protein, 446 aa, Methanosarcina acetivorans C2A
MEKDYDIIIIGTGTSGRTFADKVASSGLKTAIIDSREYGGVSPPIGCDPKKMFVDIAEITDWNNRLIGKGAGTQNPLKIDWPSLIEFRRTFTEKCSRKTENHFVELGIDTYHGKAYFENKNTVAVGEDKLKGEYIFLATGAKPRKLNIPGEEYIITSGEFMETEKLPERIIFIGGGHISMEFSHITLKAGSEAIILHRSEKLLKSFDSDMVNFLINESEAAGIKIFTNKPVIAVEKEGNSFLVRAGSESEIRSFRADMVVHGAGRVPYIEELHLEKAGVRVEGGAIEVDKHMRTSNPRIYAGGDCASEGMQLTPVAAYQGEVAAVNILTEDSVEADYKGIPSAVHTMPVLASVGISTVKDSDKYKIIFRDRSSEKTGRSEGADFVASKVIIDEANDRIMGAHILGPNAGEAINIFAAVMRLGLKASDMKKMIFSYPTVCSDIPYML

SEQ ID NO: 43571 - protein, 282 aa, Erythrocoma triflora
GLPPAMAAYGHRVMTVSPRYDQYKDAWDTGVTVELQVGDKIETVRFFHCFKRGVDRVFVDHPLFLERVWGKTASKIYGPVTGEDYKDNQLRFSLLCLAAPEAPRVLNLNSNKYFSGPYGEDIIFVANDWHTALLPCYLKARYQSKGIYMSAKVAFCIHNIAYQGRFSFADFSLLNLPDSFKSSFDFIDGYDKPIKGRKINWMKAGMLESNIVLTVSPYYAKELVSSNDKGVELDNIGRKVGVLGIVNGMDVQEWNPFTDKYTDVKYDATAVVDAKPILKEAL

SEQ ID NO: 43572 - protein, 366 aa, Triticum aestivum
MAATSRDAPVPPAMPDLVRDHLYFGDINDAIAALTASLPDGTYITHVLSVVSSASISFFTDYRPGLSLPTEEVRRVVAGEDGAPSAVAPGRLMRVVERTGEGLRVTRMAVPLKDTEEENLLDHLEPCLDFIDEGRKAGNVLVHCFAGVSRSATIITAYLMRTEQKSLEEALESLKEINESVCPNDGFLDQLKLFEEMGFKVDTSSSLYRRFRLKLLGQSYKVGEKIGNHVFEDDPGVARQPNPTQELSGKEKALKTAYRCKKCRRIAAAQDNVIGHTPGEGNSSFAWHDKRKGHTHNKEQDCSSLYVEPLKWMTPVEDGALEGKLSCIHCGARLGYFNWSGIQCNCGSWITPAFQISKSKVDVSTI

SEQ ID NO: 43573 - protein, 256 aa, Triticum aestivum
  misc_feature (61)..(61): Xaa can be any naturally occurring amino acid
  misc_feature (248)..(248): Xaa can be any naturally occurring amino acid
  unsure (1)..(256): unsure at all Xaa locations
QISFEFVMYVAQITAAIVILILSRHELPHAPLVAWIIGYTVGCTASLPLVYWRYVHRNRPXSEEEPEQPPTTYPTLTSSSSEGRNQRTSGTVLHLGCITIACPRPSILAYHSKTAVDCFFAIWFVVGNVWIFGGRGTSSDAQDAPNMYRLCLAFLALSCVGYAIPFIMCAAICCCFPCLISVLRLQEDLGQSRGATQELIDALPTYKFKPKRSKNWVLDHASSSENLSEGGILGPGTKKERVVSAEDXVCCICLTK

SEQ ID NO: 43574 - protein, 276 aa, Geum montanum
GLPPAMAANGHRVMTVSPRYDQYKDAWDTGVTVELQVGDKIETVRFFHCFKRGVDRVFVDHPLFLERVWGKTASKIYGPVTGEDYKDNQLRFSLLCLAALEAPRVLNLNSNKYFSGPYGEDVIFVANDWHTALLPCYLKARYQSKGIYMSAKVAFCIHNIAYQGRFAFADFSLLDLPDSFKSSFDFIDGYEKPVKGRKINWMKAGMLESNIVLTVSPYYAKELVSSIDKGVELDNIGRKVGVLGIVNGMDVQEWNPLTDKYTDVKYDATTVMDAKP

SEQ ID NO: 43575 - protein, 323 aa, Candidatus Blochmannia floridanus
MNQLDNLKKFSKISADTGDVDLIRTYQIQHATTNPSLILKSPLFTTYLKLFNDAIDYAQKIGGNQNTKITNASDRLIVNIGSEILANISGYISTEIDAQLSFNTDLTIKKAHKLITMYQKKNIDTSRVLIKIAATWEGIQAAEELEKSGIKCNLTLVFSFAQARACAERNIYLISPFIGRIYDWYNQRNLIKTSYINDDPGIQSIKKIYHYYKTYGYNTIIMGASFRRLEQILALSGCDYLTISPHFLKQLYQNTNSVTRQLFPPKTIISHHIPVLDQSEFFQEHNKNQMAVEKLNEGIQQFSIDQQKLHKLLLNNLNVQLQK

SEQ ID NO: 43576 - protein, 125 aa, Klebsiella granulomatis
REVMTTLWPFLEENPRYRQLALLERLVEPERVIQFRVVWVDDRNQVQVNRAWRVQFNSAIGPYKGGMRFHPSVNLSILKFLGFEQTFKNALTTLPMGGGKGGSDFDPKGKSDGEVMRFCQALMTE

SEQ ID NO: 43577 - protein, 664 aa, Candidatus Blochmannia floridanus
MLHEQMLANAIRILSIDCIQHANSGHPGAPMGMADIAEVLWREYMNHNPKNPNWINRDRFILSNGHASMLLYSILHLTGYKISIEDLKNFRQLHSKTPGHPEYKHTDGVEVTTGPLGQGLANAVGFAIAERTLANQFNRPLFNIIDHYTYVFVGDGCMMEGISHESCSLAGTMKLNKLIVLYDKNGISIDGSVEEWFSDNTAARFESYGWHVIPDVDGHNRKSINIAINQAKSILNKPSLIIFKTIIAFGSPNKSGQSCTHGSPLGTSEILATRNKLCWNEQTPFLIPQKIYKLWDATIIGQQKENIWNQMFLQYQKTYPDLAQELTRRVQCKLPIYWNTKIQKLIKQLSTNPQNIATRQSSQIVIEYISKYLPELLGGSADLTSSNLTTYSQSSSIIQNPSGNYIHYGVREFGMTAIANGISVHGGFLPYTATFLTFSDYSKNAIRMAALMNNRHIMIYTHDSIGLGEDGPTHQPIEQLSSLRMIPNLQIWRPCDQIETVIAWKTAIENTGPTVLILTRQTLKQQKNTIINMTNISKGGYILQDCYNTPELIIIATGSEIELAVNIYHQLTNEGYKIRIVSMPCTNIFDQQNATYREQVLPQTVTKRLAIEAGHSDLWYKYVGLHGKVIGINTFGKSAPAHDLFNFFGFTKNHILQEINILLQ

SEQ ID NO: 43578 - protein, 455 aa, Schizosaccharomyces pombe
MEANFQQAVKKLVNDFEYPTESLREAVKEFDELRQKGLQKNGEVLAMAPAFISTLPTGAETGDFLALDFGGTNLRVCWIQLLGDGKYEMKHSKSVLPRECVRNESVKPIIDFMSDHVELFIKEHFPSKFGCPEEEYLPMGFTFSYPANQVSITESYLLRWTKGLNIPEAINKDFAQFLTEGFKARNLPIRIEAVINDTVGTLVTRAYTSKESDTFMGIIFGTGTNGAYVEQMNQIPKLAGKCTGDHMLINMEWGATDFSCLHSTRYDLLLDHDTPNAGRQIFEKRVGGMYLGELFRRALFHLIKVYNFNEGIFPPSITDAWSLETSVLSRMMVERSAENVRNVLSTFKFRFRSDEEALYLWDAAHAIGRRAARMSAVPIASLYLSTGRAGKKSDVGVDGSLVEHYPHFVDMLREALRELIGDNEKLISIGIAKDGSGIGAALCALQAVKEKKGLA

SEQ ID NO: 43579 - protein, 222 aa, Glycine max; identical to SEQ ID NO: 911

SEQ ID NO: 43580 - protein, 317 aa, Salmonella enterica subsp. enterica serovar Typhi Ty2
MTDKLTSLRQFTTVVADTGDIAAMKLYQPQDATTNPSLILNAAQIPEYRKLIDDAVAWAKQQSSDRAQQVVDATDKLAVNIGLEILKLVPGRISTEVDARLSYDTEASIAKAKRIIKLYNDAGISNDRILIKLASTWQGIRAAEQLEKEGINCNLTLLFSFAQARACAEAGVYLISPFVGRILDWYKANTDKKDYAPAEDPGVVSVTEIYEYYKQHGYETVVMGASFRNVGEILELAGCDRLTIAPALLKELAESEGAIERKLSFSGEVKARPERITEAEFLWQHHQDPMAVDKLADGIRKFAVDQEKLEKMIGDLL

SEQ ID NO: 43581 - protein, 279 aa, Pseudomonas fluorescens Pf-5
MSLAVIQMVSQSDVLANLQQARSLLEQAAAGGAKLAVLPENFAAMGRRDMAAIGRAEALGEGPILPWLKQAARDLRLWIVAGTLPLPPVDQPEAKSNACSLLVDDQGQFVARYDKLHLFDVDVADNRGRYRESDDYAHGDRVVVADTPVGRVGLTVCYDLRFPELYSELRAAGAELITAPSAFTAVTGAAHWEVLIRARAIETQCYVLAAAQGGVHPGPRETYGHAAIVDPWGRIVAQQDQGQGVLLAERDSSEQASIRARMPVFSHRRIFSQGVQRLA

SEQ ID NO: 43582 - protein, 332 aa, Streptococcus thermophilus
MAILVLGGAGYIGSHMVDRLVEKGQEKVVVVDSLVTGHRAAVHPDAIFYQGDLSDQDFMRKVFKENPDVDAVIHFAAYSLVGESMEKPLKYFDNNTAGMVKLLEVMNECGVKYIVFSSTAATYGIPEEIPILETTPQNPINPYGESKLMMETIMKWSDQAYGIKYVPLRYFNVAGANLMVRLVRTRSETHLLPIILQVAQGVREKIMIFGDDYNTPDGTNVRDYVHPFDLADAHLLAVEYLRKGNESTAFNLGSSTGFSNLQILEAARKVTGKEIPAEKADRRPGDPDILIASSEKARTVLGWKPQFDNIEKIIASAWAWHSSHPKGYDDRG

SEQ ID NO: 43583 - protein, 347 aa, Bacteroides fragilis YCH46
MAQLNFGGVTENVVTREEFPLEKAREVLKNETIAVIGYGVQGPGQSLNLRDNGFNVIVGQRPGKTYEKAVADGWVPGETLFGIEEACEKGTIIMCLLSDAAVMSVWPTIKPYLTAGKALYFSHGFAITWSDRTGVVPQKDIDVIMVAPKGSGTSLRTMFLEGRGLNSSYAIYQDATGRAMERTIALGIGVGSGYLFETTFVREATSDLTGERGSLMGAIQGLLLAQYEVLRENGHTPSEAFNETVEELTQSLMPLFAKNGMDWMYANCSTTAQRGALDWMGPFHDAIKPVVQKLYNSVKTGNEAQISIDSNSKPDYREKLEAELKALRESEMWQTAVTVRKLRPENN

SEQ ID NO: 43584 - protein, 538 aa, Geobacter metallireducens GS-15
MKTKFIFVTGGVVSSIGKGLASASLGALLEARGLRVSMQKLDPYINVDPGTMSPFQHGEVFVTDDGAETDLDLGHYERYTSARLSKRSNFTTGQVYFSVIEKERRGDYLGGTVQVIPHITDEIKHKILENAKGADVAIVEVGGTVGDIESLPFLEAIRQFKADRGAGNVLYLHVTLVPYIKTAGELKTKPTQHSVKELREIGIQPDILICRCEKDLPHDMKAKIALFCNVEEKGVITSADAEHIYAVPLALHKQGLDDQVVDKLNIWTKAPDLAPWESVVEKLRNPLKGEVHIAIVGKYVNLTESYKSLAEALTHGGIANDCRVYLRYLDSEKLESEGLGGLLDDVDAILVPGGFGERGTEGKIKAIEYARTRKVPFFGICLGMQMAVVEYARNVCGLDNAFSSEFRPDCANPVIHLMEEQKGVERKGGTMRLGAYPCSLSKGTFAHRAYGSLDVSERHRHRYEFNNAFREILVSKGLVISGIYKEGDLVEIVEVADHPWFLGCQFHPEFKSKPLNPHPLFRTFIAAALEHRGKRSQA

SEQ ID NO: 43585 - protein, 351 aa, Bordetella bronchiseptica RB50
MKRTALIAGPYGIVGNALVQHLARDAAWDVVTISRRQEATLPGVRHIAADLLDAAQAEAALAAFPGITHVFYCAYAPRPTLGEEAAPNLAMLANLVSAVDRHARGLARVVLVHGTKWYGNHLGPFRTPAREDDARHCPPNFYYDQQDWIAARQRESGRWSWTAFRPHGIFGYALGSPMNHLMALSLYASVMKAAATPLKFPGTPAAFAALNQCTDARLLARAMAWSVDVAACENEAFNFHNGEPERWANLWPAVAEAFGMQAGGVQQIRLAAMMPANEAAWQAICQRQGLRHFPLEAYVNWAFADWVYSNGFDQVCSLYKLRRAGWTEILLFDDMLKSMLSDLRQRKLLPA

SEQ ID NO: 43586 - protein, 513 aa, Zea mays
MDKAYVAVLSVAFLFLVHYLVGRAAPGGGKGRKRLPPSPLAIPFLGHLHLVKTPFHSALGRLAERHGPVFSLRMGCRRAVVVSSPECARACFTEHDMSFANRPRFESMRLVSFDGAMLSVSSYGPYWRTLRRVAAVQLLSAHRVACMSPVICAEVRAMVRRMARLAAGGAARVQLRRRLFELSLGVLMETIARTKTSRSEACAADTDVSPEASELTRISEEIMPYLGTANLWDYLPFLRWFDVFGVRNKLMAAVRWRDAFLRRLIDAERRRMDGDGDGEKKSMIAVLLSLQKSEPELYTDTMIMALCGDLFGAGTETTSVTTEWAMSLLLSHPEALKKAQAEIDAVVGNSRRLITADDVPRLGYLHCVINETLRMYPAAPLLLPHESAADCKVGGYDVPRGTLLIVNAYAIHRDPAVWEDPGSFLPERFEDGKAEGRLLMPFGMGRRKCPGETLALRTVGLVLATLLQCFDWDTVDGAEVDMTESGGLTMPRAVPLEAMCKPRAAMCDVLREL

SEQ ID NO: 43587 - protein, 365 aa, Picrophilus torridus DSM 9790
MDVDLGLENTYIKHTKLTYIDGELGVLRYRGYDINDVVNNLSFMETAYLMLYGRIPDPKELKLFSSYIGDGKLPERIFSMIDTFPEGDPLSMASSVFAALAIDNNMKWSIDENKRNAGRIIGLSFNVFANIYLHIKGKKLYNIDLGDPVSGFLRVTNNMDQKNVKAFEAAMILYMDHEIPASTTAALVTASTLSDMLSSLSSAMNALKGPLHGGAAENAFLEFLDIGSPENVKPWFNEHIIKNRERLIGFGHRVYKTYDPRIKKFRELSMSLCDEKNRIILDTALELERVALDYFMEKKIYPNTDFFSGLLFNELGFEHWFFTSLFALSRVTGILAHIIEYNENEQRLIRPRAIYNGDGERFIKR

SEQ ID NO: 43588 - protein, 86 aa, Aeromonas hydrophila
VELTVQLHYRTPDHPEYGYAPGIETTTEPLGQGITNTVGMTITEKTMAEQFNQPGHDIVDHYTYAFMGDGCLMEGMLPRGLLPWPV

SEQ ID NO: 43589 - protein, 305 aa, Symbiobacterium thermophilum IAM 14863
MRHLFTFGDLVLDVVATASSALEADTDTPGDVRSAPGGSAANFAVWTRRLGSPVCFATRVGDDLLGRALVDDMRREGVEVHAAVDPVYPTAVLVLFSDGVQRHMMVPRGANHFFGPGDLPEERIRTAGWLHATGYAFFWDSTREALQRALAVAREAGVPVSFDPSSAGFIRRHGLDLPEGIRVLMPNRDEARALTGCADVKDAARELARRADLVAVKLGPEGALLARAGQLTYVPPVAPSAPAVDGTGAGDAWGAALIDGLRRGLDPYRAALRANRLGAEVVTRVGARPALSPEIMRQLEVERDA

SEQ ID NO: 43590 - protein, 727 aa, Physcomitrella patens
MAACTIVWFRRDLRLEDNPALIAAARAGTVVPVFVWSPAEDGQFHPGRVSRWWLKQSLTHLELSLKKLGSPLILRKSPDTLSVLLEIAEATGATQVFYNHLYDPVSLVRDHRVKQGLSQRGIVVHTFNGDLLYEPWEVYDEEGQAFTVYEAFWKKCMSMPFEPEAPLLPPRRLTGPIGKIVGCNAEELGLEDEFEKSSNALLARAWCPGWGFANKSLDSFLRSPLIDYARDRQKADGASGTPTSLLSPHLHFGELSVRKIFHEVRKRQITWAREGNAGGEASVNMFLRALGFREYSRYLSFHFPFTHERSLLANLKSFPWRADEGYFKAWRQGRTGYPLVDAGMRELWATGWAHNRIRVVVASFSVKFLQLPWRWGMKYFWDVLLDADLECDVLGWQYISGSLPDGHELDRIENPEVEGYRFDPDGDYVRRWIPELARLPNEWVHHPWDAPPSALRAAGVELGTNYPRPIVEIGAARERLQASLAEMWERDAAMKAALANGLEEGLGETVEVAGTGGPEHERMDVPRVMVHMQRDADMSCNSSRRDQLVPEIVPNQFHIRAHESIMNRSAAMVEDGEEAGRAAVPMVFASVRRGMGGNYGGHHVEGNGGEVAQASAPIQWPTVTAVDYELDSTAESASVTGRGGSEGGTVPVWSQSVSARTPIQVREGLVPEVRRGPGLSRRQLQASVQRVNLEGMTSNKQAEEEDFYVPKLVKWTQPRKRRVKQDG

SEQ ID NO: 43591 - protein, 520 aa, Arabidopsis thaliana
MAQALAQPPLVVTTVVPDPPPPPPPPHPKPYALRYMADLLGRIGIMDTDKDGNISPQSPRSPRSPRNNILMGKYELGKLLGHGTFAKVYLAQNIKSGDKVAIKVIDKEKIMKSGLVAHIKREISILRRVRHPYIVHLFEVMATKSKIYFVMEYVGGGELFNTVAKGRLPEETARRYFQQLISSVSFCHGRGVYHRDLKPENLLLDNKGNLKVSDFGLSAVAEQLRQDGLCHTFCGTPAYIAPEVLTRKGYDAAKADVWSCGVILFVLMAGHIPFYDKNIMVMYKKIYKGEFRCPRWFSSDLVRLLTRLLDTNPDTRITIPEIMKNRWFKKGFKHVKFYIEDDKLCREDEDEEEEASSSGRSSTVSESDAEFDVKRMGIGSMPRPSSLNAFDIISFSSGFDLSGLFEEEGGEGTRFVSGAPVSKIISKLEEIAKIVSFTVRKKEWSLRLEGCREGAKGPLTIAAEIFELTPSLVVVEVKKKGGDREEYEEFCNKELRPELEKLIHEEVVVEEALYLPSDTE

SEQ ID NO: 43592 - protein, 282 aa, Geum montanum
GLPPAMAANGHRVMTVSPRYDQYKDAWDTGVTTELQVGDKIETVRFFHCFKRGVDRVFVDHPLFLERVWGKTASKLYGPVTGEDYKDNQLRFSLLCLAALEAPRVLNLNSNKYFSGPYGEDVVFVANDWHTALLPCYLKAKYQSKGIYMSAKVAFCIPNIAYQGRFAFVDFSLLNLPDSFKSSFDFIDDSDKPVKGRKINWMKAGMLESNIVLTVSPYYAKELVSSIDKGVELDNIGRKVGVHGIVNGMDVQEWNPLTDKYTDVKYDATTVMDAKPILKEAL

SEQ ID NO: 43593 - protein, 282 aa, Geum rivale
GLPPAMAAYGHRVMTVSPRYDQYKDAWDTGVTVELQVGDKIETVRFFHCFKRGVDRVFVDHPLFLERVWGKTASKIYGPVTGEDYKDNQLRFSLLCLAALEAPRVLNLNSNKYFSGPYGEDIIFVANDWHTALLPCYLKDRYQSKGIYMSAKVAFCIHNIAYQGRFAFADFSLLDLPDSFKSSFDFIDGYDKPVKGRKINWMKAGMLESNIVLTVSPYYAKELVSSIDKGVELDNIGRKVGVLGIVNGMDVQEWNPLTDKYTDVKYDATTVMDAKPILKEAL

SEQ ID NO: 43594 - protein, 110 aa, Mycosphaerella citri
GGKAPRKQLASKAARKSAPSTGGVKKPPRYKPGTVALREIRRYQKSTELLIRKLPFQRLVREIAQDFKSDLRFQSSAIGALQESVEAYLVSLFEDTNLCAIHAKRVTIQS

SEQ ID NO: 43595 - protein, 275 aa, Symbiobacterium thermophilum IAM 14863
MAPVAAAAEMADVIMLLINDEHQGRVFAEQIRPHLKPGKALGFGHGFAVHFGQVRPPADVDVFMIAPKGPGHLVRRQYEEGRGVPCLMAIHQDATGRCRDIALAWAKGIGGTRAGVIETTFREECESDLFGEQAVLCGGLTQLVKYGFEVLTEAGYAPEIAYFECLHELKLIVDLMYEGGMAAMRYSISDTAEYGDYVSGPRVIGPEVKERMKQILAEIQNGTFAKDWILENQVGRPRFTALRRQNAAHPVEQVGARLRAMMPWLPKPVGAVGNE

SEQ ID NO: 43596 - protein, 152 aa, Zea mays
MSLVRRSNVFDPFSMDLWDPFDTMFRSIVPSAASTNSETAVFASARIDWKETPEAHVFKADLPSVKKEEVKVEVEDGNVLVISGQRSREKEDKDDKWHRVERSSGQFVRRFRLPENAKVDQVKAGLENGVLTVTVPKAEEKKPEVKAIEISG

SEQ ID NO: 43597 - protein, 159 aa, Clostridium acetobutylicum ATCC 824
MSVYDFKAKDISGEEISLSKYEGKVLLIVNTASKCGFTPQYKELEDIYKKLGNEKFEILGFPCNQFANQEPGGSGDIKNFCEINYGVTFPLFEKIDVKGENAHPLFKYLASQAGGILGKEIKWNFTKFLIDKKGDVVDRFAPVTKPSKIKDKIVKLMEE

SEQ ID NO: 43598 - protein, 282 aa, Geum urbanum
GLPPAMSANGHRVMTVSPRYDQYKDAWDTGVTTELQVGDKIETVRFFHCFKRGVDRVFVDHPLFLERVWGKTASKIYGPVTGEDYKDNQLRFSLLCLAALEAPRVLNLNSNKYFSGPYGEDVVFVANDWHTALLPCYLKAKYQSKGIYMSAKVAFCIHNIAYQGRFASADFSLLNLPGSFKSSFDFIDGSDKPVKGRKINWMKAGMLESNIVLTVSPYYAKELVSSIDKGVELDNIGRKVGVHGIVNGMDVQEWNPLTDKYTDVKYDATTVMDAKPILKEAL

SEQ ID NO: 43599 - protein, 423 aa, Thermobifida fusca YX
MAGSGGDAGRGVTLRTTCAVVGGGPAGLVLGLLLARAGIDVVVLEKHADFLRDFRGDTVHPSTMALLDDLGLFERFDALPQSRLRRAVFSTPEGREVTFASFERLPLRHPYIAMVPQWDLLTLLAEEASREPTFRLCMEHEVTGVVWEGDRVAGVDFRSPSGSGRLRADLVVACDGRWSVVRRAVGLPVKEFPVGIDVWWYRIPTQRRLESLLPRMSRGKIIIAIPREGYAQVAYVGRKGADAQLRARGIAALRADTAELLPELADGAARLESMDDVKHLSVRVDRLRRWYAPGVLCIGDAAHAMSPIGGVGINLAVQDAVAAARILARPLREGRLASPGGERWLARVQRRRMLPTVVIQALQRVMHQRVIMPVLEGRARGLPGGVLGLMGRMPVMTAVPAAVLGVGPRPEKAPVWARRTPAR

SEQ ID NO: 43600 - protein, 408 aa, Nocardia farcinica IFM 10152
MTPVPKGDTPMSTSDLQQRWSAALMNNYGTPKVALVRGAGVVVYDADGKRYLDFLGGIAVNSLGHGHPAILAAVTQQLGTLGHVSNLYVSEPVIELAERLLAHFGDGAGKAFFCNSGTEANEAAFKIARLTGRRKIVACEEGFHGRTMGALALTGQPSKRAPFEPMPPGVVHVPYGDAAALAAAVDADTAAVFLEPIMGESGVVVPPMDYLVKAREITARHGALLVLDEVQTGIGRTGKFYAHQAAGIVPDVITLAKGLGGGLPIGAVLAQGRAADLLTPGMHGTTFGGNPVCAAAALAVLRTIDQEDLLAHVESVGKRLSDGIALLEHPLIDHVRGAGLLLGIVLTDNVSGEVEARAREAGYLVNAPKPNIVRLAPPLVLTETQADNFVVDLPAILDGAAADAKGAR

SEQ ID NO: 43601 - protein, 181 aa, Clostridium acetobutylicum ATCC 824
MSIYDFKVKDINGEDISMEEYRGKALLIVNTASKCGFTPQYEDLEALYKKFKGENFEVLGFPCNQFENQEPGTNNDIKKFCQINYGVTFKIFDKVDVNGENEAPLYRYLKEQAPFKELDESTPTAKIIAAFLREKLPETLIGDSIKWNFTKFLIDKNGRVVNRFESGVEPMEIESYIKALI

SEQ ID NO: 43602 - protein, 608 aa, Bradyrhizobium sp. BTAi1
MPGILHRRSARARQALRPVLLQRDPAARPRRHRRCRVLPLSRRIDPPVSASQCLRRDDLGGGLLARLLADPLRRHRRASFRLAFVISALTHITRLARAAFVFAREGVFGAVDPSLAPPPGQLALKLARLVERPGAKSGPRLSRALERMGPAYLKLGQFLATRPDVVGVVMARDLESLQDRLPPFPQAEAEAVIATALERPISQVFVSLSAPVAAASIAQVHRGEVERDGIRHAVAVKVLRPNVAARFRRDLSDFFFVAEKAEAHSSEARRLRLVEVINTMSRSVAMEMDLRLEAAALSEMAENTRDDPDFRVPTVDWDRTANNVLTMEWIDGIALNDHARLAQADVDLPDIGRKVIQSFLRHALRDGFFHADMHPGNLFLDKEGRLVAVDFGIMGRLGMKERRFLAEILLGFITRDYRRVAEVHFEAGYVPPHHSVENFAQAIRAIGEPIHNRTAEEISMAKLLTLLLEVTGLFDMRTRPELILLQKTMVVVEGVARGFDPKLDIWKIADPVVREWIERNLGPIGRIEGAVTGIGELARLTATLPVLAARAAAVLEHMETMTRDGLRLSPETIAAMGRTEGKKSRWRAIALWVIALTFIGILFAVLRL

SEQ ID NO: 43603 - protein, 607 aa, Methanosarcina barkeri str. fusaro
MDTYEKVFELAKRRGFLWNSFELYGGSRGFYDYGPLGSTLKRRIEQTWREFYVIQEGFMEIECPTIGIEEVFIASGHVGGFSDPLCECMNCKEAFRADHLVENVMEAAGTLSAEELTKVIKENDIRCPECGGKFGDAYEFNLMFKTTIGPGTGRQGYLRPETAQGMFVDFQRLSRFYRDKLPFGAVQIGKSYRNEIAPRQGVIRLREFTQAECEIFVDPRNKKHPNFERFADRELVLYSQKAQEKGEPFRMTVREAVETGVIAHEVLGYNIALTNEFLTKVGIDPAKLRFRQHLKDEMAHYAIDCWDAEIETDRFGWVEIVGIADRTDYDLKAHAKVSKTELYVYVEYDEPKMVTRFVVKPNMGKLGPLFKGKAKAVADALKQLSEKELSKDEIKVTVDGEEFTVGSDAVDFAEETVKVSGENVTPHVIEPSYGIDRIFYGVMEHAYDEENVAQKVAESELKGTEETEKESEAGKGESETEGEEEARLVMHFSSAVAPVQVAVLPLLTRKELADPAKDIIVKLREKTLLVNYDDSGTIGRRYRRNDEIGTPYCVTVDYDTLKDGTVTIRDRDSMRQIRAPVKGIENVLYELIYRGRNFESAGKPFNF

SEQ ID NO: 43604 - protein, 193 aa, Lycopersicon chilense
FVFAGVGSAIAYGKLTTNAALDPAGLVAIAVCHGFALFVAVSISANISGGHVNPAVTCGLTFGGHITFITGSFYMLAQLTGAAVACFLLKFVTGGCAIPTHGVGAGVSILKGLVMEIIITFGLVYTVFATAADPKKGSLGTIAPIAIGLIVGANILAAGPFSGGSMNPARSFGPAMVSGNFEGFWIYWIGPLV

SEQ ID NO: 43605 - protein, 473 aa, Arabidopsis thaliana
  misc_feature (169)..(169): Xaa can be any naturally occurring amino acid
  misc_feature (401)..(401): Xaa can be any naturally occurring amino acid
  unsure (1)..(473): unsure at all Xaa locations
MARKMLVDGEIDKVAADEANATHYDFDLFVIGAGSGGVRAARFSANHGAKVGICELPFHPISSEEIGGVGGTCVIRGCVPKKILVYGATYGGELEDAKNYGWEINEKVDFTWKKLLQKKTDEILRLNNIYKRLLANAAVKLYEGEGRVVGPNEVEVRQIDGTKISYTAXHILIATGSRAQKPNIPGHELAITSDEALSLEEFPKRAIVLGGGYIAVEFASIWRGMGATVDLFFRKELPLRGFDDEMRALVARNLEGRGVNLHPQTSLTQLTKTDQGIKVISSHGEEFVADVVLFATGRSPNTKRLNLEAVGVELDQAGAVKVDEYSRTNIPSIWAVGDATNRINLTPVALMEATCFANTAFGGKPTKAEYSNVACAVFCIPPLAVVGLSEEEAVDQADADXVDEKSDKVIGASMCGPDAAEIMQGIAIALKCGATKAQFDSTVGIHPSSAEEFVTMRSVTRRIAHKPKPKTNL

SEQ ID NO: 43606 - protein, 555 aa, Methanosarcina barkeri str. fusaro
MAGQPIFILKEGSKRTRGRDAQNNNIMAAKAVAEAVRTTLGPKGMDKMLVDSMGDVVITNDGATILKEMDIEHPAAKMVVEVAKTQDEEVGDGTTSAAVVAGQLLSKAEDLIEQEIHPTIIASGYRLAAEKAVEVLNSLAMTVELSNRDLLVSIAETAMTGKGAESSKKLLSEIAVDAVTSVVDKNGKNSVDKDNINVVKKVGGKVEDSELIRGMIIDKERIHPNMPEKVKDAKIILLNSAIELKDTEVDAEISITSPDQLQSFLDQEEQMLKKIVQKVISSGANVVFCQKGIEELAQHYLAKAGIFAVRRVKKSDMEKLARATGGKLITNMDEITPEDLGYAALVEEKKVGGDSMTFVTGCDNPKAVTILLRGGTEHVVDSIDSALEDALRVVGVAIEDEKLVAGGGSPEVEVALRLQEYAATLEGREQLAVKAYSEALEIIPRTLAENAGLDPIDMLMDLRSQHEKGVKAAGLNVYEGKVVDMWKNFVVEPLRVKTQVINAATESAVMILRIDDVIASTRAAGPEEGGMPPGAMGGMPGGMPPGMGGMPPGMM

SEQ ID NO: 43607 - protein, 430 aa, Triticum aestivum
  misc_feature (65)..(65): Xaa can be any naturally occurring amino acid
  unsure (1)..(430): unsure at all Xaa locations
EVDLDLGNYERFLDIKLTRDHNITTGKIYQAVIDKERRGDYLGKTVQVVPHITDEIQDWIERVAXKPVDGKEGPPDVCVIELGGTIGDIESMPFIEALGQFSYRVGPGNLCLVHVSLVPVLNVVGEQKTKPTQHSVRGLRGLGLAPDILACRSTEPLEEHVTTKLSQFCDVPIPNIVNLHDVTNIWHIPLLLRDQKAHEAILKVLDLQLVGKVPREPKLAEWTERASKFDKLKTPVKIAMVGKYTGLSDSYLSVLKALLHASVAMERKLVLEWVPSCDLENSAAKETPEAHQKAWKLLKGADGVLVPGGFGDRGVEGKILAATYAREKNVPYLGICLGMQVAVIEFARSVMKLGGANSTEFDPATASPCVIFMPEGSKTQMGATMRLGSRRTHFLANNCKSAKLYGNATSIDERHRHRYEGDPEMVPLLE

SEQ ID NO: 43608 - protein, 130 aa, Brassica napus
MGRLFVVHLEGKIYSCKHCKTHLALYEDIISKSFHCKHGKAYLFNKVSNVTIGETEDRMMMTGKHTVADIFCVSCGSIVGWRYETAHEKSQKYKEGKSVLERFKISGPDGSNYWVSSHGRHIGGSDADDS

SEQ ID NO: 43609 - protein, 187 aa, Arabidopsis thaliana
GFASGSLDEDAASVRLFAERGMEFFVAQSYSKNLGLYAERIGAINVVCSSADAATRVKSQLKRIARPMYSNPPVHGARIVANVVGDVTMFSEWKAEMEMMAGRIKTVRQELYDSLVSKDKSGKDWSFILKQIGMFSFTGLNKAQSDNMTDKWHVYMTKDGRISLAGLSLAKCEYLADAIIDSYHNVS

SEQ ID NO: 43610 - protein, 245 aa, Oryza sativa
  misc_feature (237)..(237): Xaa can be any naturally occurring amino acid
  unsure (1)..(245): unsure at all Xaa locations
DYVYGPGRNHLFVPGPVNIPDQVIRAMSRQNEDYRSPAVPALTKTLLEDVKQIFKTTTGTPFLFPTTGTGAWESALTNTLSPGDKIVSFLIGQFSLLWIDQQQRLNFNVDVVESDWGYGADLAALDYKLRQDPSHSIKAICIVHNETATGVTNDLSAVRKILDKHRHPALLLVDGVSSICALDFRMDEWGVDVALTGSQKALSLPTGLGIVCASPKALEASKTAKSVRVFFDWKDYXQFLQMGTY

SEQ ID NO: 43611 - protein, 455 aa, Photobacterium profundum SS9
MKKPLLVLSALALGISSVIAPVTATAALPVSVNNQQLPSLAPMLEKVTPAVVSIAVEGKHTSTQRLPDSFRFFFGPDFPEEQIREQPFRGLGSGVIVDAGKGYIVTNHHVIDGADKIIVQFYDGRELTAELIGSDKMSDIALLQVKAPKDLAEIKIADSDQLRVGDYTVAIGNPFGLGQTVTSGIVSALGRSGLNIENFENFIQTDAAINSGNSGGALVNLNGELIGINTAILGPNGGNVGIGFAIPSNMVRNLTEQILEFGEVKRGVLGVQGGELTAELAEAFGYETNQGAFVNQVMPDSSAEKAGLKAGDIIVSINGKNIRTFGELRAKIATLGAGKKVTLGIIRDSKAQDFTVTLQEMVQNTVKADNLHPGLVGAEFANTSSSDNTKGVKVTNVAEKSLAARYGLLKGDIIIGLNRSPIKNLGELRKALDKNPAVLALEVQRKDAVLYLIIR

SEQ ID NO: 43612 - protein, 362 aa, Photobacterium profundum SS9
MLAFLSRSVLLGIATAAILLVAIPELRSQMFTSSVSLSEPDTKLEQISFNNAVRRASPAVVNIYNRRYDADDRLTLSTQGLGSGVIMSDKGYIITNYHVVAQADQVIIALQDGRFFTGQLIGKDQRTDIAVLKIQAENLPVIPLNPRYNPVVGDVVLAIGNPYNLGQTTTYGIISATGRSGMSFYGRQDFLQTDAAINKGNSGGALVNTRGELVGINTASFQQATDIETYGISFAIPYELTHKIMKKLIADGRVIRGYIGIDGREINPVMARLYDADQVSGIIVMGMDPNGPATKSGFKAQDILVEIDGKPVTDMRNVLDIVTELRPGSTVAMKVLRNGKPLILSVLIADEPEVPEPVATSN

SEQ ID NO: 43613 - protein, 163 aa, Dunaliella tertiolecta
ASAQQPLNQQAPPPPTSFASQLQHTLGQQQFCDPTLIDRGLQHADKRRRDWIDVDALNEDDTQACSAYAVPIFEHLREAELVRRPNALYPEAFQTDVNAKMRAILVDWLVEVAEEYKLCADTLYLSVNYIDRFLSIHPVQRSNLQLVGIACMWIASKYEEIYP

SEQ ID NO: 43614 - protein, 441 aa, Colwellia psychrerythraea 34H
MSEPSLDKSSFNQPSWRNALAGLQMLFVAFGALVLMPLITGLDPSVALFTAGIGTILFQFITKQQVPLFLASSFVFIAPIAYSVQTWGIAVAMGSLFVTGLVYVLIASVVAVRGAGFLHKLMPPVVTGPIIMVIGLSLAPIAVNMAMGKAGDGSAVLFPYADSLIVSMSALITTLLVATLGKGIFRLIPIMAGVFVGYIMASVMGMVSTEAIANSEWFAIPNFVTPEFNLTAILFMLPVAIAPAIEHVGDIIAIGSVTGKDYTKSPGLHRTLLGDGLATSLASLFGGPPNTTYSEVTGAVMLTKMFNPKIMLWAAAFAIGLAFVAKFGLALQTIPAPVMGGILILLFGSIAGVGMNILIKAQVDLAEQRNLVIVSTTLVFGIGGMAIGNDDFSLTGISLCGLVAIALNAIIPQTQLEEESLVQEETIVEDLVEHAKGKEIN

SEQ ID NO: 43615 - protein, 171 aa, Arabidopsis thaliana
  misc_feature (36)..(36): Xaa can be any naturally occurring amino acid
  unsure (1)..(171): unsure at all Xaa locations
MGASASVPERSVHQFTVKDSSGKDLNMSIYQGKVLXLIVNVASKCGFTETNYTQLTELYRKYKDQDFEILAFPCNQFLYQEPGTSQEAHEFACERFKAEYPVFQKVRVNGQNAAPIYKFLKASKPTFLGSRIKWNFTKFLVGKDGLVIDRYGTMVTPLSIEKDIKKALEDA

SEQ ID NO: 43616 - protein, 324 aa, Pseudomonas syringae pv. phaseolicola 1448A
MKKTVLAFSRVTPEMAERLAQDFNVIVPNPKLGDINAQFDEALPESHGLIGSGRKLGREQLQNAAKLEVVSSISVGYDNYDVDYLSERGILLTNTPDVLTESTADLGFSLIMSSARRVAELDAYTKAGQWTRSIEPPHFGTDVHGKTLGIVGMGNIGAAIARRGRLGFNMPILYSGNSRKTELEQELGAQFRSLDQLLAEADFVCLVVPLSEKTKHLIGRRELSLMKPGAILINIARGPIVDEPALIEALQNGTIRGAGLDVYEKEPLKESPLFQLKNAVTLPHIGSATTETRQAMADRAYHNLRNALLGERPQDLVNPQVWKG

SEQ ID NO: 43617 - protein, 246 aa, Arabidopsis thaliana
MEGGASNEVAESSKKIGRGKIEIKRIENTTNRQVTFCKRRNGLLKKAYELSVLCDAEVALVIFSTRGRLYEYANNSVRGTIERYKKACSDAVNPPTITEANTQYYQQEASKLRRQIRDIQNLNRHILGESLGSLNFKELKNLESRLEKGISRVRSKKHEMLVAEIEYMQKREIELQNDNMYLRSKITERTGLQQQESSVIHQGTAYESGVTSSHQSGQYNRNYIAVNLLEPNQNSSNQDQPPLQLV

SEQ ID NO: 43618 - protein, 233 aa, Arabidopsis lyrata subsp. petraea
  misc_feature (96)..(96): Xaa can be any naturally occurring amino acid
  misc_feature (144)..(145): Xaa can be any naturally occurring amino acid
  unsure (1)..(233): unsure at all Xaa locations
MEGGASNEVAESSKKIGRGKIEIKRIENTTNRQVTFCKRRNGLLKKAYELSVLCDAEVALVIFSTRGRLYEYANNSVRGTIERYKKACSDAVNPPXVTEANTQYYQQEASKLRRQIRDIQNLNRHILGESLGSLNFKELKNLEXXLEKGIGRVRSKKHEMLVAEIEYMQKREIELQNDNMYLRSKITERTGLQQQESSVIHQGTVYESGVTSSHQSEQYNRNYIPVNLLEPNQ

SEQ ID NO: 43619 - protein, 196 aa, Caulobacter crescentus CB15
MRRLIVLFAAALAVLGATAPALAAPKTETAVFAGGCFWCMEHDMQGVPGVLKVESGYTGGHLKNPTYRDVTSETSGHYEAVRVTYDPAKLDYGFLLYRYWRLVDPTDDGGQFCDRGPSYRPAVFVTPAQRPIAEKSRTEAAKRLKTGTMKTQILPAQTFYLAEEYHRDYAKRNKLNYFAYRTGCGRDARLKQVWGG

SEQ ID NO: 43620 - protein, 152 aa, Geum rivale
GLPPAMSANGHRVMTVSPRYDQYKDAWDTGVTVELQVGDKIETVRFFHCFKRGVDRVFVDHPLFLERVWGKTASKIYGPVTGEDYKDNQLRLSLLCLAALEAPRVLKLNSNKYFSGPYGEDVIFIANDWHTALLPCYLKARYQSKGIYISAK

SEQ ID NO: 43621 - protein, 650 aa, Dehalococcoides sp. CBDB1
MFMIHSYYSRINGNSPDEKPKITRGLLKRVWSYARPYRWLVLWMLLLTLATTGLGLLTPLILRDLIDTTLPNKDLTRLSWLIAALLTIPLLTSFLNVVLRRYNSRVGEGVISDLRLAMFSHLQRMSLSFFTHTKSGELMSRLNNDVIGAQTAISNTFVSIVTSLIQAVVVFSVMVTLEWRLALVSVAILPLFFWAAHHLGNRLRDIARNQLDLNARMNAVAQELLNISGALLVKLFGRSSEEDRRFKQRSEEVRNIGIKRAVTGSLFFASIGLLSAIGIALVYGVGGYFVIQETLTIGTIVALGVYLTTLYGALQTLTNAPVDFATSMVSFERVFEVLDVPLDIKEKENARILGKVRGVLEFKDVLFHYEREEKGLLREVRRFGQMEDVVSVLSGAGGAPRNGGEKDAAGAERTNGEVLEHISFRAEPGQLVALVGPSGAGKTTLTYLIPRLYDPVAGQILIDGHDLMDVTLDSLAAQIGMVTQETYLFHDTVRTNLLYGRPDATQTEVETAAKAANIHKFVKGLPQGYETIVGERGYRLSGGEKQRLALARVILKNPRILVLDEATSSLDSQSEYLIQEALKHVMVGRTSIVIAHRLSTILAADIILVLDHGHIVERGTHSELLALGGLYANLYETQFRGKMNNLSSAE

SEQ ID NO: 43622 - protein, 132 aa, Brassica napus
MCGILAVLGCVDNSQATRSRIIKLSRRLRHRGPDWSGLHCYEDCYLAHERLAIIDPISGDQPLYSEDKTVVVTVNGEIYNHKALRESESLKSHKYHTGSDCEVLAHLYEEHGEEFINMLDGMFAFVLLDTKD

SEQ ID NO: 43623 - protein, 681 aa, Arabidopsis thaliana
MSGSVSGCGSGGCSIVWFRRDLRVEDNPALAAAVRAGPVIALFVWAPEEEGHYHPGRVSRWWLKNSLAQLDSSLRSLGTCLITKRSTDSVASLLDVVKSTGASQIFFNHLYDPLSLVRDHRAKDVLTAQGIAVRSFNADLLYQPWEVTDELGRPFSMFAAFWERCLSMPYDPESPLLPPKKIISGDVSKCVADPLVFEDDSEKGSNALLARAWSPGWSNGDKALTTFINGPLLEYSKNRRKADSATTSFLSPHLHFGEVSVRKVFHLVRIKQVAWANEGNEAGEESVNLFLKSIGLREYSRYISFNHPYSHERPLLGHLKFFPWAVDENYFKAWRQGRTGYPLVDAGMRELWATGWLHDRIRVVVSSFFVKVLQLPWRWGMKYFWDTLLDADLESDALGWQYITGTLPDSREFDRIDNPQFEGYKFDPNGEYVRRWLPELSRLPTDWIHHPWNAPESVLQAAGIELGSNYPLPIVGLDEAKARLHEALSQMWQLEAASRAAIENGSEEGLGDSAEVEEAPIEFPRDITMEETEPTRLNPNRRYEDQMVPSITSSLIRPEEDEESSLNLRNSVGDSRAEVPRNMVNTNQAQQRRAEPASNQVTAMIPEFNIRIVAESTEDSTAESSSSGRRERSGGIVPEWSPGYSEQFPSEENRIGGGSTTSSYLQNHHEILNWRRLSQTG

SEQ ID NO: 43624 - protein, 961 aa, Saccharum officinarum
MASERHHSIDAQLRALAPGKVSEELIQYDALLVDRFLDILQDLHGPSLREFVQECYEVSADYEGKKDTSKLGELGTKLTGLAPADAILVASSILHMLNLANLAEEVELAHRRRNSKLKHGDFSDEGSATTESDIEETLKRLVSLGKTPEEVFEALKNQSVDLVFTAHPTQSARRSLLQKNARIRNCLTQLSTKDVTVEDKKELDEALQREIQAAFRTDEIRRAQPTPQDEMRYGMSYIHETVWKGVPKFLRRVDTALKNIGINQRLPYNVPLIKFCSWMGGDRDGNPRVTPEVTRDVCLLSRMMAANLYIDQVEDLMFELSMWRCNDELRARAEEVQSTPASKKVTKYYIEFWKQIPPNEPYRVILGAVRDKLYNTRERARHLLATGFSEISVDSVFTNIEEFLEPLELCYKSLCDCGDKAIADGSLLDLLRQVFTFGLSLVKLDIRQESERHTDVIDAITTYLGIGSYRSWPEDKRMEWLVSELKGKRPLLPPDLPMTEEIADVIGAMHVLAELPSDSFGPYIISMCTAPSDVLAVELLQRECGIRQTLPVVPLFERLADLQAAPASVERLFSTDWYFDHIKGKQQVMVGYSDSGKDAGRLSAAWQLYVAQEEMAKVAKKYGVKLTLFHGRGGTVGRGGGPTHLAILSQPPDTINGSIRVTVQGEVIEFMFGEDHLCFQSLQRFTAATLEHGMHPPVSPKPEWRKLMEEMAVVATEEYRSVVVKEPRFVEYFRSATPETEYGKMNIGSRPAKRKPGGGITTLRAIPWIFSWTQTRFHLPVWLGVGAAFKWAIDKDIKNFQKLKEMYNEWPFFRVTLDLLEMVFAKGDPGIAGLYDLLLVADDLKPFGKQLRDKYVETEKLLLQIAGHKDILEGDPYLKQGLRLRNPYITTLNVLQAYTLKRIRDPCFKVTPQPPLSKEFADENKPAGLVKLNPASEYPPGLEDTLILTMKGIAAGMQNTG

SEQ ID NO: 43625 - protein, 197 aa, Hordeum vulgare subsp. vulgare
MSASRFIKCVTVGDGAVGKTCLLISYTSNTFPTDYVPTVFDNFSANVVVDGSTVNLGLWDTAGQEDYNRLRPLSYRGADVFLLAFSLISKASYENVTKKWIPELRHYAPGVPIILVGTKLDLRDDKQFFVDHPGAVPISTAQGEELKKVIGATAYIECSSKTQQNIKAVFDAAIKVVLQPPKQKRKKRKSQKGCSIL

SEQ ID NO: 43626 - protein, 223 aa, Kineococcus radiotolerans SRS30216
MLFGNPYKTTMVTADQALRGSATRRFEVPATHAVLGTPLEGPWPEGTEVISFAMGCYWGAERIFWRQPGVVTTAAGFQGGFTENPTYEESTTGRTGHAETVLVAYDPTATSAEQLLKIFWENHDPTQGYRQGNDRGTEYRSAVYTTTDEQWEAAQRTRETFQRELTEHGHGRITTEIRRASEAGPFWYAEDYHQQYLEKVPNGYCNHGPNGLTCQIGLVPAAE

SEQ ID NO: 43627 - protein, 107 aa, Oryza sativa
GNLSRQRYICGNQLTEADVRLLVTLIRFDEVYAVHFKCNKRLLREYPNLFNYTKDIYQIPGISSTVNMEHIREHYYGSHPSINPYGIIPAGPNIDYNTPHDRERFSA

SEQ ID NO: 43628 - protein, 215 aa, Hordeum vulgare subsp. vulgare
MSYAYLFKYIIIGDTGVGKSCLLLQFTDKRFQPVHDLTIGVEFGARMITIDNKPIKLQIWDTAGQESFRSITRSYYRGAAGALLVYDITRRETFNHLASWLEDARQHANANMTVMLIGNKCDLSHRRAVSYEEVEQFAKEHGLVFMEASAKTAQNVEEAFIKTAGTIYKKIQDGVFDVSNESYGIKVGYAVPNASGGGAGLVLSNQGRLLAIKQV

SEQ ID NO: 43629 - protein, 338 aa, Bacillus licheniformis ATCC 14580
MKAAVMTKPYSIEFHDIPRPEPASGEVLVKIKAAGICGSDVHFYDGSNPYAQYPQIFGHELAGIIEKTGAGVRGRSAGERVVIEPAIPCGGCYPCRKGRTNACMNIDMIGSVRRGGFADFIIVPETHVHPIPEQMDFATAALCEPFSIGAQAVRRADIQTGETIVILGMGPIGLTILAQVKKRFDVRVIAVDPVRERLELAEAFGADAVIQPGEEDAEQMILKLTGGEGAGIVFEAAGIPATIEQSVRLAAAAGRIVIVGLTGRNVTIPGLLLTKKDIEIYGTKHSVNQFPGVIQFLNENPEIARAFVTEIMPFMEIEEALKKAKNCPHQVTKIILSY

SEQ ID NO: 43630 - protein, 337 aa, Bacillus licheniformis ATCC 14580
MKQIVCEKPYRFKMTDVKMPELKDGEALVRIKRIGICGTDFHAYCGRQPFFSYPRVLGHELSGEIVSIDNSGGTLKPGDQVSIIPYLECGACIACRNGRPNCCVNLNVLGVHTDGGMREYINVPADHLLKTEGLTLSEAAVVECLSIGAHAAERANIKKGETVLVVGAGPIGLSVMKFAKLKGAKVIAMDVRKERLTFSRRWAEADEVVLGGEHAADEIKRLTNGDFPTAVFDATGHPASMNSAYQYAAHGGRLIYVGLVNDHLAMPDPEIHMRELTILSSRNALRRDFETVMKAIMDGGADANRFVNGQMAFHDVVDGFQSALAPETNPVKVLIHL

SEQ ID NO: 43631 - protein, 596 aa, Arabidopsis thaliana
MASTFSATSSMGSSLAPPSNRLSSFVSISSSSFGRTQSIAQRKARFPKIYAAKQLHFNKDGTAIKKLQAGVNKLADLVGVTLGPKGRNVVLESKYGSPRIVNDGVTVAREVELEDPVENIGAKLVRQAASKTNDLAGDGTTTSVVLAQGLIAEGVKVSAGANPVLITRGIEKTTKALVAELKKMSKEVEDSELADVAAVSAGNNYEVGNMIAEAMAKVGRKGVVTLEEGKSAENSLYVVEGMQFDRGYISPYFVTDSEKMCAEYENCKLFLVDKKITNARDIISILEDAIKGGYPLLIIAEDIEQEPLATLVVNKLRGTIKVAALKAPGFGERKSQYLDDIAALTGATVIREEVGLQLEKVGPEVLGNAGKVVLTKDTTTIVGDGSTEEVVKKRVEQIKNLIEAAEQDYEKEKLNERIAKLSGGVAVIQVGAQTETELKEKKLRVEDALNATKAAVEEGIVVGGGCTLLRLASKVDAIKETLANDEEKVGADIVKKALSYPLKLIAKNAGVNGSVVSEKVLSSDNPKHGYNAATGKYEDLMAAGIIDPTKVVRCCLEHASSVAKTFLMSDCVVVEIKEPESAAPAGNPMDNSGYGF

SEQ ID NO: 43632 - protein, 218 aa, Anabaena variabilis ATCC 29413
MERPKVIFVDAVGTLFGVKGSVGKVYSQIAQEFGVEVAPDIVDKAFMESFKASPPPIFPDADAEDIPQREFEWWRRIALNTFESAGVLTQFADFSSFFGELYIHFGTAEPWVIYPDVVQSLSNWQHIGIELGVLSNFDSRLYSVLQSLGLSHYFSSVTISTQVGAAKPDPKIFAIALEKHNSSPEEAWHIGDSIEEDYQGAKAAGLRGVWINREKSYN

SEQ ID NO: 43633 - protein, 494 aa, Colwellia psychrerythraea 34H
MTEVTCNLEAAGIKDSQLIKPFSYINGSWHSSETQFPVINPSTGEVVAQVSNADVAETELAVSAAKGALKMWSAKSANERATLLRNWFNLVMENQDDLGRILTLEQGKPLAEAKGEIAYGAAFLEWFAEEGKRVYGDTIPALSSDKKIVVIKQPVGVVASITPWNFPNAMIARKAAAALAAGCTFVVRPSESTPLSALAMAELAERAGIPAGVFNVVVGSNSRGMGQVLTQHPDVAKFTFTGSTGVGKLLLTQCATTVKKVSMELGGNAPFIVFNDADIDAAVQGAIISKYRNAGQTCVCTNRILVQQGVLEEFTEKFKNAVAELHIGDGLVEGVNLGPMISDKAVCDVEKLVADSIAAGAKVAFGGQRSEAGELFYQPTILTGVTNDMPIAANEIFGPVSPIIAFETEEEAIELANDTEYGLAAYFYSRDIGTVWRVAEGLEFGMVGINEGIISNAAAPFGGVKQSGNGREGSKYGLDDYLEIKYLCMGGLDK

SEQ ID NO: 43634 - protein, 273 aa, Bacillus subtilis subsp. subtilis str. 168
MGRLENKTAVITGAATGIGQATAEVFANEGARVIIGDINKDQMEETVDAIRKNGGQAESFHLDVSDENSVKAFADQIKDACGTIDILFNNAGVDQEGGKVHEYPVDLFDRIIAVDLRGTFLCSKYLIPLMLENGGSIINTSSMSGRAADLDRSGYNAAKGGITNLTKAMAIDYARNGIRVNSISPGTIETPLIDKLAGTKEQEMGEQFREANKWITPLGRLGQPKEMATVALFLASDDSSYVTGEDITADGGIMAYTWPGKMLIEEKWKEETK

SEQ ID NO: 43635 - protein, 407 aa, Pseudomonas syringae pv. phaseolicola 1448A
MRRVVITGLGIVSCLGNDKETVTANLRANRPGIRFNPEYAEMGLRSQVSGSIDLNLEELIDRKIFRFVGHAAAYAYLAMKDAITDSGLTEEQVSNVRTGLIAGSGGASTLNQMEALDTLREKGVKRVGPYRVTRTMGSTVSACLATPFKIKGVNYSISSACATSAHCIGNAVEQIQLGKQDIVFAGGGEEEHWSQSFLFDAMGALSTQYNETPEKASRAYDAKRDGFVIAGGGGMVVVEELEHALARGAKIYAEIVGYGATSDGYDMVAPSGEGAIRCMQMALGDINSGDIDYINTHGTSTPVGDAKEMEGVREVFGAKAPAISSTKSLSGHSLGAAGVHEAIYCLLMMENNFIAGSANIDELDPVVADMPILLKTREDAKLDLVMSNSFGFGGTNATLVLKRWAGK

SEQ ID NO: 43636 - protein, 538 aa, Hypocrea jecorina
MSQISRTQSIMATTAQEHLETGGRINWLASLNTAFTPARNFRRTSIICTIGPKTNSVEALNKLRDAGLNVARMNFSHGSYEYHQSVIDNVRASVAAHPGRPVAIALDTKGPEIRTGNTAGDVDIPISAGTVMNFTTDEKYATACDTQNMYVDYKNITKVIQPGRVIYVDDGVLAFDVLSIKDDQTVEVRARNNGFISSRKGVNLPNTDVDLPALSEKDKADLRFGVKNNVDMVFASFIRRAQDIKDIRDVLGPEGKQIQIIAKIENRQGLNNFAEILEETDGVMVARGDLGIEIPAAEVFAAQKKMIAMCNIAGKPVICATQMLESMIKNPRPTRAEISDVGNAVTDGADCVMLSGETAKGNYPAESIHEMHEASLKAENTIPYVSHFEEMCTLVKRPVSTVESCAMAAVRASLDLGAGGIIVLSTSGDSARLLSKYRPVCPIFMVTRNPTTSRFSHLYRGVYPFLYPEQKPDFDTVNWQEDVDKRIKWAVTRAIELKTLTAGDTVVVVQGWKGGMGNTNTLRIVRADPDHLGIGQME

SEQ ID NO: 43637 - protein, 328 aa, Colwellia psychrerythraea 34H
MLPTESQRIWMYRNMLISRYMEERIESIYMEGKKPVFNMANGPIPGEMHLSNGQEPCAVGVCAHLKAEDVVTATHRPHHIAVAKGVDLNKMMAEIFGKKTGLSGGRGGHMHLFDNDVNFACSGIIAQGMGPAVGAALSRKLQKKSGIAISYIGEGAANQGAFHETLNLASVWKLPVIFIIEDNDWGISVAKSTSTAVEKNSIRAASYDMPGIHIEDNCPDKIFSATKEAIERARRGEGPSLIEIKTSRLAGHFMGDAEDYRPKGEKDKLVKEDPIPTYRQKLIDAKVITLDDDLVLVEETQQIVEQAITFARDSEYPQPEEAMLHVFA

SEQ ID NO: 43638 - protein, 611 aa, Neurospora crassa
MSHSQNPQDEQAQKGSKFSHLPLSTSGPLECALKGTVLLNHPYFNKGSAFTKEERRDFALHGLLPPQIQSLEQQVQRAYEQYCSQPNDLAKNTFMTSMKEQNEVLFYRLLHDHLDEMFSVVYTPTEGEAIQNYSRLFRRPEGVFLNINDMDSVKRDLAQWGKPEDIDYIVVTDGEEILGIGDQGCGGILISIAKLVLMTICGGIHPNRVLPVVLDCGTNNEELLKDDLYLGLRQKRARGDKYDDFVETFIKAARELYPRAYIHFEDFGLDNARRLLERYRPQMPCFNDDVQGTGCVTLAAIMAGLHISKQKLSDVRMVVFGAGTAGVGIADHVRDAIAADADISPEEAGKQIWLIDKPGLLTTKSESLSDAQKKYAKSHDDWANEKTDLLAVIKEVKPHILVGTSTKPKSFTEEVVREMAKHVERPIILPLSNPTKLHEAVPEDLLNWTDGKALVATGSPFDPVKGPWGKDGKEIEIDVAECNNSVVFPGIGLGSVLSRANRVTDKMLMAASKGVAEMGPALRDDTAPLLPGVDVVRDVSVRVARRVILAAMEEGVVEEKDVPTNEEDLDEWIREQMWDPVYRPLKYVEGNKASRGAKGDLRVLGNPNDVE

SEQ ID NO: 43639 - protein, 278 aa, Bradyrhizobium sp. BTAi1
MTSRMDARFAQLKKEGRSAFVTFVMGGDPDPETSLAIVKALPQAGADIIEIGMPFTDPMADGPSIQAAGLRALKAGMTLKKTLQLVRSFREGDAATPIVLMGYYNPIYIYGVDKFLDDAKAAGVDGLIIVDLPPEEDTELCIPALKAGLNFIRLATPTTDDKRLPAVLANTSGFVYYVSITGITGAAAADSSAVGAAVARIKRHTALPVCVGFGIRTPETARAIAANADGAVVGTALVDALRASLDAEGRATPKTVSAVADLVAALAQGVRGAQQAAE

SEQ ID NO: 43640 - protein, 459 aa, Dianthus caryophyllus
MSTSKSTIFLLFSIIFIVSSSALDLSIIDRAFNRPDDEIASLYETWLVKHGKNYNGLGEKQLRFNIFKDNLRFVDERNSENLSFKLGLNRFADLTNEEYRSVYLGTRPRSVAVARSGRSKSDRYAFRAGDTLPESVDWRKKGAVAGIKDQGSCGSCWAFSAIAAVEGVNQIVTGDLISLSEQELVECDTSYNDGCDGGLMDYAFEFIIKNEGIDSDEDYPYTGRDGRCDTNRKNAKVVTIDDYEDSPVYDEKSLQKAVANQPVSVAIEGGGRDFQLYDSGVFTGKCGTALDHGVAVVGYGTEDGLDYWIVRNSWGDTWGEGGYIRMQRNTKLPSGICGIAIEPSYPIKSGLNPPNPGPSPPSPVQPPSVCDDNYSCAERTTCCCLFEYAHYCYSWGCCPLEAATCCEDNYSCCPHDYPVCNIYAGTCSMGKNNPIQIPALKRTPAKPHWAFGNVGKSSS

SEQ ID NO: 43641 - protein, 543 aa, Clostridium acetobutylicum ATCC 824
MNNLKGLELLRNPFLNKGTAFTLEERKKYDLTGLLPCAVMTLEEQEKVVYEKLKSIDDALDKHFYLMNIYDTNRILFYYVVKKHIVELLPIVYTPTIGDAVINYSKNYDTPKDAVFLSINHPENIKKSIEAVSNDLDDIKLIVVTDGEGVLGIGDWGVQGVDISIGKLAVYTVAAGLNPRNVLPIVIDAGTNNEALLNDPFYVGNKHKRVTGEKYYSFIDEFVKTCTSLFPDVLLHWEDFGRGNASTILEKYRNNICTFNDDIQGTGVMMVAALNSVAKVTNTPIKNHKILVFGGGTAGIGVSDQILLEKIRSGLTLDEALKDFYIVDRQGLITEDMQDLTEGQKKYSRKKGEFKKPLKDLAEIVAEVKPTVLIGTSGVHGAFTEAVVKNMAKSTERPAIMPISNPTKLAEAKAEDIIKWSDGNALVVTGSPSSPVEYKGVTYTIGQANNALLYPGLGLGIVVSKSKTVSDGMLAAAAHGVSSLIDLSVKGAPMLPVISKLREASKLVATAVVKEAVKENLNRAPIVDAENAVENEIWEPYYR

SEQ ID NO: 43642 - protein, 328 aa, Symbiobacterium thermophilum IAM 14863
MVGGAGYVGSHVVRALLEAGHEPVVYDNLSTGHMEAVCDSEVIIGDVGDRDKLRTVLQARRFDGVVHLAAASLVAESMREPSVYFRNNVSASIVLFDELIRADVPWVVLSSTAAVYGEPEVVPIPEEHPTRPTNPYGESKLMLERILKWYDVAYGFKHISLRYFNAAGAHPSGQIGEDHMPETHLIPIVLQVALGLRDFVTVFGIDYPTPDGSAVRDYVHVCDLADAHVRAITRLCATGTSSVYNLGSARGYSVREIVDVAQQVVGMPIKSVVADRRAGDPPILVADNRKALSELQWMPQFDLEAIVETAWRWHRDHPQGYGNRRSSI

SEQ ID NO: 43643 - protein, 569 aa, Nocardioides sp. JS614
MNQATPTKHVFVTGGVASSLGKGLTASSLGSLLRSRGLRVTMQKLDPYLNVDPGTMNPFQHGEVFVTNDGAETDLDIGHYERFLDTDLSQIANVTTGQVYSSVIAKERRGDYLGDTVQVIPHITNEIKERILAMGGTGEDGRSVDVVITEVGGTVGDIESLPFLEAARQVRHDIGRENCFFLHVSLVPYIGPSGELKTKPTQHSVAALRQVGIQPDAVVCRADRELPPSIKKKISLMCDVDQDAVVTCADAPSIYDIPKVLHREGLDAYLVRRLDLPFRDVDWTVWDDLLRRVHHPKEEVTVALVGKYVDLPDAYLSVAEALRAGGFAHEAKVQLRWVASDECQTAAGAARNLQDVDAICVPGGFGVRGIEGKLGALTYARTHGIPTLGLCLGLQCMVIEYARNVVGLEKAGSTEFDPDTPEPVIATMAEQKAFVEGAGDLGGTMRLGLYPAALKDGSIAREVYGSSLIEERHRHRYEVNNAYRDQLEEAGLVFSGTSPDNSLVEYVELPRDTHPYYISTQAHPELRSRPTRPHPLFAGLVGAAIERQRELRFPIDETGLRREPEPDED

SEQ ID NO: 43644 - protein, 154 aa, Thermus thermophilus HB27
MTLVRRDARPMELTPFRTWSPFTLVDEVNRLFEEAFSDLVRPAAAYVAPADLYETDEALILEMAVPGMTPEDLEVSLEGNKLTIRGQVKPVADERVRRYYLQEMAHGSFVRTFTLPVEVDASGVKAEFRNGILRLTLPKVAEARARRIPIEVVQ

SEQ ID NO: 43645 - protein, 240 aa, Brassica napus
  misc_feature (151)..(151): Xaa can be any naturally occurring amino acid
  misc_feature (153)..(154): Xaa can be any naturally occurring amino acid
  misc_feature (178)..(178): Xaa can be any naturally occurring amino acid
  misc_feature (185)..(185): Xaa can be any naturally occurring amino acid
  misc_feature (195)..(195): Xaa can be any naturally occurring amino acid
  misc_feature (198)..(198): Xaa can be any naturally occurring amino acid
  misc_feature (201)..(201): Xaa can be any naturally occurring amino acid
  misc_feature (204)..(205): Xaa can be any naturally occurring amino acid
  misc_feature (208)..(208): Xaa can be any naturally occurring amino acid
  misc_feature (212)..(212): Xaa can be any naturally occurring amino acid
  misc_feature (221)..(221): Xaa can be any naturally occurring amino acid
  misc_feature (235)..(235): Xaa can be any naturally occurring amino acid
  unsure (1)..(240): unsure at all Xaa locations
MDVYGLSSPDLLPIDDLLDFSNDEIFSSSSTIVSSATSSAASSSENPFNFPSPASTSFHTSPPPLTDFAHDLCVPSDDAAHLEWLSRFVDDSFSDYPANPLTMTVRPEMSFTGKPRSRRSRATAPSTWAPTPEAELCHSVAKRKTTKKLEXAXXGGARRCTHCASEKTPQWRTGPLGXKTLCNAXGVRFKSGRLXPEXRPXSSXXFVXTQHXNSHRKVMEXRRQKEQLESAVHLXPFQPQ

SEQ ID NO: 43646 - protein, 258 aa, Oryza sativa
MGASNKLQFTPRSSLFQGNEINFSKLYLHHTPAGPRRDQSGLTGNNRETGLGPLVVNNWPVYDGIGRDAKVVARAQGLHIYAGNWHNSFSLVFKDERFKGSTLEVMGIVVERGEWAIVGGTGQFAMANGVIFKKFHEQKQEGNIMELTIQGFCPVLKGSQLTLRDYIVNIMVLDINVLCPLMKHLIFDSISFIYLDQAGQKHRAGPWGGPGGDPYMIEFGSSELLKEVSGTYGLYEGWKVIRSIKFVTNKKPYGPFGR

SEQ ID NO: 43647 - protein, 444 aa, Bacillus subtilis
MSSYLIKPELSSAYPVVSYAKGSYVYDQTGKKYLDGSSGAVTCNIGHGVRDVTEKLKEQLDQVSFAYRSQFTSEPAEQLAALLAQELPGDVNWSFFVNSGSEAIETAMKIAIQYWQEKKQTQKSIFLSRWSSYHGITLGALSLSGFYERRYRFTHLIERYPAISAPHIYRLNHETEEDFVQTAADELDTMIKRIGSQFIAGFVAEPIIGAAGAAITPPPGYYERLSEVCRTHDVLFIADEVMTGLGRTGRMLATEHWDTVPDIAVLGKGLGAGYAPIAAAVVSDSIIETIKQGSGVIMSGHTYSAHPYSAKAALEVLRYVLKHGLIKQSEKKGAVLKKKLDEAASQSGIIGEVRGKGLLLGIEFVQTKKRRKCFRQQQAITQLIVSEAKKRGLIVYPSKAGIDSGEGDAVIIAPPFTISDGEMEELISIFSETVAAVEKNLKKD

SEQ ID NO: 43648 - protein, 538 aa, Arabidopsis thaliana
MGNCCGTAGSLAQNDNKPKKGRKKQNPFSIDYGLHHGGGDGGGRPLKLIVLNDPTGREIESKYTLGRELGRGEFGVTYLCTDKETDDVFACKSILKKKLRTAVDIEDVRREVEIMRHMPEHPNVVTLKETYEDEHAVHLVMELCEGGELFDRIVARGHYTERAAAAVTKTIMEVVQVCHKHGVMHRDLKPENFLFGNKKETAPLKAIDFGLSVFFKPGERFNEIVGSPYYMAPEVLKRNYGPEVDIWSAGVILYILLCGVPPFWAETEQGVAQAIIRSVLDFRRDPWPKVSENAKDLIRKMLDPDQKRRLTAQQVLDHPWLQNAKTAPNVSLGETVRARLKQFTVMNKLKKRALRVIAEHLSDEEASGIREGFQIMDTSQRGKINIDELKIGLQKLGHAIPQDDLQILMDAGDIDRDGYLDCDEFIAISVHLRKMGNDEHLKKAFAFFDQNNNGYIEIEELREALSDELGTSEEVVDAIIRDVDTDKDGRISYEEFVTMMKTGTDWRKASRQYSRERFNSISLKLMQDASLQVNGDTR

SEQ ID NO: 43649 - protein, 484 aa, Physcomitrella patens
MNVSEGCSTLTGAQLKYSTDKSNMSYETVYRDAAVESPQREVSNESGSTLKEHDYFGLSEVLSSNSSSGKQPEKCCREELNLNESATTLQLGPPAAVKPSGQADGDDAHDEGAGPENPAKRSAYHMQQESLADGRKAAAEMGSFKIQRKNILEEFRAMKAHAHMTKSPKTVQTMQHNMHVSYSGAQMAFGGAKNNGVKRVFSEAVVANHNAASGVGVGVREGNDDVSRCEEMNGTEQLDLKVHLPKGMGMARMAPASGSPSFDNMQGPLNPFFRKSLVSKMPVPDGGDSSANASNDCANRKGMVASPSVQPPPAQNQTVGWPPVKNFNKMNTPAPPASTPARACPSVQRKGASTSSSGNLVKIYMDGVPFGRKVDLKTNDSYDKLYSMLEDMFQQYISGQYCGGRSSSSGESHWVASSRKLNFLEGSEYVLIYEDHEGDSMLVGDVPWELFVNAVKRLRIMKGSEQVNLAPKNADPTKVQVAVG

SEQ ID NO: 43650 - protein, 503 aa, Physcomitrella patens
MKFSNEVVHKSMNITEDCSALTGALLKYSTDKSNMNFETLYRDAAVESPQHEVSNESGSTLKEHDYFGLSEVSSSNSSSGKQPEKCCREELNLNESATTLQLGPPAAVKPSGHADGADAHDEGAGPENPAKRPAHHMQQESLADGRKAAAEMGSFKIQRKNILEEFRAMKAQAHMTKSPKPVHTMQHNMHASFSGAQMAFGGAKNNGVKRVFSEAVGGNHIAASGVGVGVREGNDDVSRCEEMNGTEQLDLKVHLPKGMGMARMAPVSGGQNGSAWRNLSFDNMQGPLNPFFRKSLVSKMPVPDGGDSSANASNDCANRKGMVASPSVQPPPAQNQTVGWPPVKNFNKMNTPAPPASTPARACPSVQRKGASTSSSGNLVKIYMDGVPFGRKVDLKTNDSYDKLYSMLEDMFQQYISGQYCGGRSSSSGESHWVASSRKLNFLEGSEYVLIYEDHEGDSMLVGDVPWELFVNAVKRLRIMKGSEQVNLAPKNADPTKVQVAVG

SEQ ID NO: 43651 - protein, 260 aa, Glycine max
MHPINTGDDSTLSSPIPQYGQISNSCLIETQDPSLQPLNQGGNGRKRHYRGVRQRPWGKWAAEIRDPKKAARVWLGTFDTAEAAAAAYDAAALKFKGSKAKLNFPEHVLLPPPPISSSSPPCNNNNNHHSYYYGSSALAPLAPPPQHVYDQTPPPQQQPLLSSSAQEEGFPNLMQYAQLLWSRDDDDLQRIASGLHQHHHHNEAFYDSSSSTLFSSTSTTYSMTVSDQQQNIGDDTSTPKGAEYNYGGCFFRGSDFHDKN

SEQ ID NO: 43652 - protein, 627 aa, Schizosaccharomyces pombe
MKGLRSKFVKALSLKDEQGSHKNGHSKSHYISKNGSYVETDDVKHTDTHHSSKHELKKLKSHFLKDTLKHKRNHHANSNNEKHENSDKKIHTTVLASGHEDSDYSTFLPVIETSKVKDANHFPPNYPEPKNDSVSSNIDEFPNDSISSASFLSVPQSTPPYLVSQPTPLNKFLAGAENVDIPHSLRPVPRREHSSQFQVSEKRTLVRLPSFDDVHTSEREELFIKKLEQCNIIFDFNDPSSDLASKEIKREALLQMIDYVSENRGISSASLFPYVVNTFSLNVFRPISPALNDYSSDMFALDDEPFLEPAWPHLEEVYLLFIKFLESPDFRASKAKSLVDRRFFNRLLALFDTEDPRERELLKTTLHRIYGKFLNLRSYIRKSMNNVFLQFIYEREKFHGIAELLEILGSIINGFAVPLKEEHKIFLSKVLIPLHQTKSVFLYHPQLTYCIVQFIDKDPSLTKAVLTGILKYWPRINSFKELLFLNEIEDIFEVLEPSEFVNIMSPLFQQLARSISSMHFQVAERALCLWSNEYFTSLVSQNVVTLLPIIYPSLYKTANEHWNSTIQAIACNVLQIFVDMDADFFNGLVEDYKQAIIKQEEVMIIRKQQWCQIEALAAENKPTDYLR

SEQ ID NO: 43653 - protein, 142 aa, Brassica napus
MTNQNVIVSDRNPILGSKTITVSVSNSPLFSSPPTYFTFPRRKFLELLEAADKNNNNKNNLGAGKISSWVDSMRDSSPTRLRSSSRDSDSDNDEKTSWIVRFPSALNMFDKIMNAAKGKQIVMFLDYDGTLSPIVEDPDKAY

SEQ ID NO: 43654 - protein, 341 aa, Zea mays
MGRPPCCDKAGVKKGPWTPEEDIVLVSYVQEHGPGNWRAVPVSTGLMRCSKSCRLRWTNYLRPGIRRGNFTPHEEAIIVHLQSLLGNRWAAIASYLPQRTDNDIKNYWNTHLKKKLKKQQAIGAIFAPPDSSSSSSIVVPPGATTTTTTTDDHHHRDMLGANLLVSSKDTYYYARPPAEAAAVARRSPFAADGDSSSSSYASSMDNISRLLTGFMKQQHDDAAAAADTKPPAPAAQVNSPPPAAFLSPSFHHHMSAGTGSGTPPAASAAYFNDMMPPPPPQQQAALMGGHGDYDDGPSSRQHLQPSPLSPIEKWLFEEAAEQVGDLMDLSEDCCSSVPMMF

SEQ ID NO: 43655 - protein, 292 aa, Oryza sativa (japonica cultivar-group)
MEQQRSRSTAAGGEVEVEQLPGFRFHPTEEELLEFYLKQVVQGKKLKFDIIPTVHLYRHDPRELPGLARIGEREWYFFVPRDRKQATGGGGGGRPSRTTERGFWKATGSDRAIRCAADPKRLIGLKKTLVYYEGRAPRGTKTDWVMNEYRLPDAAAIPDTMQLQMQHDDMVLCKVYRKAVSLKELEQRVAMEELARSTTSSGTHNTGSPLQQDSSSISISSSSDAMKKEVVGVDEASAAAHELVRPATLSLPQLEVARPQSGLEWMQEPFLTQLRSPWMETWSPYYASVLNF

SEQ ID NO: 43656 - protein, 295 aa, Candida albicans SC5314
MPAQLQVNTDYFTLNNGNKIPAVGLGTWQATNEDEAYRAVLAALKNGYKHIDTAAIYGNEEQVGKAIKDSGVPREELFVTTKLWNADHKNIEEALETSLKKLGLNYVDLYLIHWPASIDKSTNKPYTDFDYVDTYRGLQKVYKNSKKIRAIGVSNFTKKKLERLLSSEGVDVVPAVNQIEAHPLLTQPELYDYLKEKGIVLEAYSPLGSTNSPLFKNETIVKIAEKNGVEPAQVLVSWAIQRKTVVLPKSVTESRVISNLKTFTLPSEDFETLNKLSEKDGVVRTCNPAFNNFDD

SEQ ID NO: 43657 - protein, 227 aa, Oryza sativa
  misc_feature (178)..(178): Xaa can be any naturally occurring amino acid
  unsure (1)..(227): unsure at all Xaa locations
PVSRACEPMGAREYYDYRRAIYGDITHKAILVDAAGTLLAPTEPMAQVYRTIGEKYGVNYSEDEILMRYRRAYAQPWGRSRLRYVDDGRPFWQHIVSASTGCSDLQYFEELYQYYTTAKAWQLCDPDAKYVFEALRKAGVKTAVVSNFDTRLRPLLQALNCDHWFDAVAVSAEVAAEXPNPTILGRVASFKGGGRPKEPIHHHHRLLELFSFPSHRDVLLFLSSYNG

SEQ ID NO: 43658 - protein, 200 aa, Pseudomonas syringae pv. phaseolicola 1448A
MDNSHGVQNLVWQTSQVSSTDREQHLKQTPKTVWLTGFSGSGKSTIAFALERALMDLGRLAYTLDGDNIRQGLCRDLGFAAADRSENIRRIAEVARLMNDAGLIVISSFISPYEADREAARSIIGHERFIEVFISTPLETCIQRDPKGLYRRALAGELKDFTGISAPYEPPAGAALCLDSSQLSMDDCLERVLRLLSLNT

SEQ ID NO: 43659 - protein, 289 aa, Candida albicans SC5314
MSAQLKTNNDRIALNNGNKIPVIGLGTWESNKDAFLTALKLGYRHIDTATIYKNEEQVGQAIKESGIPREELFITTKVWNNDHKNVEQALETSLKKLGLDYVDLYLVHWPVSIDKTTKEPYPDYDYVDTYKELQKIYKTTTKIKSIGVSNFTKSQLERLLSADGVDVVPAVNQVEAHPLLPQPELYEYLKEKGITLEAYSPLGTSSSPLIKNKTIVEIADKNGVDPAQVLISWAVQRKTVVLPKSVTESRLVSNLKTFELSAEDFDTLNKLSEKEGITRIINPFKNFQD

SEQ ID NO: 43660 - protein, 577 aa, Bacillus anthracis str. A2012
MNRGRDVMSKFTVASNGSLETTLRGVEVLSTPLLNKGVAFTQEEREELGLKGLLPPAVLTLEEQARRAYEQFCSQPDDLLKNVYLTALHDRNEVLFYRILTDHLREMLPIVYTPTVGVAIQRYSHEYRKPRGVYLSINDPSGIEEAFANIGATAENIDLVVVTDGEGILGIGDWGVGGINIAIGKLAVYTAAVGIDPSRVLPVILDVGTNREELLNNPFYIGNRHPRITGEAYDEFIDTFVQAVNKQFPKALLHWEDFSSRNARKILDKYRHDICTFNDDIQGTGAVSLAAVLSAVKASGVPLSEHRVVVFGAGTAGIGIADQVRDAMVRVGVSEEESYKRFWCIDRNGLVTDNMEDLLDFQIPYARKEAEVSEWKENGVIGLAEVVKHVKPTILIGTSTVAGAFKEEIIKEMASHVERPIILPMSNPTPLAEAKPADLIEWTEGRALVATGSPFEPVTYNGVTYVIGQSNNALIFPGLGLGTIVVRASVMTDGMFAAAAEAVASMVDTSQPGAPILPEVEELRNISEMVAIEVAKVAVAEGVARENFSDNDIKIAVKEAIWEPEYRQIKAVEKVTI

SEQ ID NO: 43661 - protein, 471 aa, Burkholderia sp. 383
MNQRQGFDAIVEREKGLHRGLSTGQLSMIAIGGAIGTGLFLGSGFAIGFAGPSVLVSYAIGALIALLLMGCLAEMTVAHPTSGSFGAYAEHYVSPWAGFLVRYAYWASIVFAVGTEVTAIAVYMKYWFPAVPGWYWIVGFSAALIGINLVSVKVFGAVEYVFSMLKIAAIVAFIALGAVVVFGAPAGSGIGFANYTAHGGFFPKGVWGMWVAVIVSIFSYLSIEMIAVAAGEARDPHQAITRAFRATMVRLVFFYLLTLALMLAIVPWTAAGADESPFVKVMAATHVPGAAGVINFVILVAALSAMNSQLYITTRMMFSLSRAGYAPKALGRLTGHGVPAAALGLSAIGIALATVLNVLYPDTSFVMMMSVSMFGAMFTWLMIFVTHLFFRRHHRGQVLAFRMWGFPVTSLLGAALMFAALVTTYFTREFRMTLFCGVPFMIVLSVVYAVWYRGKGAEPAAGREGVHVPGQ

SEQ ID NO: 43662 - protein, 299 aa, Prosthecochloris aestuarii DSM 271
MRQLKISKQITNRESLSLDRYLQEIGKYELLTAEDEVKLTMAIKEGYDMPVDTPEYKRAKRALDKLIKGNLRFVVSVAKQYQNQGLTLGDLINEGNLGLIKAAKRFDETRGFKFISYAVWWIRQSILQALAEQSRIVRLPLNRVGTLNKISKAYSQLEQEFERDPNTKELATVLDMDSQDVADTLKIAGRHVSVDAPFAQGDDNRLLDVLQHDGQKPDHGLTRDSLTLEVERSLSVLAPREADVIRSYFGIGMENPLTLEEIGEKFKLTRERVRQIKEKAIRRLRQSAYSKVLKEYIGS

SEQ ID NO: 43663 - protein, 456 aa, Bordetella parapertussis 12822
MTTLSSAQQQDIQYQLHSYTNAVKHRDVGPRIITHGEGVYVFDDQGNRYLEGMAGLWSVAVGFGEQRLVEAAARQFQELPYYHTFTHKSHPSVIALAERLIGYTDGRMAQAFFTNSGSEANDTVVKLVWYYNNALGRRDKKKIIARQRGYHGVTVASTSLTGLPGNHKDFDLPLPQIRHTACPHYYRYGLPGETEEDFATRMAGELEAMILREGPDTVAAFIGEPVMGAGGVIVPPRTYWQKIQAVCRKYDILVIADEVITGFGRLGQRFGSQVFDIEPDIMVLSKQITSSYQPLGAVLLNARVADVVAEHSGRLGTFGHGYTASGHPVATAVALENLRLIDERGLIEHAAEMGALLHLELQALSSHPLVGEVRGVGLIAGVELVADKATRQPFDPLGKAGGYAYERAHDHGLIVRGIQDTVAFCPPLIITAEQVRDMVARFARTLDDVAAHVAQG

SEQ ID NO: 43664 - protein, 321 aa, Symbiobacterium thermophilum IAM 14863
MGCVMRTVLITGGAGFVGSHVVERFLAEGLRVVVVDNLTTGVREHVPPGAEFHNIDILTPEFTSLVGKVKPDTIVHLAAQVSVAVSVRDPVLDADVNVGGTLRVLEAAREHQVPNFVFSSSAAVYGIPSSLPVTEDAPFSPLSPYGIAKVAAEGYIRAYCFLHGLKAVVMRYSNVFGPRQKAAGDGGVVANFVEAILRGHPPVFFGDGGQTRDFIYVKDVADATLKAIDYLDKSGTSEYLVVNISSGVETSLRTLYTLLCELVKQAPEPILTPPREGDIRHSCLDNRKAREYLGWLPGYSLEQGILETVTAARLAGQGARL

SEQ ID NO: 43665 - protein, 121 aa, Neurospora crassa
MRSKFKDEHPFEKRKAEAERIRQKYSDRIPVICEKVEKSDIATIDKKKYLVPADLTVGQFVYVIRKRIKLSPEKAIFIFVDEVLPPTAALMSSIYEEHKDEDGFLYITYSGENTFGDFETA

SEQ ID NO: 43666 - protein, 543 aa, Clostridium acetobutylicum ATCC 824
MNNLKGLELLRNPFLNKGTAFTLEERKKYDLTGLLPCAVMTLEEQEKVVYEKLKSIDDALDKHFYLMNIYDTNRILFYYVVKKHIVELLPIVYTPTIGDAVINYSKNYDTPKDAVFLSINHPENIKKSIEAVSNDLDDIKLIVVTDGEGVLGIGDWGIQGVDISIGKLAVYTVAAGLNPRNVLPIVIDAGTNNEALLNDPFYVGNKHKRVTGEKYYSFIDEFVKTCTSLFPDVLLHWEDFGRGNASTILEKYRNNICTFNDDIQGTGVMMVAALNSVAKVTNTPIKNHKILVFGGGTAGIGVSDQILLEKIRSGLTLDEALKDFYIVDRQGLITEDMQDLTEGQKKYSRKKGEFKKPLKDLAEIVAEVKPTVLIGTSGVHGAFTEAVVKNMAKSTERPAIMPISNPTKLAEAKAEDIIKWSDGNALVVTGSPSSPVEYKGVTYTIGQANNALLYPGLGLGIVVSKSKTVSDGMLAAAAHGVSSLIDLSVKGAPMLPVISKLREASKLVATAVVKEAVKENLNRAPIVDAENAVENEIWEPYYK

SEQ ID NO: 43667 - protein, 458 aa, Pseudomonas syringae pv. syringae B728a
MTSQDGLKRGLSARHIRFMALGSAIGTGLFYGSASAIQQAGPAVLLAYLIGGAAVYMVMRALGEMAVHDPVSGSFSHYATRYMGPLAGFVLGWTYAFEMIIVCLADVTAFGIYMGFWFPEVPRWIWVLGIVFLIGALNLCNVKVFGETEFWLSILKVSAIVAMIVAGFGIMIFGIGSSASGSEIGISNLWAHGGFMPNGVTGLIASFAVVMFAFGGIEIIGITAGEAKDPRRSLPQAINAVPLRILLFYVLTLFVLMCIYPWPQIGTQGSPFVQIFDNLGIASAATILNIVVISAAVSAINSDIFGAGRMMYGLAREGQAPASFARVSRHGVPWMTVLVMGIALLGGVLLNYLIPKDVFLLIASLATFATVWVWLMILLTQVSMRRSMSREEAAQLKFAVPFWPYGPAAAIAFMLFIFGVLGYFPDNRAALIVGAIWIVLLLIAYAVWVKPKALNTTH

SEQ ID NO: 43668 - protein, 224 aa, Thermosynechococcus elongatus BP-1
MGFFGFKNKKLTMPSPSEALPGRAEPMPVPKAHLVNGHPLTPPYPEGMELAMFGMGCFWGAERKFWQVPGVYVTAVGYAGGYTPNPTYEEVCTGMTGHNEVVRVVFDPQIVSYEELLKVFWENHDPTQGMRQGNDVGTQYRSGIYYYSPEQKALAEASRDRYQAALTAAGYGTITTEILPAPEFYFAEPYHQQYLQRNVNGYCGLGGTKVPYELMGATPAFRGD

SEQ ID NO: 43669 - protein, 110 aa, Mycosphaerella thailandica
GGKAPRKQLASKAARKSAPSTGGVKKPHRYKPGTVALREIRRYQKSTELLIRKLPFQRLVREIAQDFKSDLRFQSSAIGALQESVEAYLVSLFEDTNLCAIHAKRVTIQS

SEQ ID NO: 43670 - protein, 99 aa, Aspergillus niger
HKWLPHLLCLAYGLTTPISIAIGLGLRTAYNPGSKTSLIVQGVFNAISAGVLIYSALVELLARDFIFDPCRTRRRSKLLYMVFCTLLGAGIMALIGKWA

SEQ ID NO: 43671 - protein, 575 aa, Vitis vinifera
SARAPSVISSSEATLGRHLARRLVQIGVSDVFSVPGDFNLTLLDHLIAEPGLKNIGCCNELNAGYAADGYARSRGVGACVVTFTVGGLSVLNAIAGAYSENLPVICIVGGPNSNDYGTNRILHHTIGLPDFSQEFRCFQTVTCYQAVVNNLEDAHEQIDTAISTALKESKPVYISISCNLPGIPHPTFSREPVPFCLAPKVTNQMGLEAAVEAAAAFLNKAVKPVMVGGPKLRVAKACEAFVELADACGYPVAVMPSAKGLVPECHPRFIGTYWGAVSTAFCAEIVESADSYIFAGPIFNDYSSVGYSLLLKKDKAILVQPERVVIGNGPAFGCILMKDFLKALSKRLKCNTTAYENYHRIYVPEGQPLRSDPKEPLRVNVLFQHIQKMLSSETAVIAETGDSWFNCQKLKLPKGCGYEFQMQYGSIGWSVGATLGYAQAVPNKRVISCIGDGSFQVTAQDVSTMIRCEQRTIIFLINNGGYTIEVEIHDGPYNVIKNWNYTGLVDAIHNGEGKCWTTKVVCEEDLINAIETATGSKKDCFCFIEVIAHKDDTSKELLEWGSRVSAANSRPPNPQ

SEQ ID NO: 43672 - protein, 272 aa, Photobacterium profundum SS9
MTKIGLVQMNSGPDPEANLVQLKKKLKGLQLQGARLVVTPENTLVFGANSDYKRHAEVLGDGPLQTELAAFAKQLGIWLLIGSMPISQPDGKITSTALLFDDQGVCIAHYNKLHMFDVEIEDKHHSYRESDTFQSGNEIKVVETPFGKIGLSICYDVRFPQMYSALREQGADIIVVPAAFTKVTGKAHWDILLRARAIETQCWLIAAAQWGEHNQGRETWGHSMIIDPWGQVLACQQQGTGVLTADIDLDFSQTIRTNMPLVEHARFSVHPR

SEQ ID NO: 43673 - protein, 347 aa, Streptomyces coelicolor A3(2)
MDMTESLRHNGEYEHANPYQGTPQHASSPVSPEWPPPPAQPPGNYATQPLPEPPHGGRPARRRGPAALLVAVAIVAAAVGGGTAYGIQELTGSDTVASSSTSTNVVPSSQKGTVSGVAKAVSPSIVEINATSNAGSSTGSGVIITDDGEIITNNHVVAGASSVKVTTNDGKQYTAEVVGTDSKKDLALIKLENASGLKAAALGDSAGIGVGDQVVAIGSPEGLTGTVTSGIVSALDRDVTVSTDEGQQQQQQRQGGQWPFEFGGQQFNGDTGSSTTTYKAIQTDASLNPGNSGGALIDMNGNIIGINSAMYSATESSASAGSVGLGFAIPINTVKADLPELRAGASN

SEQ ID NO: 43674 - protein, 109 aa, Oryza sativa
MRAISAAAAGMLRARLRGGGGDGAGRWTTPGHEERPKGHLFNRPPPGESRKWEDWELPCYVTSFLTVAILGVGLSAKPDLTLETWAHHKALDRLQEKDLAAAGQVPREL

SEQ ID NO: 43675 - protein, 383 aa, Rickettsia sp. R300
DISRVSAEADCFTYDPGFMSTASCQSTITYIDGDKGILRHRGYDIKDLAEKSDFLEVAYLLIYGELPSGEQYNNFTKQVAHHSLVNERLHYLFQTFCSSSHPMAIMLAAVGSLSAFYPDLLNFKEADYELTAIRMIAKIPTIAAMSYKYSIGQPFIYPDNSLDFTENFLHMMFATPCTKYKVNPIIKNALNKIFILHADHEQNASTSTVRIAGSSGANPFACISTGIASLWGPAHGGANEVVINMLKEIGSSEYIPKYIAKAKDKNDPFRLMGFGHRIYKNYDPRAAVLKETCKEVLKELGQLDNNPLLRIAIELEAIALKDEYFIERKLYPNVDFYSGIIYKAMGIPSQMFTVLFAIARTVGWMAQWKEMHEDPEQKISRPR

SEQ ID NO: 43676 - protein, 255 aa, Triticum aestivum
HEGSVSDNWGEEPLPEEPPSFSNEMTVAPEEPVQPPPVPPPHVEEPVGEPVKKTYASILKTAKAPPAFPVAQQVPVSKPSHPTTESIQTQHSVMASSTGAEKPRSDVYGEGAAHDDEESKSVYVGNVPANVNEADLESEFKKFGRLIPDGVAIRSRKETGGYYAFVEFEELSGVHNALKASPIEINGRQIYVEERKPNSGIRGGRRGGRGRFSGGGRGYARGGGDEYNGNRSRSNGYGRVPHQERGILGSHTARN

SEQ ID NO: 43677 - protein, 772 aa, Deinococcus radiodurans R1
MADFHFALLKGRWLMAPKRTLSTPLSLDDAQKQVDDLSKAQDLSANTTDPGTTLTDNMGHVVSDDQNSLRAGERGPTLMEDFLFREKITHFDHERIPERVVHARGAGAHGYFQLDKSLEKYTHAKVLTEVGVKTPVFARFSTVAGSRGSADTARDVRGFAVKMYTKEGNWDIVGNNIPVFFIQDAIKFPDLIHSVKPEPHNEIPQAASAHDTFYDFIAETPEAMHMLMWIHSDRAIPRAYNMMEGFGVHTFRLVNAQGKAHLVKFHWKPVLGVKSLVWDEAQKIAGKDADFHRRSMWETIDQGGTLEWDFGVQVFTEEEAMKWDFDVLDATKIVPEDLVPVQRVGKMVLDRNVDNFFAETEQVAFMTQNVVPGIDFTNDPLLQGRNFSYLDTQLSRLGSPNWQELPINRPIIRVSNNQRDGHMRHTINKGRVAYFPNQMAANKPAQAGAAGFVTYPDKVEGTKLRVRAESFSDHYGQARLFWNSMSPVEKEHIAKSLRFELSKCETRDVRVRMLGHLAKINEVLAAQVAKGLGEKLPSTSDAKPGGQQDSASETALLAAAISPTTASGGLQKAKGLSQEEGQPKSAKGRKVAVLVADGVDAAGVKALQDALKKADVKYDIVAPHLGEIASGVMATATLSNTDPVVYDGVVVAGGAAAVRELAQHPESFNFVVGSYRHAKPIGSLGEGAEIVTGSGIGNVLRRVAADSPAKDGATAPVQNLSEVAGVRLAAGEGGAKLAALGVIVGQDKGASAAADSFVQALAEHRFWGRPQL

SEQ ID NO: 43678 - protein, 315 aa, Phanerochaete chrysosporium
MHNLIKVIYILIIATVAAMAAPPSPNRVRCSAGREAGHPECCKWFDVREEIQDRLFNRSCGADVRKSIRIQWHDAIAFSHTGGLKSGGGADGSILAHPIELAYPANVGLSDIAERQRALALKHNVSFGDFIQFASAVGLSNCEGAPRLTFLAGRPNASRAADDGLVPAPWHSADTLLARMADAGFAPHELVALLAGHSVATQQTVDASVAGTPLDSTPRTFDNAFFVETQARGTVCPGAALHKGEALSSSPHELRLQSDGALARDPRTAPTWKRFAEDQVEMARQFANAMAKLSVVGQDAASLVDCTDVVPRWRM

SEQ ID NO: 43679 - protein, 599 aa, Symbiobacterium thermophilum IAM 14863
MAMRGGPGAFRLDDYDVKLSQVDPRIYRLLGTLIRPYVPKLAAGVLLMVATALTGLVGPYLTQVAIDRFVAERDPAGLDLVALAFLATALLNWWSSYGQTYIVSYVGQSIIYDLRDRMFRHLQRLSFRFFDSMATGRIMSRLMSDVDAINQLVSSGLVSLFADSMVLVTIMGTMLWMNWRLALVSFITIPTLLLVLRLFRGWMRDAFMAQRRRAADMNAHLAEAIAGIRVTQAYVREARNQAQFDGINERLRQANLGAVRVWATMMPSIEVVSAFGVTLVLWYGGILLRGGTADVTVGQVAAFILYLNRFFQPIRDLSQVFNVFQAAVVSAERVAELLDQQPEIVDRPGARDLPRVAGRVEFRDVVFGYEPGQVVLKGINLRAEPGETIALVGPTGAGKSSVINLLARFYEPQEGQVLVDGVDLSTVTQRSWRSQLGIVLQDTFLFSGTIRDNIRYGRPDATDEEVEAAARAVGAHDFIVRLEKGYDTEVHERGAKLSVGQRQLIAFARALCADPAVLILDEATSNIDTHTEAVIQEALQTLLRGRTAFVIAHRLSTIRSADRIYYIEDGQVVEQGRHAELLALGGRYARMYRGQWEGE

SEQ ID NO: 43680 - protein, 131 aa, Morus alba
IYRVLKPGQYFAAYEWCMTNSFDPNNQEHQKIKAEIEIGDGLPDIRLTGKCLEALKQAGFEVIWEKDLAAGSPVPWYLPLDKSHFSLSSFRLTAVGRFITKNMVKALEAIGLAPKGSQRVQDFLEKAAEGL

SEQ ID NO: 43681 - protein, 603 aa, Symbiobacterium thermophilum IAM 14863
MQILKRLWPLYRPGLPLVVLSLTQIALVSLLGTAQPQIIRFVTDLVLENGEWQYLVPGALAVIAVAVVQGGLRFGQRYTMEIVSTRVVAQLRAQVYSHLQRLSWAFYDRAQTGELMSRVTADVDAVRMAAGMALVNGLTHLGTIVAVVVAMFLMDWRLAIVSLLFLPLLVHAIARFQAGSRAAWSDVQARTAELSASLQENIAGVRVVKAFAREEGEIARFRTANDAFQAANLRAIRVSAFWTNYMNFLTAVGAVAVLWYGGRRAMTGAISVGTLVAFNAYVTQLAGPVRMLGMAISHFTRAAASLQRIYALLDTPVEVADRPGARDLEAVVAEQGTTAAAPDGADPAGGDGTRRVAGRVTFEDVSFRYPGGEAVLQDIHLDVAPGMKVAVLGLTGSGKSTLLHLIPRFYDPTAGRVLIDGVDVRDVTLASLRRQIAIVPQETFLFSATLRENIAYGRPDATQEEIEAAARAAQIHDFILSLPQGYDTVVGERGVGLSGGQKQRIAIARALLTDAPILLLDESTSAVDVATERHIQKALDRLMSGRTTFIIASRLSTVMKADLVLVLEDGRIAARGTHEELIRRDGLYRRIYELQLRPVEEVV

SEQ ID NO: 43682 - protein, 214 aa, Neurospora crassa
MANDEYDFLFKVVLIGDSGVGKSNLLSRFTRNEFNLDSKSTIGVEFATRSIQVDSKTIKAQIWDTAGQERYRAITSAYYRGAVGALLVYDISKGVTFENVNRWLKELRDHADQNIVIMLVGNKSDLRHLRAVPTEDAKKFAEENHLSFIETSALDATNVELAFQNILTEIYKIVSTKNFDNGPSGSNEGHQNLSGQSISLSQTANDPQAKSGCC

SEQ ID NO: 43683 - protein, 627 aa, Pseudomonas aeruginosa
MCGIAGFWNITGTLLGDNARVARQMAAAIHHRGPDESGIWYEAPRAPILVHARLAVLELSPAGSQPMHSDCGRYVLIYNGEIYNHLALRARLSEAGVTHSWRGGSDTETLLACFAQWGVESTLKLTVGMFALALWDRQEKTITLARDRMGEKPLYWGWQNGVLFFASELKALKEHPLFRGDIDRDALALFLRYGYVPAPYSIYKGIGKLRAGSYLVLSERSLNETCEPAAYWSANAAIEEALSNPFQGTDAEAVDLLESQLRTSISDQMVSDVPLGAFLSGGVDSSTVVALMQQQSSRPIRTFSIGFDEPGYDEAVYAKAVAEHIGTDHTELYVNSKDALDVIPSLPKIYCEPFGDSSQIPTLIVSGLARQQVTVALSGDGGDELFGGYNPYQFTPRVWRMLERFPHSMRRFASAFAQDLPLPEKLGKLRDVFASRTAEELFYRLNSHWRNHEYPVIGAQGHTALLDTPERWPRVDSFQHWMMAMDVQGYMPDDILVKVDRAAMANSLETRVPLIDHRVFELAWRMPLHMKIRNGKGKWLLREVLYRHVSRELIERPKKGFSVPVSDWLRGPLKEWAESLLDERRLQQEGYLDSRLIRRIWNDHLAGRRDHSRRLWSVLMFQAWLES

SEQ ID NO: 43684 - protein, 315 aa, Phanerochaete chrysosporium
MHNLIKVIYILIIATVAAMAAPPSPNRVRCSAGREAGHPECCKWFDVREEIQDRLFNRSCGADVRKSIRIQWHDANAFSHTGGLKSGGGADGSILAHAIELAYPANVGLSDIVERQGALALKHSVSFGDFIQFASAVGLSNCEGAPRLTFLAGRPNASRAADDGLVPAPWHSADTLSARMADAGFAPHELVALLAGHSVATQQTVDASVAGTPLDSTPRTFDNAFFVETQARGTVCPGAALHKGEALSSSPHELRLQSDGALARDPRTAPTWKRFAEDQVEMARQFANAMAKLSVVGQDAASLVDCTDVVPRWRT

SEQ ID NO: 43685 - protein, 312 aa, Phanerochaete chrysosporium
MHNLIKVIYILIIATVAAMAAPPAPNRVRCSAGREAGHPECCKWFDVREEIQDRLFNRSCGADVRKSIRIQWHDAIAFSHTGGLKSGGGADGSILAHAIELAYPANVGLSDIAERQRALALKHNVSFGDFIQFASAVGLSNCEGAPRLTFLAGRPNASRAADDGLGPAPWHSADTLLARMAHAGFAPHELVALLAGHSVATQQTVDASVAGTPLDSTPRTFDNAFFVETQARGTVCPGAALHKGEALSSSPHELRLQSDGALARDPRTAPTWKRFAEDQVEMARQFANAMAKLSVVGQDAASLVDCTDVVPR

SEQ ID NO: 43686 - protein, 435 aa, Dendrobium crumenatum
MSKEFGIEAPLSKIAVSKAHGEDSPYFAGWKAYEENPYDAVDNPNGVIQMGLAENQLSFDLLEEYLEQHPEASSWGSGMSSFRENALFQDYHGLQTFRKAMASFMEKIRGGRSKFDPDRIVLTAGATAANELLTFILADPGDALLVPTPYYPGFLRDLQWRTGVTIFPVHCHSSNGFQLTLASLESAYADAKASNFNVKGLLITNPCNPLGTVASLSLLQDIILFISDKNIHLISDEIYFGCVFSSTNLFSISDLITNAVSYQIHIVYSLSKDLGLPGFRVGALFSYNDRVVKTARRMSSFSLVSSQTQKLLAFMLSDEEFTVNYIKKNRERLRERYELVVGGLKEAGIECLKGEAGLFCWVNMEELMEDKTEEGELRLWKVMVDELKLNISPGSSCCCSEPGWFRVCFANTSRETLEVALRRLKDFARKKTKNI

SEQ ID NO: 43687 - protein, 207 aa, Triticum aestivum
ASQEPSRTGTPIIASSPTSTRTPTPNRSVEFGVGTIDSSKMGMSEEELQLNTRKEIMDLGERLGKTTIAAWASKEERATANFANVPADKAVEIDRETRAADWHEAEKAKYLARFQREEVKIQAWENHQRAKIEAEMKSIEAKMERKRAREHGWLAKKTTEATGRAEAKREAAEARRSQEAERTDEQAAQIRKTGHIPSSISCWCWCL

SEQ ID NO: 43688 - protein, 237 aa, Cicer arietinum
LLFLYVTILTIIGYSHQSDPKAGGTDCDGVGILGIAWAFGGMIFILVYCTAGISGGHINPAVTFGLFVGRKVSLLRAVFYMAAQCAGAISGTGLAKGFQKAYFDRYGGGANFVHDGYNKGTALGAEIIGTFVLVYTVFSATDPKRNARDSHVPVLAPLPIGFAVFMVHLATIPITGTGINPARSFGSAVIYNEGKIWDDQWIFWVGPIIGATVAAIYHQYILRGSAIKALGSFRSNA

SEQ ID NO: 43689 - protein, 338 aa, Neurospora crassa
MVVKVGINGFGRIGRIVFRNAIEHDDIHIVAVNDPFIEPKYAAYMLRYDTTHGNFKGTIEVDGADLVVNGKKVKFYTERDPAAIPWSETGADYIVESTGVFTTTEKASAHLKGGAKKVIISAPSADAPMYVMGVNNETYDGSADVISNASCTTNCLAPLAKVIHDNFTIVEGLMTTVHSYTATQKTVDGPSAKDWRGGRTAAQNIIPSSTGAAKAVGKVIPDLNGKLTGMAMRVPTANVSVVDLTARIEKGATYDEIKEVIKKASEGPLAGILAYTEDEVVSSDMNGNPASSIFDAKAGISLNKNFVKLVSWYDNEWGYSRRVLDLISYISKVDAKKA

SEQ ID NO: 43690 - protein, 76 aa, Glycine max
YTHELTKVDGENAVLRARHGELAGRLQALGGVLEIFHVAGAPVDIPEIPDPLLRPWQSPFAPQLAAAGGMPDAFQF

SEQ ID NO: 43691 - protein, 630 aa, Thermus thermophilus HB27
MKVAKRFTLKDAEELYLVPHWSGGFFRVGEKGDLEVTPLGPKGPAASLLEIVEALRDEGRPLPLVLRFPQILEARVRALNEAFLEAMAKYGYQGTYRGVYPVKVNQRRLVLETVARAGRPYHLGLEAGSKPELALILAQDLSEEALITTNGFKDDDFVRLALMGRKLGRNVVITLEKFAELFRVLRLSKELGVKPLLGIRYKLKAKGAGQWEASGGENAKFGLTTPEIVRAVEVLQEEGLLDALVMLHAHIGSQVTDIRRIKAAVREAAQTYVQLRKLGAPLRYLNLGGGLAVDYDGSKTNFYASANYTLSEYAENLVYVTKEVVEAQGEPHPILVTESGRAITAYHEVLVLQVIDVIAPPGEARPSPPPPEAHPLVKELWESLQSLSPKNFQEVYHDAFADKETLQTLYDLGLVSLRDRALAEEIFYHIARRVQAIAQNLPYVPDELEDLEKLLADKLVCNFSVFQSLPDAWAIHQLFPVVPLSRLLEPPTRRATLVDISCDSDGKMDRFIDLHDVRQTLPVHPVRPGEPYYLGVFLVGAYQDVLGSNHNLFGQVGEAHVRVEEEGFAIERFVGGETAERVIEKMGFTARELMLGVERLVRRSRLSPAEKGAFLERYARELQGYTYLED

SEQ ID NO: 43692 - protein, 253 aa, Glycine max
  misc_feature (235)..(235): Xaa can be any naturally occurring amino acid
  unsure (1)..(253): unsure at all Xaa locations
MSATFKYQPTGLHGWGAPRSSSRNLARFFSMRFACNSRHHKILHASVSHPSSLSISHDSSTETESTLILIRHGESLWNEKNLFTGCCDVPLTKRGVEEAIEAGKRISYIPVDMIFTSALIRAQMTAMLAMTQHHQEKVPIIIHNESERATAWTQVYSEKTTKQSIPVITAWQLNERMYGELQGLNKQETAERYGKEKVHEWRRSFDIPPPKGESLEMCSQRAVAYFKDFIEPQLXSGKHVMGAAHGNSLRAII

SEQ ID NO: 43693 - protein, 579 aa, Clostridium acetobutylicum ATCC 824
MKVFKKFIKYYKPYKFLFFTDMICALIVCLVDLSFPIILSYLSKNFFIKDRDTVLTGIIYIAVGLAIMYVAKYFCQYFIASWGHIMGARMETDMRQDLFYHLQMLPFSYYDENNTGEMMSKLVSDLFDISELAHHGPENVFISALKILGSFVILMMINVKMTFILFVVTLIMVIFSINRNTKMQKIFFDNRKKIANVNSSVQDSLEGIRVVKSFANESVEQKKFDVSNNNYLKSKVKSYKAMGEFIAGSSLFQGMLYLSIIVSGAVFIKDGTLKISDLAIYALYINIFINPIDVLINFMEQFQKGYAGFKRFIEVVETKPSILDKPGAEEIKNVKGNIKFKDVCFKYDDAHEVIHNLNINIDAGKTVALVGPSGGGKTTICSLLPRFYDVTSGSITIDDNDIRDVTLNSLRNAIGVVQQDVYIFSGTIRDNIAYGRPEASEEEVIEAAKGANIHDYIMSLEDGYDTFVGERGVKLSGGQKQRISIARVFLKNPPILILDEATSALDNESEKYIQKSLEKLSSGRTSIVIAHRLSTIRNADEIIVIKDRGIKEKGNHEELLKKGGVYSYYYNMQFEGLNA

SEQ ID NO: 43694 - protein, 546 aa, Gibberella fujikuroi
MASQNMANPSVNPDIEDELFQKEVEAVKAWWSDSRWRHTKRPFTAEQIVSKRGYLPVDYASNAQAKKLWKILEHRFETRDASYTYGCLEPTMVTQMAKYLDTVYVSGWQSSSTASASDEPGPDLADYPYTTVPNKVGHLFMAQLFHDRKQRQERLSVPKAQRLNLLNIDYLRPIVADADTGHGGLTAVMKLTKPFIEKGAAGIHIEDQAPGTKKCGHMAGKVLVPIQEHINRLVAIRAQADIMGSDLLAIARTDAEAATLLSTNIDPRDHAFILGSTNPTLKPLNDLMIAAEGAGKSGVELQRIEDEWLAKANLSRFDDAVTAAIDAGSSTDKASLKRDYLSKAKGKSNLEARAIARQVLGHDIFFDWDAPRTREGYFRLKGGCDCAVNRAIAYAPYCDAIWMESKLPDYAQAKEFAEGVHAVWPEKKLAYNLSPSFNWKTAMPRDEQETYIRRLAKLGYCWQFITLAGLHTTALISDQFAKAYSTVGMRAYGELVQEPEMEQKVDVVKHQKWSGATYVDELQKMVTGGISSTAAMGAGVTEEQFK

SEQ ID NO: 43695 - protein, 150 aa, Schizosaccharomyces pombe
MQIFVKTLTGKTITLEVESSDTIDNVKSKIQDKEGIPPDQQRLIFAGKQLEDGRTLSDYNIQKESTLHLVLRLRGGGKKRKKKTYTTPKKIKHKHKKVELAVLKYYKVEDDGSVKRLRRECPNCGASTFMANHKDRLYCGRCHLTLKLEN

SEQ ID NO: 43696 - protein, 335 aa, Zymomonas mobilis subsp. mobilis ZM4
MPHNRYDIVAIGNAIVDVLAATDDQFLSEKNITKGSMQLIDADSAETLYQEMNPTHEISGGSAANTLVGVAALGGRCAFIGQVANDPLGQVFQQDIRAQNIHFDVPVQEATIPTGRCLILVSPDGERSMNTFLGVAQTLHQTAIKPEVIENAEILYLEGYLWDPEVPRSAMKEAIQIARKAGKKVALTLSDTFCIERHREDFKQLINNGLIDILFANEGELRSLVQHDDLDRGIEEVAAKLPLLVVTKGPDGAIAVQDMERTEVSAKKIDQVVDTTGAGDLFAAGFLAGQARNLSIAASLEMGAIAAAEIISHYGARPENDIKTMIESALNISLN

SEQ ID NO: 43697 - protein, 306 aa, Zea mays
TLQFVSPPLAAAAERARGMAKDGGPDWNGLFKWSIAHGDGTNPPRALSEEDRKWFMEAMQANTIDVVKRMKEITRVMRTPQDVLQSQGVTPENIEDMLDELHEHVESIDMANDLHSIGGLDPLFGYLKNSNAGIRAKAAEVVSTVAQNNPKSQQLVMESNGLEPLLRNFKSDPSTNARTKALGAISSIIRHNQPGVSAFRLGNGYAGLKDAPGSDDAKLQRKALNLIQYLLHNNKADRSFATELGLPKLMMHLAASDDPLVREAALSGLLELSQDQTSGNALPDQDKLKRDPEPEEPNRRGQCDGL

SEQ ID NO: 43698 - protein, 235 aa, Brassica napus
NHLRCFTITGRRTPTLLNTSPNRSLSHLSIKMGSSSTAQEEPQLVDTPAIVPSPLAQEPDNDVPAPGNQFAEFAAGCFWGVELAYQRIPGVTETEVGYTQGISHNPSYKDVCTNTTNHAEVVRVQYDPNECTYETLLDLFWSRHDPTTLNRQGKLVGAQYRSGIYFYTPEQEKLARESLENQQKKLEKKIVSEILPAKKFYKAEEYHQHYLSKGEKSGHAQSPAKSCKDPISCFG

SEQ ID NO: 43699 - protein, 460 aa, Glycine max
MLDTAERDSEVSLETVYSSTLGSSMSSESICSTSFSRLSFDLLPPSPETLSIKPHRSSDFAYSAAFRRKAALTFRDFHLLRRIGAGDIGTVYLCRLHNSNQLKNQDEDEEDVSCLYAMKVVDKDAVALKKKSQRAEMEKKILKMLDHPFLPTLYAEFEASHFSCIVMEFCSGGDLHSLRFKHPHNRFPLSSARFYAAEVLVALEYLHMLGIIYRDLKPENVLVRSDGHIMLSDFDLSLYSEAIPAVESSPDSLPSSNALPLPYAYTRSHSFMSPFSCFSNRSREVRTIEPNRLFVAEPVSARSCSFVGTHEYVSPKVASGRSHGNAVDWWSFGVFIYELIYGRTPYAGPSKEATLRNIVKKPLAFPTATPTSNLELHARDLISGLLNKDPARRLGSKRGAADVKKHPFFKGLNLALIRMQTPPEVPGSRRRTKTTSLYPVKGNGNNNHKQQQTASFDFYF

SEQ ID NO: 43700 - protein, 202 aa, Triticum aestivum
MASQSLSLPPTHIPYNRIIGKLDSKFLLWPSCAHIKPRRISTSIRAMGSSASSHSQSQYADSVESEAGADTIDYKSLTDEEWKKRLTNEQFYITRQKGTERAFTGEYWNTKTPGIYHCICCDTPLFESSTKFNSGTGWPSYYQTIGKNVKSKLDLSIIFMPRQEVLCAVCDAHLGHVFDDGPPPTGKRFCINSAALKLKPKQ

SEQ ID NO: 43701 - protein, 433 aa, Bacillus licheniformis ATCC 14580
MMEYNREDQLETKNELIVSDQKPDQAIKKAEQQKRRLSWMTPILSGIIGGSLVLGVTTYQHSKDETANTSVQTQTNETSNSSASSTKANTEKLSSTNSSDISTMVENVSPAIVGISNYQKQTESGMFGFESNSSSSSEQETGTGSGVIYKKANGKAYIITNNHVVEGASKLTVSLSNGKEVEGKLLGSDSLTDLAVVEISADHVEKVASFGDSSSLKAGESVIAIGNPLGKDLSRTVTQGIISGVDRTVSVDTSAGQTEMNVIQTDAAINPGNSGGALLNTKGEVIGINSMKISESGVEGIGFAIPSNDVKPIAEELMSKGKIERPFIGIGMMDLEQVPENYQTGTLGLSGSQLNKGVYIRQVASGSPAEKAGLKENDVIVSFNGKETDTGSALRNLLYNDAKIGDTVKVTLIRNGKTMTKQITLDQKESASS

SEQ ID NO: 43702 - protein, 388 aa, Zea mays
  misc_feature (40)..(40): Xaa can be any naturally occurring amino acid
  misc_feature (76)..(76): Xaa can be any naturally occurring amino acid
  misc_feature (100)..(100): Xaa can be any naturally occurring amino acid
  misc_feature (104)..(104): Xaa can be any naturally occurring amino acid
  misc_feature (138)..(138): Xaa can be any naturally occurring amino acid
  misc_feature (140)..(140): Xaa can be any naturally occurring amino acid
  misc_feature (154)..(154): Xaa can be any naturally occurring amino acid
  misc_feature (156)..(156): Xaa can be any naturally occurring amino acid
  misc_feature (172)..(172): Xaa can be any naturally occurring amino acid
  unsure (1)..(388): unsure at all Xaa locations
MVSGAAHNPGGGAAAQTTQRSPPQLGARTALATPPPVSGXAAHSASTSGGTAGSPPSSRSEQHAPDGAVKGPALAXAPAAAAAASTPASDSTFLRLNNLXDINXDDAPSSSAPTSKKKRRSTRAVGPDKGNRGLRQFXMXVCEKVESKGRTTYXEXADELVAEFTDPNNNIXAPDPDTPNAQQYDEKNIRRRVYDALNVLMAMDIISKDKKEIQWKGLPRTSISDIEELKTELVGLKGRIEKKSVYLQELQDQYVGLQNLIQRNEQLYGSGNTPSGGVALPFILVQTRPHATVEVEISEDMQLVHFDFNSTPFELHDDSYVLKEMRFCGREQHDGTQESISNGGESSNVSNIYWQQAQHMEMPNNGTVRLSSSPPIPGILKGRVKHEH

SEQ ID NO: 43703 - protein, 616 aa, Candida albicans
ARASADQQQHQHNHHHHHHHHHHNENQSQQQVPIDPAANPANRIGRYQILKTLGEGSFGKVKLAQHLGTGQKVALKIINRKTLAKSDMQGRVEREISYLRLLRHPHIIKLYDVIKSKDEIIMVIEFAGKELFDYIVQRGKMPEDEARRFFQQIIAAVEYCHRHKIVHRDLKPENLLLDDQLNVKIADFGLSNIMTDGNFLKTSCGSPNYMPAPEVISGKLYSSVQKLMIWSAGVILGMSCCVVDYHSMTSSIPALFKKISNGVYTLPNYLSAGAKHLLTRMLVVNPLNRITIHEIMEDDWFKQDMPDYLLPPDLSKNKNSKIDVDEDVIRALSVTMGYDRDCKIVNVIEKANKQVAAGNSSSQQSKSSNEILDAYLLMKENHRLVKDLKKSKSENIESFLSQSPPPSPFPNAGSTSSAPGVQQSLTYQTLATVPDLSTLPNSTIAILPTSLPSIHRAYMAETKQNGDPSQQHAPPPTKKSKTRWHFGIRLRSYPLDVMGEIYRALKNLGAEWAKPTEEELWTIRVRWKYDTSAQFECGSAPNLMKMQIQLFQLEPNNYLVSFKFSGWESAHGNAGTDSPQSHRQQDLDEVGSFSAYPFLHLATRLIMELAVNSQSG

SEQ ID NO: 43704 - protein, 699 aa, Saccharomyces cerevisiae
MTAQLQSESTSKIVLVTGGAGYIGSHTVVELIENGYDCVVADNLSNSTYDSVARLEVLTKHHIPFYEVDLCDRKGLEKVFKEYKIDSVIHFAGLKAVGESTQIPLRYYHNNILGTVVLLELMQQYNVSKFVFSSSATVYGDATRFPNMIPIPEECPLGPTNPYGHTKYAIENILNDLYNSDKKSWKFAILRYFNPIGAHPSGLIGEDPLGIPNNLLPYMAQVAVGRREKLYIFGDDYDSRDGTPIRDYIHVVDLAKGHIAALQYLEAYNENEGLCREWNLGSGKGSTVFEVYHAFCKASGIDLPYKVTGRRAGDVLNLTAKPDRAKRELKWQTELQVEDSCKDLWKWTTENPFGYQLRGVEARFSAEDMRYDARFVTIGAGTRFQATFANLGASIVDLKVNGQSVVLGYENEEGYLNPDSAYIGATIGRYANRISKGKFSLCNKDYQLTVNNGVNANHSSIGSFHRKRFLGPIIQNPSKDVFTAEYMLIDNEKDTEFPGDLLVTIQYTVNVAQKSLEIVYKGKLTAGEATPINLTNHSYFNLNKPYGDTIEGTEIMVRSKKSVDVDKNMIPTGNIVDREIATFNSTKPTVLGPKNPQFDCCFVVDENAKPSQINTLNNELTLIVKAFHPDSNITLEVLSTEPTYQFYTGDFLSAGYEARQGFAIEPGRYIDAINQENWKDCVTLKNGETYGSKIVYRFS

SEQ ID NO: 43705 - protein, 1021 aa, Oryza sativa
MEKDSGGGGGGLARRLMLDASGREMDSPRFRAILRATSGRRKRAPDVKSFSHELNIRGPLLHPLQQRKPRGCVNSPEEFIGAIRTKFIRLKEEVDAELGVFAGDLVGALDKADGDEERVALEDLLVVAQRCAEMSPEELWVKCECIVQGLDDRRQELTAGVLKQAHTRVLFILTRCTRLLQFRKEGGGYVAADDKQHVLSLHQLSDLGLYPFKVAGGSSELGRKSTSSLTELKERLIRRRMLEHKQLTLDFSAGRVISSDTGGDSPGSGGKISSWKKLPSPAEKTLHKVTEPTTEEKTTPTKKKAITRNKVAVDEIVERIDAASIHPDGLSYLGDSAVKLEVPSGFPEAQQIIVDGKPRMICRICDFEIPMVCAEGHFIVCTLADRCDSKGLNTDQRLQRVAEVLGRVLGCFESKSPQTAECNHNETARGSTSSLTESDGSMDHDILSHLLTVPSTELFSEGALTPASGSMPQSPLLTPRTSHAESQLTKHKAFVELENFQQVESLMTIARGIERIKNSEYNSLEDLSSYLEDLNAVIDTRKVDALVVETFGRRIAKLLQEKFIQLCGQIEDSNTDSLGSIDEDGPMESSVSSRTSQMNGKFKDRTSIEDFEIIKPISRGAFGRVFLAKKRVTGDLFAIKVLKKADMIRKNAVESILAERDILISARNPFVVRFFYSFTCRENLYLVMEYLNGGDLYSLLRNLGCLDEDMARTYMAELVLALEYLHSMNVIHRDLKPDNLLISRDGHIKLTDFGLSKVGLINSTDDLSGPDVSNVLVGDHQPADAEQRAQKREQRQKQAAVGTPDYLAPEILLGMTHGPTADWWSVGVILFELLVGIPPFNAEHPQIIFDNIMNREIPWPQVPEELSFEAYDLIDKLLIENPVQRLGATGAGEVKAHPFFKDINWDMIARQQAAFIPSTDDEYDTSYFACRHTWDDQVNVASNDYDDRSETSSMSCGSSPHSCDYEEDADEFGSMEEFGAPSLSVKYSFSIFSFKNISQLASMNYDLITKHNEDPLQSSKS

SEQ ID NO: 43706 - protein, 235 aa, Capsicum annuum
MACTTVTCSSTSPLVSNVGVGGTCKVTAPCSVFFPSMRRPASTLVARATGDTKTHQWTCTCQNGQGGNTKALLFEHVLGGLALDVSPFGLLDPMSPMRTMRQMMDTMDRLFEDTMTFPGRNRASGSGEIRAPWDIHDGENEIKMRFDMPGLSKEDVKVSIENDVLVIKGEHKKEEGGNDEHSWGRNISSYDTRLSLPDNIEKDKIKAELKDGVLFISIPKTKVEKKVIDRACQLN

SEQ ID NO: 43707 - protein, 150 aa, Arabidopsis thaliana
MAPKAEKKPAEKKPASEKPVEEKSKAEKAPAEKKPKAGKKLPKEAGAGGDKKKKMKKKSVETYKIYIFKVLKQVHPDIGISSKAMGIMNSFINDIFEKLAQEASKLARYNKKPTITSREIQTAVRLVLPGELAKHAVSEGTKAVTKFTSS

SEQ ID NO: 43708 - protein, 162 aa, Pseudomonas syringae pv. phaseolicola 1448A
MSAFHDIKLKALGGQELPMAGFKNKVVLVVNVASKCGLTPQYAALENLYQQYKDKGLEILGLPCNQFAGQEPGSEKEIAEFCELNYGVTFTLGEKLDVNGPDRHSLYRLLAGEGAEFPGDITWNFEKFLVGKNGGVSARFSPRTAPDDPAVIQAIEKALAQS

SEQ ID NO: 43709 - protein, 454 aa, Deinococcus radiodurans R1
MSIQSFEEKSVPMTVDRVLDDLGLGRFQWKLLAICGLTWAADAMEVLLMGFALPGISAAFELPKGSPAATMLLTATFAGMLFGAWFWGYLADRVGRRSVFLTTVALGVVFGLAGALAPTLTWLLVARFLTGFAIGGTLPVDYSMMAEFVPTAWRGRFLVYLESFWAVGTVVVAALAWWVSTAFAPAEGWRWLLGLAALPGLVGLIARIGIPDSPRSLLARGEEAQARAALQKVAQANGGTLPAAPLAHPEQPPRVSPAQLFRGVLARRTPLLMVTWFGLSLGYYGIFSWLPSFLRAQGLDLGAVYRSTLLLALAQVPGYLLAAYLVEKIGRRVTLVGFLTLGAVGAYLFLLAHDANTVLLTSALLSFALLGAWGSLYAYTPELFPTPLRTTGMGLVSGVARLASVVSPSIGAMLLTGNLTLALTVFAVCFALAALAAWGIGVETRGQALAETAE

SEQ ID NO: 43710 - protein, 329 aa, Bordetella parapertussis 12822
MASNIVKAVRIEQHGGPEVLQVVDVEVPPPAANEVTIRQHAAGLNFIDIYFRTGLYPHPLPHGLGFEGAGVVEAVGADVRHLKKGDRVAYGQSPLGAYAQARNVPAAQVVKLPKGIGFDEAAALMLKGLTVQYLFRQTYRLQGNETILFHAAAGGVGLIACQWAKALGVKLIGTVSSPEKAELARAHGAWATIDYSRENVVERLLELTGGKKVPVVYDGVGKDTWETSLDCIEPRGLMVSFGNASGPVAGVNLGILNQKGSLYVTRPSLGVHVNTHEKLAAAADELFGLVLKKKIKVRIDQRYSLAQAGDAQTALAGRKTTGATVLTLD

SEQ ID NO: 43711 - protein, 256 aa, Brassica napus
TLEEILYALVVQKFMEANVSLVPSITPSSSDPSGRVDTWPTKVEKLEKLHSSEMYEMIHNHLALILGPRMGDLASVAQISKLRVGQVYAASVMYGYFLKRVDQRFQLEKSMKLLTGGLDESKTSVEQPENVTFKAVSSHPEVGSFAGGVSAKGFGSEIKPSRLRTYVMSFDSETLQRYATIRSREAVGIIEKHTEALFGKPEIVITPEGTVDSSKDEQIKISFGGMKRLVLEAVTFGSFLWDVESHVDARYHFVLN

SEQ ID NO: 43712 - protein, 408 aa, Ashbya gossypii ATCC 10895
MLSSVRNPALAKVKTSLLRTLSTTGAVRAEAVESAGADEEVEIRLPETSFEGYMLDVPELTYKVTKGNLLQMYKDMIVVRRMEMACDALYKAKKIRGFCHLSVGQEAIAVGIENAITKRDTVITSYRCHGFTYMRGASVRAVLAELMGRRTGVSYGKGGSMHMYTDGFFGGNGIVGAQVPLGAGLAFAHQYKNEDVCAFALYGDGASNQGQVFEAFNMAKLWNLPAVFACENNKYGMGTAASRSSAMTEYFKRGQYIPGLKVNGMDILAVYQASKFAKHWCVSGKGPIVLEYETYRYGGHSMSDPGTTYRTRDEIQHMRSKNDPIAGLKMQLLDLGIASEEEIKAYDKAARKYVDEQVELADAAPAPEAKMSILFEDVYVPGTETPTLRGRINDDTWDFAKKGFAFRD

SEQ ID NO: 43713 - protein, 326 aa, Arabidopsis thaliana
MDLDSMDCTSTMDVTDDEEIHQDRHSYASVSKHHHTNNNTTNVNAAASGLLPTTTSVHELLECPVCTNSMYPPIHQCHNGHTLCSTCKARVHNRCPTCRQELGDIRCLALEKVAESLELPCKHMSLGCPEIFPYYSKLKHETVCNFRPYSCPYAGSECSVTGDIPFLVAHLRDDHKVDMHSGCTFNHRYVKSNPREVENATWMLTVFHCFGQYFCLHFEAFQLGMAPVYMAFLRFMGDETEARNYNYSLEVGGYGRKLIWEGTPRSVRDSHRKVRDSHDGLIIQRNMALFFSGGDRKELKLRVTGRIWKEQQQSGEGGGACIPNLS

SEQ ID NO: 43714 - protein, 580 aa, Deinococcus radiodurans R1
MPPGEDPMSHKTLPLTDHYDVKRGEDGHRYLRPLVRGFNLTRIPLLNKGTAFTAEEREAHGLDGLLAPQVDSLEVLIERAYREFSKRGAALEKHVYLRNLQDRNEVLFYALLSHHVEEMLPIVYTPTVGDAVKKFSQIYRYPRGLTLSTRTIERAEQALANVPLNDVRIIVATDSSAILGIGDQGFGGMAISIGKLSLYTVAGGVGPDKTLPVELDVGTGRADLREDPHYLGVKHERLTGEEYFAFIDKFVEATIQRYPKAIIQWEDFSKDAAFEVLARYRKVVPSFNDDIQGTGAVVLAGVLNACRIKGEALKDQVVVVHGAGAGGAGVAAAIREGMHREGLSPDEIARRVFVLDSRGLLTDDRSMEAYKQALATPRALVSGWSGTDLLGVVREAKATVLLGLSGVPGTFDEDIVKAALANTPRPLVFPLSNPTAHSEALPEDILRWTDGAAIVATGSPFAPVEHGGQTHEIGQGNNAFIFPGLGFGAILARVREITDEMVTEAAYALADYTQAHHPGRTYPPVNELSQASVQVAVAVIKQAIKDGVATEFSVRRLSDGELRAFVERKFWEPKFLPYHS

SEQ ID NO: 43715 - protein, 527 aa, Zea mays
MQGGVMAHAAAAAAAASTVTTAVAPPVTAHAVAVAPPVTAHAAAAAGNGSATAAPPPPFLMKTYEVVDDPATDDVISWGPGNNSFIVWNTPEFARDLLPKYFKHSNFSSFVRQLNTYGFRKVDPDRWEFANEGFLRGQKHLLKTINRRKPSLQGNSQPQQPQSQNAPVPSCVEVGKFGLEEEIERLKRDKNVLMQELVRLRQQQQTTDHQLQTLGKRLQGMESRQQQMMSFLAKAMQSPGFLAQFVQQNEKSRRRIVAANKKRRLPRQDGGLDSESAAASLDGQIIKYQPLINEAAKAMLRKILKLDSSHRLESMGNSENGNFLLENYMPGAQAFESSSSTRNSGVTLSEVSANPGLPYGGGGGTSSGLSAICPPEIQCPVVMDNMSSNQVPSMSAVPPVSKATIDMGIPEFSALADLVNEGSVDIPGGAFEMPGPEFPLPEGDDSVPIETDETMYNNNDETQSLPGIIDSFWEQFLVGSPLSADNDEVDSGSPQENGWSKVGNIGDLTEQMGLLSSTNHRDSGNGL

SEQ ID NO: 43716 - protein, 276 aa, Triticum aestivum
MAMASLARRRAAEAVLLRRPHAAAWASACRGYAASGEESDVVVIGGGPGGYVAAIKAAQLGLKTTCIEKRGALGGTCLNVGCIPSKALLHSSHMYHEAKSSFAHHGVKFSNLEVDLPAMMAQKDKAVSGLTKGIEGLFKKNKVEYVKGFGKLVSPSEVSVDLVDGGSTIVKGTNIIVATGSDVKSLPGVTIDEKKIVSSTGALALTEIPKKLVVIGAGYIGLEMGSVWNRLGSEVTVVEFAPDIVPSMDGEIRKQFQRMLEKQKFKFMLKTKGSRG

SEQ ID NO: 43717 - protein, 570 aa, Thermus thermophilus HB27
MNHHDLEHADPPFPELGEEVELFLETEAREGVLLYERDGELQKKPMAPWERGLKARVPVHASPFRYCFRLPQGYLGSHGLERTLPRYDRFFHLLAKPLPPEWALGAVFYQIFPDRFRQGRPELAPKEGAWLYGGRPIRKKAWHEPPGEDGAREFYGGDLFGVLEALPYLEALGVEALYLTPIFQSPSSHRYDTEDYHRVDPHLGGEEALRALYEALEARGMKLILDGVFNHVGATHPWFQKALKDPSSPERGMFTFYPDGSYASFWGVKHMPKLDYASALTQERFVFGKEAPVRYWMRLAHGWRLDVAHSIGEGGTNRKNARWLRALARAAKEEREDALVFGELSYDTVPTLRAHTLDGAMHYAGFAHPVMEWLSGRDLHGNPVALEAEELWRALFDHYAALPLQLRHAMYTLLSSHDIPRALWRLRGDKERFKTAYALLFAFPGSPAVYYGDEVGLSQPNPYEVWRGDPYCRAPFPWDEALWDKDLLAFLRRLILLKKTHPALRLGGLLPLKAPPGVLAFRRRHRGKEVWAFFAKEEVRLSLPRGVDLLSGREVAGEVEARYLLFEPSE

SEQ ID NO: 43718 - protein, 154 aa, Triticum aestivum
  misc_feature (19)..(19): Xaa can be any naturally occurring amino acid
  unsure (1)..(154): unsure at all Xaa locations
MSSGTSFASSQGTRSSRSXEDCPDLRAQMEKRRKRRKESNRESARRSRVRKQQHLDDLSSQVDQLKNQSQQMNMVLGMTTQNLVALQAQNSVMQTQKMELESRLCALGEIICCMNSITNTANPAAAMGATASSAYDIFGAGSTWSQPIDLYQCF

SEQ ID NO: 43719 - protein, 253 aa, Nocardioides sp. JS614
MSELLDFTGKVVLITGGATGIGRATALAFAQQGARVVVGDVDDRAAETVRLIEESGGTALFVRTDVTSAADVQQLVRTTVDTYGGLHVAFNNAGILPPTGPLAEQSEDDFDRTIAVDLKGVFLALKYEIEHMAAAGGGSIINTASVAGVIADPGMAPYVAAKHGVVGLTRAAAIDYAAAGVRVNALAPGLVDTPMTKVWQEDAEIWDAVAASNGFHRAAAPEEIAGTVLFLASDLASFTTGTVVTADAGQTAH

SEQ ID NO: 43720 - protein, 435 aa, Kineococcus radiotolerans SRS30216
MSEPATVSQRLDALPFTRRHTRLLLGSGVGWALDALDVGLVAYVLVALRQQWGLDAAQLSWIASVGFAGMAVGAALGGLLADRVGRRQVFALTLLVYGLATGAAALSWSLTALLVFRFLVGLGLGAELPVASTLVSEFAPRRIRGRVVVALEAFWAVGWTLAALIGYLLVPASDDGWRWALALGALPAVYAIVVRRGLPESVRFLLAKGRTAEAEAVVRDFEASAGVTSTAPLVPDPPAGARRGIWSAGLRRRTAGLWLVWFFVNFSYYGAFTWIPSLLVEDGFTVIRSLQFTLIITLAQLPGYALAAVLVEVWGRRRTLAVFLVGSALSALAYAGAGTTTTILLAGMALSFCNLGAWGALYAVTPEVYPTAVRGRGAGAAAGFGRIASILAPLSVPLLLDAGGSGAVFVVFGVAFAIAAAASFLLPERRGVALD

SEQ ID NO: 43721 - protein, 481 aa, Burkholderia sp. 383
MANVTYTDTQLLIDGEWVDAASGKTIDVVNPATGKPIGKVAHAGIADLDRALAAAQRGFDAWRKVPAHERAATMRKAAALVRERADAIAQLMTQEQGKPLTEARVEVLSAADIIEWFADEGRRVYGRIVPPRNLGAQQTVVKEPVGPVAAFTPWNFPVNQVVRKLSAALATGCSFLVKAPEETPASPAALLRAFVDAGVPAGVIGLVYGDPAEISSYLIPHPVIRKVTFTGSTPVGKQLAAMAGLHMKRATMELGGHAPVIVAEDADVALAVKAAGGAKFRNAGQVCISPTRFLVHNSIRDEFTRALVKHAEGLKVGNGLEEGTALGALANPRRLTAMASVVDNARKVGARIETGGERIGTEGNFFAPTVIADVPLEADVFNNEPFGPVAAIRGFDKLDDAIAEANRLPFGLAGYAFTRSFANVHLLTQRLEVGMLWINQPATPWPEMPFGGVKDSGYGSEGGPEALEPYLVTKSVTVMAV

SEQ ID NO: 43722 - protein, 388 aa, Gibberella fujikuroi
TIDIALWKFETPRYYVTVIDAPGHRDFIKNMITGTSQADCAILIIAAGTGEFEAGISKDGQTREHALLAYTLGVKNLIVAINKMDTTKWSEARYQEIIKETSSFIKKVGYNPKAVAFVPISGFNGDNMLTPSTNCPWYKGWEREIKSGKLSGKTLLEAIDSIEPPKRPVDKPLRLPLQDVYKIGGIGTVPVGRIETGVIKPGMVVTFAPSNVTTEVKSVEMHHEQLSEGQPGDNVGFNVKNVSVKDIRRGNVAGDSKNDPPMGAASFTAQVIVLNHPGQVGAGYAPVLDCHTAHIACKFAEIQEKIDRRTGKATEAAPKFIKSGDSAIVKMVPSKPMCVEAFTDYPPLGRFAVRDMRQTVAVGVIKAVEKSTGAAGKVTKSAAKAAKK

SEQ ID NO: 43723 - protein, 96 aa, Gluconobacter oxydans
MTKFRPLHDRVVVRRLTGEEKTAGGIIIPDTAKDKPTEGEVVSVGPGARNEQGQVVALDVKAGDKVLFGKWSGTEVKIDGEELLIMKESDIMGVIG

SEQ ID NO: 43724 - protein, 543 aa, Gluconobacter oxydans
MAAKDVKFGADARERMLRGVDILANAVKVTLGPKGRNVVLDKSFGAPRITKDGVSVAKEIELADKFENMGAQMVREVASKTNDIAGDGTTTATVLAQAIIREGAKAVAAGMNPMDLKRGIDKAVGVVVDQLKSNTKKITSPEEIAQVGTISANGETEIGEMIASAMQKVGSEGVITVEEAKGLHTELDVVEGMQFDRGYISPYFVTNPEKMTADLDSPYILIHEKKLSSLQPMLPLLESVVQSGRPLVIIAEDVDGEALATLVVNKLRGGLKIAAVKAPGFGDRRKAMLEDIAILTGGQVISEDIGIKLESVTLEMLGRAKKIHIEKENTTIVEGAGNSDDIKGRCNQIRAQIEETTSDYDREKLQERLAKLAGGVAVIRVGGSTEVEVKERKDRVDDALHATRAAVEEGIVPGGGTALARASSALKGLTFDNDDQRVGGEIVRKALQAPLRQIAFNAGEDGAVIAGKVLENEGYVFGFDAQKGEYKDLVAAGIIDPTKVVRTALQDAASVGGLLITTEAMVAERPEKKAPAAAPGGMGDMDF

SEQ ID NO: 43725 - protein, 361 aa, SYNECHOCOCCUS SP. WH 8102
MGQDLAVDTAPIGSAAAGPHAERLSNLVTAKRATVDRETGLELFRDMTLGRRFEDKCAEMYYRGKMFGFVHLYNGQEAVSTGVIGAMKRQHDWFCSTYRDHVHALSAGVPAREVMSELFGKETGCSKGRGGSMHLFSKEHHLLGGFAFIAEGIPVALGSAFTSRYKRDALGDASSNAVTAAFFGDGTCNNGQFFECMNMAQLWKLPILFVVENNKWAIGMAHDRATSDPEIWRKAASFGMAGEEVDGMDVLAVRAAAQRAVERARAGEGPTLLECLTYRFRGHSLADPDELRAEQEKQFWAQRDPLKALERDLCEANLVSSDELRSIEKEIDAIVQDCVEFALSAPEPDPTELTRYIWAED

SEQ ID NO: 43726 - protein, 428 aa, Shewanella sp. MR-4
MADLKAKLELPGNDSIELPVKQGSAGFDVIDISKLGSKGYFTFDPGFLATASCESAITYIDGDQGILLHRGYPIEQLAVDSDYLDLCYLLLYGELPTKEQYAEFVHTVKTHTMVHEQLAFFFRGFRRDAHPMAMLCGVTGALSAFYQDSLDVNDPRHREIAAYRLVSKMPTIAAMCYKYSSGQPFVYPRNDLSYAGNFLSMMFAVPCEEYKVNPIVERAMDRIFILHADHEQNASTSTVRLAGSSGANPFACIAAGIASLWGPAHGGANEACLQMLEEIGSVDRIPEFIARAKDKNDPFRLMGFGHRVYKNFDPRAKVMRETCHEVLKELKVQDPLLDVAMELERIALEDEYFISKKLYPNVDFYSGIIMKAIGIPTSMFTVLFALARTVGWIAHWKEMLDQPGHKISRPRQLYTGETARDFVSQDKR

SEQ ID NO: 43727 - protein, 229 aa, Candida albicans SC5314
MQIFVKTLTGKTITLEVESSDTIDNVKSKIQDKEGIPPDQQRLIFAGKQLEDGRTLSDYNIQKESTLHLVLRLRGGMQIFVKTLTGKTITLEVESSDTIDNVKSKIQDKEGIPPDQQRLIFAGKQLEDGRTLSDYNIQKESTLHLVLRLRGGMQIFVKTLTGKTITLEVESSDTIDNVKSKIQDKEGIPPDQQRLIFAGKQLEDGRTLSDYNIQKESTLHLVLRLRGGF

SEQ ID NO: 43728 - protein, 459 aa, Neisseria meningitidis Z2491
MLLDLNRFSFSVFLKEVRLLTALALPMLLAQVAQVGIGFVDTVMAGGAGKEDLAAVALGSSAFATVYITFMGIMAALNPMIAQLYGAGKTDEVGETGRQGIWFGLFLGVFGMVLMWAAITPFRNWLTLSDYVEGTMAQYMLFTSLAMPAAMVHRALHAYASSLNRPRLIMLVSFAAFVLNVPLNYIFVYGKFGMPALGGAGCGLATMAVFWFSALALWIYIAKENFFRPFGLTAKFGKPDWAVFKQIWKIGAPIGLSYFLEASAFSFIVFLIAPFGEDYVAAQQVGISLSGILYMIPQSVGSAGTVRIGFSLGRREFSRARYISGVSLVSGWMLAVITVLSLVLFRSPLVSMYNNDPAVLSIAATVLLFAGLFQPADFTQCIASYALRGYKVTKVPMFIHAAAFWGCGLLPGYLLAYRFDMGIYGFWTALIASLTIAAIALVWCLELCSREMVRSHKAV

SEQ ID NO: 43729 - protein, 372 aa, Photobacterium profundum SS9
MTITSFYPPQRTLMGPGPSDIYPQVLQALSRPTIGHLDPLFVGMMDELKQLLQYAFQTKNTFTIAVSAPGSAGMEACFVNLVEPGDKVIVCRNGVFGDRMRENVERCGGKAVVVDNTWGEPVDPLLVEQALIDNPDAKVLAFVHAETSTGALSDAEALAKLARQHDCLTIVDAVTSLGGVPLLVDEWQLDAVYSGSQKCLSCVPGLSPLTFSQRAIDKIQARKTPVQSWFLDQSLVLGYWSGEGKRTYHHTAPVNSLYALHEALVLLQNEGLENAWQRHKDAHLELREGLEKLGITFVVDEASRLPQLNAVYIPDGVDDALVRKKLLERYNLEIGAGLGALGGKAWRIGLMGYAARSENVALCLKALESTLK

SEQ ID NO: 43730 - protein, 539 aa, Pseudomonas syringae pv. phaseolicola 1448A
MKLLAVRRLFRIQRVVIRYRLDDLLFALPLPWWMLAVRFVLPWRWLPRRKSELSRGVRFRLALQDLGPIFIKFGQLLSTRRDLLPEDIADELMLLQDRVPPFDQQVAINLIEEQLGARICDVFSRFDETPLASASVAQVHAACLKTGEEVVVKVVRPGLKPVIGQDLAWLFILARMAERVSADARLLHPVQVVMDYEKTIYDELDLLREAANSSQLRRNFEGSDLLYVPQVYWDWCRPKVLVMERIYGLQVTDMAGLADQRTDMKLLAERGVEIFFTQIFRDSFFHADMHPGNIFVSTVNPWSPKYIAIDCGIVGSLTPEDQDYLARNLFAFFKRDYRRVAQLHIDSGWVPAETKLNEFEAAIRTVCEPIFEKPLKDISFGQVLMRLFQTARRFNMEVQPQLVLLQKTLLNIEGLGRQLYPDLDLWSTAQPYLERWMRERVSPKTLFGNLQSQVEQLPHIAGMTRDLLERMSRPHASDPPRPWHERKDEPVLRLIGAALLVGGAIQGWVMSEAATQLLTLTAWPAAIMLIAGLYLIVRR

SEQ ID NO: 43731 - protein, 177 aa, Zea mays
  misc_feature (126)..(126): Xaa can be any naturally occurring amino acid
  unsure (1)..(177): unsure at all Xaa locations
MVAAVDAVAEKVVAQLREECATPATRLDGVATAMEEEMRAGLHQEGGSKIKMIISYVDNLPNGSEEGLFYALDLGGTNFRVLRVQLAGKDKRVVKRESREVSIPPHLMSGSAAELFGFIASALAKXVADEGDNKVLDGKQRELGFTFSFPVRQSSIASGTLIKWTKAFAIDDAVGED

SEQ ID NO: 43732 - protein, 329 aa, Dehalococcoides sp. CBDB1
MKVLVSGASGRIGNVLVRELLKSGYGVRALVKPGDTALSIQGLDIERVEGDVTVYPSVLDGLKGCEAVFHLAGIVSLIPGREKELYETNIKGAANMADACLECGITRLLYTSSIHALSEPPPGTAFTEEEGYHPSDFPPGYNRSMAQGALEVLKRFSAGLSGVIVCPSGVIGPYDYDPSEMGRVVVDYARGKMSAYVDGGYDFVDVRDVAIGMISAFEKGQDGQSYILSGQYVSIKSLFEILGRLSGLTPPRLRVPYILAKLGAYISYPYYRLTHSAPLFTAYSLDVLRSNSNISSAKARCELGFSPRLAEESLADAYLWFKSKGYLSD

SEQ ID NO: 43733 - protein, 746 aa, Bradyrhizobium sp. BTAi1
MMGASFRIRLRLRRFTRRHHTLFTILRSAMIFMAGFGGAYGFIKASLSETSGYNPHAFAIGASFLFALACVGLATLSMRLRFMRKKMHKLALHNEVLADRNWELQEAEQRARSLFEQQGDLIVMRESDGTIIFVNDAYCRMAGLDRENLLGSQFSFDLLEQGDSALEPSGTRVHDQRIDSAIGPRWIAWREALVRSDAGHPAVQQCVGRDVTDRTETERALAEARDQANAANRAKSRFLAMASHEIRTPLNGILGMSGLLLETQLTPEQTTYAKAVRSSGEALMSLINELLDYSKIEAGKLALEAQPFALTALIEEITELLAPRAQGKQLEIAAYLDERLPTWVTGDAARLRQVLLNLAGNAIKFTSKGGVALIAEPGIWPNEISFQVRDTGIGIAADAQERIFREFEQADDSVARSFGGTGLGLAISDRIVKRMGGRIALQSQPGAGSTFEVSVPLPPALERGEQNSFRGPDLTGQSIMLIAPAGLQAELIERRLQNWGAQTCLVAETEIAAALLPERAWHAVLIDDAIGSEAARRLGEAAHHHTTRLIVLVTPTSRHELAPAAPFNGYLVKPLRAASLAARVSFDLDAGAAFAEHPIPTIAPSIAARAGTGLAILVAEDNDINALLMRSLLTKLGHHADIAVHGEAALDSWLAARAAGTPYDLILMDVQMPRLDGIAATRRIRAHEASEPGRRTPILALTANALVEDRYACFEAGMDGFLVKPIDRDKLDEALANLAAARQVAA

SEQ ID NO: 43734 - protein, 130 aa, Triticum aestivum
MAFSKSLGFILLAAFFISFTVAQSPAPAPSNGGGRRISPAHSPKKALSPAQAVSPSPQTALTPESSASPPSPPSVDSPLADSPSDSSAVSPSSISNSPAQAPAPVSGAVSNSYAVFGSIAVMLSAAVLAM

SEQ ID NO: 43735 - protein, 757 aa, Saccharomyces cerevisiae
MMRGFKQRLIKKTTGSSSSSSSKKKDKEKEKEKSSTTSSTSKKPASASSSSHGTTHSSASSTGSKSTTEKGKQSGSVPSQGKHHSSSTSKTKTATTPSSSSSSSRSSSVSRSGSSSTKKTSSRKGQEQSKQSQQPSQSQKQGSSSSSAAIMNPTPVLTVTKDDKSTSGEDHAHPTLLGAVSAVPSSPISNASGTAVSSDVENGNSNNNNMNINTSNTQDANHASSQSIDIPRSSHSFERLPTPTKLNPDTDLELIKTPQRHSSSRFEPSRYTPLTKLPNFNEVSPEERIPLFIAKVDQCNTMFDFNDPSFDIQGKEIKRSTLDELIEFLVTNRFTYTNEMYAHVVNMFKINLFRPIPPPVNPVGDIYDPDEDEPVNELAWPHMQAVYEFFLRFVESPDFNHQIAKQYIDQDFILKLLELFDSEDIRERDCLKTTLHRIYGKFLSLRSFIRRSMNNIFLQFIYETEKFNGVAELLEILGSIINGFALPLKEEHKVFLVRILIPLHKVRCLSLYHPQLAYCIVQFLEKDPFLTEEVVMGLLRYWPKINSTKEIMFLNEIEDIFEVIEPLEFIKVEVPLFVQLRKCISSPHFQVAEKVLSYWNNEYFLNLCIENAEVILPIIFPALYELTSQLELDTANGEDSISDPYMLVEQAINSGSWNRAIHAMAFKALKIFLETNPVLYENCNALYLSSVKETQQRKVQREENWSKLEEYVKNLRINNDKDQYTIKNPELRNSFNTASENNTLNEENENDCDSEIQ

SEQ ID NO: 43736 - protein, 368 aa, Streptococcus pyogenes MGAS10394
MHYLHRRKGSVMVSVMWFRRDLRIDVQKALAHAIASQSPTLCVFQFNKEQLNLLHSRNQSSFITSVLAFRKLLKCEGIDLYLMYGDLMTCFEQLLTQLKDWTDVYFNYDESGYGRLRDQKAAQFFKKNGIAVHTYQDHYLHGSQEIINQSGQPYKVFTPYYRIWQNYPKETPIKVELSQGRWLNLETPDDVLRTVESIKDEKYQDVATFDEASKQLNRFIQDQLAAYHANRDFPAQLGTSRLSPFLRIGAIGIRTVYHAVRQAPNSLGQATFLKELAWRDFYNMVYVAYPDQKTQPIQKAFSQIEWVNNPDWFQLWKEGKTGYPIVDAAMLQLQKTGWMHNRLRMIVASFLTKDLLCDWRLGEQYFQQ

SEQ ID NO: 43737 - protein, 506 aa, Propionibacterium acnes KPA171202
MRSVVTVKLVNGLAAQICSVGGAARVGAIRVSTPMRTWKKGTAVASTSTLDNVINLCKRRGFVFPCGEIYGGTRAAWDYGPFGVELKENIKRQWWRAMVTRRDDVVGLDSSVILPREVWVASGHVGVFNDPLTECLSCHKRMRADHLQEGHAAKHGIADPDSISLEEVNCPNCGNKGQWTEPRDFNMMLKTYLGPVEDKSGLHYLRPETAQGIFVNFQNVLTSARKKPPFGIAQTGKSFRNEITPGNFIFRTREFEQMEMEFFVEPGTDEEWHQYWIDVRTAWYTDLGINPDNLRHYEHPKEKLSHYSKRTVDVEYKFGFSGSDWGELEGIANRTDFDLGNHSRHSGKDLSYYDQANNKRYLPYVIEPAAGLTRSLMAFMVDAYTEDEAPNAKGGVDKRTVLKLDPRLSPVKAAVLPLSRNSDLSPKARDLAARLREHWNVDFDDAQAIGKRYRRQDEIGTPFCITVDFDSLEDDAVTIRERDTMAQQRVSIDKVEEYLGGKLLGC

SEQ ID NO: 43738 - protein, 216 aa, Zea mays
MEKYELLKDIGSGNFGVARLMRNKDTKELVAMKYIPRGLKIDENVAREIINHRSLRHHNIIRFKEVVLTPTHLAIVMEYAAGGELFDRICSAGRFSEDEARYFFQQLICGVSYCHFMQICHRDLKLENTLLDGSPAPRLKICDFGYSKSSLLHSKPKSTVGTPAYIAPEVLSRREYDGKHCSYATYRTPFLNLWQAIASTCDVASLLCASVMLTVL

SEQ ID NO: 43739 - protein, 249 aa, Glycine max
MKEITKMDDGSGKGSIEKNILMSRGDSKRDDRKDVGVPIGQIKKGLEEENASKKGKRGGFGKVSSLKKNNNGQNRRLITYDDDNNDDLKTIAPCSSKEKYKVQRAMDSCDVEELPSKKLKIDKKLAKLTSDKLRKESSMISPNVEHKLDFRPMEVTRRPNDEDRSKWFKEIPWEEKMKTAYEQGRLVLLQNLDPSLSSSEVQNIIWTGFKESCTARMIQKTAYSSPHSGQAFVIFKKSEAAESVVRKLD

SEQ ID NO: 43740 - protein, 206 aa, Zea mays
MFSGTQQKCKVCTKTVYPMDQLSTDGVVSFQSQSPVFHRSCFKCQHCKSTLSLSNYSSFEGVPYCKTHFEQLFKETGSYNKSFQSQSPAKITPEKLAPELTRSPSKAARMFSGTQDKCATCGKTAYPLEKVTVEEKSYHKSCFKCSHGGCAITPSNYAALEGILYCKHHFSQLFKEKGSYNHLIKCASVKRAAEAQPEQPASDSSS

SEQ ID NO: 43741 - protein, 324 aa, Magnaporthe grisea
MASPTMKLNNGLDMPQVGFGLWKVENSVCADVVYNAIKAGYRLFDGACDYGNEVECGQGVKRAIDEGLVKREELFIVSKLWNTFHDGERVEPIVKKQLADWGIEYFDLYLIHFPVALEYVDPSVRYPPGWHYDDAGTEIRPSKASIQETWTAMEKLVDAGLSKAIGVSNFQAQLLYDMLRYARIRPATLQIEHHPYLVQQRLIEACKTEGIVVTAYSSFGPASFKEFNMEHAEALTPLLEEPTIVKLAEKYGKDPGQVLLRWATQRGLAVIPKSSREKTMKSNFEAVGWDMEDSDIKTISALDKGIRFNQPANYFSTDKLWIFG

SEQ ID NO: 43742 - protein, 354 aa, Oryza sativa; identical to SEQ ID NO: 1267

SEQ ID NO: 43743 - protein, 313 aa, SYNECHOCOCCUS SP. WH 8102
MVSTAQKPTDSQRRRSSDPVSWYLATIGRIPLLTPAEEIELGNQVQAMMTLTEDGSKTFEDHELTGKQRRMLRIGRRAKERMMKANLRLVVSVAKKYQGKGLELLDLIQEGSLGLERAVEKFDPTRGYKFSTYAFWWIRQSMTRAIACQSRTIRLPVHLSERLTTIRKVSLDLAHKLGAMPSRVEIAEAMDIPLDELDSLLRQALTTSSLDAPVNGEEGRSFLGDLIADSSLDEPLDIVEQRIHHEQLGRWLSHLSEQEQHVLKLRFGLEGNERHTLAEIGRLMDVSRERVRQVELKALRKLRNLTRRLPSGI

SEQ ID NO: 43744 - protein, 104 aa, Brassica napus
  misc_feature (97)..(97): Xaa can be any naturally occurring amino acid
  unsure (1)..(104): unsure at all Xaa locations
MGVVFISSSAARSPLGLSTDLRTQRSSLKKPSIVAFKADDSTPTNSSLIIDKQKEKRAVATRRKPCKDTKTTKSLDQHVAPSCPLDYNEAAARLESXYKLSPPP

SEQ ID NO: 43745 - protein, 430 aa, Triticum aestivum
MDPIVIQGWTSSQVEEAPSLIARLNTNKIMYDANDDKNKKHNYIVNSLHALFPSKTMQQVTDRYVDLAVEMHMIQRREGTHVTGGSPQNMLTFCDPVNGNYELPGEENGASSTHGLYTMGDHANGNFGVREEEATIMDNNGLSFGCAMENTGITVTGEAPLMADNNKMEVLENNISIDQPVVAPHQWGFWTDEEHSMGGLVNENFEAQEDEDTTMDDNGFSFRCALEDTRIRKTEEAPMMVDKNKMVVLENNTSVDRPVVAAHQRKFWTKEERKSFLYGLEVYGRGDWKNISKHFVTTKTPVQVSSHAQKFFKRIQKKASSGTKRYSINDVRLHDNELLAANNSSVTRQALSFTGLNNDPSFRLQAPTSSLTVMNNQAQCSPSIYNQQVDQQPMWSEQQMMGSVAAVMDGIGNYVPDGQQGPAYFYLGNV

SEQ ID NO: 43746 - protein, 52 aa, Mesorhizobium sp. BNC1
MDVIRILLAIVLPPLGVFLQVGIGLQFWINILLTLMGYIPGIIHAIWVITRR

SEQ ID NO: 43747 - protein, 116 aa, Gibberella fujikuroi
PDQQRLIFAGKQLEDGRTLSDYNIQKESTLHLVLRLRGGMQIFVKTLTGKTITLEVESSDTIDNVKSKIQDKEGIPPDQQRLIFAGKQLEDGRTLSDYNIQKESTLHLVLRLRGGQ

SEQ ID NO: 43748 - protein, 702 aa, Zea mays
GTRDDNASMMEAFMASADLPTFPWGAPAGGGNSSAAAASPPPQMPAAMAPGFNQDTLQQRLQAMIEGSRETWTYAIFWQSSLDSATGASLLGWGDGYYKGCDEDKRKQKPLTPSAQAEQEHRKRVLRELNSLISGAAAAPDEAVEEEVTDTEWFFLVSMTQSFLNGSGLPGQALFAGQPTWIASGLSSAPCERARQAYNFGLRTMVCFPVGTGVLELGSTDVVFKTAESMAKIRSLFGGGAGGGSWPPVQPQAPSSQQPAAGADHAETDPSMLWLADAPVMDIKDSLSHPSAEISVSKPPPHPPQIHFENGSTSTLTENPSPSVHAPPPPPAPAAPQQRQHQHQNQAHQGPFRRELNFSDFASTPSLAATPPFFKPESGEILSFGADSNARRNPSPVPPAATASLTTAPGSLFSQHTATMTAAAANDAKNNNKRSMEATSRASNTNHHPAATANEGMLSFSSAPTTRPSTGTGAPAKSESDHSDLDASVREVESSRVVAPPPEAEKRPRKRGRKPANGREEPLNHVEAERQRREKLNQRFYALRAVVPNVSKMDKASLLGDAISYINELRGKLTSLETDKETLQTQVEALKKERDARPPSHSAGLGGHDGGPRCHAVEIDAKILGLEAMIRVQCHKRNHPSARLMTALRELDLDVYHASVSVVKDLMIQQVAVKMASRVYTQDQLSAALYSRLAEPGSAMGR

SEQ ID NO: 43749 - protein, 402 aa, Zymomonas mobilis subsp. mobilis ZM4
MTCFDHHFYQALIGLDQKKLRRTISGIKPEEGAMISALSDNELLCDFSSNDYLGLSSHPLLKERSQLWTDQFGVGSRASRLVSGTLPIHLEVEKKVALLKGKEAALLFPSGWQANASVLPALFRLSLEQTGHKALVFTDKLNHASIHLGCSAAGIKQIRFRHNDLPHLEQLLEKQKQVNGLRFIITESVFSMDGDQADIGTLRQIADKYNAFLYVDEAHATGVLGENGQGLAGGANGADLIMGTFSKALGCFGAYIAGSTLLCDWLVNSCSGFIYSTAIPPSVIGAMDAALDILPTLSKERKQLIERSNHIRKEFQSMGLDTGLSSTHIIPVVIGNNEATLLAAQRLKDEGILAIAIRPPTVPLHAGRLRFAITSLHNDAMLEHLSHVMKKLAAEIHRGSSI

SEQ ID NO: 43750 - protein, 480 aa, SYNECHOCOCCUS SP. WH 8102
MSDASFDFDVIVIGAGYGGFDAAKHAAEHGLKTAIIESRDMGGTCVNRGCVPSKALLAASGKVRELADDQHLASFGIHAAPVRFERQKIADHANQLVQTIRTNLTKTLERAGVTILRGHGRLEGSQRVGLREPSGVDRVLSARDVIVATGSDPFVPPGIETDGRTVFTSDEAINLEWLPRWIAIVGSGYIGLEFADVYTALGCEVTMIEALDRVMPTFDPDIAKIAGRHLIDGRDIDARSGVLASKVTPGCPVRIDLADFNSRELVETLEVDAVLVATGRVPSSKGLNLESLNIETNRGFVPIDDSMRVLVNGQPVPHLWAVGDVTGKLMLAHTAAAQGTVAVDNILGQNRTIDYRSIPAATFTHPEISSVGLTEAEAKQLAETDGFQLGSVRSYFKANSKALAELESDGLMKLLFNKSSGEVLGAHIYGLHAADLIQEVANAVARRQSVRQLSTEVHTHPTLSEVVEVAYKQAASQLTA

SEQ ID NO: 43751 - protein, 235 aa, Triticum aestivum
  misc_feature (148)..(148): Xaa can be any naturally occurring amino acid
  unsure (1)..(235): unsure at all Xaa locations
MEDYGGVASLVASGVVLWSTAFLLLRALLPKRSYDFCNRAVSTMHAVTGVALGCLSVQDWASPVSPVASPSSPSQMRALAVTLSYMIYDGACCHLSGDARLDNALHHLISIVGLAAGLAYQRCGTELVACLLVTEISSPLLHLREMLXKEIGVKDTDLNLLVHILFAVTFSVARMVCGTYVTYRTVTADNPILISARGTSLLLVSAYWFLRILRMVRHKIGKKRLASKAAGKESM

SEQ ID NO: 43752 - protein, 208 aa, Photobacterium profundum SS9
MMTTIVKSHDNENIVWHRHNVDKSSRAEQKKQKPCVLWFTGLSGAGKSTVAGALENRLVELGYHTYLLDGDNVRHGLCRDLGFSSEDRRENIRRIGEVAKLMADAGLIVLSAFISPHRAERQLVKDLLPEGEFIEVFVDASLDVCEKRDPKGLYKKARAGEIKQFTGIDSEYQAPVNPEVHLHAGDKTVSELVELSLHSLRKRAIIRD

SEQ ID NO: 43753 - protein, 448 aa, Prosthecochloris aestuarii DSM 271
MVHPNNDHSLTITDNRTGKSYTIPIECGTVRTMDLRQIKVKEDDFGLLGYDPGFLNTASCKSQVTYIDGEKGILRYRGYPIEQLAEKSSFLETAYLLIKGQLPDHDRLAAWGKNIQSHTMVHTNLAKFMDGFRYDGHPMGILVGTVGALSTFYPGAKNIFDKESRKLQVRRLIGKMPTLAAMSFRHSMGFPYVLPDNDLSYTGNFLSMMFKMTELKYTPNPVLEKALDVLFILHADHEQNCSTSAVRSVGSSQVDPYSALAAGCAALYGPLHGGANEAVIRMLERIGSVDRVPEFIRSVKSGEGRLMGFGHRVYKNYDPRARIIKKIAFEVFDVTGTNDLLDIALELERIALEDDYFVSRKLYPNVDFYSGLIYQAMGFPLDMFPVLFAIGRTPGWLAQWTEHVNDSEQKISRPRQMYLGEEQRDYVLIDERLPLNPDEELMPGMCRL

SEQ ID NO: 43754 - protein, 83 aa, Brassica napus
DGILVPGGFGDRGVQGKILATKYARTNQVPFLGICLGMQLAVVEFARSILGFEDANSTEFEPETPSPCVIFMPEVIRPYSLFI

SEQ ID NO: 43755 - protein, 1275 aa, Magnaporthe grisea 70-15
MTVFIASLFLPKTVHFRLPGTPSRSAPPPALDKDRAKGDVPAGGLKSPSHAKQPSLFKDITPPETPIEERPAAEDIFANEDGLAVPQFPAPTDAGKQRGPADRGSPTWGARRDQPMSRANSPPPSSLLNHNKTLALKARELGRMGVKQPLSLTRSDSHDRVFAQADYTIVNADQGNGGLRNAAEAAAREGKLGDHTYVGTLGMPTDALDGTQQKQDIEDRLATEHDCLAVWCSDKDFDGHYSHFCKQILWPVFHYQIPDNPKSKAYEDHSWKYYVNVNQAVADKIVKNWKRGDVIWVHDYHLLLVPGMIRKKLPDAKIGFFLHVAFPSSEVFRCLAVRRELLEGMLGANLVGFQIHEYTRHFLQTCSRILSAEATPDGLQLEDRFVDVINMPIGIDPVALSEHRKEPQVLEWVNKLRKQYEGKHLIVARDKLDHVRGVRQKLLSYELFLNQNPEWRGKTMLIQVALSTSEKSELDATVSDIVTRVNSSWASLTYQPVTYLKQDIGYAQYLALLTIADALMITSQREGMNLTSHEFLACQDGKNSNDKKHGSLILSEFTGTSSLFGGNELSVNPWDYRACADAIKKALEMSAEEKERRWTKLYQAVSHHTGAHWFTEFMLRLDRVHEEQHRRDQTSVPRLSVASLSAQYKRSSKRLFILDYEGTLVSWGPVNQIIPVSPQVQNATSTNPLSAGQQGQPEGRQHIVHPRLGPLTLASPPTIVTHQPPTTIRDVESNVLSPIRPSSPYTTLNKTMRPGDPIQYTDTNPQRTLDVLSDLLLDEQNTIYVMSGRRPEELDRLFRARIPNLGLIAENGCLLRKCGADSWTEMADAGHIKNWKESVRGIMTYFLERTPGAEVEERRCSLVFHYKNAEDYEAAARQASDCASHINDACESQRVHAVALDGCVVVEPVDWTKGTAAEKIFDDLRSGDLSPDFLMVVGDGREDEKVFKWANQLGEEGTVKDVVTVSLGSRNTEARATLTQGVSGLNAASSRNVAGSFPCPRGTDRRLAHRHIALQPTDLHAGSRGTCYLTAVTYHSSSHPHPGPPLKNTRFLATDSLASHQWAYYALTNGAGQGQVPNNTMQGDYQDQFSTDAVKGLEPTTTGTSLRITYGSESGACDDSPAVVDGVAQGNASHATYSVVQHRGYLVAEETGNYTLNVAGSDLVAAWFGQYAVSGWDWSNAAVVAQSASEDDDGGLDGWQSYSFNATQGDYIPMRIMYVNAQGCSALGVNLTRPDGMEILGADDIRSQNVIRDCIGGDPRFPNMALPFVPWAQES

SEQ ID NO: 43756 - protein, 815 aa, Rhodobacter sphaeroides
MIAEKSERFFPFAVSAELAPVGVSAAERSALADYLESSETLLTERVVAYASTRSYSHLVSTLPEAWRSSVQGLTDSVILMLDHQSAEAAIDYDADIGTDPSTAYGIEAGLRHRLRGISLETFIGAFKGYRDVYLNVTAEARVPAAMREGWLRLLRGFFDRAEIGICAHWSGELGTLDHDQLLSVNRALVNEKNKYLTIFESMNNPVLLVDDGGRIENMNFAAARLFLQDALPGSVYYGPEANLRFADLAGFDLEAVKLRGEAGDVLTCIGERWYSITAQEMLDVSRKFVGIVVTFHDVTEARRAREQAEALARAKTDFLATMSHEIRTPIHSIGGVTELLKQSELASRDRGYVDAIERSTEVLASIVSDVLDYARIESGLVELEQVDFSIDQILDDVARMMQPLVRRKPQLRIVIERTDLPAGPGKMQASLRQILINLTSNAVKFTPEGTVVIGAERLAGGHRFRFTVSDTGPGIAAEKLEEIFKPYIQSDSSISRRHGGTGLGLAICRRLAGHLGGRLDVRSTPGFGSRFTLEVALAPGGSEPPGDATGDAPPPARALDLLVVEDDEVNALVAQSLLSAAGHGVRVAGTGEAALVRPRRSTAFDLVLTDLNLPDMDGLELARTIRRHADRHTAELPLVALSAHGPGVDPAALTEAGIDAFLGKPFHFARLEEILSRLVGSSSPTPLGKAAPARRALQSVDLCVLRGHAEALGRTSAARIVQTFRQSVLETARALELAMDEADMRSVTSLAHRLKGAARHLGFRGLSDKAEQVETAAAADGCEAALVLELVSDCRAAPALADLAWAEASAGVAES

SEQ ID NO: 43757 - protein, 454 aa, Pseudomonas syringae pv. syringae B728a
MSANNPQTLEWQALSSEHHLAPFSDYKQLKEKGPRIITRAEGVYLWDSEGNKILDGMSGLWCVAIGYGREELADAASKQMRELPYYNLFFQTAHPPVLELAKAISDIAPEGMNHVFFTGSGSEGNDTMLRMVRHYWALKGQPNKKTIISRVNGYHGSTVAGASLGGMTYMHEQGDLPIPGVVHIPQPYWFGEGGDMTPDEFGIWAAEQLEKKILELGVENVGAFIAEPIQGAGGVIVPPDSYWPKIKEILSRYDILFAADEVICGFGRTSEWFGSDFYGLRPDMMTIAKGLTSGYVPMGGLIVRDEIVAVLNEGGDFNHGFTYSGHPVAAAVALENIRILREEKIVERVRSETAPYLQKRLRELSDHPLVGEVRGVGLLGAIELVKDKTTRERYTDKGAGMICRTFCFDNGLIMRAVGDTMIIAPPLVISFAQIDELVEKARTCLDLTLAVLQG

SEQ ID NO: 43758 - protein, 261 aa, Zea mays
  misc_feature (155)..(155): Xaa can be any naturally occurring amino acid
  unsure (1)..(261): unsure at all Xaa locations
MGNANAKEGENGHMAASPEPAAPNGGGGSSSSAGGAAARPPPLSPPDDVMLERPPPVPYLFVPQVPETPLHRPTELSPLLNHSPVNDSTDQHSQEQGIPTLITWSQGGDEVFLEGSWDNWTSRRALERSGKDHAVLLVLPSGVYHYRIIVDGELXDYVPESLDSVAEFEAPPSPVHSYDLHCPGDEEFAKEPPTLPPQLLMSVLGGDVDSAGSQALKPQHVVLDHLFIEKGWGSQSLLALGVTHRFESKYVSFVLYKPLER

SEQ ID NO: 43759 - protein, 446 aa, Candida albicans SC5314
MTAETIAKAANSAFASLKTLTNDQRSLALQKIHDALLTNKDKILESNKLDMENAQSQNLSSSLIKRLDLSNPGKYDSMLQGILDVAQLPDPMGKITLAKKLDEGLNLYRVTAPIGVLLIIFESRPEVIANITALAIKSGNSAILKGGKESYQTFKIMSEIINQTLQIETDVPRDAIQLIQSREDVADLLNQDKYIDLVIPRGSNELVRNIKSNTKIPVLGHADGICSIYVDEKFDIIKAKKIIVDSKTNYPAGCNAVEQLLINSHIPQQQIIEILQILIAAKVTIHVTPEIKQIISSGDNININIKGDDYIKDVEADSFDKEYLSFDISVKLVDNVDEAIKHINEHSSKHTECIITEDKAIAEKFLKSIDSAGIYWNASTRFADGFRYGFGTEVGISTNKIHARGPVGLEGLMSYQYQLKGDGHIVGEYVGGGGNKLFIHEDLSTN

SEQ ID NO: 43760 - protein, 480 aa, Pisum sativum
MKLLSTKATCNSHGQDSSYFLGWQEYEKNPYDHVQNPKGIIQMGLAENQLSFDLLESWLAKNQDVGGFKRDGKSIFRELALFQDYHGLPSFKKALVDFMAEIRGNKVTFDPNHIVLTAGATSANETLMFCLAEKGEAFLLPTPYYPGFDRDLKWRTGVEIVPIQCTSSNNFQMTESALQQAHEDAKKKNLKVKGVLVTNPSNPLGTTMSKNELNLLIDFIKDKNMHLISDEIYSGTVFTSPNFVSVMEILNERTDKDFLDANVSERVHIVYSLSKDLGLPGFRVGAIYSDNETVVAAATKMSSFGLVSSQTQYLLSAMLGDKKFTRNYLSENQKRLKKRQKMLVNGLQKAGISCLKTNNAGLFCWVDMRNLLTSDTFEAEMDLWKKILYEVGLNISPGSSCHCTEPGWFRVCFANMSEDTLNLAMKRLKDFVSNSNGEEGSNSDNKRTRSSQSSRSFTRKSISNWVFRLSSRDHHEQEER

SEQ ID NO: 43761 - protein, 178 aa, Bacillus anthracis str. A2012
MSEKTYELATFAGGCFWCMVKPFDELPDIHKVLSGYAGGHVENPTYEQVKAGTSGHLEVVQITFDPSIFPYEKLLNLYWPQIDPTDDGGQFFDRGPSYRTAIFYHTETQKELAEKSKHSLAESGMFKDPIVTEIRPAAPFYEAEEYHQHFYKKNPEKYATEQKESGREDFIKENWQKK

SEQ ID NO: 43762 - protein, 270 aa, Thermosynechococcus elongatus BP-1
MKSYLAAAVQMTSQPNLEANLAQAEELIELAVRRGAELIGLPENFSFLGDDREKVAQAATIAERTEAFLKRMAQRFQITLVGGGYPVPATEGKVYNTAVLIGPTGEELSRYQKVHLFDVDLPDGNIYHESGTVLAGQQLPSVYPSKELGNIGLSVCYDVRFPELYRALSQAGATVLFVPAAFTAFTGKDHWQVLLQARAIENTCYVIAPAQTGVHYARRQTHGHALIVDPWGTILADAGDRPGLAIAAIEPSRLEQVRQQMPCLQHRVFF

SEQ ID NO: 43763 - protein, 489 aa, Symbiobacterium thermophilum IAM 14863
MFKLDRTSATPLYRQLYAQAKERILSGALPPGTRLPPERTLARRLGVNRTTVVNAYRELAAEGLVEGRVGHGTVVLGPPEPRGADAVRPMPWAGPTEAEEPLVADINAIIRRPGAISFAHGEMSPELYPAEAVAHLMQQVLQDPAALGYGPIAGLMPLRQAIADAMGVTADQVLILAGSQIALYLISRVLLQPGDTVLVEMPSYINTLGIFDSAGVRVVPVPVDQHGLVVDGLDELMLRYQPKLLFTLPTFHNPLGVTLTPERRRRLIQLAARHQVGIVEDDPYGPLHFTGQPVPTLKSLDPGGYVIYISSASKAVSPALRLAWIVAAPPVVERIARARGSLDFRAALLNQRVMEAFLREGLLAEHLGRLRPALKERRDLMLEALQRYMPDGVSWYVPEGGYHIWCRLPRPLTARRLLTEAGREGVAFVPGDFYGAGQMARRGLRLNFSYPRPEEIGPGIARLARAVERLLREEAVDGGEEASISGPVV

SEQ ID NO: 43764 - protein, 487 aa, Pisum sativum
MGVMNLDQPQLLSKIAMGDGHGEASSYFDGWKAYDKDPFHPSKNPHGVIQMGLAENQLTADMVQNWIMSNPEASICTLEGVHNFKQMANFQDYHGLPEFRNAVAKFMSRTRGNRVTFDPERIVMSGGATGAHEATAFCLADRGEALLVPTPYYPGFDRDLRWRTGVKLVPVICESSNNFKLTKQALEEAYEKAKEDNIRFKGLLITNPSNPLGTVMDRNTLRTVITFINEKRIHLISDEIYAATVFSHPSFISIAEIIEHDTDIECDRNLVHIVYSLSKDMGFPGFRVGIIYSYNDTVVDCTRKMSSFGLVSTQTQYLIAKMLSDDDFVEKFLPESAKRLAQRYRVFTGGLIKVGIKCLQSNGGLFVWMDLRGLLKNATFESEIELWRVIIHEVKINVSPGVSFHCSEPGWFRVCYANMDDRDVQIALQRIRSFVTQNNKEAMGSDKNSKPYWHSNLRLSLKPRRFDDIMMSPHSPIPQSPLVKATT

SEQ ID NO: 43765 - protein, 449 aa, Streptococcus agalactiae NEM316
MNNSAANIRSFELALLFLLVFVAVYFVYLAVRDFKMSKNIRLLNWKVRDLIAGNYSDSILIQGDADLVELGESLNDLSDVFRMAHDNLEQEKNRLASILTYMTDGVLATDRSGKIVMINETAQQQFNLAYDEALSMNIVDMLGSGSPYSFQDLVSKTPEVVLNRRDENGEFVTLRIRFALNRRESGFISGLVAVSHDATEQEKEERERRLFVSNVSHELRTPLTSVKSYLEALDEGALNEEVAPSFIKVSLDETNRMMRMISDLLSLSRIDNEVTHLDVEMTNFTAFMTSILNRFDQIRNQKTVTGKVYEIVRDYPLKSIWVEIDTDKMTQVIDNILNNAVKYSPDGGKITVNLRTTKTQMILSISDQGLGIPKKDLPLIFDRFYRVDKARSRQQGGTGLGLSIAKEIVKQHKGFIWAKSEYGKGSTFTIVLPYDKDAVTYEEWEDVED

SEQ ID NO: 43766 - protein, 328 aa, Magnaporthe grisea
MAKTSIKLNSGYEMPLVGFGIWKVPVDKTAQAVYDAIKLGYRQIDGAYDYTNSKEAGEGVRRAIEEGIVKREDLFITSKLWNNYHKHEHAIEMAKHEVDTWGIGYLDLFLIHFPISLEYISHSKMPYPCFWPDREKSRSTPLQYTPVAETWAALESLVKTDSNPDGILRSIGVANFRAQLLTDLWGSAKIKPAVNQIEHHPYLVQPQLLAFLKDHGIAITAYSSFGPQSFVELDHPRVSKVEPLFTHPTIKAIADKHGRTGAQVLLRWATQRDIVVIPKSNNVDRLKQNLDCVSFDLSDDEVKQISDLDCGVRFNDPADLSPPIYIFD

SEQ ID NO: 43767 - protein, 597 aa, Zea mays
SPHLSEANPWVCVAESFLRVAAFVFPSSADPSPCGCQALLESKKTHGELGDFTTNRRSPLLLAIVEGERERERPRSVGFGFGRQLQLSATATMGLRVAATAPAPAGVRVLGRGAARVTPRPWAAVGGRRRFSVRMSVATTEATTTIAVGASEDQALEARNSKTVVAVILGGGAGTRLFPLTRRRAKPAVPIGGAYRLIDVPMSNCINSGINKVYILTQFNSQSLNRHLSRAYDFSNGVAIGDGFVEVLAATQRPGTEGKRWFQGTADAVRQFDWLFDDAKSKDIEDVLILSGDHLYRMDYMDFVQSHRQRGAGISICCLPIDGSRASDFGLMKIDDTGRVISFSEKPKGDELKAMQVDTTVLGLSKEEAENKPYIASMGIYIFKKDILLNLLRWRFPTANDFGSEIIPASAKEIDVKAYLFNDYWEDIGTIKSFFEANLALAEQPPRFSFYDADKPMYTSRRNLPPSMVNNSKITDSIISHGCFLDNCRIEHSVVGVRSRIGSNVHLKDTVMLGADYYETAVERGELLAEGKVPIGIGENTTIQKCIIDKNARIGKKVVISNSEGVDEADRTSEGFYIRSGITVVLKNAIIADGLVI

SEQ ID NO: 43768 - protein, 573 aa, Nocardia farcinica IFM 10152
MGQTRIQARTATKHIFVSGGVASSLGKGLTASSLGQLLTARGLRVTMQKLDPYLNVDPGTMNPFQHGEVFVTEDGAETDLDVGHYERFLDRDLSRDANVTTGQIYSSVIAKERRGEYLGDTVQVIPHITDEIKNRILAMRGPDLQGQTPDVVITEIGGTVGDIESQPFLEAARQIRHDVGRDNVFFLHVSLVPYLAPSGELKTKPTQHSVAALRNIGIQPDALILRCDREVPQALKSKIALMCDVEVDACISTPDAPSIYDIPKVLHREGLDAYVVRRLGLPFRDVDWTVWGDLLDRVHSPREEVEVALVGKYVDLPDAYLSVTEALRAGGFASRAKVNIRWVASDECETAAGAAAALRDVDAILIPGGFGIRGIEGKVGAIHFARTRGIPLLGLCLGLQCVVIEAARSIGLTDANSTEFEPDTQHPVISTMADQKQAVAGEADLGGTMRLGAYPAVLEKGSVVARAYGSEQVSERHRHRYEVNNAYRDKIATSGLKFSGTSPDGLLVEFVELPAEVHPFFVATQAHPELKSRPTRPHPLFAALIAAALKYKLAERLPVDIPDDELASAEQGA

SEQ ID NO: 43769 - protein, 262 aa, Zea mays
  misc_feature (203)..(203): Xaa can be any naturally occurring amino acid
  misc_feature (215)..(215): Xaa can be any naturally occurring amino acid
  misc_feature (232)..(232): Xaa can be any naturally occurring amino acid
  misc_feature (242)..(242): Xaa can be any naturally occurring amino acid
  misc_feature (252)..(252): Xaa can be any naturally occurring amino acid
  unsure (1)..(262): unsure at all Xaa locations
MICSSLLRVSSRSAVRPSHSFSQSASNLPRICAINRWQRGYATEAKEHDLVIIGGGVAGYVAAIKAGQEGLKVACIEKRGMLGGTCLNVGCIPSKSLLNNSHMYHQILHDTKKRGIEVGDVKLNLQQMMAAKNTSVDGLTKGVEFLFKKNKVEYIRGTAAFSGEHEVTVNKTEGGETTLRAKNILIATGSEATPFPGLTIDEXRVVTSTGAISLXKVPKKMVVIGGGIIGLXEMGSVWSRLXAEVTVVEFLXIGGPGMDANI

SEQ ID NO: 43770 - protein, 381 aa, Zingiber officinale
MASTVDNILLLLLLLSSSALAAVSSAPYQDVLTLSKQGGAVPVRSDEEVRMLYLEWRVKNHPAEKYLDLNEYRLEVFKENLQFVDEHNAAADRGEHTFLLGMNRFADLTNEEYRTRFLRDFSRLRRSASGKISSRYRLREGDDLPDSIDWRENGAVVPVKNQGGCGSCWAFSTVAAVEGINQIVTGDLISLSEQQLVDCTTANHGCRGGWMNPAFQFIVNNGGINSEETYPYRGQNGICNSTVNAPVVSIDSYENVPSHNEQSLQKAVANQPVSVTMDAAGRDFQLYRSGIFTGSCNISANHALTVVGYGTENDKDFWIVKNSWGKNWGESGYIRAERNIENPNGKCGITRFASYPVKKGANTAAIPNWALTSSGGLKSSA

SEQ ID NO: 43771 - protein, 216 aa, Zea mays
  misc_feature (18)..(18): Xaa can be any naturally occurring amino acid
  unsure (1)..(216): unsure at all Xaa locations
MSKLQSESVKEAISQIVXDAKEKNRKFTETVELQIGLKNYDPQKDKRFSGSVKLPHIPRPKMKVCMLGDAQHVEEAEKMGLDYMDVEALKKMNKNKKLVKRLAKKYHAFLASEAIIKQIPRLLGPGLNKAGKFPTLVTHQESLESKVNETKATVKFQLKKVLCMGVAVGNLAMEEKQIQQNIQMSVNFLVSLLKKNWQNVRCLYVKSTMGKPYRVF

SEQ ID NO: 43772 - protein, 379 aa, Zingiber officinale
MASTVDIILLLLFSSSALAAVSSVPYQDVLTLSKQGGAVPVRSDEEVRMLYLEWRAKNHPAEKYLDLNEYRLEVFKENLQFVDKHNAAADRGEHTFRLGMNRFADLTNEEYRTRFLRDFSRLRRSASGKISSRYRLREGDDLPDSIDWREKGAVVPVKNQGGCGSCWAFSTVAAVEGINQIVTGDLISLSEQQLVDCTTANHGCRGGWMNPAFQFIVNNGGINSEETYPYRGQNGICNSTVNAPVVSIDSYENVPSHNEQSLQKAVANQPVSVTMDAAGRDFQLYRSGIFTGSCNISANHALTVVGYGTENDKDYRTVKNSWGKNWGESGYIRVERNIGNPNGKCGITRFASYPVKKGTNTAAIPNWALTSSGGLKSSA

SEQ ID NO: 43773 - protein, 475 aa, Zingiber officinale
MASFVAVVLLFLLSSSALTAVSVVPPLDILTLSKQAWAAPAGRSDEEVRIIYQEWRVKHRPAENDQYVGDYRLEVFKENLRFVDEHNAAADRGEHAYRLGMNRFADLTNEEYRARFLRDLSRLGRSTSGEISNQYRLREGDVLPDSIDWREKGAVVAVKNQGRCGSCWAFAAIAAVEGINQIVTGDLISLSEQQLVDCSTRNYGCEGGWPYRAFQYIINNGGVNSEEHYPYTGTNGTCNTTKENAHVVSIDSYRNVPSNDEKSLQKAAANQPISVGIDASGRNFQLYHSGIFTGSCNTSLNHGVTVVGYGTENGNDYWIVKNSWGENWGNSGYILMERNIAESSGKCGIAISPSYPIKVGATNLRNPTTSSSSVPSLVESLTACDNYYTCSGSTTCCCMHERGNRCFAWGCCPLEGATCCKDHYSCCPFNYPICSVADDNCLMSKNSPLRVKASRRTPAIPNWVLSSSGGLKSSA

SEQ ID NO: 43774 - protein, 467 aa, Propionibacterium acnes KPA171202
MSETVQDKVDFLVIANRLPVDRKVDDDGSVSWKSSPGGLVTALEPVMQRKGGAWIGWHGAPDVVVKPFHHDGYDIHPVPLSAQEVEEYYEGFSNATLWPLYHDCIVEPVFHREWWDAFQKVNKRFAEQAAEQAAEGATVWVQDYQLNLVPKYLREMRPDLRIGFFLHIPFPPIELYSRLPWREELVEGLLGADLIGFQTPGAAANFQRLARHRPGVTAARGRAHTPDGRTVVIRDFPISIDSRGFHELATSEKVKAEAAKLREDLGHPGTIIFGVDRLDYTKGLRQRIRAVGELFKEGKLDPHEVVFLQLATPSRERVEEYKILRDDINLLVGQINSKVGSIANRALVYRNESVPREVLAAMYQMADLMLVTPVRDGMNLVAKEYIACRSNDDSALVLSEFAGAARELKQAYMVNPYDIDGMKATIMKALTDSPKIKARKMRSMRRQVFDKTIDVWADNFLTELEGQ

SEQ ID NO: 43775 - protein, 390 aa, Mesorhizobium sp. BNC1
MSGISLSSYRRVTVKIGSALLVDRAAGLKREWLAALVDDIARLMSAGTEVLVVSSGAIALGRTVLGLGKRTLRLEESQAAAAVGQIALAGAWSGELGRHGLISGQVLVTLGDTEERRRYLNARATISTLLKMKAVPVINENDTVATSEIRYGDNDRLAARVATMMGGDLLILLSDVDGLYTAPPERDPAAKFIPVVDAITPEIMAMGGAAASELSRGGMRTKLDAGRIATAAGTAMIIASGKERGPLSAIERGARATLFKPSPTPVRAYKTWIAGQLEPAGRIGIDDGALRALLQGKSLLPAGVRRVEGVFSRGDTVAIVDSAGREIGRGLVAYDAADAVKIAGLKTGDIAGILGYEARAAMVHRDDLVLSGPTGELMDRKVEGIDVAGA

SEQ ID NO: 43776 - protein, 276 aa, Silicibacter pomeroyi DSS-3
MKTALLQLTSSDDPAANLDMVRGMVAEAAAQGARWVLTPEVTNCVSNSTTRQREVLQHEEDDITLAGLRAQATELGIWLLIGSLGLKTHDADGRFANRSFMIGPDGGIVARYDKIHMFDVQVTETETFRESANYRPGDRAVLAPTEFGTVGMTICYDLRFPHLHAALAQAGATVLTVPAAFSPVTGAAHWESLLRARAIETGCWVLAPAQTGTHPNSRGKPRRTHGHSLVVAPWGEVRIDAGSEPGIHIFDLDDTSVTEARRRVPSLTHKRAFDGP

SEQ ID NO: 43777 - protein, 428 aa, Mesorhizobium sp. BNC1
MLQVREPSEHDIVTLMAELGRRGRAAARPLAVASTERKNAALLAMAEALEANTGRILAANKTDMEKGEAAGLSAAILDRLKLDEKRVRAIAEGIRAIADLDDPVGTVIAEWDRPNGLHIERVRTPLGVIGVIYESRPNVTADAGALCLKAGNAVILRGGSDSAASSAAIHSCLVEGLRKAGLPEDAIQRVPVTDREAVGEMLRGLGGNLDVIVPRGGRSLVERVQNEARVPVFAHLEGICHLYVDRSAKLDMAVALALNAKMRRTGVCGAAETLLVDRAVAGTHLVPILEALAAAGCEIRGGEDVRARFPSAISASEEDWRTEYLDAIISVKLVDGVFEAIEHIGTYSSHHTEAIVAEDPVAVQRFLNEIDSAILLHNASTQFADGGEFGMGAEIGIATGKMHARGPVGVEQLTSFKYRVHGSGQTRP

SEQ ID NO: 43778 - protein, 344 aa, Bacteroides thetaiotaomicron VPI-5482
MKERILVTGGTGYIGSHTVVELQNSGYEVIIIDNLSNSSADVVDNIEKVSGIRPAFEKLDCLDFAGLDAVFAKYKGIKAIIHFAASKAVGESVEKPLLYYRNNLVSLINLLELMPKHGVEGIVFSSSCTVYGQPDELPVTEKAPIKKAESPYGNTKQINEEIIRDTIASGAPINAILLRYFNPIGAHPTALLGELPNGVPQNLIPYLTQTAMGIREKLSVFGDDYDTPDGSCIRDFINVVDLAKAHVIAIRRILEQKQKEKVEVFNIGTGRGVSVLELINGFEKATGVKLNYQIVGRRAGDIEKVWANPDYANQELGWKAVETLEDTLRSAWNWQLKLRERGIQ

SEQ ID NO: 43779 - protein, 366 aa, Glycine max
MGNSEEEKSVKTGSPSSSPATTEQTNQPNIHVYPDWAAMQGPHSHGQGVPSSPAAGTPSSVESPTKFSGNTNQGLVKKLKGFDELAMSIGNCNAESAERGAENRLSQSVDTEGSSDGSDGNTAGANQTKRKRSREGTPITDAEGKTELQNGPASKETASSKKIVSATPASVAGTLVGPVVSSGMATALELRNPSTVHSKANSTSAAQPCAVVRNETWLQNERELKRERRKQSNRESARRSRLRKQAETEELARKVEMLTAENVSLKSEITRLTEGSEQMRMENSALREKLINTQLGPREEITLSSIDSKRAAPVSTENLLSRVNNSGANDRPAENENDICETKPNSGAKLHQLLDTNPRANAVAAG

SEQ ID NO: 43780 - protein, 482 aa, Staphylococcus aureus subsp. aureus Mu50
MLVILQLPCHIISKTNRISLLIFIMKKQSKMSLKTFKRRIYVMKTYDLIVIGFGKAGKTLAKYAASTGQHVAVIEQSSKMYGGTCINIGCIPSKTLVHDGLEGKSFEASYNRKNDVVNALNNKNYHLLADDNNIDVLDFKAQFKSNTEVNLLDQHGDIVDSITAPHIIINTGATSIIPNIKGLDQAKHVFDSTGLLNISYQPKHLVIVGGGYIALEFASMFANLGSKVTVLERGESFMPREDQDVVAHAITDLENKGIALHTNVETTELSSDDHHTTVRTNVGNFEADAVLLAIGRKPNTALALENTDIELGDRGEIKVNAQLQTSVPHIYAAGDVKGGLQFTYISLDDYRIIKSALYGNQSRTTDNRGSVPYTVFIDPPLSRVGLTSKEAAAQHYDYTEHQLLVSAIPRHKINNDPRGLFKVVINNENNMILGATLYGKQSEELINIIKLAIDQNIPYTVLRDNIYTHPTMAESFNDLFNF

SEQ ID NO: 43781 - protein, 1196 aa, Paenibacillus polymyxa
MTLYRSLWKKGCMLLLSLVLSLTAFIGSPSNTASAAVADDFQASVMGPLAKINDWGSFKKQLQTLKNNGVYAITTDVWWGYVESAGDNQFDWSYYKTYANAVKEAGLKWVPIISTHKCGGNVGDDCNIPLPSWLSSKGSADEMQFKDESGYANSEALSPLWSGTGKQYDELYASFAENFAGYKSIIPKIYLSGGPSGELRYPSYYPAAGWSYPGRGKFQAYTETAKNAFRTAMNDKYGSLDKINAAWGTKLTSLSQINPPTDGDGFYTNGGYNSAYGKDFLSWYQSVLEKHLGVIGAAAHKNFDSVFGVRIGAKISGLHWQMNNPAMPHGTEQAGGYYDYNRLIQKFKDADLDLTFTCLEMSDSGTAPNYSLPSTLVDTVSSIANAKGVRLNGENALPTGGSGFQKIEEKITKFGYHGFTLLRINNLVNNDGSPTGELSGFKQYIISKAKPDNNGGTGNKVTIYYKKGFNSPYIHYRPAGGSWTAAPGVKMQDAEISGYAKITVDIGSASQLEAAFNDGNNNWDSNNTKNYSFSTGTSTYTPGNSGNAGTITSGAPAGANPGDGGGTTNKVTVYYKKGFNSPYIHYRPAGGSWTAAPGVKMQDAEISGYAKITVDIGSASQLEAAFNDGNNNWDSNNTKNYLFSTGTSTYTPGSNGAAGTIRTGAPSGSVLSVVTSTYATDLNEVTGPIQTEKLSGVSLNVSTSTYAPNSNGVEVTAQTEAPSGAFTSMDLGTLSNPTSLNTDWSKQSIYFIMTDRFSNGDPSNDNYGGFNSNNSDQRKWHGGDFQGIINKLDYIKNMGFTAIWITPVTMQKSEYAYHGYHTYDFYAVDGHLGTMDKLQELVRKAHDKNIAVMVDVVVNHTGDFQPGNGFAKAPFDKADWYHHNGDITDGDYNSNNQWKIENGDVAGLDDLNHENPATANELKNWIKWLLNETGIDGLRLDTVKHVPKGFLKDFDQAANTFTMGEIFHGDPAYVGDYTRYLDAALDFPMYYTIKDVFGHDQSMRKIKDRYSDDRYYRDAQTNGVFIDNHDVKRFLNDASGKPGANYDKWPQLKAALGFTLTSRGIPIIYQGTEQGYSGGDDPANRENMNFNANHDLYQYIAKLNYVRNNHPALQNGSQREKWVDDSFYSFQRSKNGDEAIVFINNSWNSQTRTIGNFDNLSNGTRLTNQLSNDSVQINNGSITVTLAPKEVKVFTK

SEQ ID NO: 43782 - protein, 341 aa, Glycine max
MSTSSINGWCLSSISPAKTSLKKATLGPSVFATVSTPSSPSSSSSSSFPSLIQDRPVFAAPAPIITPTVREDMAKEYEQAIEELQKLLREKSELKATAAEKVEQITASLGTSSSDGIPSSQASYRIKAGFIHLNYEKYDKNPALYGELAKGQSPKFMVFACSDSRVCPSHVLDFQPGEAFVVRNVANIVPPYDQSKYAGTGAAVEYAVLHLKVSEIVVIGHSACGGIKGLLSFPYDGTYSTDFIEEWVKIGLPAKAKVKTQHGDAPFAELCSHCEKEAVNVSLGNLLTYPFVRDGLVNKTLSLKGGYYDFVKGSFELWGLQFGLASSFSVKDVATILHWKL

SEQ ID NO: 43783 - protein, 403 aa, Legionella pneumophila subsp. pneumophila str. Philadelphia 1
MFSQSQQKIVCVLYDDPKGGFPPNYARESIPELKQYPDGQSLPNPDSIDFIPGEMLGSVSGELGLRQFLESNGHQLVVTSDKDGSDSVFARELKEATVVISQPFWPAYLTRDRIESAPKLKLAITAGIGSDHVDLQAAMEHNITVCEVTYCNSISVAEHTVMMILALVRDFIPQYNTVIDGGWNIADCVSRSYDLEGMQVGCVAAGRIGLAVLRRLKPFAVKLHYTDRHRLPVQLEQELNLTYHPSVESMVKVCDVVSIHCPLHPETEYLFDERLIKQMKRGSYLINTARGRICDQHAVADALESGHLAGYAGDVWFPQPPAKNHPWRSMPNHAMTPHTSGTTLSAQARYAAGVREILECWLGNKPIREEYLIVSQGHLAGVGSHSYSAGNTTSGTEQAAELV

SEQ ID NO: 43784 - protein, 685 aa, Helicobacter pylori
MGSYFMESPMKKKANEEKAPKRAKQEAKTEVAQENKAKENNKTKESKIKENKTKESKIKEAKAKEPVPVKKLSFNEALEELFANSLSDCVSYESIIQISAKVPTLAQVKKIKELCQKYQKKLVSSSEYAKKLNAIDKIKKTEEKQKVLDEELEDGYDFLKEKDFLEWSRSDSPVRMYLREMGDIKLLSKDEEIELSKQIRLGEDIILDAICSVPYLIDFIYAYKDALINRERRVKELFRSFDDDDENSVSDSKKDDDNEEDEENEERKKVVSEKDRKRVEKVQESFKALDKAKKEWLKALEAPVDEKEDELVRLLTLAYKRQTLKDRLYDLEPTSKLINELVKTMETTLKSGDGFEKELKRLEYKLPLFNDTLIANHKKILANITNMTKEDIIAQVPEATMVSVYMDLKKLFLTKEASEEGFDLAPNKLKEILEQIKRGKLISDRAKNKMAKSNLRLVVSIAKRFTSRGLPFLDLIQEGNIGLMKAVDKFEHEKGFKFSTYATWWIKQAISRAIADQARTIRIPIHMIDTINRINKVMRKHIQETGKEPDLEVVAEEVGLSLDKVKNVIKVTKEPISLETPVGNDDDGKFGDFVEDKNIVSSIDHIMREDLKAQIESVLDQLNEREKAVIRMRFGLLDDESDRTLEEIGKELNVTRERVRQIESSAIKKLRSPQYGRILRNYLRI

SEQ ID NO: 43785 - protein, 462 aa, Thermoplasma volcanium GSS1
MSYFKNKNINDECSYATMPEDVVEKTLKKLDQDKVEFLQMQFTDIVGNVKSLTVPKNRFENALTEGVVFDGSSVAGYAQIEESDMRAIPNLDSYTLLPDEFGKSRVVRFVCNVYSPDGSRFPGDPRYVLEKLLEKVHKEGNEFFVGPEFEFFLFKRDANGNPTTEPSDYGGYFDNTPLDSASDIRQQIVRELYELGYQPEAAHHEVAYGQQEIDLRYAPALKMADRIVMLKSIIKNVAERNGLYASFMPKPINGVNGSGMHIHQSIMSFDEKVNRFYDKNAKYGLSDYAMHYLGGILSHINEGSAILASTVNSYKRLIPGYEAPVYISWANKNRSALIRIPAGEGTRKRMELRCPDPAGNPYLQFAVILGMGLDGIEKKIDPPEPIEKDIFHMTKEERLQEGITSMPESLGEALHHLRNSKLMRDILGDHVYENFLTVKQREWDQFRSYVGEWEIKKYLPTL

SEQ ID NO: 43786 - protein, 272 aa, Neurospora crassa
MDLTGSAFVIGASGIGKACALAFARYGVRGIVIADLTLEAASAVAAECKSQATHPHFLAEAVAIDVTKEESVYQAIAYAHQVLGRIDYAVNSAGVGVQLANEIAEASVSEFEKMFKVNVTGTFIVTRALSALMKTQDPVPVDEAVPARGVSRGSIVNVGSASGFVATPGMVQYTAAKHAVVGITKNAALDNAKHGIRVNSVCPSWVDTPMIRKAMDDIPELGEMIQKAVPLGRIALAEEVADAVMFLSSPKASYATGCNMILDGGTTLAAHV

SEQ ID NO: 43787 - protein, 335 aa, Bacillus anthracis str. A2012
MKTYYEQDANVGLLQGKTVAVIGYGSQGHAQAQNLRDSGVEVVVGVRPGKSFEVAKADGFEVMSVSEAVRTAQVVQMLLPDEQQAHVYKAEVEENLREGQMLLFSHGFNIHFGQINPPSYVDVAMVAPKSPGHLVRRVFQEGNGVPALVAVHQDATGTALHVALAYAKGVGCTRAGVIETTFQEETETDLFGEQAVLCGGVTALVKAGFETLTEGGYRPEIAYFECLHELKLIVDLMYEGGLTNMRHSISDTAEFGDYVTGSRIVTDETKKEMKRVLTEIQQGEFAKKWILENQAGRPTYNAMKKAEQNHQLEKVGEELREMMSWIHAPKELVKK

SEQ ID NO: 43788 - protein, 341 aa, Dehalococcoides sp. CBDB1
MAVGLVYNHIYLNHDTGTHVENPDRLLAIMEYLETHGLKDRLVHIEPKRVGMRELESFHKRSYISRVEEVGFSGGGWLDQDTVISLDSYEAALYAVGGVIEGVDKVLSRELDSAFVLCRPPGHHALPEASMGFCVFNNVALGALHALNKHKLKRVAVVDFDVHHGNGIQHVCLNDPRLIYLSLHQIHHFPFTGDSRENGPFQNILNIPLPAGCGDSHYQKAFDEVIGPYLRKFAPELILVCAGYDAHFADDMGEMCLSQQGFAGITRAIKHAAEEVCGGKLVFSLEGGYHYLGLAEGVGATLAVLLNEALPPPNTKAPEGAVGNPDIDLMINDLRHINGIR

SEQ ID NO: 43789 - protein, 857 aa, Ashbya gossypii ATCC 10895
MTKDTCTGARRVINCVAQLPFRTQARGADWQVEPTAGNSALHASLTRLGDGWEQHVVGWTGEVGSADGEAPQYLTAEERAAAAGRLQERAGGLRLHPVWLLRKDQARWRAYAENVLWPALHYILNPPSDGQQENTWWYDYVRFNEAYAMKVAQVYRPGDVVWVHDYQLMLLPQLLRMRFGDALIGYFHHSPWPSNEYFRCLPKRKELLDGLLGADRVCFQNEGFARHFVSSCMRLLGAEASGETGADGTVYRISAYGGDVLVDCLPLGVDTEQLLEEAFTEDVDAKVQEIRRAYEGKHIILGRDRLDAVRGVVQKLQAFEMFLTMYPEWKDKVVLIQVSSPTGMERDHRVEVQANELVNSINAQFGDLNFNPVQHYHMRIPKNVYYSLLRAADLCVVTSVRDGMSTTALEYVTVKSRSSSLGCYASPLVLSEFSGSSTVLQDAMIVNPWDSVAVAKAIKKALSLSEEQKGKLERALWQHVPTVQDWTSKFLEGMLTLQDQKDASEHKPSTKVTPALNRPLLLQNYEKAQRRLFLFDYDGTLTPIVQDPAAAIPSARLLSILRKLALDPKNQIWIISGRDQKFLSRWLGDRLPQLGLSAEHGCFMKDVSNSEWINLASKFNMSWQIKVAEIMEKYTKKTPGSFIERKKVALTWHYRRADPELAEYSAAQLKEELEAIASGLELEVMEGKANLEVRPKFVNKGEIVKRLVWHPHGSNQTTEDEFKIDENVSKDKLPDFLLCLGDDFTDEDMFRQLIDIEDKWAEKFPNDRNEWGHYGIYPCTVGPASKKTVAKNHLTEPQQVLDTLGLLVGDVSLFQSAGTVDLDDRGHLKNSESSMKSERAGVAYAMKRSSSYKTDRN

SEQ ID NO: 43790 - protein, 233 aa, Arabidopsis thaliana
WSPAIRESIAKFLEKRDGHPAEPKDIYLSAGASSGVNTLLHIISDKPTAGVLVPIPQYPLYTATLSVLGSKCVPYYLDESKGWGTDIDAIKGAYKIAEEKGIDVRAIVIINPGNPTGASLSIEDIQAVITFAAENRLVILADEVYQTNVFKGKFYSFKRILRDLQKSNPDKYKYIELASLHSVSKGMVGECGHRGGYFELVGFDPEVQQQIYKFVSITLCAPVIAQCLVELMV

SEQ ID NO: 43791 - protein, 496 aa, Yarrowia lipolytica CLIB122
MLRQGIKRAVVHARAVQAVCKRTNMTITKKDLNPQVVNAQYAVRGKLAVRADEIKEQMRTNPSLFPFDKVINANIGNPQQLDQKPVTFYRQVLAMLQYPELMDRAADVGIPNDAVQRARKLLDDIGSVGAYSSSQGVTTVRNSVANFIQKRDGYAASASDIYLTTGASNAVTFLLTTLARGDGSDGFMIPIPQYPLYTATLTLQNSNPVPYYLDEAKEWGTNMAALNDAVESSKHKLKAVVVINPGNPTGACLGVKEIKDILLLAQKEGIAVIADEVYQANIFASGQFHSFKKVWSILKEENPDFNVPLASLHSTSKGKIGECGQRGGYMELVGFHEDVIEQIYKLCSISLCPVVTGQALIECMVNPPVEGDESYPLFNKETNHIMDTLTQRANRLYEAFKEMPKVSCEPPQGAMYLFPSIELPAGAIAEAERHNEQPDEFYCMKLLEQTGICVIPGSGFGQKDGTYHFRTTFLAPGDDYGEKIVNFHKKFLAQYE

SEQ ID NO: 43792 - protein, 371 aa, Bacillus cereus G9241
MTVIRGLEGVVATTSSVSSIIDDTLTYVGYNIDDLAENATFEEVVYLLWHRKLPNEQELAEFNEIVSEYYKVPGEILAYLKQVDLKIAHPMSVLRTAISMLSLYDESAEIMDEKSNYLKAVKLQAQVGTLVAAYARIRKGLDVVEPRNDLSLAANFLYMLNDREPNEVEIEAFDKALVLHADHELNASTFTARVCVATLSDVYSGITAAIGALKGPLHGGANENVMKMLTEIGEEENVESYIHNALQNKVKIMGFGHRVYEQGDPRAKHLREMSKRLCVLLGEEKWYNMSIKIEDIVTKEKGLPPNVDFYSASVYHCLGIDHDLFTPIFAISRMSGWLAHILEQYENNRLIRPRADYNGPTHQVYVPIAQR

SEQ ID NO: 43793 - protein, 466 aa, Zingiber officinale
MASFVAVVLLLLLSSSALTAVSAVPHLDILPAGRSDEEVRIIYQEWRAKHRPAENDQYVGDYRLEVFKENLRFVDEHNAAADRGEHAYRLGMNRFADLTNEEYRARFLRDLSRLGRSTSGEISNQYRLREGDVLPDSIDWREKGAVVAVKSQGRCGSCWAFAAIATVEGINQIVTGDLISLSEQQLVDCSTRNHGCEGGWPYRAFQYIINNGGVNSEEHYPYTGTNGTCNTTKGNAHVVSIDSYRNVPSNDEKSLQKAVANQPISVGINASGRNFQLYHSGIFTGSCNTSLNHGVTVVGYGTVNGNDYWIVKNSWGESWGDSGYILMERNIAESSGKCGIAISPSYPIKEGATNLRNPTTSSSSVPSLVESLTACDNYYTCAGSTTCCCMYERGNRCFAWGCCPVEGATCCKDHYSCCPFNYPICSVADDNCLMSKNSPLRVKASRRTPAIPNWVLSSSGGLKSSA

SEQ ID NO: 43794 - protein, 1155 aa, Nocardia farcinica IFM 10152
MESTRATRLRQRIAALYADDAQVRDARPDEAISTALREPGLRLRELVATVVDGYRDRPALAARSVQPAVDAATGACVARLLPEYTTMSYGELGLRLRAVAAAWQHDDETRLRPGEFVATLGFTSPDYAVVDLACVWAGAVAVPLQASASVTQLTAILAETAPAILATGLDTLPHAVDCVLAGATPRALHVFDFDPAIDAQRTVYEAACARLAGTGVRVRTLAEVEDRGRALPPAVIDDGPGDDRLALLIYTSGSTGTPKGAMYTERLVALMWLGQPQVAALTVNYLPLSHVAGRLALFGLLARGGTAYFTARADMSTLFEDLALARPTELFVVPRVCEMVLQRFQTERLRRQADDDRVKADLRLELFGDRLLSVVCGSAPLAPELKAFMESVLDLTLHDGYGSTEAGGSVVIDTTVRRPPVLDYRLADVPELGYFRTDKPHPRGELLLKTTTMIPGYYRRPELNAQIFDEDGFYRTGDVVAELAPDRLVYVDRRNNVLKLAQGEFVTIARLEAIFANSPLVRQIFVYGNSERAYLLAVIVPSRQAMAGDPATLKTRIAESLQLIGRDAELEAYEIPRDFLIETEPFTTESGLLSGIGKILRPAVEARYRDRLEQLYADLAAAQQDELAALRREAGQRPVLETVTRAAAAILGGTASDLSPAAHFTDLGGDSLAALALSNLLREIFAVEVPVGVITGPATDLRGLAAHIAAERENRTETPLFDRVHPDQILIRATDLALEKFFDAEELAAAATAAPPVAEPRVVLLTGANGYLGRFLCLEWLERLDRVDGRLICLVRGADEAAALARLEAAFDSGDPELVRRFKELAQRRLTVVAGDIGEPGLGLATATWRRLAAEVEHIVHPAALVNHVLPYRQLFGPNVAGTAEILRLALTERRKPIDFLSTVAVAAQIPADRFAEDGDIRVISPTRTVDRGYANGYGNSKWAAEVLLRAAHDRFDLPVAVFRSDMILAHGSFAGQLNIPDVFTRLLLSLLVTGIAPASFHAATVTGERPRAHYDGLPADFTAAAITALGARTAGFHTYDVLNPHDDGISLDTFVDWLIEAGHPIERIPEHSEWVTRFETALHALPERQRKHSLLPLLHAYRRPVPALRGSALPAAEFRAAVRAAGITADGDIPHLTRALIEKYVADLRLHGLL

SEQ ID NO: 43795 - protein, 70 aa, Pinus pinaster
DLVKVGGLIAYDNTLWNGSVVAPPDAPLRKYVRYYRDFVMELNKALAVDPRIEISQIPVGDGVTLCRRVY

SEQ ID NO: 43796 - protein, 460 aa, Lactobacillus plantarum WCFS1
MSKQTHLSRQMESRHVLMISLGGVIGTGLFLSSGYTIHQAGPIGTLLAYTIGAILVYLVMLCLGELSVAMPYTGAFHVYAKKYIGPGTGFTVAILYWLTWTIALGSEFTAAGLIMQTWFPHIATWIWSLVFMVVIFTVNALSVRWFAETEFWFASIKVIAIIAFIVLGGLAMVGILPLHGHTSAPFLSNYTRNGWFPNGFGGVFTTMLTVNFAFSGTELIGITAGETKDPAHTIPTAIKTTLWRLIIFFIGSMFVMAALIPYKQAGVTQSPFVLVFKAIGIPYAADLMNFVVLTAIMSAANSGLYASTRMLWSLANEGTIPKVFKRTTKRDVPLVALITSMLGGILALLSSVYAAGSVYLVLVSISGLAVVIVWMAIALSEINFRKAYLKSGQSLDQLTFKTPGYPVVPWLAFILSGLSCILIWFDPNQRIALYYTIPFVAICYLGYYLNQRYRRTHAAK

SEQ ID NO: 43797 - protein, 420 aa, Pyrococcus furiosus DSM 3638
MKAIILAAGKGERLRPLTDDRPKVVLKIANKPIISYVLENLDPFVDEFIIVVKYMKEKVIDLLGDEFRGKPITYVEQGEEEGTAAAVYSVKEFIESNEEFFVVNGDLYFEPDAVKGLLHVFKKEKGDAGIVVKEFENLSQYGMVEVENGKVKGIIEKPGNVKGYANLGIYIFKSDVFDYIENTEISERGEYEITDTINLMIKDGKSVVYYNYEGFWSDIGRPWDLLEVNEYILKTKLKHEIRGVVEEGATIIPPVEIGEGTIVRAGSYIIGPVKIGKNCRIGPNCYIRPYTSIGDNCHIGNAVEVKNSIIMDNSNAPHLNYVGDSIIGENTNLGAGTITANLRHDKGTIKVEVKGKLEDSGRRKLGAIIGHNVKVGINVTIYPGRKIGSNSFIGPGVIVDKNIPQNVLVTVKQEKKVIEK

SEQ ID NO: 43798 - protein, 134 aa, Triticum aestivum
ISLSLGKTFSKSLGDILLATGDISFTEAQSPVPAPSNRGGRRISPEQSPKKVISAAQAVSPSPQTAGTPATSASPPSPPYYESPLAESASDTPAVSSSSISNSADQAPDTCTGDVSNTYAHERIHRCHAICYSI

SEQ ID NO: 43799 - protein, 84 aa, Pisum sativum
MCGILAVLGCSDDSQAKRVRILELSRRLKHRGPDWSGLHQHGDNYLAHQRLAIVDPASGDQPLFNEDKSIIVTVNGEIYNHEEL

SEQ ID NO: 43800 - protein, 84 aa, Pisum sativum
MCGILAVLGCSDPSRAKRVRVLELSRRLKHRGPDWSGLHQHGDCFLAHQRLAIVDPASGDQPLFNEDNPSIVTVNGELYNHEDL

SEQ ID NO: 43801 - protein, 927 aa, Vibrio cholerae O1 biovar eltor str. N16961
MTQRYGLRARVMTLTLAPTLIIGLLLSALFSFNRYHDLETQVINSGASIIEPLAIASEDALRMQSRESVRRIISYAHRKNSKLVRSIAVFDANHELFVTSNFHPNFEKLMYPKDKPIPFLSSSVIDENTLILRTPIISERTVLDNGDANPATPVMGYIAIELDLSSLRLQQYQEIFSAGLVLVIGILLSGVFASRLMYDVTRPITHMKNMVDRIRRGHLDVRIEGKMHGELDTLKKGINAMAVSLSEYHVEMQHSIDQATSDLRETLEQLEIQNVELDIAKKRAQEAARVKSEFLANMSHELRTPLNGVIGFTRQMLKTQLTNSQADYLQTIEKSANNLLTIINDILDFSKLEAGKLALENIPFEFQEVLEEVVNLQATSAHEKGLEITLKIDPKIPRGVVGDPLRIQQVLTNLVGNSIKFTERGNIDVSVEMRALRDDVIDLQFMVRDTGIGISERQQAQLFQAFSQADASISRRYGGTGLGLVITQKLVSHMGGEISLTSRLHQGSTFWFTLRLHTTELPLNDGYNADSLNHRHLLLIEPNMQAAAIVQQTLVQSGLEVTYRSAIPEEQHVYDYVLLNLAPSKETNPTLVELWVQRALAMTHNVIVGVPSTELALADQLMQRYPVKCISKPLSRKKLLQTLAAQQPQLANTSLPKPQADKLPLCVMAVDDNPANLKLITALLQERVEYVVSCTSGQEAIEQAQSRQFDIILMDIQMPHMDGVTACKAIKQLKGYRDTPVIAVTAHAMAGERDRLLKAGMDDYLTKPIEEHILQQVLVHWSPHTRSKQVAKVTPPDGAAVISNALPSSPPAEEAIIDWPVALRQSANKEDLAKEMLGMLVDYLREVETVVNTALEDEEYPASDLLHHIHKLHGSCSYSGVPRLRKICASLEQALRNGASIDELEPELFELQDEMAKVLEASRDYLN

SEQ ID NO: 43802 - protein, 602 aa, Glycine max
  misc_feature (403)..(403): Xaa can be any naturally occurring amino acid
  unsure (1)..(602): unsure at all Xaa locations
MPTWWGKKSSKTKDQQHQQQQDHPHGAAATTTLLHFNFIKPKPSKSFDDVVRNSPRASRDFGSSAAVDQGLPLPRPSVFSTQSFAIDQGLVFGSASVSGSSVSSSGSYDDHPQINASRGQGDMKFLVRSKSPGPGSRGPTSPTSPLHPKLLGLSLDSPTGRQEGECHPLPLPPGSPTSPSSSLPSMRANGMTEHTTSNLSKWKKGKLLGRGTFGHVYLGFNSDSGQLSAIKEVRVVCDDQSSKECLKQLNQEIHLLSQLSHPNIVQYYGSDLGEETLSVYLEYVSGGSIHKLLQEYGAFKEPPVIQNYTRQIVSGLAYLHGRNTVHRDIKGANILVDPNGEIKLADFGMAKHINSSASMLSFKGSPYWMAPEVVMNTNGYSLPVDIWSLGCTIIEMATSKPPXNQYVRVAAIFKIGNSRDMPEIPDHLSSEAKNFIQLCLQRDPSARPTAQKLIEHPFIRDQSATKATNVRITRDAFPYMFDGSRTPPPVLDHSNRTSLTSFDGDYATKPIPVTSRTVRSPRDNTRMITSLPVSPCSSPLRQYGPAHKSCFLSPPHPTYTLMGQNTLPSYPVRSNATFTLDPFHETAFYKAHTPGGSPRRLI

SEQ ID NO: 43803 - protein, 437 aa, Synechococcus elongatus
MRELTLTTTVFQTTKSQEIFAAAQKLMPGGVSSPVRAFKSVGGQPIVFDHVKGAHIWDVDGNQYIDYVGSWGPAIVGHAHPEVIDALHAALEKGTSFGAPCLLENILAEMVIAAVPSVEMVRFVNSGTEACMAVLRLMRAYTQREKVIKFEGCYHGHADMFLVKAGSGVATLGLPDSPGVPKATTAATLTAPYNDLEAVSRLFEQYPNDIAGVILEPVVGNAGFIPPDAGFLEGLRELTKQYGALLVFDEVMTGFRIAYGGAQEKFGVTPDLTTLGKVIGGGLPVGAYGGRAEIMKMVAPAGPVYQAGTLSGNPLAMTAGIKTLEILSRPGSYEHLDRITGKLVQGLLDAAREFGHEVCGGHISGMFGLFFTAGPVTNYEQAKQSDLKKFAAFHRGMLEQGIYLAPSQFEAGFTSLAHTEADIERTIAAARTVLSQL

SEQ ID NO: 43804 - protein, 349 aa, Rosa hybrid cultivar
MASESESVCVTGASGFIGSWLVMRLLDRGYTVRATVRDPANKKKVNHLLDLPKAATHLTLWKADLAEEGSFDEAIKGCTGVFHVATPMDFESKDPENEVIKPTINGVLDIMQACLKAKTVRRLVFTSSAGSVNVEETQKPVYNESNWSDVEFCRRVKMTGWMYFASKTLAEQEAWKFAKENNIDFITIIPTLVIGPFLMPSMPPSLITGLSPLTGNESHYSIIKQGQFIHLDDLCQSHIYLYEHPKAEGRYICSSHDATIHEIAKLLKGKYPEYNVPTTFKGIEENLPKVHFSSKKLLETGFEFKYSLEDMFVGAVDACKEKGLLPPPTERVEKQEVDESSVVRVKVTG

SEQ ID NO: 43805 - protein, 354 aa, Thinopyrum ponticum
MDGNKGPVVVTGASGFVGTWLVMKLLQAGYTVRATVRDPANVEKNKPLLELPGAKERLSIWKADLSEEGSFDDAIAGCTGVFHVATPMDFDSQDPENEVIKPTVEGMLSIMRACKEAGTVKRIVFTSSAGSVNIEERQRPAYDQDNWSDIDFCRRVKMTGWMYFVSKSLAEKAAMEYASENGLDFISIIPTLVVGPFLSAGMPPSLVTALALITGNEAHYSILKQVQLVHLDDLCDAMTFLFEHPEANGRYICSSHDATIHGLAKMLGDRFPEYSIPQKFAGVDDDLQPIHFSSKKLLDHGFSFRYTAEDMFDAAIRTCREKGLIPPGDVPAPAAGSKLGALAAGGGQAIGAET

SEQ ID NO: 43806 - protein, 333 aa, Thermoanaerobacter tengcongensis MB4
MKLKGGRIVTMEFSKEKLLWMYKKMVQIRQFELKTDELYKKNMIWGTYHLYVGEEAAAVGACAALEPTDYITSTHRGHGHTIAKGADLKRMMAELLGKETGHCKGRGGSMHIADIFTGHLGANGIVAGGIPIATGAALASKLRGDKRVTLCFFGDGAANTGAFNESLNMAAIWQLPVVYFCENNQYAMSAPVNKFTAVKNIADRAASYNMPGVIVDGNDVLEVYKAVKEAVDRARKGEGPTLIEAKTYRWFGHSKSDPRVYRTREEEEEWKKKDPIKRFAEKLLSEGVATEEELKKIDEEVAKEIEEAYQFAVESPEPKVEDLAKYVYAEEGE

SEQ ID NO: 43807 - protein, 397 aa, Glycine max
MAIQHHNEQLEHNENVSSVLDALYCDEGKWEDEEEEEEDNEESEVTTNTGTSLFPLLMLEQDLFWEDEELNSLFSKEKVQHEEAYDYNNLNSDDNNSNDHSNNNNNVLSDSCLSQPRREAVEWILKVNAHYGFSALTATLAVTYLDRFLLSFHFQREKPWMIQLVAVTCISLAAKVEETQVPLLLDLQVQDTKYVFEAKTIQRMELLVLSTLKWKMHPVTPLSFLDHIIRRLGLKTHLHWEFLRRCEHLLLSVLLDSRFVGCLPSVLATATMLHVIDQIKHNGGMEYKTQLLSVLKISKEKVDECYNAILQLSKANKYGHNNINNTSKRKYEQIPSSPSGVIDAAFCSDGSNDSWAVGSSLLYSPPEPLFKKSRTQGQQMNLSPLKRFIIGIVGTPP

SEQ ID NO: 43808 - protein, 667 aa, Thermoanaerobacter tengcongensis MB4
MAKRIEQLAINAIRVLSIDAIEKAKSGHPGMPMGAAPMAYVLWTEFMNHNPLNSKWFNRDRFVLSAGHASMLLYALLHLSGYKVSMEDIKNFRQWGSKTPGHPEYGLTDGVEATTGPLGQGLGMAVGMAMAERFLANKYNRGSYNIIDHYTYVIASDGDLMEGISHEAGSLAGHLKLGKLIVLYDSNDVTLDGDRHLSFTESVADRFKAYGWQVLRVDDGNDLDAIRNAISEAKKNTEQPTLIEVKTVLGYGAPNKAGKSDAHGAPLGEEEARLAKEYYKWEYEPFFIPEEIYEHYRAKVLERGKKAEEEWNKLFEAYKKEYPELAKELEDAINGNLPEGWDKDMPSYDKGAYATRDVSGEMINALAKNIPYFIGGSADLASSNKTAIKGEQPFGPTSNYTGRNIWFGVREFGMATALNGMALHGGLKVYGGTFLVFSDYLRPALRLSALMGVPVTYVFTHDSIAVGEDGPTHQPVEHLAAFRAMPNVSVIRPADGNETRAAWKLAVQSKNKPTVLILTRQKLPILPTTKEKVEEGVAKGAYIVSDGEKEIPDILLLASGSEVSLAVEAQKKLKEEGIDARVISMPSWDRFEEQDKSYKDYILPPNVKKRLAIEAAAPLGWERYVGDEGKVLGVNTFGASAPGEKLMEEYGFTVDRIVKEAKELLRK

SEQ ID NO: 43809 - protein, 354 aa, Thinopyrum ponticum x Triticum aestivum
MDGNKGPVVVTGASGFVGSWLVMKLLQAGYTVRATVRDPANVEKNKPLLELPGAKERLSIWKADLSDQGSFDDAIAGCTGVFHVATPMDFDSQDPENEVIKPTVEGMLSIMRACKEAGTVKRIVFTSSAGSVNIEERQRPAYDQDNWSDIDFCRRVKMTGWMYFVSKALAEKAAMEYASENGLDFISIIPTLVVGTFLSAGMPPSLVTALALITGNEAHYSILKQVQLVHLDDLCDAMTFLFEHPEANGRYICSSHDATIHGLATMLRDRFPEYRIPHKFPGVDDDLQPIHFSSRKLLDHGFSFRYTAEDMFDAAIRTCREKGLIPLGDAPPPAAAGKLGALAAGEGQAIGAET

SEQ ID NO: 43810 - protein, 402 aa, Bacteroides fragilis YCH46
MEKNIFKLDNEQLKGIAHAFREKVEEGLNKNNAEIQCIPTFILPKATDVKGKALVLDLGGTNYRVAIVDFSTEKPIIYPNNGWKKDMSIMKSPGYTREELFKELADLIVEIKREEEMPIGYCFSYPTESIPGGDARLLRWTKGVDIREMVGQFVGKPLLDYLNEKNKIRFTGVKVLNDTIASLFAGLTDKSYDAYIGLIVGTGTNMATFIPSDKITKLDPECHVQGLIPVNLESGNFYPPFLTAVDDTVDATSDSLGKQRFEKAVSGMYLGDILKAAFPLEEFEEKFDARKLTAIMNYPDIHKDIYVQVAHWIYNRSAQLVAASLAGLIALLKSYNRDIHRVCLIAEGSLFWSESRKDKNYNILVMEKLQELLRELELEDVEVHINSMDNANLIGTGIAALS

SEQ ID NO: 43811 - protein, 336 aa, Nicotiana glutinosa
MDKKKVAAPLVCHGHSRPVVDLFYSPVTSDGFFLISASKDSSPMLRNGETGDWIGTFEGHKGAVWSCCLDTNALRAASGSADFSAKIWDALTGDELHSFAHKHIVRACAFSEDTNFLLTGGVEKVLRVYDMNRPDAAPREVAMTPGSVRAVTWLHSDQTILSSCTDSGGVRLWDVRTGDIVRTLETKSPVTSAEVSQDGCYITTCDGFSVKFWDANHFGLVKSYNMPCTVESASLEPKYGLKFVAGGEDMWIRVFNFHTGEELACNKGHHGPVHCVRFAPSGESYASGSEDGTIRIWQTGPLTNDDVDMTTNGKVKVCAEEKIEGFQIIKEEDVAD

SEQ ID NO: 43812 - protein, 577 aa, Nicotiana glutinosa
MKMVVEKKFDQEQVIEEFEDLTKDAGKIQEETLKKILEQNGGTEYMQQWGLNGRSDPQTFKNCVPIVTHNDLEPYIQRIADGDLSPILTGKPIETISLSSGTTQGKPKFVPFNDELMESTMKIFKTSFAFRNREFPIGNGKALQFIYSSKQFKTKGGLAAGTATTNVYRNAQFKKTMKAMCTPCCSPDEVIFGPDFHQSLYCHLLCGLIFRDEVQVVSSTFAHSIVHAFRTFEQVWEALVVDIREGVLSSRVTVPSIRLAMSKLLKPDPELADTIYNKCSRLSNWYGLIPELFPNTRYIYGIMTGSMEPYLKKLRHYAGELPLLSADYGSSEGWVGVNVNPKLPPELVTYAVLPNIGYFEFIPLGGNLNGVEQADSPVDLTEVKVGEEYEIVFTNFAGLYRYRLGDVVKVKGFHNGTPELQFVCRRNLLLSINIDKNTEKDLQLAVEAASKRLVDEKLEVVDFTSQVNVSADPGHYVIFWELSGEATDEMLQDCCNCLDKAFIDTGYVSSRKVNAIGALELRIVKRGTFHKILDHFVGLGGAVSQFKTPRCVGPKNSSLLQILCSNVVENYVSTAFC

SEQ ID NO: 43813 - protein, 331 aa, SYNECHOCOCCUS SP. WH 8102
MAQLFYDSDADLGLLNSKTVAIIGYGSQGHAHALNLKDSGVNVVVGLYDGSRSADKAKADGLEVLSVADASAKADWVMVLLPDEFQKDVYEKEIAPHLTSGKVLSFAHGFNIRFELIKPPTDVDVVMIAPKGPGHTVRWEYQNGQGVPALFAIEQDASGQARGLAMAYAKGIGGTRAGILETNFKEETETDLFGEQAVLCGGLSELVKAGFETLVEAGYQPELAYFECLHEVKLIVDLMVKGGLTSMRDSISNTAEYGDYVSGPRLITADTKAEMKRVLADIQDGTFAKNFVAECEAGKPEMKKVRDRDSQHPIEKVGKGLRSMFSWLKDA

SEQ ID NO: 43814 - protein, 143 aa, Candida albicans SC5314
MSDVEQEQIVEEVVVEEQSGAITIEDALKVVLRTSLVHDGLARGLREASKALSKREAQLCVLCDSVTEESIIKLVEALCNEPEEKIPLIKVSDAKLLGEWAGLCQLDRDGNARKVVGASCVVVKNWGADSDERNILLEHFSQQ

SEQ ID NO: 43815 - protein, 257 aa, Petunia x hybrida
ARGLHKAKPKLSTDKAPILPTSDLPDDFDWREKGAVTGVKNQGSCGSCWSFSTTGAVEGAHFLATGELVSLSEQQLVDCDHECDAEQQNECDAGCGGGLMTTAFEYTLKAGGLQREKDYPYTGRDGKCHFDKSKIAASVANFSVVGLDEDQIAANLVKHGPLAVGINAAWMQTYVGGVSCPLICFKRQDHGVLLVGYGSAGFAPIRLKEKPYWIIKNSWGESWGEQGYYKICRGRNICGVDAMVSTVTAAHTTNPNL

SEQ ID NO: 43816 - protein, 188 aa, Glycine max
MSHDFTHTVLTIFIDGDGLFLVTNNLELVSGYALAVLTPNVNEYKRLVQKVLSSEVNDIDAPQQLLSLAKQIGGVTILSKGNSDLISDGDTVKSVSVYGSPRRCGGQGDILSGSVAVFLSWARQHILAADSNSNLSCKNPIVLGCNIADPAILRKAASLAFSNKKRSTVTGDIIECLGRSLEDISPAC

SEQ ID NO: 43817 - protein, 282 aa, Mycobacterium avium subsp. paratuberculosis K-10
MSKVPTIELNDGARIPQLGFGVYQIKPDETAAAVRAALDIGYRHIDTAEMYGNEREVAQGIRDAGLDRSEVFVTSKLNNGFHEPDAARRAFDATLNALGSDYVDLFLIHWPLPTLYGGDFVSTWRVLEEFARDGRARSIGVSNFQVAHLERLAAETDTVPAVNQVEVHPYFTNEKVRGYAREHGLAIEAWSPIAQGGVLGDAVINRIADGLGRTAAQVVLRWHIQRGDIVFPKTVNPDRMKSNFELFDFELDERAMEAISALDRGESGRRGPNPDTFDYIPR

SEQ ID NO: 43818 - protein, 151 aa, Triticum aestivum
  misc_feature (72)..(72): Xaa can be any naturally occurring amino acid
  unsure (1)..(151): unsure at all Xaa locations
MSIVRRSNVFDPFADLWADPFDTFRSIVPAISGGSSETAAFANARVDWKETPEAHVFKADLPGVKKEEVKVXVEDGKVLVVSGERTKEKEDKNDKWHRVERSSGKFVRRFRLPEDAKVEEVKAGLENGVLTVTVPKAEVKKPEVKAIQISG

SEQ ID NO: 43819 - protein, 529 aa, Saccharomyces cerevisiae
MKFSAGAVLSWSSLLLASSVFAQQEAVAPEDSAVVKLATDSFNEYIQSHDLVLAEFFAPWCGHCKNMAPEYVKAAETLVEKNVTLAQIDCTENQDLCMEHNIPGFPSLKIFKNSDVNNSIDYEGPRTAEAIVQFMIKQSQPASAVADLPAYLANETFVTPVIVQSGEIDADFNATFYSMANKHFNDYDFVSAENADDDFKLSIYLPSAMDEPVVYNGKKADIADVDVFEKWLQVEALPYFGEIDGSVFAQYVESGLPLGYLFYNDEEELEEYKPLFTELAKKNRGLMNFVSIDARKFGRHAGNLNMKEQFPLFAIHDMTEDLKYGLPQLSEEAFDELSDKIVLESKAIESLVKDFLKGDASPIVKSQEIFENQDSSVFQLVGKNHDEIVNDPKKDVLVLYYAPWCGHCKRLAPTYQELADTYANATSDVLIAKLDHTENDVRGVVIEGYPTIVLYPSGKKSESVVYQGSRSLDSLFDFIKENGHFDVDGKALYEEAQEKAAEEAEADAEAEADADAELADEEDAIHDEL

SEQ ID NO: 43820 - protein, 272 aa, Synechococcus elongatus PCC 6301
MRKLIEGLRHFRTSYYPSHRDLFEQFAKGQHPRVLFITCSDSRIDPNLITQSGMGELFVIRNAGNLIPPFGAANGGEGASIEYAIAALNIEHVVVCGHSHCGAMKGLLKLNQLQEDMPLVYDWLQHAQATRRLVLDNYSGYETDDLVEFLVAENVLTQIENLKTYPIVRSRLFQGKLQIFGWIYEVESGEVLQISRTSSDDTGIDECPVRLPGSQEKAILGRCVVPLTEEVAVAPPEPEPVIAAVAAPPANYSSRGWLAPEQQQRIYRGNAS

SEQ ID NO: 43821 - protein, 190 aa, Petunia x hybrida
HEELVSLSEQQLVDCDHECDPEEKDSCDSGCNGGLMNSAFEYTLKAGGLMREEDYPYTGTDRAKCKFDNTKVAAKVANFSVVSLDEEQIAANLVKNGPLAVAINAVFMQTYVGGVSCPYICSKRQDHGVLLVGYGSGFAPIRMKEKPYWIIKNSWGEKWGESGYYKICRGRNVCGVDSMVSTVAAVSTSS

SEQ ID NO: 43822 - protein, 143 aa, Glycine max
MTEAHIRKKPGMASVKDMPVLQDGPPPGGFAPVRFARRIPNKGPSAVAIFLTTFGAFSWGMYQVGQGNKIRRALKEEKYAARRSILPVLQAEEDERFVKEWHKYLEYEAEVMKDVPGWKVGESVYHSSRWVPPASGELRPDVW

SEQ ID NO: 43823 - protein, 450 aa, Escherichia coli CFT073
MNAFRQEIIMNKYQAVIIGFGKAGKTLAVTLAKAGWRVALIEQSNAMYGGTCINIGCIPTKTLVHDAQQHTDFVRAIQRKNEVVNFLRNKNFHNLADMPNIDVIDGQAEFINNHSLRVHRPGRNLEIHGEKIFINTGAQAVVPPIPGITTTPGVYDSTGLLNLKELPGHLGILGGGYIGVEFASMFANFGSKVTILEAASLFLPREDRDIADNIATILRDQGVDIILNAHVERISHHENQVQVHSEHAQLAVDALLIASGRQPATASLHPENAGIAVNERGAIVVDKQLHTTANNIWAMGDVTGGLQFTYISLDDYRIVRDELLGEGRRSTDDRKNVPYSVFMTPPLSRVGMTEEQARESGADIQVVTLPVAAIPRARVMNDTRGVLKAIVDNKTQRILGASLLCVDSHEMINIVKMVMDAGLPYSILRDQIFTHPSMSESLNDLFSLVK

SEQ ID NO: 43824 - protein, 276 aa, Bordetella parapertussis 12822
MTGDPRTDTTPSCRVAAIQMVSGPDVDENLAQAAELIGKAAQDGARLVALPEYFCFMGHTDTDKLAIKEESGYGKIQSFLSNISSQYGIWVAGGTLPLTSPDPQRVFNTTFVYGPGGQPAARYDKIHLFNFQRGAESYDEAIAIRPGKEVQVFDGPCGRVGLSVCYDLRFPELYRAMGTVDLILVPAAFTYTTGQAHWELLLRARAIENQCYVLAPAQGGRHPTGRRTWGHSMLVDPWGQVLDVLPEGPGVIGGTIEAARLAEVRASLPALRHRVL

SEQ ID NO: 43825 - protein, 76 aa, Chlamydomonas reinhardtii
MQIFVKTLTGKTITLEVESSDTIENVKAKIQDKEGIPPDQQRLIFAGKQLEDGRTLADYNIQKESTLHLVLRLRGG

SEQ ID NO: 43826 - protein, 694 aa, Arabidopsis thaliana
  misc_feature (276)..(276): Xaa can be any naturally occurring amino acid
  unsure (1)..(694): unsure at all Xaa locations
MEQEKSLDPQLWHACAGSMVQIPSLNSTVFYFAQGHTEHAHAPPDFHAPRVPPLILCRVVSVKFLADAETDEVFAKITLLPLPGNDLDLENDAVLGLTPPSSDGNGNGKEKPASFAKTLTQSDANNGGGFSVPRYCAETIFPRLDYSAEPPVQTVIAKDIHGETWKFRHIYRGTPRRHLLTTGWSTFVNQKKLIAGDSIVFLRSESGDLCVGIRRAKRGGLGSNAGSDNPYPGFSGFLRDDESTTTTSKLMMMKRNGNNDGNAAATGRVRVEAVAXEAVARAACGQAFEVVYYPRASTPEFCVKAADVRSAMRIRWCSGMRFKMAFETEDSSRISWFMGTVSAVQVADPIRWPNSPWRLLQVAWDEPDLLQNVKRVSPWLVELVSNMPTIHLSPFSPRKKIRIPQPFEFPFHGTKFPIFSPGFANNGGGESMCYLSNDNNNAPAGIQGARQAQQLFGSPSPSLLSDLNLSSYTGNNKLHSPAMFLSSFNPRHHHYQARDSENSNNISCSLTMGNPAMVQDKKKSVGSVKTHQFVLFGQPILTEQQVMNRKRFLEEEAEAEEEKGLVARGLTWNYSLQGLETGHCKVFMESEDVGRTLDLSVIGSYQELYRKLAEMFHIEERSDLLTHVVYRDANGVIKRIGDEPFSDFMKATKRLTIKMDIGGDNVRKTWITGIRTGENGIDASTKTGPLSIFA

SEQ ID NO: 43827 - protein, 455 aa, Xanthomonas axonopodis pv. citri str. 306
MDPSVLKALQQLDAAHHLHPFNDNAALAQKGTRILTRGEGVYVWDADGNQLLDAFGGLWCVNVGYGRKELAQAAARQMEQLAYYNSFFQCTTEPTIQLAAKLAELAPGDLNHAFFANSGSEANDTILRLVRHFWAVQGQPQKRIFIGRHDGYHGTTMAGASLGGMRGMHQQGGLPIADIHHVAPPYHFGDGGEMDPEEYGLLAARRLEDKILELGPDNVAAFIGEPIMGATGVYIPPRSYWPEIERICRRYDVLLVADEVICGFGRTGEWFGAEYFGFQPDVMTLAKGITSGYIPLAAAMFNDRVAGVLKTQGGELAHGGTYAGHPVCAAVALENLRLLQDEGIVETARTQVAPYLAQRWAALGEHRLVGEARIAGLVGALELVPDKQRRGAYFPRRGRVGAMCRDFALRRGLILRATYDAMLLSPPLIITPAQVDELFDKAWAALDDTAQALGR

SEQ ID NO: 43828 - protein, 348 aa, Lotus uliginosus
MVSTAAIPPATAGRILIIGATGFMGQFVTKASLGFGRSTYLLLRPGPLTPSKAAIVKSFQDRGAKVIHGVINDKELMVKILKDYEIDVVISLVGGGNLMDQRTLVDAIKSVKTVKRFLPSEFGHDTDRANPVEPGLAMYKEKRLIRRLIEESGIPYTYICCNSIASWPYHDNCHPSKVPPPVDQFLIYGDGTVKAYFVDGNDIGKFTMKAIDDIRTRNKNVHFRPPSNCYSINELASLWEKIIGRKIPRAIISADDLLAAAAENCIPGSIVAAFTHDIFINGCQINFTIDGPNDIEIGTLYPDEKFRCLEECFKDFVPMTHDMNVHVGTTENNNRKSLVEVAPISAMG

SEQ ID NO: 43829 - protein, 658 aa, Nocardioides sp. JS614
MSPWCQPAGRSAALAPARAASSANLDLTTMANPGFASDSGDRTTGRDHVCEGAEGDDGLVPRRHGLGRLGADDGLHGRLLGPGGVRGDRTVPRHAQRRRVGAGPARPDPDPRRAVRPRRDRRGRVPRAQRGAACSRALRPSSGSELALSRATEPASPRSDIPPITRRALLRGTAALGGATALAGLASCSRSGGTAVGPTAPAVTAAEDARRRAGGQLVTARLTPRPVTLDLGGRAVDTWAYGDAVPGPLLRARAGDLLRVEVDNQLPVDTSVHWHGIALRNDMDGVPGVTQDPIGAAATFRYEFTVPDPGTYFYHPHSGVQLDRGLYGVLLVDGPDEEDADQEWVVVLDDWVDGTGRTPDQVLESLRAGGGGGHGSMAGMDHGSMMGGGGGMQSRLLGGSGDVRYPLYLVNGRTADDPATLRGRPGQKVRIRVVNAGSDTAFRVAVGGHRLTVTHSDGFPVTPVSTDALLIGMGERFDVTVTLGDGVFALVAVAEGKNGGGLAVVRTGAGTTPGPDAWARHRGQPALLGADLTPTESVRLPDRAVDRRHDLVLAGTMASYRWSINGRMFPDDEPLPVAEGERVRLRFVNRSMMFHPMHVHGHTFALATGGARKDTVIVRPMEALEVDLDADNPGQWAAHCHNIYHAESGMMTTLSYRA

SEQ ID NO: 43830 - protein, 599 aa, Oryza sativa
MERCQRRRWIGPAINVGREPPSSTAHLRPAPRKAQRTAKATAVATGDPDSGQLLHSPPCQCDASKSIQSNPIHDPIWLLDSLLFLDRYPSDPTMDNVSSPCCYAVCSYRKAKEQNKKSTTLIPFRCRRIDRFSIRLSGTGIMAAVEAEKVVAELRERCATPASLLRDVAAAMAGEMGAGLEKEGGSRVKMLLSYVDKLPTGREDGLFYGLDLGGTNFRVLKVHLGGSKKHVVNSESREVSIPPHLMSGTSQELFGFIAGELGKFVAEEEEGTDMPNGKKKELGFTFSFPVRQRSVASGTLVKWTKAFSIDDAVGEDVVAELQTAMVKQGLDMHVAALINDAVGTLAGARYYDEDVVAGVIFGTGTNAAYVEKANAIPKWEGELPNSGDMVINMEWGNFYSSHLPVTEYDEALDKESLNPGEQIYEKLTSGMYLGEIVRRVLLKLSLQSGIFGSIDNSKLKTCFHLRTPHISAMHHDETPDLKIVAEKLHQILQITHTSLEIRKMVVEICDIVARRAARLAAAGVAGILMKLGRNGGINNQRSVIAIDGGLFEHYTKFRECLESTLGELLGEEASKSVAVKHANDGSGIGAALIAASQSR

SEQ ID NO: 43831 - protein, 497 aa, Streptomyces nodosus
MTPQPPPPKADNGQAGRTGPTSPAEHGSGLQAGLKNRHLSMIAIGGVIGAGLFVGSSSGIATAGPGILLSYALVGTLVVLVMRMLGEMSAANPTSGSFSAHADRALGSWAGFSIGWLYWFFWVVVLAVEATAGAAILSSWVPAVPQWGWALIVMIVLTATNLISVGSYGEFEFWFAGIKVVAISIFIVIGLLAVFGVLPGVHADKAGLGNLTDHGGFLPHGLSAIFTGVLLVVFSFMGSEIATLAAGESEDPQRAVTKATNSIIWRIGVFYLGSVFVVVTLLPWNDKAIAEKGSYVAALDSLGIAHAGEIMKFIVLTSVLSCLNSGLYTASRMAFSLGERGDAPKAFARTNSRGVPMAAILSSVVFGFVAVFFNYRFPDSVFLFLVNSSGAVALFVWLVICFSQLRLRRIIQSEAPEKLIVKMWLYPYLTWAAAFLIILVFGYMLTDTEHDGRETVLLSMLVAVIVLAVAFIKQRVEGGRAKATEPAAAEAEKVSAG

SEQ ID NO: 43832 - protein, 686 aa, Mesorhizobium sp. BNC1
MCRLLLRARAPPVPDRPQPTQRAHMISREKHDRMANAIRFLSMDAVEKAKSGHPGLPMGTADIATVLFTRFMKHDPKTPHWPDRDRFVLSAGHGSMLLYSLLHLLGYEDITIEEIKNFRQLGSRTAGHPEYGFAAGIETTTGPLGQGFGNAVGMAIAERLLNARYGDDLVNHFTYALVGDGCLMEGISQEALTLAGHLRLNKLIVLFDDNHISIDGPVSLADSTDQCARFAASGWNTLRADGHDPDAIASAIETARQSDRPTLIAFRTTIGYGSPSKAGTNKVHGSPLGADEIAKTRSALGWDSPPFVVPSEVLDDWRLAGLRSAKERGSWEKRLAAADTETRAQFERRMRGDLPAAFPGVIVDYKKKLAQQNTAVATRNASEMALEVINDCIPETVGGSADLTGSNNTKTSQTTPITPTDFSGRYIHFGIREHAMAAAMNGIALHGGLIPYGGTFLTFSDYARPAMRLASLMHIRSIFVMTHDSIGLGEDGPTHQPVEHLAALRAIPNHNVFRPADATETAECWQLALESRKTPSTIALTRQKLQPVRLEFEEENLCARGAYELLPASDEAKVTIFASGSEVEIAVKARVMLEERGYPTRVVSVPCFELFEEQSQDYQRAILGDAPVRIAIEAGVRQGWDRFIGVDGIFIGMHGFGASGPAPELYQHFGITAEAAVEAVEARLPD

SEQ ID NO: 43833 - protein, 432 aa, Nostoc sp. PCC 7120
MVNTTIKTTKSQEIFAAAQNLMPGGVSSPVRAFKSVGGQPIVFDHVKGAYIWDVDGNQYIDYVGTWGPAICGHAHPDVIGALHDALEKGTSFGAPSFLENVLAEMVIAAVPSIEMVRFVNSGTEACMAVLRLMRAFTNREKVIKFEGCYHGHADMFLVKAGSGVATLGLPDSPGVPKSATSSTLTAPYNDLEAVKALFEENRDQIAGVILEPVVGNAGFITPDAGFLEGLRELTHEHGALLVFDEVMTGFRIAYGGAQEKFGVTPDLTTLGKVIGGGLPVGAYGGRRDIMSMIAPAGPVYQAGTLSGNPLAMTAGIKTLELLQKPGAYEYLERITKKLADGLLQVALETGHAACGGHISAMFGLFFTSGPVHNYEDAKNSDTAKFGRFHRGMLERGVYLAPSQFEAGFTSLAHTDEDIDQTIAIAREVLSSI

SEQ ID NO: 43834 - protein, 423 aa, Propionibacterium acnes KPA171202
MSDVVITGFGTTTPLGPDAPSTWQGLLEGRNGVHTLDFDWIDDVPVKFAAPAVDDPANHLPRPQARRLDRSSQLALVAAKEAWADAGLELPEADDNSGSNGIDPERLVVCCATGIGGLHSLLGQWDIQKDKGFKRVSPFTVPMLMANAPAANIGLMVHAKAGVHTPVSACASSSEAISLGLDQLHLGRADIAVVGGAEAIIHPLPVAAFAQMKALSTRNDDPEHASRPWDVDRDGFVIGEGAAIMVIETLEHAQARGAKIYGTLAGSGISADSHDIVQPDPTGSGQASAMHKALASAGLSPSDVNHVNAHATSTPLGDTAEAHSIAAVLEKATDQVLVNGTKSMTGHLLGGAGALESFAAVMALLKRQVPGTINVEHLEEGLEINVVTETTDLPDGDLAALNNSFGFGGHNVTLAFTNTNATR

SEQ ID NO: 43835 - protein, 350 aa, Arabidopsis thaliana
MERYDILRDLGSGNFGVAKLVREKANGEFYAVKYIERGLKIDEHVQREIINHRDLKHPNIIRFKEVFVTPTHLAIVMEYAAGGELFERICNAGRFSEDEGRYYFKQLISGVSYCHAMQICHRDLKLENTLLDGSPSSHLKICDFGYSKSSVLHSQPKSTVGTPAYVAPEVLSRKEYNGKIADVWSCGVTLYVMLVGAYPFEDPEDPRNIRNTIQRILSVHYTIPDYVRISSECKHLLSRIFVADPDKRITVPEIEKHPWFLKGPLVVPPEEEKCDNGVEEEEEEEEKCRQSVEEIVKIIEEARKGVNGTDNNGGLGLIDGSIDLDDIDDADIYDDVDDDEERNGDFVCAL

SEQ ID NO: 43836 - protein, 374 aa, Gossypium hirsutum
MLADFMPFLANVLLQVGYAGMNITSKLALESGMKPLILVAYRQIFATLAIAPFAFFLERKTRPKLTMPILFQIFLCSLTGATANQVFYFVGLQNTTATIACALNNVLPAATFLLAAICRQEAVGIKKASGQAKVIGTLACVGGAMLLSFYHGHIIGIGESSIHWNYANKMANSSPSPSGSNFFLGPFLVMASAVAWALWFIIQGQTSKSFPAPYTSTTLMCFMASIECTIIGIFSDPKPSAWSLSSSMRLIAALYAGIICNAVAFCVMSWCIQKRGPLYVSVFSPLLLVIVAILSWALLREKLYVGTVVGSLLIVGGLYAVLWGKDKEMKQMKGNEKGGEEQVVVEEGAVEVTKAGDRDHDLEMQLQQGGAACG

SEQ ID NO: 43837 - protein, 441 aa, Thermotoga maritima
MIGYQIYVRSFRDGNLDGVGDFRGLKNAVSYLKELGIDFVWLMPVFSSISFHGYDVVDFYSFKAEYGSEREFKEMIEAFHDSGIKVVLDLPIHHTGFLHTWFQKALKGDPHYRDYYVWANKETDLDERREWDGEKIWHPLEDGRFYRGLFGPFSPDLNYDNPQVFDEMKRLVLHLLDMGVDGFRFDAAKHMRDTIEQNVRFWKYFLSDLKGIFLAEIWAEARMVDEHGRIFGYMLNFDTSHCIKEAVWKENTRVLIESIERAVIAKDYLPVNFTSNHDMSRLASFEGGFSKEKIKLSISILFTLPGVPLVFYGDELGMKGVYQKPNTEVVLDPFPWNESMCVEGQTFWKWPAYNGPFSGISVEYQKRDPDSILSHTLGWTRFRKENQWIDRAKLEFLCKEDKFLVYRLYDDQHSLKVFHNLSGEEVVFEGVKMKPYKTEVV

SEQ ID NO: 43838 - protein, 344 aa, Xanthomonas campestris pv. vesicatoria str. 85-10
MTDRLRFPAEWEPQSAVLLAWPHAGTDWAERLADVEETYIALVTAISRFEPVVICVADDDLQIYAEARLRSARVDMTRVRFVIAAYNDTWLRDSGPITLRQEAGFRLMDFRFTGWGGKFEASLDDQLVSSLDAAQVFVPAQVETIDFALEGGAIETDGAGTLLTTWKCLHERHPQRTRESLSSDLATWLAQERVLWLDHGYLEGDDTDAHIDTLARFAGPDAIVYQGCDVPGDSHYVELQAMGAELAALRRADGQPYRLFVLPWAQPILDEGRRLAASYANFLIVNGAVLMPAYGDAADATAQAVLAQAFPQHEIVPVPCRALIWQNGSLHCLTMQLPAGLLAA

SEQ ID NO: 43839 - protein, 341 aa, Mesorhizobium sp. BNC1
MSERLEDIAARMVADGKGILAADESSGTIKKRFDSIGLESTADNRRDYREMLFRADEAMRNSISGVILYDETLRQQAKDGTPLVEIISRSGAVPGIKVDAGAKPLAGFPGETITEGLDGLRERLKEYYELGARFAKWRGVIAVSDDLPTWGSVKQNAQALARYAALCQEAGIVPIVEPEVLMDGTPATHSIDRCYEVTEWVLKTVFTELFDARVALEGMVLKPNMVIDGKNARKASREEVAEKTVRCLKATVPAAVPGIAFLSGGQSDEEATAHLSLMNASHSMPWKLTFSYGRALQAAALKAWGGKSENVAAGQRAFAHRARMNALAARGDWKQELEVAA

SEQ ID NO: 43840 - protein, 255 aa, Glycine max
  misc_feature (198)..(198): Xaa can be any naturally occurring amino acid
  unsure (1)..(255): unsure at all Xaa locations
MGRGKIVIRRIDNSTSRQVTFSKRRNGLLKKAKELAILCDAEVGVMIFSSTGKLYDFASSSMKSVMDRYSKSKEEPCQLGSSASEIKFWQREAAMLRQQLHNLQESHRRKMMGEELSGLTVKELQNLENQLEISLHGVRMKKDQLLMGEIQELNRKGNLIHQENVELYKKVYGTQDDNETNRDSVLTNGLGIGEDLQXACESPAKPATATATTLQGIFRNYKIGIAIALIHIQDVCVSQLLSRKMDSDLNLDVFV

SEQ ID NO: 43841 - protein, 79 aa, Zea mays
  misc_feature (73)..(73): Xaa can be any naturally occurring amino acid
  unsure (1)..(79): unsure at all Xaa locations
SLIFPSPIGRPRLTAWEVPPPTILPIFVNCKDLTYYNGQMLSFDVVKIVQAFKNEILPRHGLIKVCEFTLSEXEHFVVP

SEQ ID NO: 43842 - protein, 408 aa, Synechococcus elongatus PCC 7942
MGQSPCLLTIMLLLSQELPETVRPAVRDRHAQIVAWRQQLHRRPELGFQEQETAAFIAARLTELGVSFQAGVAGTGIVAEIAGQRSGPTLAIRADMDALPILEANEIPYRSEIDGRMHACGHDGHVAIALGTAACLQANSDFAGRVKIIFQPAEEGPGGAAPMIAEGVLENPAVDAIIGLHLWNYLPLGKVGVRSGPLMAAVELFDLTIQGRGGHAAIPQNCIDAVLVASQIVTLLQSIVSRNVDPLHSAVVTIGSLHAGTTYNVIADRAQLKGTVRYFDDRYQGFLQERIEQIVAGVCNSHGATYELNYRKLYPAVINDSAIADLVRSVAEEVLEPPLGVVPDCQTMGAEDMSYFLQKVPGCYFFLGSANLDRGLNFPHHHPRFNFDETALALGVELFLRCVERFCR

SEQ ID NO: 43843 - protein, 587 aa, Arabidopsis thaliana
MSMVDEPLYPIAVLIDELKNDDIQRRLNSIKRLSIIARALGEERTRKELIPFLSENNDDDDEVLLAMAEELGGFILYVGGVEYAYVLLPPLETLSTVEETCVREKAVDSLCRIGAQMRESDLVEHFTPLAKRLSAGEWFTARVSACGIFHIAYPSAPDVLKTELRSIYGQLCQDDMPMVRRAAATNLGKFAATIESAHLKTDIMSMFEDLTQDDQDSVRLLAVEGCAALGKLLEPQDCVAHILPVIVNFSQDKSWRVRYMVANQLYELCEAVGPEPTRTDLVPAYARLLCDNEAEVRIAAAGKVTKFCRILNPELAIQHILPCVKELSSDSSQHVRSALASVIMGMAPVLGKDATIEHLLPIFLSLLKDEFPDVRLNIISKLDQVNQVIGIDLLSQSLLPAIVELAEDRHWRVRLAIIEYIPLLASQLGVGFFDEKLGALCMQWLQDKVHSIREAAANNLKRLAEEFGPEWAMQHIVPQVLEMINNPHYLYRMTILRAVSLLAPVMGSEITCSKLLPAVITASKDRVPNIKFNVAKMMQSLIPIVDQAVVENMIRPCLVELSEDPDVDVRYFANQALQSIDNVMMSS

SEQ ID NO: 43844 - protein, 132 aa, Vigna unguiculata
YATSLESMVDFSTSKLGKNVAVLSTEVDQETGLQQYTIAPGVKKVSGDNAVVCHKQSYPYAVFYCHKTETTRTYPVPLEGANGIRVKAVAVCHTDTSQWNPKHLAFEVLKVKPGTVPVCHFLPEDHVVWVQK

SEQ ID NO: 43845 - protein, 306 aa, Thermoanaerobacter tengcongensis MB4
MRKIVVVGSINMDIVIRVPRIPVVGETVIAYDLKNYGGGKGANQAVSIARLGGNVSMIGRVGNDEYGQKLYRDLKSNGVGVEGIEFDSETPTGTAYINVSEKGENNIVVYQGANKRLNMTQIKRYEHFFDEAEICLLQLEIPIETVKFVVDLCYSRGIKVILNPAPAYELPDTVLEKVYILTPNETELAFLSKSKIETIEDIRKASKYLLDKGVQNVITTIGEKGSYFINKNTEKLFDAIKVTAVDTTAAGDSFTGALAFALSKGEKIEDAIRFATFVAALTVTKEGAQTSLPYKEEVEKFIKERS

SEQ ID NO: 43846 - protein, 743 aa, Silicibacter pomeroyi DSS-3
MHVAGSPDVDHLSEYERRYSRRGLLIRYARGRVRNFAGRQIMTFAGSFILAMTEGLHTAMLAAFAALLGEVIDCLYLHRLPERLRQGQGYRRLLIGSTLTALVQALTISFCVWLAWTGARSGLSPLFIGSFLAGAAINAGLVLPFHRPAAVARLAVYAGIGQYLFLIEAMEPGRLGDALLLNAAGAVMLAFMVGLFLNFVNWGFRQHRRTTLDLIEQGRDLLRHQKEAQLLSLVARNANDSVILADSEGRIVWTNESFTRTTGYSLDEAKGRYPGELLNGDKTDLEVSNAIADAVEAGRPFRTEILNVTKDGREIWMETNLVPVLDRNGKVEVTVAIERDVTAAKAQAEELAAARVAAEEGARAKAEFLATMSHEIRTPMNGVVGMAELLSETKLSIEQRQYVDTIRSSSTALLAIINDILELSRLDARKMELHPVNFDPVSCVRDTMRLLKPQAQAKGLRLSLETGADVPPLVYGDDGRLRQVLINLLGNAIKFTERGGVTLRLRSEAQDPGYLLTLEVEDTGIGIAAEKIERVFERFSQADADTTRLYGGTGLGLTISRELVALMGGRITVDSTLGQGSCFTLCLPLGSPDDDAGQSDGQVLSPAELDRLRGLRVLVADDNRVNRLLMGKFLADLPIRLDFAHDGQQAVAMTQRQKPDIVFMDMSMPVMSGIEATRQIRAAEGRQPLIVALTANTFDSDREACLAAGMDDFLSKPVGRADLFRCLLHHLPPTDAAPRTASG

SEQ ID NO: 43847 - protein, 460 aa, Burkholderia sp. 383
MNQPEDQLHRGLEERHINLMALGATIGVGLFLGSASAIRVAGPAILLTYLLGGIAIFLIMRALGEMAIANPVAGAFSRYARDYLGPLAGYLTGWTYWFVWIVTCMAEITAVGVYMHMWFPGVPNWIWALAALMAMGSVNFIAVKLYGEFEFWFALIKIVTIVLMIIGGGLMIAFGIGNGGVAIGLSNLWAHGGFMPNGINGVIAALPIVMFAYLGVEMLGLTAGEARNPEKSLTKAVNSVFWRVLIFYIGALFVIMSLYPWDQIGTQGSPFVMTFSRLGIPAAAGIINFVVLTAALSSCNSGLFSTARMLYNLAQQGQAPSKLGKVNRNGVPVYGVIVSVALLLIGVLLNYLAPQHVFTWLTSVSTFGAIWTWCVILIAQMRFRRTLSADKIARLPIRVPFYPLGSFVALGFLVLVVVLMAFTPDTRVALVIGPVWIVLLGITYALFYANRPAASVPTKS

SEQ ID NO: 43848 - protein, 311 aa, Oryza sativa (japonica cultivar-group)
MAKALLAVVVVAVAAVLELGLVGANFQDQCDITWEPQNAKMTEGGDHLTLSLVSNSSGCMLRTKKQFIYGSVSTRIQLVKGNSAGTVTTYYTSSIGDKHDEIDFEFLGNSSGLPYTFHTNVFADGVGSREMQFRPWFDPTDGYHNYTIFWNPCMIVWFVDSIPIRVFRNHEKEGVPFPTKRPMYAFSSIWAAEDWATQGGRVKTDWTKAPFVAEYRDIGLNICECPGSGSGSSSSFSSSSSSTSGDAEDPACAQRCATSDHWYAAEGLCQLSDKQLRQMKAVQLGYTIYDYCADAQAKGRPVPPECSMPQY

SEQ ID NO: 43849 - protein, 481 aa, Ralstonia solanacearum
MASPVEPDGRRMRAHSAVSFDLIVIGAGSAGLAAARRAAQLGARTLLIDRAEVGGTGVNRGCMPKKLLGYGAAWSQSASRCLHTAAAHGRDAWQDAAARIRTEVGRLHGVYRAHLAEAGVQWLAGSASLRGRGALRLLTDAGKRTMRARQIVLATGARPQPLPVPGAELACTPEDVLTWDALPASLAIVGGGVIAVEMASTLVRFGVRVTLLVRDPRVLPDFDAALSEAAFRALAAHGVDVVPDADVVRVERDAVNGDGVAVYVAGPDGTAARVVRAQRVMAAIGRAPATDGLGLEAAGVTLDARGHIAVDRHFRTRARGVHAIGDVSGSPQLTPVAVAQGRYVAERLFGKGAKLPDMEHVPMAVFCEPAIAAVGLTEAQARERWPDRPERDARPVAERIDVVERRFVSLEQRFAGTGAESLIKLVCNARSGRVLGAHVMDNAAPEIVQALAVAVRMGVRLKHLRSTVGLHPTVAEELLCI

SEQ ID NO: 43850 - protein, 497 aa, Corynebacterium glutamicum
MESSMVENNVAKKTVAKKTARKTARKAAPRVATPLESHPISATPARSIDGTSTPVEAADTIETTAPAAKAPAAKAPAKKVAKKTARKAPAKKTVAKKATTAKAAPATAKDENAPVDDDEENLAQDEQDFDGDDFVDGIEDEEDEDEDGVEALGEESEDDEEDGSSVWDEDESATLRQARKDAELTASADSVRAYLKQIGKVALLNAEQEVSLAKRIEAGLYATHRMEEMEEAFAAGDKDAKLTPAVKRDLRAIARDGRKAKNHLLEANLRLVVSLAKRYTGRGMAFLDLIQEGNLGLIRAVEKFDYSKGYKFSTYATWWIRQAITRAMADQARTIRIPVHMVEVINKLGRIQRELLQELGREPTPQELSKEMDISEEKVLEIQQYAREPISLDQTIGDEGDSQLGDFIEDSEAVVAVDAVSFTLLQDQLQDVLETLSEREAGVVKLRFGLTDGMPRTLDEIGQVYGVTRERIRQIESKTMSKRRHPSRSQVLRDYLD

SEQ ID NO: 43851 - protein, 183 aa, Zea mays
SFAVSLSLSLSLSLLDSLLNPSLGLLFLPILPPPHPPPNRFNPTRQASMSSSRRSSSPDSNDTTDERKRKRMLSNRESARRSRARKQQRLEELVAEVARLQAENAATQARTAALERDLGRVDGDNAVLRARHAELAGRLQSLGGVLEVLQMAGAAVDIPEMVTDDPMLRPWQPSFPPMQPIGF

SEQ ID NO: 43852 - protein, 720 aa, Arabidopsis thaliana
MEDSGVNPMDSPSKGSDFGVYGIIGGGIVALLVPVLLSVVLNGTKKGKKRGVPIKVGGEEGYTMRHARAPELVDVPWEGAATMPALFEQSCKKYSKDRLLGTREFIDKEFITASDGRKFEKLHLGEYKWQSYGEVFERVCNFASGLVNVGHNVDDRVAIFSDTRAEWFIAFQGCFRQSITVVTIYASLGEEALIYSLNETRVSTLICDSKQLKKLSAIQSSLKTVKNIIYIEEDGVDVASSDVNSMGDITVSSISDFFKLPPHNAVQPILPSKNGVAVIMFTSGSTGLPKGVMITHGNLVATAAGVMKVVPKLDKNDTYIAYLPLAHVFELEAEIVVFTSGSAIGYGSAMTLTDTSNKVKKGTKGDVSALKPTIMTAVPAILDRVREGVLKKVEEKGGMAKTLFDFAYKRRLAAVDGSWFGAWGLEKMLWDALVFKKIRAVLGGHIRFMLVGGAPLSPDSQRFINICMGSPIGQGYGLTETCAGATFSEWDDPAVGRVGPPLPCGYVKLVSWEEGGYRISDKPMPRGEIVVGGNSVTAGYFNNQEKTDEVYKVDEKGTRWFYTGDIGRFHPDGCLEVIDRKKDIVKLQHGEYVSLGKVEAALGSSNYVDNIMVHADPINSYCVALVVPSRGALEKWAEEAGVKHSEFAELCEKGEAVKEVQQSLTKAGKAAKLEKFELPAKIKLLSEPWTPESGLVTAALKIKREQIKSKFKDELSKLYA

SEQ ID NO: 43853 - protein, 459 aa, Vicia faba
MTDSFAHYASHINIRPKTKTMLIFSTPCCSPSTAFFSPFRASNCKPLRSSTLCLRSLTSSATSITSTSNSSLAFNIVKPKEKNVVSANMTSSVSSRTFLNAQNEQDVLSGIKKEVEAGTLPASIAAGMQEVYLNYKSAVIKSGDPKANEIVLSNMTALLDRIFLDVKEPFVFEAHHKAKRGPFDYYMFGQNYIRPLVDFETSYVGNMPLFIQMEEQLKQGHNIILMSNHQSEADPAIIALLLEMQLPHIAENLIYVAGDRVITDPLCKPFSIGRNLICVYSKKHMLDNPELIDMKRKANTRSLKEMATLLRSGSQIIWIAPSGGRDRPVANSGEWAPAPFDSSSMDNMRRLVDHSGPPGHIYPLAILCHDIMPPPLKVEKEIGEKRIISYHGTGISTAPEISFSSTTAACENPETAKDAYTKALYDSVTEQYDVLKSAIHGKKGLQASTPVVSLSQPWK

SEQ ID NO: 43854 - protein, 488 aa, Mycobacterium avium subsp. paratuberculosis K-10
MTNDPRYSPPPQQQPGYPPAPNQTAPVPSHAGSSGYAQGQQPYQQQFDWRYRSQPSQTTQFRSPYEPFGNAGPGRVPGGTGTGPLPGMHPGMPAPPEPQKRSRAGLLTVGAVAIAVVSAGIGGAAATAVEMGTHATGSGGGRIAGAAPSVPAANMPPGSVEQVAAKVVPSVVMLETDLGRQSEEGSGIILSTDGLILTNNHVVAAAAGPPKGPAAPPVVPLPPGGPGGGPGAGTPKTTVTFSDGRTAPFTVVGADPTSDIAVIRVQGMSGLTPISLGSSSDLRVGQPVVAIGSPLGLSGTVTTGIVSALNRPVSTTGESGNQNTVLDAIQTDAAINPGNSGGALVNMNGQLVGVNSAIATLGADSPDAQSGSIGLGFAIPVDQAKRIADELIATGKASHASLGVQVTNDKGTPGAKVVDVVSGGAAASAGLPKNVVVTKVDDRPINSADALVAAVRSKAPGDKITLTFSDPAGGGSRTLPVTLGKADQ

SEQ ID NO: 43855 - protein, 396 aa, Cucurbita ficifolia
MAELIQDKESAQSAATAAAASSGHERRNEPAHSRKFLDVRSEEELLSCIKKETEAGKLPPNVAAGMEELYQNHRNAVIESRNPKADEIVLSNMTVALDRILLDVEDPFVFSPHHKAIREPFDYYMFGQKYIRPLIDFGNSFVGNPYLFKDIEEKLQQGHNVVLISNHQTEADPAIISLLLEKTNPYIAENTIFVAGDRVLADPLCKPFSIGRNLISVYSKKHMLDIPELAETKRNANTRTLKEMALLLRGGSQLIWIAPSGGRDRPDPLTGEWYPAPFDASSVDNMRRLVQHSDVPGHLFPLALLCHDIMPPPSQVEVEIGEKRVIAFNGAGLSVAPEISFDEVAATHKNPEEVREAYSKALFDSVAMQYTVLKTAISGKQGLGASIADVSLSQLW

SEQ ID NO: 43856 - protein, 519 aa, Craterostigma plantagineum
VDHYTYCILGDGCQMEGVSNEACSIAAHWGLGKLIALYDDNHISIDGDTDIAFTEDVDKRFEALGWHVIWVKNGNNGYDKIRAAIKEAQAVKDKPTMIKITTTIGFGSPNKSNSYSVHGSALGAKEVEATRQNLGWPYEPFHVPDDVKKHWSRHTPQGASLESEWNAKFAEYEKKYPEEAAELKSIITGELPLGWEKALPTYTPENPGDATRNLSQQNLNALAKVLPGLLGGSADLASSNMTLLKSSGDFQKNTPEERNVRFGVREHGMGAICNGIALHSPGLIPYCATFFVFTDYMRAAMRISALCEARVIYVMTHDSIGLGEDGPTHQPIEHLASFRAMPNILMLRPADGNETAGAYKVAVQNLKRPSVLALSRQKLPQLPGTSIEGVEKGGYVISDNSSGNKPDVILIGTGSELEIAAKAGEVLRKEGKGVRVVSFVSWELFDEQSKEYKESVLPSSVTARVSIEAGSTFGWGKIVGSKGKAIGIDRFGASAPAGKIYEEFGITVEAVVAAAKELI

SEQ ID NO: 43857 - protein, 676 aa, Craterostigma plantagineum
MAPKTTLIAEPELVSKSVNTIRFLAIDAVEKAKSGHPGMPMGCAPMGHVLYDEFMRFNPKNPYWFNRDRFVLSAGHGCMLQYALLHLSGYDSVKEEDLKSLRQWGSRTPAHPENFETPGVEVTTGPLGQGIASAVGLAVAEKHLAARYNKPGFEIVDHYTYVILGDGCQMEGVSNEACSLAAHWGLGKLIALYDDNHITIDGDTDVAFTEDVDKRFDALGWHVIWVKNGNDGCDEIRAAIEEAKSVKDRPTMIKVTTTIGYGAPSKANTYGVHGNALGPKEAEATRKNLGWPYEPFHVPDDVKKHWSRHIAEGAALESAWNAKFAEFQKKFPEEAADLKSIITGELPTNWESIFPTYTPENPGLPTRTLSHQILNGLGDVLPGLLGGSADLTLSNMAFLKNSGDFQKKSPGERNVKFGAREHAMGSICNGLALHSPGLLPYCATYFVFTDYMRAAMRISALSKARVLYIMTHDSIGLGEDGPTHQPVEHLASFRAMPNILTLRPADGNETAGAYRAAVQNGERPSILVLARQKLPQLPGTSIEGVSKGGYVISDNSRGGNSKPDVILIGTGSELEIAARAGDELRKEGKKVRVVSLVCWELFAEQSEKYRETVLPSGVTARVSVEAGSTFGWERFIGPKGKAVGIDRFGASAPAERLFKEFGITVEAVVAAAKEIC

SEQ ID NO: 43858 - protein, 668 aa, Prosthecochloris aestuarii DSM 271
MQQDPIDTLSINTIRLLAADMVEKAGSGHPGMPMGAAPMAYVLWTKIMKHNPRDPHWLNRDRFVLSAGHGSALLYSLLHLCGYELTMEDLQQFRQWQSRTPGHPEYRHTPGVEMTTGPLGQGIATAVGMAVAERFSAERLNRQSFNIIDYHTYVICGDGDLMEGLSSEAASIAGHLKLEKLICLYDDNRISIEGPTSLAFTENVGKRFEAFGWNVLDVDGNDPEAVEEALRKVRKGTGKPNLIRATTNIGYGSPNKQDNAASHGSPLGKEELAMVRKKFGFPEDESFVIPEAVTAHMRAISDKGEQSQAEWTTLWEAYSQAHPDLATQINDLINKRLPDSWQTLLPEFNPEEQLATRQALNKILHALIGKIPFLAGGSADLAPSNGTAVKNAEDFNPDNYGGTNFHFGVREHAMGAIINGMALSGMLKPYGATFLVFADYMKPALRLAALMQIPSTFIFTHDSIAVGEDGPTHQPIEQLVMLRSIPGMTVIRPADANETKAAWKYIMTAQTPVSLILSRQALPILDSSLYPSEEGTARGGYILADWGNASGSGSKPVILIATGAEVHLAVQAQQQLEEEGIPARVISMPSVELFLQQPEEYREEVLPTSIRRRVVIEAASTIGWHRFITEEGTIVGIDRFGSSAPGSRVLKEYGFTAEHIVATVKTLL

SEQ ID NO: 43859 - protein, 469 aa, Pseudomonas syringae pv. syringae B728a
MSETTSPSGELKRGLKNRHIQLIALGGAIGTGLFLGSAGVLKSAGPSMILGYAICGFIAFMIMRQLGEMIVEEPVAGSFSHFAHNYWGGFAGFLSGWNCWLLYILVGMSELTAVGKYIHYWLPDIPGWVSAAAFFVLINAINLTNVKVFGETEFWFAIIKVVAIIGMIALGSYMLVSGSGGPQASVSNLWEHGGFFPNGVSGLVMALAIIMFSFGGLEMLGFTAAEAEQPKTVIPKAINQVIYRILIFYIGALVVLLSLTPWDSLLASLNASGDSYSGSPFVQVFSMLGSDTAAHILNFVVLTAALSVYNSGTYCNSRMLVGMAEQGDAPRALAQVDKRGVPVKAIFASAAVTLVAVLLNYFVPQQALELLMSLVVATLVINWAMISYSHLKFRQHMNRTAQVPLFKALWYPYGNYVCLAFVVFILGIMLMIPGIQISVYAIPVWLAVMWVCYRAKNRRSVVVPAESGK

SEQ ID NO: 43860 - protein, 252 aa, Petunia x hybrida
MRVNRNATVFIALNLILFLVFVFTAFALSGQENTGGFCGEEEEKGNNYIEMALLGGIRDSHPESQNSDEIHSLAKFAVDEHNKKENAMFELARVVKAKEQVVAGTLHHLTLEVVDAGKKKLYEAKVWVKPWLNFKELQEFTHVEDAPAITSSDLGVKKEEQCSGFKSVPVHDPVVQEAAEHAIKTIQQRSNSLLPYELQEIVHANAEMIEDSTKLHMLIKTSRGGKEEKFKVQVHHSNEGAFHLNHMEPDRS

SEQ ID NO: 43861 - protein, 267 aa, Prosthecochloris aestuarii DSM 271
MVLEKTAACIISKALQAIRQHGWCSLVLAGGNSPRKLYRKLAEGLPYELIEPDCRDTRTGNDTTVRLPWEKIMLFWGDERCVPLNHPDSNFRMAQESLLNYTEIPENNIFCMPHVTSGFADAALRYETTLKHFFQSHHSSWPSDNLWPAFDIILLGMGNDGHTASLFPDDTPALEEKHRWVTDVHAKNGSPPGHRLTLTLPLINNAASVLFYVTGEKKTALARQIISGGQNTVPAARINPKHGDLQWFLADGSTGQKPVSGPQECTA

SEQ ID NO: 43862 - protein, 648 aa, Thermosynechococcus elongatus BP-1
MPLPMNTAIVPSDSAPQEIAIAAETLPNDLESFQPYDPVAIDAYYRQRPLLVLSRWLRILWPVFWLLFNRWWDKVTGQSKQNQRQRAIALRETLTRLGPAYIKVGQALSTRPDLLPAVYLEELTKLQDQLPPFPNEVAFQFIEEELGAPPNELFAELSDHPIAAASLGQVYRGKLHSGEEVAVKVQRPGLAESITLDIYILRGVAYWAKRLIKEIRSDLVAILDEFASRLFEEMDYTQEGRNAERFARLYGHLTDVYIPKIYWKYTRRRVLTMEWVTGVKLNQPQQIQALGIDPRYMVYVGVQCSLRQLLEHGFFHADPHPGNLLAMPSGKLAYLDFGMMSEIAPEQRYGLLNAIVHIVNREYESLAYDYVRLGFLTPDTDVKPIIPALALVFEDALGASVSELNIQRIFDRLSEVMYEYPFQVPAYYALIVRSLLTMEGIAMGVDPNFKVLSAAYPYIAKRLLTDPAPELRTSLASLLLKDGQFRWTRLENLLRNARESRDYDFNVVLEQALDFLFSERGAEYRDRLADEIVKSLDTWARTTMGQWNLGQLLPLLSRPVPATASANILSEANALEHLRRIFSILQDTPGFDWGKVIPAIVRMIARPEVQQMGQRIVNGLLQRAIARFIREMLLADSQPALQTTSLPR

SEQ ID NO: 43863 - protein, 282 aa, Triticum aestivum
  misc_feature (58)..(58): Xaa can be any naturally occurring amino acid
  misc_feature (215)..(215): Xaa can be any naturally occurring amino acid
  misc_feature (245)..(245): Xaa can be any naturally occurring amino acid
  misc_feature (262)..(262): Xaa can be any naturally occurring amino acid
  unsure (1)..(282): unsure at all Xaa locations
HYRTSLYKKAGWYRSGIPGISSTHASVRVLGHEELEMHSVSAWKEAKLQYYGGADVAXVKDSDNLRDVALTIIQNEISSVPIFKSSTDISGIPLLNLATLPGILKFLCSKLQEQPEGYPILRNQISSIPIGTWSQHTGRASTRQLRTSGLSAPLITCLDFLLEDRISSIPIVDDNGSLLDVYSLSDIMALAKNDVYACIELEQLTVENALELQYXQVMGRRQGHTCLNTNTLLGVLDQLSVPRGXRRLVLFEPKNKFVQGIXSLKKAITFPPGKKFGVPFPK

SEQ ID NO: 43864 - protein, 954 aa, Prunus persica
MIMGSVEEKIKAGGLLSGAQSSILDEMKLLKELQDHSGSRKAINSELWHACAGPLVCLPQVGSLSYYFPQGHSEQVAVSTKRTATSQIPNYPNLPSQLLCQVQNVTLHADKETDEIYAQMSLKPVNSEKDVFPVPDFGLKPSKHPSEFFCKTLTASDTSTHGGFSVPRRAAEKLFPPLDFTMQPPSQELVVRDLHDNSWTFRHIYRGQPKRHLLTTGWSLFVGAKRLRAGDSVLFIRDEKSQLMIGVRRANRQQTTLPSSVLSADSMHIGVLAAAAHAAANRSPFTIFYNPRACPSEFVIPLATYQKAIYGTQLSVGMRFGMMFETEESGKRRYMGTIVSTSDLDPLRWPGSKWRNLQVEWDEPGCCDKQNRVSSWEIETPENIFIFPSLTSSLKRPSHTGFLGAETEWGNLIKRPFIRVPEIGNGNSFPYSISNLCSEQLVNMLLKPQLVNHAGTLAALQQQSPANGDLIADMKAMQAKLIQKNPGVFSEGTSLQSQNPPQSSLDQSATIDVNTTSHAILPGKLNNLTKFGSQAPVGNSTDKTKLETDFSADQLSQLNSTGLGIEDKLAAGFVSPYNLVNQLTFANQNQSAAQLQTSPRPMQPPLESLLYHSQQTDMPNSDFNSTNGSLPFLDNDECIFYQSYQPFAGTLRSQGPLSVFGLQDSSAVLTEANNSSLTSIGQEMWDNSLNNCRLLPQVDQLTSSHQGPGSLNCISNSSSLRDLSDESNNQSGIYGCPNVDVGSGVSAVIDPSVSSTILDEFSTLKNADFHNPSDCLLGNLSSSQDLQSQITSASLGDSQAFSRQDLADNSGGTSSSNIDLDESSLLQNNGSWHQVVPPVRTYTKVQKTGSVGRSIDVTSFKNYEELCSAIECMFGLEGLLNDPRGSGWKLVYVDYENDVLLVGDDPWEEFVGCVRCIRILSPTEVQQMSEEGIKLLNSAAMQGINGTMSEGGRT

SEQ ID NO: 43865 - protein, 456 aa, Salmonella typhimurium LT2
MESNNKLKRGLSTRHIRFMALGSAIGTGLFYGSADAIKMAGPSVLLAYIIGGVAAYIIMRALGEMSVHNPAASSFSRYAQENLGPLAGYITGWTYCFEILIVAIADVTAFGIYMGVWFPAVPHWIWVLSVVLIICAINLMSVKVFGELEFWFSFFKVATIIIMIVAGIGIIVWGIGNGGQPTGIHNLWSNGGFFSNGWLGMIMSLQMVMFAYGGIEIIGITAGEAKDPEKSIPRAINSVPMRILVFYVGTLFVIMSIYPWNQVGTNGSPFVLTFQHMGITFAASILNFVVLTASLSAINSDVFGVGRMLHGMAEQGSAPKVFAKTSRRGIPWVTVLVMTIALLFAVYLNYIMPENVFLVIASLATFATVWVWIMILLSQIAFRRRLPPEEVKALKFKVPGGVVTTIAGLIFLVFIIALIGYHPDTRISLYVGFAWIVLLLIGWIFKRRRDRQLAQA

SEQ ID NO: 43866 - protein, 450 aa, Xanthomonas axonopodis pv. citri str. 306
MPDHLPSDAADALQAPTQLDAFWMPFTANRQFKARPRLLASAQGMYYRDVQGRQILDGTAGLWCCNAGHSRERIVAAIRDQAGTLDFAPTFQMGSPLPFVLAQRLAAIAPPGLGHVFFTNSGSEAVDSAMKIVLAYHRLRGEGQRTRFIGREKAYHGVGFGGMSIGGLPNNRKWFGPLLAGTDHLPHTLDLQHNAYARGLPVHGAELADDLERLITLHDASTIAAVFVEPVSGSAGVILPPEGYLQRLRAICDRHGIVLVFDEVITGFGRVGDAFAAQRFGVIPDIITAAKGLTSGTVPMGAVLVADAIHDAFMHGPQNAIELFHGYTYSGHPLACAAAIATLDTYAEEELFTRAITLGPQWEDALHGLRGSPHVIDIRNIGLIGAIELAPRDGAPGARGYDVFERCFHEGGLLVRVTGDVIALSPPLIVTPEQIGQMVETLGKILRQVD

SEQ ID NO: 43867 - protein, 605 aa, Salmonella typhimurium LT2
MLNAWHLPVAPFVKQHNDKLTITLWLSGENPPSRVTLRSEFDNEEISLAMRKQRRQPQPGVTAWRATLNIALGQPRRRYSFKLLWHDRQLWFTPQGFSRFPPARLEQFAVDVPDSGPQWVADQIFYQIFPDRFARSQSREAGQDRVYYHHAAGQEIVLRDWDDPLTPQAGGSTFYGGCLNGICEKLPYLKKLGVTALYLNPVFTAPSVHKYDTEDYRHVDPQFGGDRALLRLRRKTQVQGMRLVLDGVFNHSGDSHVWFDRHNRSTGGACHHPDSPWRDWYSFSPQGVALDWLGYPSLPKLDYQSETLVDEIYRGEDSIVRHWLKAPWNMDGWRLDVVHMLGEAGGARHNLQHVAGITRAAKEAQPEAYIVGEHFGDARQWLQADAEDAAMNYRGFTFPLWGFLANTDIAYEPQHIDARTCIAWMDNYRAGLSHQQQLRMFNQLDSHDTARFKTLLGKDAARLPLAVVWLFTWPGVPCIYYGDEVGVDGANDPMCRKPFPWDERKQDGNLLALYQRMAKLRQSSLALRRGGCQALYAEGDVVVFVRVYQQQRALVAINRGEACEVALEALPLLNVAGWQCKTGSGDIREGRLSLPAISATVWMNR

SEQ ID NO: 43868 - protein, 481 aa, Propionibacterium acnes KPA171202
MASNGHARVEMKPGDSGSAGATRNSQTSRAVFIAVTAAALGITYGYDISNTAAALQFVQRDFGIYSAINTASVVGQIAGAILGGPMANAIGRKKSMLVIAAGYTIFAILTAISPSAGLFLAMRVLLGITIGLSITVVPVFIAESAPASRRGGLATAYQVTCVVGIILGYLVGYSLLPTDTWRWILGVAAVPAFIVLLMLVRTQETPSWYMLKGREDEARRAMERIEVAELVEPSLDEIRNSLSSRPSGSVWGRLREMFHGGMARATIFAIVLGFSIQITGINATIYYAPGIYSRMGFTDTATTYLVPSLVQFLSLISVVISMLVIDKVGRRFVLITGISTMIVATIVLIVTYLASGFEGAVAGIIGLVGMSLFTMGFTFGFGSIVWVYAGEIFPARYRSLGASLVLTADLIANAITAQLGAAMLDGIGLAGTFGVYGGLLVVALLFLLRYAPETSGRSLEEIQDYWNNGARWPKADSPSMG

SEQ ID NO: 43869 - protein, 468 aa, Pisum sativum
GTSIEGAVASHNDSKLFDDDDRLKRTGTVWTTSSHIITAVVGSGVLSLAWAIAQLGWVIGPSVMLFFSLITWYTSSLLAECYRIGDPHSGKRNYTFMEAVHTILGGFNDTLCGIVQYSNLYGTAIGYTIAAAISMMAIKRSGCFHSSGGKDGCHISSNPYMISFGVIQIFFSQIPDFHKMWWLSIVAAIMSFTYSLIGLGLAIAKVAENGSFKGSLTGVTIGMVTEAQKVWGVFQALGNIAFAYSYSQILIEIQDTIKNPPSEVKTMKQATRISIGVTTIFYMLCGGMGYAAFGDTSPGNLLTGFGFYNPYWLIDIANAAIVIHLVGAYQVYAQPLFAFVEKIMIKRWPKINKEYIVTIPGFHPYHLNLFRLIWRTIFVITTTVISMLIPFFNDVLGLIGAVGFWPLTVYFPVEMYIKQKKIPKWNYKWICMQTLSVICFVVSVVATVGSVASIVLDLKKYKPFTTDY

SEQ ID NO: 43870 - protein, 260 aa, Zea mays
  misc_feature (158)..(158): Xaa can be any naturally occurring amino acid
  unsure (1)..(260): unsure at all Xaa locations
MLSEQTAASTSSGEHQERSVVEDRRLQPVGENEEEFRDIHALSPPPSQPSSYRRSRHASVGSDTAPSEPFPTMSREFSAMVAAAAAIANGAAADRVGEAEDEETNPLAIVPDSNPIPSPRRARGPPTPGAGAAHANGDGGVSVGQVRKEEVESKIAAXQIAEVAKVNNRFKREEVVINGWEGDQVEKASAWLKKYERKLEEKRAKAMEKAQNEVAKARRKAEERRASAEAKRGTKVARVLELANFMRAVGRAPSTKRSFF

SEQ ID NO: 43871 - protein, 368 aa, Streptococcus pyogenes MGAS10394
MEHKWKLWLFIVGVVLLIGGASVLIQKGQAKAFSQGKPQIPAKKVKSTKVDPNAPVDQKVIYLAGGCFWGVEEYFSQVDGVLDAVSGYANGRGDTTNYQLIHQTGHAETVEVAYDANRISLKELLLHFFRIIDPTSLNKQGNDRGSQYRTGIYYTDKADLAIIDEVFKEKAKDYKKKIVVEKAPLKHFIKAEDYHQDYLKKNPNGYCHIDINQATYPVIDESKYPKPSATEIKEKLSADEYRVTQKNETEKAFSNRYWDSFDAGIYVDVVTGEPLFSSKDKFESGCGWPSFSRPISPDVVRYKEDKSFNMTRTEVRSRSGNSHLGHVFTDGPKDQGGLRYCINSLSITFIPKADMEAKGYGYLLSSVE

SEQ ID NO: 43872 - protein, 72 aa, Candidatus Phytoplasma solani
LGPACQGKEALKQLIKNGLNVARFNFSHATYENSEKILREIKEINQELNTYVATMLDTKGPEIRTHNFVKPV

SEQ ID NO: 43873 - protein, 228 aa, Zea mays
  misc_feature (222)..(222): Xaa can be any naturally occurring amino acid
  unsure (1)..(228): unsure at all Xaa locations
MDPNFNGVWSASEMDMAKSLIPSQITNKTYTNDMETKHIDFVDDLQAMFPWKEKHQVTNLYVELLVEIMRAQSNNQHVVPSSVLVNDNFGMLSKPMDNMKVIEGYLMDEMEAMRILEEQPNMLNVIHKKKRHGVKFWTTDEHMNFLRGLEAFGRGEWSNISKYFVPTRTPVDISSHAQKYFRRQECTTGKQGFNIDNVSFYGTQPWVQNNPSSCEALTFTGXCLQHLQ

SEQ ID NO: 43874 - protein, 765 aa, Vigna radiata
MGAAILPDLGTEILIPVCAVIGIAFALFQWLLVSKVKLSAVRDASPNAAAKNGYNDYLIEEEEGINDHNVVVKCAEIQNAISEGATSFLFTEYKYVGIFMVAFAILIFLFLGSVEGFSTSPQACSYDKTKTCKPALATAIFSTVSFLLGGVTSLVSGFLGMKIATYANARTTLEARKGVGKAFITAFRSGAVMGFLLAANGLLVLYIAINLFKIYYGDDWGGLFEAITGYGLGGSSMALFGRVGGGIYTKAADVGADLVGKVERNIPEDDPRNPAVIADNVGDNVGDIAGMGSDLFGSYAESSCAALVVASISSFGLNHELTAMLYPLIVSSVGILVCLLTTLFATDFFEIKAVKEIEPALKKQLVISTVLMTIGVAVVSFVALPTSFTIFNFGVQKDVKSWQLFLCVAVGLWAGLIIGFVTEYYTSNAYSPVQDVADSCRTGAATNVIFGLALGYKSVIIPIFAIAISIFVSFTFAAMYGIAVAALGMLSTIATGLAIDAYGPISDNAGGIAEMAGMSHRIRERTDALDAAGNTTAAIGKGFAIGSAALVSLALFGAFVSRASITTVDVLTPKVFIGLIVGAMLPYWFSAMTMKSVGSAALKMVEEVRRQFNTIPGLMEGTAKPDYATCVKISTDASIKEMIPPGALVMLTPLVVGILFGVETLSGVLAGSLVSGVQIAISASNTGAWDNAKKYIEAGASEHARSLGPKGSDCHKAAVIGDTIGDPLKDTSGPSLNILIKLMAVESLVFAPFFATHGGLLFKIF

SEQ ID NO: 43875 - protein, 352 aa, Daucus carota
MASLTDLINLDLSDTTDKFIAEYIWIDAVGGLRSKARTLSGPVDDPTKLPKWNFDGSSTGQGPGDDSEVIIYPQAIFKDPFRRGNHILVMCDTYTPAGEPIPTNKRCNAAKIFSHPDVAAEVPWFGIEQEYTLLKKEVNCPIGCPTGGYPGPQGPYYCGIGADKAFGRDIVDAHYKACLYAGINISGINGEVMPGQWEFQVGPAVGISAGDELWVARYILERITEIAGVVVSLDPKPIPGDWNGAGAHTNYSTKSMRNEGGFEIIKKAIAKLETKHAQHIAAYGEGNERRLTGKHETASIHKFSWGVANRGASVRVGRDTEKEGKGYFEDRRPASNMEPYVVTSMIAETTIL

SEQ ID NO: 43876 - protein, 372 aa, Shewanella sp. MR-4
MRVSSMIVKAIPTNIITGFLGVGKTSLIKQLLKTKPEGETWAVLVNEFGEVGIDAGLMDASNSGVQIREVAGGCMCCAAGVPTQVAINQLIARAKPDRLLIEPTGLGHPNEIIKVLSAPHYQNVISLRSTLCLIDARKLRDERYRGHDNFIQQLHVADVIVTTKTDLYPEFEAAQGGQLAEELTQYLNELQLSDTSVMEHSALQGISTSLLESLKLPRRQATKASGSQSAVFKPVNSSSSLLRHTADTLGLQGIFAESASEQGFRFDARGLVRKHNQGEGCFSCGWVFEPMQEFDFDKLMQFISAQTQGHSALLRLKAVMITSDGIAGINWSDGDMALTELDDSLDSRLEMIATQEINWDEVEQGLIGCLVA

SEQ ID NO: 43877 - protein, 192 aa, Arabidopsis thaliana
MTKNYPTVSEDYKKAVEKCRRKLRGLIAEKNCAPIMVRLAWHSAGTFDCQSRTGGPFGTMRFDAEQAHGANSGIHIALRLLDPIREQFPTISFADFHQLAGVVAVEVTGGPDIPFHPGREDKPQPPPEGRLPDATKGCDHLRDVFAKQMGLSDKDIVALSGAHTLGRCHKDRSGFEGAWTSNPLIFDNSYFK

SEQ ID NO: 43878 - protein, 529 aa, Oryza sativa (japonica cultivar-group)
MAASPFLILPSLFPKPTILAARIHPSIFRGRHIRCSPNGAAVPESPEPAPRRGRRKSPSPSPPKAKTTRRRTKKNTQESDSEGEEEPPKRRGRRTRKSKQEAEQEAAEKEDEVRAASPGTEDSKRAVQDEDGEAEATGSDSEDGEDSPYDWPPLVCCFGAPRWEFVPTVRVSDRQMHPDIYSTWLHLQWEPPEFARAPGSAASNVAIALTRLGGRAAVLGKVGDDDFGRELVYRMNCERVQTRAIRFDDGAATATARMKVGFRDREDGSGGTRLVAETVKSAAEDSLSKAEINVDVLKEARVFHFNSEVLLTPSMESTLFRAIELSKKFGSKIFFDLNLPLPLWRSRDETKELINKAWNEADIIEVSRDELEFLLDHEYYQYKRANPPQYYLDGFHLTRNWPQYYHYTPEEIAPIWHDGIKLLLVTYGTLRIHYYTPKFHGCVIGTEDALITPYTTDRTGSGDAVVAAAIRKLTSCPEMYEDQDTLERNLRFAVAAGIISQWTIGAVRGFPTESAAQNLKEQVYVPSMW

SEQ ID NO: 43879 - protein, 582 aa, Cryptococcus neoformans var. neoformans JEC21
MTMELLKVLHHEASQLFPNCIRSSPVACIVLYSFGGIAILLFSVYLWLWPFQYAKLYFRNLPGPPSDSWFWGVVPTLIKSPPSVPHSMWTDEYGPTVRYRVALGAQRFLTIDPTALNYILSHADLFPKPSRVRKALSDLLGNGLLTAEGHTHKKQRKALNPSFSPAAVRGMIPVFYDKAYELKAKLLGIIEGDETEQASPTPCKEEDEVEGGKKIDVMKYLGKTTLDVIGIVGFSYDFKALSEPRNELSEAYSKMFQAGMDANFWDFLRGAIPLVNKLPNKRATEIAARKAVTLRISKKIVEDKKREVMSAHSEGLEKREDIGDDLLSILIKANMASDVKPEQKLSDEEVLDQITTFMLAGNETSSTALTWILYSLTQHPECQTRLREEVLAVPDDRPSLETLNNLPYMDAVIREALRLHAPAPGTMREAKEDTVIPLSMPVIGRDGKQIDSVKINKGTMVFIPIITVNTSPAIWGPDARVFNPDRHLKTSSDSFGGANMHVPGVWGNMLSFLGGARNCIGYKLALAEISTILFVLIRSFEFQELKSKPEVEKKASVVMRPRIKGEESAGLQMPLMVKPLLM

SEQ ID NO: 43880 - protein, 198 aa, Leucophanes seychellarum
GGAKKVVISAPSKDAPMFVMGVNEDKYTSEDIVSNASCTTNCLAPLAKVINDKFGILEGLMTTVHATTATQKTVDGPSNKDWRGGRSAASNIIPSATGAAKAVGKVLPELNGKLTGMAFRVPTTDVSVVDLTVRLEKPASYDAIKAALKEASQGKLKGILGYTEDEVVSSDFITDSRSSIVDAKAGIALSDTFVKLVA

SEQ ID NO: 43881 - protein, 497 aa, Salmonella typhimurium LT2
MKTQTTHAAEQHAAKRRWLNAHEEGYHKAMGNRQVQMIAIGGAIGTGLFLGAGARLQMAGPALALVYLICGIFSFFILRALGELVLHRPSSGSFVSYAREFLGEKAAYVAGWMYFINWAMTGIVDITAVALYMHYWGAFGDVPQWVFALGALTIVGTMNMIGVKWFAEMEFWFALIKVLAIVIFLVVGTIFLGTGQPLEGNATGFHLITDNGGFFPHGLLPALVLIQGVVFAFASIELVGTAAGECKDPQKMVPKAINSVIWRIGLFYVGSVVLLVLLLPWNAYQAGQSPFVTFFSKLGVPYIGSIMNIVVLTAALSSLNSGLYCTGRILRSMSMGGSAPKFMAKMSRQHVPYAGILATLVVYVVGVFLNYLVPSRVFEIVLNFASLGIIASWAFIMVCQMRLRQAIKEGKAADVSFKLPGAPFTSWLTLLFLLSVLVLMAFDYPNGTYTIASLPLIAILLVAGWFGVRRRVAEIHRTAPVTADSTESVVLKEEAAT

SEQ ID NO: 43882 - protein, 357 aa, Triticum aestivum
  misc_feature (125)..(126): Xaa can be any naturally occurring amino acid
  unsure (1)..(357): unsure at all Xaa locations
MADHLQVQRQQLKFPQGFRFHPTDVEIITSYLVPKVLNKAFDPIAIGEVDLNKCEPWELPEKAKMGEKEWYFFSQKDRKYPTGIRTNRATTSGYWKATGKDKEIFHHVTTSLIGMKKTLVFYKGXXPRGEKTNWVMHEYRLECGKQGTPGLPTDITTATAINASSKEEYVVCRIFHKSTGLKKVVVSSYAIPMSMPMGAEEQHAFHESGTLPPFMGYGASSSLVPPSSVPTSSSYQLHDVGARSSMMGSAVLPMMNDHYFRNHHYQNMATPPRPLVSFYHHDHHHQQQQQQQHMIQMPMQMQIGADEGLMIGVEPGSGPSSIVSQEDTLARFSSNDVATTADEISSVNMGTDGMWKY

SEQ ID NO: 43883 - protein, 324 aa, Prochlorococcus marinus str. NATL2A
MAIPPIFVKAARDIWSFEWKILMNGLAPSDSNGNYKRPINIQQQIQIPTKEDLKNRASNQMPGLIIGRSCPWAHRAWIIHEIKGLKKSINLHIAQVDEEGGRWRLDPPIKGCKTLQELYQKCGNYQSRRATVPMLFDPGKEPESKLRLINNESAELVEILNNWPIYDQEIDLNPSKYKKEIINWQNLIQENVNNGVYKCGFARNQKAYEKASNNLFSALNIIEEHLKSNGPWLCGKNLSIADIRLFPTLIRWEAIYYPLFKCSNKPIESFPHIIKWRKKIFNMYNIKKTCDVDAWRKDYFGALFPLNPSSIIPKGDDITTTINN

SEQ ID NO: 43884 - protein, 497 aa, Ralstonia solanacearum
MTRTDLPPAPITLNDPALWRTQAFLAGAWTDADDGSTRDVTDPATGRVIGTVPAMGAAETRRAIEAAQAAQRAWRKVTARERARILRKLADLMLEHQQDLARILTAEQGKPLPEATGEIAYAASFIEWFAEEARRVYGDTIPAPQGDRRIVVNKEPIGVTAAITPWNFPIAMMTRKVGPALAAGCAMVVKPALETPYSALAFAELAARAGVPAGLLSIVTGDAQGIGGELTANPVVRKLSFTGSTAVGRLLMRQCADDVKKLSLELGGNAPFIVFDDADLDAAVEGAMVAKYRNAGQTCVCANRFYVQRGIYDAFAARLSEAVRALRVGNGAEPGVQQGPLIHQRAMDKVRAHVDNAVAQGARVLVGGKPHALSAQGGAFFEPTVIVDARPGMLVAHEETFGPLAALIPFDTEDEAVAAANDTEFGLAAYFYTRDLGRAWRVSEALESGMVGVNTGLISTAEAPFGGVKQSGLGREGSKYGIDEYLEIKYVCMAGLG

SEQ ID NO: 43885 - protein, 426 aa, Ralstonia solanacearum
MNARDPQHNAQWNARRLAATPRGVGVMTDRYAEHAENAQFWDVEGKRYIDFAAGIAVVNTGHRHPRLVQAVREQLERFTHTAFQIVPYASYVELAERLNTLTPGAHAKKTAFFSTGAEAVENAIKIARAHTGRPGVIALTGAFHGRTFMGMSLTGKVVPYKTGFGPFPGSIYHVPAPIALHGVSTQDSLDAIGRLFKADIDPRQVAAIIFEPVQGEGGFYQMPADFVRALRALCDEHGIVMIADEVQTGFARTGKLFAMEHTGVLPDLVTMAKGLAGGLPLSAVTGRAEIMDAPAPGGLGGTYAGNPLAVAAAHAVLDIIDEEKLCERSAALGRRLVDALDAAKAGQPRIAEVRGVGAMVAIEFNTPDGKPDADFTRTVQQRALEAGLLLLSCGVYGNVIRFLFPLTIEDAVFEEGLAILKHALEG

SEQ ID NO: 43886 - protein, 781 aa, Cryptococcus neoformans var. neoformans JEC21
MTPSRDSALASASASRAQSYKGSPSINPRYSTGNPASTPPLAANGVPPPRPNRAGTLPLDLSLDRDPSPQPASARSPASQLPPVLPSPAVSPGVFSPPTLGQPFAAPVGPAPGNPYFPSATAAIEKGMEDVKMSGPVGVGVPMGVVEPREKELPREPGSAAMGGRSRSGTGRSSKDKKSMFGFVSDLLGKDKPPVISKPYDPVHVTHVGFDFQTGKYTGMPPKWQQVLDDNGITQDEQERNPNGVMAVVQYLKHQDEGEDEEEEVWAKMKNAQPPAFPPPSAAPSQPTTPGGGVGSREMSREPSNEALGAAGTQVVDFTCPRMAPAPPTKPSLNRMLSERHAPASHRPAELTTPAPLAAAPRVTQAYSSALSHSPHLPPPHPTSSAPPTAPAPHLDRSYSQRAPVSGTKTKVLDRANTTRSPGSSAGIAQGAGTGVGLTKSQSQSGHKSRDPSREPKDSASSSGGLSRNQTTTRQQQGATPRRREKEKKENEDVIRQLRMICTPGDPNLVYKNFRKIGQGASGGVYTAIDRQTLPVAIKQMNLEKQPKQDLIINEILVMRESAHPNIVNFKDSYLWQGDLWVVMEYMEGGSLTDVVTAHCMSEAQIASVSREVCEGLRHLHSKGVIHRDIKSDNILLSLNGDVKLTDFGFCARIADPTTTKRTTMVGTPYWMAPEVVLRKEYGPNVDIWSLGILAIEMLEGEPPYLTENPVRALYLIATNGTPKIKDWDKLSTVFRDYFKVTLQVDPAKRPTAAAILKHEFFKHTAPLISLAPMIRSSRKS

SEQ ID NO: 43887 - protein, 111 aa, Synechococcus elongatus PCC 6301
MSMKTLPKERRFETFSYLPPLSDRQIAAQIEYMIEQGFHPLIEFNEHSNPEEFYWTMWKLPLFDCKSPQQVLDEVRECRSEYGDCYIRVAGFDNIKQCQTVSFIVHRPGRY

SEQ ID NO: 43888 - protein, 186 aa, Carica papaya
FGSVYKGFIDDKLRPGLKAQPVAIKLLDLDGSQGHKEWLTEVIFLAQLRHPHLVKLIGYCCEEEHRLLVYEYMPRRSLENQLFRRYSVSLPWSTRMKIAHGAAKGLEFLHEAENLVIYRDFKASNILLDADYNPKLSDFGLAKDGPEGDDTHVSTRVMGTQGYAAPEYIMTGSHLTAKSDIYSFGI

SEQ ID NO: 43889 - protein, 354 aa, Suillus bovinus
MAYQYHNDLLAPYLALSQGDKVQAEYVWIDGDGGLRSKTMTMTKKTTDIGQLRIWDFDGSSTNQAPGGDSDVYLRPAAIFKDPFRGGDNILVLAETFNNDGTPNRTNHRHHTKKVMDLAKDSVPWFGLEQEYTLFDADGTPFGWPKGGFPGPQGPYYCGAGTGKVFARDLIEAHYRACLYAGVNISGINAEVMPSQWEFQVGPCEGISMGDHLWMARYLLVRIAEQWGIKVSFHPKPLAGDWNGAGCHTNYSTKVMREPGGMKYIDEAIEKLSKRHAEHIAVYGEDNDLRLTGRHETGHIGDFSSGVANRGASIRVPRHVAAQGYGYLEDRRPASNIDPYRVTGIIVETTVLDK

SEQ ID NO: 43890 - protein, 183 aa, Anthoceros formosae
MFSMVNGFRNYSQQAIQASRYIGQGFIVTLDHMNRLPMTIQYPYEKLVPSERFRGRIHFEFDKCIACEVCVRVCPINLPVVDWKFKKDIKKKQLKSYSIDFGVCIFCGNCVEYCPTNCLSMTEEYELSTYDRHELNYDQIALGRLPISIIEDRTIESISSFDFSSKKIMEEHSKSRTVTKFLD

SEQ ID NO: 43891 - protein, 578 aa, Thermosynechococcus elongatus BP-1
MLGKTSYRFLLPYVLRYWRTLSLALLCTVGFVGTAPLAAQLVGQTSELVGTGNVRQLLPWAGAAILLFLGRGICQFGQDVLMADAAFRVVYDIRLILYAHLHRLGVDFFERMGSGDLTYRLTGDVEAIAMVITRVFQQLLPALLTAIALMAYMFYLNWPLTLAALIITPLMVAAISWFGERLRTASRRNQDALGGLSSYLTETFAGIRLIKAFATEETILHRFQQEAEKNRRAYFQIARIQSTQYPVVGFLEALSIMSLFLLGTWQIGAGNLTPAQLISFGAAAALLIDPVNQISSSYSSLKVAEASLDRSFSLLAIAPNVQEVRDAQPLPPITGKVEYRHVWFAYELDQPVLQDFNLLVQPGEVVALVGHSGAGKSTLINLLLRFYDPQAGQILIDGIDIKTVTLKSLRRQIGIVPQETILFSGTIAQNIAFGDSEPDWERLIEAAKIANAHDFIDRFPDGYQTWVGERGINLSGGQRQRLAIARAVYADPRILILDEATSALDSESETLVQNALEKAMRGRTVFMIAHRLATVRRADRILVLEQGRIIESGSHQELLAQSARYAQFYTQQYLPDGK

SEQ ID NO: 43892 - protein, 360 aa, Oryza sativa
  misc_feature (70)..(70): Xaa can be any naturally occurring amino acid
  unsure (1)..(360): unsure at all Xaa locations
MAYSTNQIMILQHAWMLVGEANSQLIISTVAHSWYQSNSIEVVLWWFWSRIAQTPTEYGFFGQAMACRTXENDDDPRALEHLDPLSMQQLAESLANELFNQPQEQQEEQHGYHNPSLRVLPFVGDINKPEGHTPAAAAIRDSFFSLTNGSSSSLNFSALEQQQDSGPMTKFCSPLSEMKRGGRRATSSMQEHVIAERKRREKMHQQFTTLASIVPEITKTDKVSVLGSTIEYVHHLRERVKILQDIQSMGSTQPPISDARSRAGSGDDEDDDGNNNEVEIKVEANLQGTTVLLRVVCPEKKGVLIKLLTELEKLGLSTMNTNVVPFADSSLNITITAQIDNASCTTVELVKNLKSTLRNF

SEQ ID NO: 43893 - protein, 501 aa, Pavlova lutheri
MAAPTSPYGAESPRAAYAYPERANVKMSEALRVLDEGVHPLVIHSSQILAAALLVTAAVNHFPKITVADLAEIWRSLQIDVAYAFALTAVAVLLLGYYALRHPRPVYLVDFATWQLRDDKDDGSLSATSDFFRSTITDCGNFCDESVDFQMKLFERNQISERCYFPPGIRAYRKGERDFDFSMAAARKEFETVVFTTVDELLAKTGVKPRDIDILVVNCSLFNPTPSLAAIVINHYQMKDSVQSYSLGGMGCSAGLISIHLAKDLLQVYPRKRALVISTENITQNFYQGNEKSMLISNTLFRMGGAAVLLSGRHADRRVAKYQLLHTVRTHKGADPDAYRCVFQEEDKAGHVGVRLSKDVMECAGAAMKTNISVLAPLILPVSEQVRFLANYVARKWLRMKGVKGYVPDFTTAVQHFCIHTGGRAVLDALQANLSLSDYYLEPSRYSLWRWGNVSSASVWYELDWLEKSGRIRRGDKVWQIGFGSGFKCNSAVWRACRAMP

SEQ ID NO: 43894 - protein, 445 aa, Streptomyces griseus
MVSAAESPKRARKSVAAKSPVKRTATKTVAAKTTVTRTVAATAAPAVESADAADDAVAAAPAKKTAAKKATAKKAAAKKTTAKKTAAKKSGKQDDEILDGDEAAEEVKAGKGEEEEGEGENKGFVLSDDDEDDAPAQQVAVAGATADPVKDYLKQIGKVPLLNAEQEVELAKRIEAGLFAEDKLANADKLAPKLKRELEIIAEDGRRAKNHLLEANLRLVVSLAKRYTGRGMLFLDLIQEGNLGLIRAVEKFDYTKGYKFSTYATWWIRQAITRAMADQARTIRIPVHMVEVINKLARVQRQMLQDLGREPTPEELAKELDMTPEKVIEVQKYGREPISLHTPLGEDGDSEFGDLIEDSEAVVPADAVSFTLLQEQLHSVLDTLSEREAGVVSMRFGLTDGQPKTLDEIGKVYGVTRERIRQIESKTMSKLRHPSRSQVLRDYLD

SEQ ID NO: 43895 - protein, 395 aa, Pyrococcus furiosus DSM 3638
MGKLDWIREELEELKKKGLYVTIRVLQSAQGPWVIVNGKKVLNMCSNNYLGLAAHPKIKEAAIRAILDYGVGAGAVRTIAGTMDLHVELEEKLAKFKKREAAILFQSGYNANLGAISALLRKGEDGVFLSEELNHASIIDGMRLSGAPKVIYKHLDMEDLKKKLEENKDKKKKIIVTDGVFSMDGDLAPLPEIVELAEQYDAIVYVDDAHGEGVLGSHGRGIVDHFNLHDKVDFEMGTLSKAFGVIGGYVAGPEEAIEYLKQRARPFLFSSAPNPPDVAAAIAAVEILQKSDDLVKKLWDNTHFLQKGLRDLGYDLGNTKHPITPVMLYDEKLAQEFSRRLFEEYNIFAQAIVYPTVPLGTARIRLEPSAAHTKEDLKLVIDAFEDLGRKTGFLK

SEQ ID NO: 43896 - protein, 214 aa, Zea mays
  misc_feature (201)..(201): Xaa can be any naturally occurring amino acid
  misc_feature (205)..(205): Xaa can be any naturally occurring amino acid
  unsure (1)..(214): unsure at all Xaa locations
MSSMQFSSVLPLEGKACVSPVRREGSACERLKVGDSSSIRHDRASRRMCNGGRGPAATGAQCVLTSDASPADTLVLRTSFRRNYADPNEVAAVILGGGTGTQLFPLTSTRATPAVPIGGCYRLIDIPMSNCFNSGINKIFVMTQFNSASLNRHIHRTYLGGGINFTDGSVEVLAATQMPGEAAGWFRGTADAVRKFIWVLXDYYXNKSIEHILI

SEQ ID NO: 43897 - protein, 267 aa, Lactobacillus plantarum WCFS1
MKTKPEALMRDLYNLIINPATRDWERHLLVQAKNNRQQLSPTGQLKQLEADLRPLAMRNNLTPDVMDFYLAITGNAPMPTKNNVSAYPTLSSPYEERAVFAGGCFWCMVEPFDQRPGINNVISGYTGGSWAQPTYEQVSGQYTGHVEAVEIRYDSRKISYQNLVDIYWQLIDPTDRFGQINDRGSQYRPVIFYANQHQLTIAQASKQALVDSQRYQKPIVVAIEPLQQFWPAENYHQDFYRKQPRRYRQLKKAHDHYLNWLKFKNKF

SEQ ID NO: 43898 - protein, 267 aa, Coxiella burnetii RSA 493
MNRIEQQFKKSPAYVAYLTAGDGGLERSLESLLALAKGGVNILEVGVPFSDPVADGPVIQEASIRALAQGTTLHDVLTLITSFRQHSEIPIILFTYFNPLLAAGDKIYQQMKSAGVDGCLVVDLPVEEAAPHLTACKTAKIAPILLISPSTTQERLKKINEHGEGMLYYVCRPGTTGVRATLPENFPAKMNQIKSMTSLPIVTGFGIANRKMAAQALQYADGFVIGSLFVKAIAEGISKNALTRLAQSLNPHYPNLRLITPFRKKTF

SEQ ID NO: 43899 - protein, 463 aa, Ralstonia eutropha JMP134
MERVPRSRGKGGKPMRTRKADFVVIGGGSAGVACARRAASHGASVVLIERDEIGGTCVNRGCVPKKMLSYGATWAAILSGCLSHTGGHEDWRDAIVRVNAEVARLNVVYAQRLLEAGVDILRGDAVVTAPDEVRVGDEVIRAKRILIATGARPKTLDIPGGELASNSDDVFTWQTVPGSIAVIGGGYIGVEQASILSRYGVKVDLLVAGDRLLPHFDAEIAEALAGALETKGVRLHLNASVNLISQANGALEVCYRPGNKPGQTESIRAQAALVAVGRVSNVDGLGLDAIGVKLGDKGGIKVDRQFRSSVRSIHAIGDAIEGLHLTPVATSQGRWLADRLFGRRGERADFDFVPTAVFCEPAIGAVGLTEAQAIEEAGKPERIRTVVKRFVSLENRFGGNGMQSVFKLVLNARTGRVLGVHLMDNAAPEIVQAMAVALRLGVRESHLETTLQLHPTVAEELFG

SEQ ID NO: 43900 - protein, 197 aa, Leucophanes glaucum
GGAKKVVISAPSKDAPMFVMGVNEDKYTNEDIVSNASCTTNCLAPLAKVINDKFGILEGLMTTVHATTATQKTVDGPSNKDWRGGRSAASNIIPSATGAAKAVGKVLPELNGKLTGMAFRVPTTDVSVVDLTVRLEKPASYDAIKAALKEASQGKLKGILGYTEDEVVSSDFITDSRSSIVDAKAGIALSDTFVKLV

SEQ ID NO: 43901 - protein, 378 aa, Triticum aestivum
  misc_feature (95)..(95): Xaa can be any naturally occurring amino acid
  misc_feature (297)..(297): Xaa can be any naturally occurring amino acid
  unsure (1)..(378): unsure at all Xaa locations
LLGLLVGSDNLDQLWPESSWRSLKVRWDESSTIPRPDRVSPWEIEPASSPPVNPLPLSRPKRSRPNVPPASPESSVRTKEGATKADMDCAQAQRXQNNTALPGQEQRSNKLTDINDFDASVQKPMMWSPPPPPNIGKNNPLTFQQRPSVHNSIQLGRRETDFKDASSGAQPFGDSLGFFMQTTFDEAPNRLGSFKNQFQDHSYARQFADPYLFMHQQPSLTVESSRKMHTENNDLHFWNGPSTVYGNSIDQAQDFRFKEHPSNWLSPQFSRAEQPRVIRPHASIALIELEITTEGSXFKILGLKFDTAMLVLIWTPNWLGPRPLQPNTCLISNDCLPEPLTCWDTENKTCRRFKRLQRFKIQSHNKGFTWKRKSLEIK

SEQ ID NO: 43902 - protein, 2370 aa, Cochliobolus heterostrophus
MSPSQTSGRAARFAHILARLQELPNYVWDSEIEPFHSSYDNWHFFGYERTPPRQERPLSRGRSDITSSTSHSPGATRPAFHRSHRSSGSEASASTVQTHHTQTTAKALAPDGRPVVCRVSHQALRLEREFHLSKLVVKESDPEGRHFVRPIEFVRLPARHGEEQLVASIFEAPGPNFLKELVDFGPNWYNFRRNITDSTPPQLDALLSNHGVPLLTFLDFAVGSVECLEILHHGHEIVHGEIRGDAFHFAESGAVKMINFGSGARSFENGLTSAGWSALSKETGVELKLAFISPEQTGRMPAEPDTRTDIYSLGILFYTMLCGHTPFDGSTALDVMQNVISKRIPPVSSTRLDIPEALSQVIQRMTQRSIEDRYHSTSGLKHDLARIRELLCEGDVEGLKAFQVGSKDISCFFNLPLKMIGREKERKTIVDVIERAARHRRNGVKNLQSMSSGSSYSDQRLDLQFDDLISESTSSRGSESRMNSVSADGPVFMEAARSIQQGSHDSITQSETSTADGSMDNRPQLQLTHRGRSNNSIESSALHSRSHQSNDGLRTLASTRRLRRKARCEASINSVIAIGGATGLGKSRLVQSIQSTARSTGYFAMAKFDPDKRAPFDPILRLMSSFFRQIFSEADVTTEFHQRLRHYLKNSGVWMVLRSYLDLPEWLLNTNNGPNTPQQKDIDFLKDRRASSPAVHCGGAGHTAEAWLRSGGASKSSRFMNVFIDVLRLLAMHKLCTWSLEDVQNADPESAELIHHIVQAKIPLVLMFTYTDEETLPRELVPLLRNATKVQLLPFTEVQTAEYVAETLHRDHQYILPLVAVIQEKSRGNLFYIREILDTCYRKRCVFYEWRENNWVFDLDKVFEVFESPDYGSAVTADFIARRLTDLPHESRKLLAWASLLGGTFSFELLKKLLKPTGHEPPGARLPLFGNNECAVTALNEALKAYVLMPAEQDARFRFSHDRYLAAASSSLDKEWDTQLMHFTIARMIISGKEYLDDPELSSKALYMQSRHICLAAELIKSKEQIRAPFRDMLYQAGETACESGARSTGIYYFAHSLKLLQDDPWDESKPDVSYQETLQLFVRSAECYWHQSMYDEALSLIETTFQHARNPCDKASSFILQSRVFAVRGDNLGALQALKNCLSMLGYPIPATTWEACDAQFQKLYSKLQATDKNELLMPQSPTNDRVLMTIGPVFIELLSAAFWSNSLLFYQATLMLIQVHLDRGIVSQVALAYVHLGSIAGGRFNMIQFAVDMGDIAKRIFQMFPEDHYTLGRAQTLQPLFLGHLEGSLGDLIPFLEDALQASLTAGDRILTLLNVGVRAYFKIMASHDVAELEAWIEETPLDVKNWEKDLRGGVFLVASRQCARALQGKTGTNDASSIFSDHEHNEAEYIDFLENTASNPKRPKSIYLAMKLPVLVLFGFYSEAVALGELLLPMVSSMWCERSNYSVRYYLSLAYMAVLRADPQNARKDEMLRHVQDTLKLLEVCCTITDANYRGWKHILSALLAESIIDYTSALQNYESAMDHSETYSFTLDEAFALELYSEFLIRKKAYRAARHTIKDCLSTYRRMSAFGKANHFASKHESLLGRGASFTVQDIGVQTSITETSNTAFRFEQNDLGTETAVDRTQNWIVPEGTRRQESTQGLQNGLSAVGLDMLDLSSILESSQVLSSELVVDKLMAKMSSILLESTGGTLCGIVVEDPQIEWSIACVATNEPDNDSGFSSGVTSFPASQPLDTVDDVVARQVTLYTLRFRETVFVQNLLEDDRFSNVSDSYLRRNPEGKAVICIPIVHSDHLLGSIYVEGPPNSFTERNTQVLRLLVNQISISLANALLFKEVERVSASNEAMLEMQKRALAQARAAEIKAKEAEANAIRNMKLKEEAAKAKSLFLANVSHELRTPLNGVIGMSELLKASPLNGEQSGYADSIRVCADTLLSIINDLLDYSKLEAGKMNVMEMPISLNETIAEVVRALAYTNAERGLKTIEQLELDPEMLVMGDPVRLHQILMNLLSNSYKFTPRGSVTVRAVVDQETSEWADVTCSVIDTGIGIPDEQKQKLFLPFSQIESSSARSYGGTGLGLSICKALIENVMHGTVRLDSQPGKGTTVTFSLRFKKVPKARAGDQQQRSREPDPMARFSSQENNGHEHTSGGCIDLSTVPRRDLRVCIAEDNLINQRIAISFVQKLGFKCDAYLDGFKTIDALERASENGRPFHLVLMDVQMPHCDGYEATKLIRKHPNPEIRNVLIIAMTASAIQGDREKCIESGMNNYLAKPVRAQTLKALLESYLNKNKESEEIPNLAIEAKKMVKDALKEAQTLPKVTGGNENVKKEVDVQSAAAEAKKADRPSGVRMSTTQHILPNGKTEPVPPS

SEQ ID NO: 43903 - protein, 2013 aa, Cochliobolus heterostrophus
MTKAPTPSPDSKRATSTTATPPTPRPPLQRLAASDAKSYPSQVSQTSPRTQQPPDHRDNEAADIDMSDTDSRHCNDQPAADPQADQTPTESTAHPPHGNVSPDELEVERLRRLQLKVLQQQQQQRARLRASTSSPNANTPGPRRISPIKEEPMPGISPTLEGAFSSPTPSPSPLPTAVTASTASTESTESAKTIRGSMPPTPATHPLRTPSYPFPTVPNTPRWASAFHMPFTNLSPTVSAGQSREYTVARERIASESSTPAACNTPFAPGGRQHSSPAIEDPRFPSPNLYDVVLRLGAEPGLAAWWTTVTSIMRDHYGAERVALAVPADASDIENVPWGQKATFTASANDTSAYAATYQESAGQSSNLQPENTSNPQQGESVDTPPTTVIPERRPKLFSHHSFAGHERQKPTMSPDTPMPAQPIRPRGPLRSVSHAPHMGSRPDHPLRQVSQASFDGMSSAFAESTPTGGPTFSDPEFSSIGEPSPPSAVYHVLRALDHEPDALIDNSGVNRVLERGRLVTLTRDYSTSFSTSKENLEKDRTDPVKPSAVQGSAAAQEAFKLAAARGRVGLGTSDPRLPPRYEEYEQYPASPWAQSPAPSPAIQNDADANPFFATGNVDEETFNPSRSPPDYTQYGMVEAIGVDKASTVTHIPLIHPTLSQTMAPTDTSTPSQTPAMSRRQSEQSVGTSFHQGDFVRKAPIAILSLLSPIVPYPRNLTNSLKHLGPHLATSFSNAWHFTNAQTQVASIRQRRAATGGAGGMAMSSDSDSLEDLLHLDLGDIANSAAGSVTSPSDYSSRSRHSPGGSIAGTPGWDTSLGFSSRHSHSGTPGHLAGSEAVESYFDARRQANKTNHNAASNSQEQSSRKTDKRSGKRVTVNPVAENVKEDPSKPREDKKDEVSSPRYAQAQDTTKRGHSFLHSYGADFSSSFQSLPAATTPGGRPQVPQGSLRTMSVTESSEMPPPSESLLRTIIDSLPVQIFTAAPNTGAISWVNSKFLIYRGQTSRQVLQNPWDSIHPEDRDAYLDEWSRSLRTGQQLQMKVRLQRFDECYRWFYVRVAPLRNKRQQIVHWIGTNMDFHEQHIAEQNSARQQETAASEAKYRALANSSPQIVFVVSDRRGLTFCNSQWISFSGQSESQALGNGFLEHVHPDDVIKCKLPELDEHGVANVPTTLPAEQGQQDSNASDASSETERTITSPSGSSPDRMDLPQAKLSKLASTGILRVVKDAHGRASYSTEVRLRNKDGDYRWHLVRILLEKSLAETSDEETWYGTATDINDHKLLEQTLKETMDAKSKFLSNMSHEIRTPLNGISGMVNFLLDSVLNTEQLEHVNIIKASTDSLLNLINDILDLSKVEAGMIKLSMEWLHLPSLLEEVNDLNMGLAIQKGLELNYLVDEGVPAEVKGDKFRIRQVLLNVVGNAIKFTEHGEIFIRCKLQPSDRSRPLKENETMIRFEVVDTGQGFTDAEAKYLFKRFSQIDASSTRQHGGTGLGLAISMQFVELHGGRMDARSAPGKGSTFFFTIKFGLPTADDYPKPLVSTPGTPAFEPPIAPPPANLPQLQPSALQKFVQSQNPGYVPLKRVSSVSSEKSESAKSAKSPVLSVTASERSRDSPALSSGSSDHSLTSSALTGQSSLRSERSSASSYMHETNPASNANMNLALPPKRTNSDQETQPGESSTSVDSDETVRPGSPHRSLSPLGSSLQPPMYSILVVCPLEHSREATIRHIKNTLPQGIPHQVTGQPSIIGAQKMMGGENPVLFTHVVLVLHDTAEVHAIVDQIFSSTAYSNTSVVIVSDPSQKKELMKEAPVYDYEQLHNDRRLEFVYRPLKPSKFAIIFDPQKQRESSTDRNQDSAQQVVVSQKLVFEELKRRVGGKNHKVLLVEDNKINQTVILKFLARIDIATETVLDGVQATEAIFSKPAGYYSIVLCDLHMPNKDGYQACKEIRRWEKKHGYRRHPIIALSANVLGDVYAKCAEAGFNSYVTKPVEFKELSIAMTTFLDPADPSKPPALMKKK

SEQ ID NO: 43904 - protein, 618 aa, Yarrowia lipolytica CLIB122
MEKIGHKQKIWGERLEKLICFHPWVRAIFFSKAQIKHYPKRGSSTNAKERGWTRPIIIVGWIFVYLYAASKELAEKVHPTMAPLATSHFAGLSLLSSKAVVQSSIFIVTRPAFAKVCDHIGRLEGWVIVVLCHLVGSVLFASAPNTGCYFAGIVFWEVATVGGHMMTELYASDTSTINTRIIFSSFIQSPNIWGPYAAAPIVGAILDVATWRWGYGMFAIVIPVCSLGVLFLFSVMRVKEFRLGARGDFYTPGGFKRFLLSFDIVGLVMLCAGTILLFFPITLAEGTDKWSRPGFIAMLTIGSFLLAAFPLWEIYGAQSPLISWKLFRNRAMICSCTILFFSSMSNKLSVPYYTSWLLVVRGYSPKATTNINSAVTVANNAFGILFAAPYLLWSGKPKHMMVLGTCLYLVGTGLTYRFRRQHSGLGILIISQVIEGIGRGTLYIPCGTIAQAMFDKHKVAKVTAVYFTMGGIGQLVGDAILGAIYKEVYPQYIHKYAPDIPQKDLNLIINKIKKATKFPIGSPVRNEINRAFDETMKHMLYGTFACAAMMFLAVLCYPSVDFKEQGSVSVDEGEDIEPDDYRIEVRSQSDTELSESPSEKLEDPHFGSCKGQEEKLKK

SEQ ID NO: 43905 - protein, 323 aa, Enterococcus faecium
MRKSVGITVFGCEQDEANAFRALSPDFHIIPTLISDAISADNAKLAAGNQCVSVGHKSEVSEATILALRKVGVKYISTRSIGCDHIDTTAAERMGISVGTVAYSPDSVADYALMLMLMAIRGAKPTMHAVAQQDFRLDRIRGKELGDMTVGVIGTGHIGQAVVKRLRGFGCHVLAYDNSRKMDADYVQLDELLKNSDIVTLHVPLCADTRHLIGQKQIGEMKQGAFLINTARGALVDTGALVEALESGKLGGAALDVLEGEDQFVYTDCSQKVLDHPFLSQLLRMPNVIITPHTAYYTERVLQDTTEKTIRNCLNFERSLQHE

SEQ ID NO: 43906 - protein, 198 aa, Arthrocormus schimperi
GGAKKVVISAPSKDAPMFVMGVNEEKYTDEDIVSNASCTTNCLAPLAKVINDKFGILEGLMTTVHATTATQKTVDGPSNKDWRGGRSAASNIIPSATGAAKAVGKVLPELNGKLTGMAFRVPTTDVSVVDLTVRLERPASYDAIKAALKEASQGKLKGILGYTENEVVSSDFITDSRSSIVDAKAGIALNDTFVKLVA

SEQ ID NO: 43907 - protein, 578 aa, Zea mays
  misc_feature (110)..(110): Xaa can be any naturally occurring amino acid
  unsure (1)..(578): unsure at all Xaa locations
MYRAAASLASKARQAGNSLAARQVGSRLAWSRNYAAKDIKFGVEARALMLRGVEELADAVKVTMGPKGRNVVIEQSFGAPKVTKDGVTVAKSIEFKDRVKNVGASLVKQXVANATNDTAGDGTTCATVLTKAIFTEGCKSVAAGMNAMDLRRGISMAVDAVVTNLKGMARMISTSEEIAQVGTISANGEREIGELIAKAMEKVGKEGVITIADGNTLYNELEVVEGMKLDRGYISPYFITNSKTQKCELEDPLILIHDKKVTNMHAVVKVLEMALKKQKPLLIVAEDVESEALGTLIINKLRAGIKVCAVKAPGFGENRKANLQDLAILTGGEVITEELGMNLENFEPHMLGTCKKVTVSKDDTVILDGAGDKKSIEERAEQIRSAIENSTSDYDKEKLQERLAKLSGGVAVLKIGGASEAEVGEKKDRVTDALNATKAAVEEGIVPGGGVALLYASKELDKLQTANFDQKIGVQIIQNALKTPVHTIASNAGVEGAVVVGKLLEQENTDLGYDAAKGEYVDMVKTGIIDPLKVIRTALVDAASVSSLMTTTESIIVEIPKEEAPAPAMGGGMGGMDY

SEQ ID NO: 43908 - protein, 438 aa, Thermus caldophilus
MIRVLHLAPEAYPLAKVGGLADVVGALPKALRPLGVEAHVLLPWHGGLEARRVGEVAFAFFGREERAPLGERVEGGVRFLLLGVEGFGRERVYGYPDDAERYLRFALAAKEVARGYDLVHAHDWTAALLALYAPTVYTIHNLAHQGLVDPGLFFSWTGLPWSLFHMEALEFYGRVNLMKGGIVFARRVTTVRPSYAEEIQTPEFGMGLDGVLRRHAGKLRGILNGLDTEVFDPGKDPYLPAPYTREDPSGKARAKEVFRERTGLRPPVLAYVGRLDYQKGLDLVLKALPRLLEMGFRLYVQGVGDGGLQEAFLRAEEENPEGVRFLPAYDEAMARLAYAGAEAVLVPSRFEPCGLVQMIASRYGTPPVARAVGGLKDTVEDGRAGVLFETYHPEGLLYGVLRLFRLGAEEMGLRAMEKDFSWEGPARAYREVYREALG

SEQ ID NO: 43909 - protein, 401 aa, Rhodobacter capsulatus
MDYNLALDKAIQKLHDEGRYRTFIDIEREKGAFPKAQWNRPDGGKQDITVWCGNDYLGMGQHPVVLAAMHEALEAVGAGSGGTRNISGTTAYHRRLEAEIADLHGKEAALVFSSAYIANDATLSTLRLLFPGLIIYSDSLNHASMIEGIKRNAGPKRIFRHNDVAHLRELIAADDPAAPKLIAFESVYSMDGDFGPIKEICDIADEFGALTYIDEVHAVGMYGPRGAGVAERDGLMHRIDIFNGTLAKAYGVFGGYIAASAKMVDAVRSYAPGFIFSTSLPPAIAAGAQASIAFLKTAEGQKLRDAQQMHAKVLKMRLKALGMPIIDHGSHIVPVVIGDPVHTKAVSDMLLSDYGVYVQPINFPTVPRGTERLRFTPSPVHDLKQIDGLVHAMDLLWARCA

SEQ ID NO: 43910 - protein, 176 aa, Carica papaya
LGRCIRAILDGLDVAIKRISKDSKQGRKEYVSEVKIINRLRHRNLVCLIGWCHARGEFLLVYEFMPNGNLNSHLYRSENPLGWPARHKIALGLASALFYLHEECEPYVVHRDVKPSNVMLDSAFNAKLGDFGLARLVDHDCGLRTTNLAGTLPYMAPEYLRNGTASKESDIYSYGM

SEQ ID NO: 43911 - protein, 120 aa, Zea mays
MAKTSSFKLEHPLEKRQSEANRIREKYPDRIPVIVEKAERSDIPDIDKKKYLVPADLTVGQFVYVVRKRIKLSAEKAIFIFVKNTLPPTAALMSSIYEENKDEDGFLYMTYSGENTFGLL

SEQ ID NO: 43912 - protein, 317 aa, Fusarium oxysporum f. sp. melonis
MKSCSCYLGLHFPAGCSLNRSCCALYIWQNPLLRESFLSPSYSTEDQCINQRLQVSFISSDIRGHHKTFYSQSSQDERHSTPLYTSPQLGQKVTDYAEQHSTPLPKHISDYHADISANREDSYYMSSIFQSQYNTFLAKSIRATRVLEIGVYVGFSALVWADAVGPSGLVTGLEFEPEYAELSKKAFAANGVDNVEILVGPASESLPKLNPTEPYDLVFIDADKTGYPGYLKQLLELSKPGNSSRILRPGALIVSDNVLRRGLVADDKALGDDELKGDQLKNVLAVRQFNDLALQSPRLETFVLPLWDGVNVSRLLD

SEQ ID NO: 43913 - protein, 620 aa, Azospirillum brasilense
METGTGRGLLRFLTCGSVDDGKSTLIGRLLHDAGLISDDQLEQARRDSRGRAEEDGGIDFSLLVDGLEAEREQSITIDVAYRYFATDRRSFIVADAPGHEQYTRNMATAASGASLAVLLVDARKGLLTQTRRHAIVASLMGIRHVVLAVNKMDLVEDGETVFAAIRQAFTVFSAPLGFRSVTAIPLSARHGDNVVHRSAAMPWHHGPTLLGHLETAAAEDDPTEDGPLRFLVEWVNRPNLDFRGLSGTLLSGSLETGGAVTVWPSGRSARIARIVTFDGDVTQARAGDAVTVTLDAAVDAGRGDLLSGPDGAPEVADQFAAHLLWMAEEPLIPGRSYLLRAGARWVPATVTALRHAVNVETLEHGAASVLGLNAVGLCNLSTAAPLAFDPYEASRHTGSFILVDRFSNRTVGAGMIRHPLRRAANLHRQELAVSTVERAALKRQRPAVLWFTGLSGSGKSTIANRVERRLHTLGHHTMMLDGDNVRLGLNRDLGFTDADRVENIRRVGEVAKLMTEAGLIVLCAFIAPFRAEREAVRALLPDGAFLEVFVDTPLDECMRRDPKGLYAKARAGTLRNFTGVDSPYEAPDAPELRLDTTAEDADALAERVVELLHRKGIAEA

SEQ ID NO: 43914 - protein, 389 aa, Escherichia coli CFT073
MSDTTILQNSTHVIKPKKSVALSGVPAGNTALCTVGKSGNDLHYRGYDILDLAEHCEFEEVAHLLIHGKLPTRDELAAYKTKLKALRGLPANVRTVLEALPAASHPMDVMRTGVSALGCTLPEKEGHTVSGARDIADKLLASLSSILLYWYHYSHNGERIQPETDDDSIGGHFLHLLHGEKPSQSWEKAMHISLVLYAEHEFNASTFTSRVIAGTGSDMYSAIIGAIGALRGPKHGGANEVSLEIQQRYETPGEAEADIRKRVENKEVVIGFGHPVYTIADPRHQVIKRVAKQLSQEGGSLKMYNIADRLETVMWESKKMFPNLDWFSAVSYNMMGVPTEMFTPLFVIARVTGWAAHIIEQRQDNKIIRPSANYVGPEDRQFVALDKRQ

SEQ ID NO: 43915 - protein, 289 aa, Saccharomyces chevalieri
MSNESNDLEKNISHLDPTGVDNAYIPPEQPETKHSRFNIDRDTLRNHFIAAVGEFCGTFMFLWCAYVICNVANHDVALTTEPEGSHPGQLIMIALGFGFSVMFSIWCFAGVSGGALNPAVSLSLCLARAISPARCVVMWFSQIIAGMAAGGAASAMTPGKVLFTNALGLGCSRSRGLFLEMFGTAVLCLTVLMTAVEKRETNFMAALPIGISLFMAHMALTGYTGTGVNPARSLGAAVAARYFPHYHWIYWIGPLLGAFLAWSVWQLLQILDYTTYVNAEKAAGQKKED

SEQ ID NO: 43916 - protein, 383 aa, Photobacterium profundum SS9
MKNNMTVNNDINFNPVRFRHHLHRYPELSLQEHKTASEITDQLLTFGFEPKTNIGGYGILVEIKSGNPGPITLLRADFDALPITEKSQHDHVSRNHGCMHACGHDGHVASLLAVANQLSQTPPQSGTVFLLFQPAEEIGVGAKKMLQDPRLKGIQPDAVYAYHNLPGYPLGTVVVKDGVFACASTGVMITLIGKTSHAAKPENGHSPAPAVARLMDYLHHMPEAFKEAFSLVTLVHVNVGNKGFGTSPGRAEVMATIRSSDNYILNYMKRNLLDFAQKQADCYQLEMQIEWIEPFNATMNNPETTKNVITAAQSLNYDVVIPTEPMRWSEDMGEFLQQWPGTLFCIGSGTDHPELHNPDYDFPDALIEQSSRLFLQLIAQSHN

SEQ ID NO: 43917 - protein, 589 aa, Yarrowia lipolytica CLIB122
MTLTNKLLHLVLCLLLAATICGASPVDLAARDFSDHQNELPSPSASDKYFNWTVDWTIQNPDGVFPRRVISINGEWPLPVINVTKGDRVVIDLYNDLGTQNVSLHFHGLYQKGQNANDGPVWITQCPQTYHNQHTFMRYNFTVDQSGAYWYHSHVDGQYPDGLRQSFLIHDPEDPYKHDFDEHLSFTLSDWYHEEVPDLMVDFLSKYNPDGDEPIPSNLLFNDTQNVSIPVEPNRTYKLTIINVGAFVSQYIQFEDHQVQVIEVDGVATEKSEPTNLLYITTAQRYTVLLRTKDSATRNFAISTAMDSTMLDSLPDGLNLVQTNYLEYNKNAPKQPVKEWYVNGANYNDDAFKKKRFDDMALVPLDRQPLLPDADHTIVLNMTMDNLNDGINYAFFNNITYTHPKVPVLYTVLSSPNGLETNREIYGSNSNVFLLKHNEVVDVVINNQDDGEHPFHLHGRNFQVPYRSPEYDDDNMTAFDPALKKDFSPIPMRRDTVYVRPNGNFVLRYRANNPGVWFFHCHIEWHMSQGLALVMVEAPTEIKQKQTVPENHLQICQAGNVPTAGNAAANSRNWLDLSNQNLQAPGLPH

SEQ ID NO: 43918 - protein, 405 aa, Photobacterium profundum SS9
MGGVLGMILAGGEGSRLRPLTDSRTKPAVPFGGSYRLIDFALNNFVNADFLKIYVLTQFKSQSLYVHMKKGWNITGITDRFIDPIPAQMRMGKRWYDGTADAIYQNLSFIELAEPEHVCIFGSDHIYKMDIKQMLNFHKEKEAELTVSALRMPLSEASAFGVIEVDENGCMVGFEEKPTNPKSIPGDPENALVSMGNYIFNKDTLCTELEEDAAKEDSSHDFGKDIIPKLFPLGKVYVYDFTTNIIPGEKNTGYWRDVGTIEAYWQAHMDLLSEDAPFSLYNRQWQLHTHYPPLPPATILDSENSKVDINNCMISAGSYIRGAQIHKSILGFRTNVDHNTMISESVILGDVKIGANCSIRKAIIDKNVHIAPGTVIGENPEEDKKNYHVSDEGIVVIPKGAKIGY

SEQ ID NO: 43919 - protein, 508 aa, Photobacterium profundum SS9
MATKKTSLTKHPLKILFVSSEVEGFAKTGGLADVAKSLPAALKKMGHDVRIVMPFYQTINGKDNAVAILSTELLVESQPFAVSYQVMQLDEGNVPVYALDAPQYYDRPELYAENNQAYADNGERFTFLSAASLDLCEKLGFQPDVIHCNDWHTGLIPFLLKTRYAESDFFAKSKSVITIHNAVFKGVFNYDQYSLIPELIQRRYINAEMDPSHISMLKAGVAYADKVNAVSPNYASELLTHLGSHGMEADFQNRAKDLYGIINGCDYDDWNPETDVYIKQKFKANKVSLARGKKACRRDLQKQVNLPEVDVPVYGMVCRLTEQKGLHYLIPVLEDFLLNDVQVVIVGTGDPTLASALRDISEQHSDKFAFVETYSNPLAHCVEAGVDFFMMPSEFEPCGLNQMYSLAYGTLPIVRSVGGLKDTVIDYDQTPQVATGFIYDTPTPEALLIKLQRSLLLYCQRPQEFKRLQQNAMACKFNWDESAEQYLDMYLGGEQSLVNEICNDKVDA

SEQ ID NO: 43920 - protein, 64 aa, Hortaea werneckii
MTKCIYCGFCQESCPVDAIVEGPNAEYATETREELLYNKEKLLANGDKWEPELAAIARADAPYR

SEQ ID NO: 43921 - protein, 367 aa, Glycine max
MVFPLLSIFALLNLAVVATHAETLPPEVYWKSKLPTTPMPKAITDILHPDLAEDKSTSVAVGKGGVNVNAGKTKPGGTSVNVGKGGVNVNTGKGKPNKGTSVNVGKGGVNVNTGPKKGKPVHVGVGPHSPFDYNYAASETQWHDDPNVALFFLEKDLHYGTKLNLHFTRYFTSSVDASFLPRSVADSIPFSSNKVNEVLNKFSIKEGSDEAQTVKNTISECEVPGIKGEEKRCVTSLESMVDFATTKLGSNDVDAVSTEVTKKDNELQQYTMAPGVKRLGEDKASVVCHKENYPYAVFYCHKSETTKAYSVPLEGADGSRVKAVAVCHTDTSKWNPKHLAFQVLKVHPGTVPICHFLPQDHVVFVPK

SEQ ID NO: 43922 - protein, 417 aa, Candida dubliniensis
MFLQNILSVLAVALLIDAAPVKRSPGFIALDFNVMKTPVDQNDPTVRAKRSPLFLDIDHTGFPVDDTGRNDVVKRGPVAVDLDNEIITYAADITLGSNNQKLSVIVDTGSSDLWIPDSKAICIPKWSGQKGDFCKTNGSYTPSASNTSKNLNTRFNIQYADGSYARGNLYQDTVGLGGAFIKDQIFADVWSTSAHKGILGIGFQKNEATESMYDNLPISMKKQGIISKNAYSLFLNSPEASSGQIIFGGIDKAKFSGSLVDLPITSDMRLSVALKSVNVLGQNVNANVEVLLDSGTTISYFQPSIARNIIYALGAQVHFDSAGNKVYVADCKTSGTVDFQFDKNLKISVPASEFIAPLYYTNGEPYPKCEVRVRASESNILGDNFMRSAYIVYDLDDNKISMAPVKYTSQSDVVPIN

SEQ ID NO: 43923 - protein, 147 aa, Saccharomyces cerevisiae
MSSNLTEEQIAEFKEAFALFDKDNNGSISSSELATVMRSLGLSPSEAEVNDLMNEIDVDGNHQIEFSEFLALMSRQLKSNDSEQELLEAFKVFDKNGDGLISAAELKHVLTSIGEKLTDAEVDDMLREVSDGSGEINIQQFAALLSK

SEQ ID NO: 43924 - protein, 151 aa, Coxiella burnetii RSA 493
MAKAVQKYPHSMLSHLQQDINRLFEPFGWATGGELWDAFSSEWSPHIDIKDEGQNYLICADIPGVDPKKIQVSMENNILTIKGERETEAKEKSEGYLRIERTKGAFLRQFTLPESVDAESIKAKSKHGVLEITIPKAQPPRTKKIEIEEQE

SEQ ID NO: 43925 - protein, 1364 aa, Cochliobolus heterostrophus
MTEDIAGNEGDYFAMESRSRPESPSSIRSDPMSMHLTAPSATIASLTALQYLPIPVLVLSSQKTVILANEALGRLFNIDFESIHHLSITEALQGKTMGELGVDIIQNGSPILITWEAFLDCVVNDAVADNMDTDGDSYMTSGHTTPTADNTGHQQNKQQSQSLPPLSSTNLARTTVHDVSVDVVVVPLAIGSDDTLQKCDRKGSYSDAVQASCIVSIWSIEDTQYYTLTFTSATQAQDSKKAQPSTRMVNRTNTGVRLDKSRSSGSSTSSSRRSNNSSNTTSKIVTPTLQQPEFPPRGPPSKNKSDIANSASVFQKATQLKDAILNSITMPAYAMWKDESFGIPNKALLRLVPKDTSYLSGDQRDFLAQFSCWTEDFQRRLPIEEFPIIEVCRHKKRVEKHRLGIRHPVTGSGMVYEVNGEPVFHEETGEFLGGIVVFKDVTEYTQKIAEQIEQNEKQFEYITNFMPVMVWTTTPDGMHDWFSKRWYDYTGLTVDKSLGEGWRLPFHPDDMHATAERWFHSLKTGDEYNTEYRCQRFDGQWRWMLGRAVPFYDDAGRIVKWFGTCTDIHDLVLARQEARQTREQLQQVIQHAKIVLWVIDRNNRVKVLEGDIDANEHLSKDQLLGKDVYDVFEFTDNNRERWRGPIQEILQGKQSDEIVNGGYMSENRYYRTRLVPLMSTSRTAGIESQAFVDGVIGVSMDITELREREEQLKEQEKENSRLLANEAAAKEASRMKSQFLANMSHEIRTPIAGVIGMSELLFDMDLNEEQKECAENIHRSANSLLTVINDILDFSKVESGRLDVEEVQFSLSVVLRDVNKMMAFAANRKGLEYQSLIQDEVQSDLRVIGDPGRLRQILTNVLTNSIKFTSVGTVQLSVSISHETKETVTVNFSIVDTGIGIEEEVRKRLFQPFSQADSSTARRFGGTGLGLTISKNLVELMKGQIWLDSKLGQGTTATFWIPFTRAPSQDGESPLVHLESIPDRLQSDMSVSCGSSEGHTPPLTPQISNGTSAYPMFKSAIPDQFMSLSESERQNVHVLVVEDNHINQQIALKTIKKLQFSVNAVWNGQEALEYLAKEFGPLHPRPDIILMDVQMPIRDGYSATHAIRTEAPWRNMPEVQGVPIVAMTASAIQGDKEKCVSCGMDDYLAKPVKGKILEKMLVKWALEGRRKAARETPCTNDKDRRSKTVPNPGNNFSASDHPRTAGMSLESETTAQALTAELDRLHYQSDAAFARSSENESERAMRRIHAEERDRKLRDEKLFSLVGPQLLHHEASEGPHSEPSMPLTVENIEKLVHEQDADGSVTRKSPSPDEMGSSATNHVPHIMSEDNNNNNNNHLDVSRPGLQQVRNRESEQTIVEQVAR

SEQ ID NO: 43926 - protein, 431 aa, Haloarcula marismortui ATCC 43049
MGPELSSASSSDNSSTPSEPESALETARLQLHRAADHLDIDPNIVERLNHPQNVHEVTVPIERDDGTVEVFTGYRAQHDSVRGPYKGGLRYHPDVTRDECVGLGIWMTWKCAVMDLPFGGAKGGIAVNPKTLSRDEKERLTRRFAQELRAVIGPNRDIPAPDMGTDPQTMAWLMDAYSMQEGETIPGVVTGKPPIVGGSEGREDAPGRSVAIITQQVCEYYDQPLSETTVAVQGYGSVGANAARLLDEQGATVVAISDVNGAMYDPAGIDTATVPSHDEEPEAVTEYADTVISNDELLTLDVDVLIPAALGNVITEANADDIAAEYVVEGANGPTTSTADSILADRDVVVIPDILANAGGVTVSYFEWLQDINRRSWSLERVNDELDEEMRAAWDAVRTEFENRDITWRDAAYIVALSRIAEAHEARGLWP

SEQ ID NO: 43927 - protein, 472 aa, Coxiella burnetii RSA 493
MTTIFWFRQDLRLSDNPALVEAAKSADHLIPLYILDDQLKMLGDAQRWWLHHSLSSLQTALSKKGTSLILKKGDTKRVLLELIKKYKVEKIYWNRSYEPPYREIDTYLENRLPPLSVEIYHSTLLTEPQKIKNKSGGYYKIFTPFWKHINASLQPRKTLAAPKKFSQHRAIKSDNLETWNLLPKHPDWSQGFDQWKPGEKNAQIVLKKFIKENLKNYPAHRDRPDISSTSHLSPYLHFGEISIRQVWTAITQATIQDKNLQKAADVFLRQLIWREFAYYLLWHFPQMGRSNFRNQFDNFKWKKNKNWLRAWQKGLTGYPIVDAGMRELWCTGYMHNRVRMIVASFLVKDLMIDWREGEKWFWNTLLDADLANNALGWQWIAGCGPDAAPYFRIFNPILQSKKFDPDGTYIKRWIPELAKVPSKYIHYPADMPDNISESSKVNLGVDYPFPIVNHHKAKELALKAYKDSTYRL

SEQ ID NO: 43928 - protein, 469 aa, Pseudomonas syringae pv. tomato str. DC3000
MSETTAPSGELKRGLKNRHIQLIALGGAIGTGLFLGSAGVLKSAGPSMILGYAICGFIAFMIMRQLGEMIVEEPVAGSFSHFAHNYWGGFAGFLSGWNCWLLYILVGMSELTAVGKYIHYWLPHIPSWVSAAVFFVLINAINLTNVKVFGETEFWFAIIKVVAIIGMIALGSYMLVSGSGGPQASVSNLWEHGGFFPNGVSGLVMALAIIMFSFGGLEMLGFTAAEAEQPKTVIPKAINQVIYRILIFYIGALVVLLSLTPWDSLLASLNASGDSYSGSPFVQVFSMLGSDAAAHILNFVVLTAALSVYNSGTYCNSRMLVGMAEQGDAPKLLAQVDKRGVPVKAIFASAAVTLVAVLLNYFVPQQALELLMSLVVATLVINWAMISYSHLKFRQHMNRTGQVPLFKALWYPYGNYVCLAFVVFILGIMLMIPGIQISVYAIPVWLAVMWVCYRAKNRRSVVVNAETGK

SEQ ID NO: 43929 - protein, 301 aa, Glycine max
MGRSPCCEKEHTNKGAWTKEEDERLINYIKLHGEGCWRSLPKAAGLLRCGKSCRLRWINYLRPDLKRGNFTEEEDELIINLHSLLGNKWSLIAARLPGRTDNEIKNYWNTHIKRKLYSRGIDPQTHRPLNAASATPATTVTATAVPSSNSKKKIKNNNNNNNGFQLVNNSAYANTKIGTDMIAAEDSNSSSGVTTEESFPHHQLNLDLSIGLPSQPQVSSSLNPEKLKPEPQEHDDQKPQVLYQLYGKNITGQQGVCLCYNLGLQSNQACYCKTMGTSTTTVTTTTATDRNLYRFYRPMNI

SEQ ID NO: 43930 - protein, 197 aa, Syrrhopodon prolifer
GGAKKVVISAPSKDAPMFVMGVNEEKYTSEDIVSNASCTTNCLAPLAKVINDKFGILEGLMTTVHATTATQKTVDGPSSKDWRGGRSAATNIIPSATGAAKAVGKVLPELNGKLTGMAFRVPTTDVSVVDLTVRLEKPASYDAIKAALKDASEGKLKGILGYTEDDVVSSDFITDSRSSIVDAKAGIALSDTFVKLV

SEQ ID NO: 43931 - protein, 424 aa, Ralstonia solanacearum
MLSGFLGAGKTTLLNHVLANREGKRVAVIVNDLSDVNIDAQLVGDGTATSAQLSRTDERMVELSNGCICCTLREDLLDEIARLAREDRFDYLLIESTGVAEPLPIAETFTFEDAEGRLLSDLARLDTMVTVVDAQHFLADYDAADFLADRGQARDEDDDRTVVDLLIEQVEFCDVIVLNKTDLVDEAERERLAGILHSLNPRARILPASFGHVPLDAILNTHRFDFDAAAAAPAWLAELRGEHVAETEALGIRSFVYRRRRPFHPQRLWDLMHTEWLREHGRVLRSKGYFWLAPRMDVAGSWGQAGGVMRHGGAGAWWAAVDTAEWPDEDEARTDIADKMLDNGAPAPWGDRRQELVFIGIDLDEAALAASLDACLLTDAEFAAGPAAWAELPDPFPDWGFDDNHGEAEDDHAHGDDCDCGHPH

SEQ ID NO: 43932 - protein, 362 aa, Ralstonia solanacearum
MSKLIPVTILTGFLGSGKTTLLKRILTEQHGMKIAVIENEFGEENIDNDILVQDGNEQIVQMSNGCICCTIRGDLVAALSDLLTRRDKGELQFDRVVIETTGVANPGPVAQTFFMDDEIAARYLLDAVITLVDAKHGNQQLDRQEEAQRQVGFADAIFITKGDLVSDDDVEALRHRLLHMNPRAPIRTANFGEAPIDTIFDLRGFNLNAKLEIDPDFLREDDHDHDHGHEHNHACSPDCDHDHEHGHDHHHGHGHHHHHGHAHHTDRIASFVFRSERPFNYTKLEEFLSGVLNVYGEKLLRYKGVLYMEGVDRKVVFQGVHQLMGSDVGGKWDGETPGNRMVFIGVDLPRDTILKGLENCLA

SEQ ID NO: 43933 - protein, 547 aa, Photobacterium profundum SS9
MSMKMTPKWWHDAVVYQVYPRSFCDSNNDGMGDLQGIISKLDYIKKLGVNVVWLSPVYRSPMDDNGYDISDYQDIAAEFGSMEDMQQLLAEAKQRDIRIIMDLVVNHTSDEHPWFIESRKSKDNPYRDYYIWRQPNEDGSVPDDQGSVFGGGAWEFDDTTGEYYYHIFSKRQPDLNWENPKIQEEVHKMMNWWIDQGIGGFRLDVIDLIGKEIDKKITGNGPRLHPLLQEMNKATFGDKDLLTVGETWDATPETAKLYSNPARNEFSMVFQFEHISLTWKQGDKWNPIALDLPKFKNALTKWQIELADEGWNSLFWNNHDLPRAVSKFGDDGQYRVESAKMLATTLHMMKGTPYVYQGEEIGMTNVAFDSIDDYRDIETLNFYKERTENGVAPETMLAAVHENSRDNGRTPMQWNNNKNAGFSEQQPWLQVNPNYPEINVDAALEDQNSIFYHYQKLIQLRKSLSVIVHGAFEPVFEDHEQVFGYLRSDSQHRLFVLNNFTGEEVTVSMPEPLQTEHAECIICNYESHQQLSSTLTLKPFESFAVLI

SEQ ID NO: 43934 - protein, 597 aa, Streptomyces avermitilis MA-4680
MNKTYPPPSAAIDPDPSRSWLWRAWPLVRAHRWMFSAALVMSGASMLVVVQVPRLIQDAVDNSIVSDRVPLSHYMWWLVGMSVIMLVVGYLSKQLLFRAAARIEYDLRNIVYEHLTAMSFPFYDRMQSGQLISRANSDIRAVQMYLAFAPYLLVQSGISLVSFAYMLAIDVPLAILAMLPMPLMFVASRRMQRSLFPVSWLIQARLADVATVVDENVNGVRVVKSFAAERSQLASLQKAATSVAWANVKDADLRARWTPLVQNLPRVGMAIVLLYGGYLVIHGELGVGAILAFNAYLLMLQVPFQVIGNLIMLGQRSSAAAKRLYEVLDEKPEIADAPDAREITGPRGDVRFDDVTFGYGDGLDVLKGFSLQLRPGETVALVGRTGTGKSTAARLLPRFYDVRAGSVSVDGHDVRDLTLRSLRDTVGVVLDEPFLFSASVRDNIAYGRPDADFTDIERVARLAGAHEFITELSEGYDTVIGERGYTLSGGQRQRIAIARTLLLNPPVLVLDDATSAIDVQVEQEIHAGLRSLFAGRTTLIVAHRLSTISLADRVVLLDGGRIVADGTHKELLASTPLYAEVLAQADETIEELGSVGR

SEQ ID NO: 43935 - protein, 585 aa, Triticum aestivum
  misc_feature (497)..(497): Xaa can be any naturally occurring amino acid
  unsure (1)..(585): unsure at all Xaa locations
YQTRRPSNRFPLFSCSARLQSTLLASHRPIRWTAPPARGRLAVLSSHLLAAGADPAAALGRSPASAAAPGARAGVLAVVDSRTGKRYEVKVSEDGTVRATDFKKITTGKDDKGLKTYDPGYLNTAPVRSSICYIDGDEGILRYRGYPIEEVAESSSFVEVAYLLMYGNLPTQSQLAGWEFAISQHSAVPQGLLDIIQSMPHDAHPMGVLASAMSTLSVFHPDANPALRGQDLYNSKQVRDKQIVRVLGKAPAIAAAAYLRLAGRPAVLPSNNLSYSENFLYMLDSLGNKEYKPNPRLARVLDILFILHAEHEMNCSTAAVRHLASSGVDVFTALSGAVGALYGPLHGGANEAVLKMLNEIGAVENIPDFIEGVKNRKRKMSGFGHRVYKNYDPRAKVIRKLAEEVFSIVGRDPLIEVAVALEKAALSDDYFIKRKLYPNVDFYSGLIYRAMGFPTEFFPVLFAIPRMAGWLAHWKESLDDPDNKIMRPQQVYTGVWXLRHYTPVRERVASNQGEELGQIAASNATRRRRAGFFPVEQQQARMHGAASSPRNKPGCCRCPSQRRSGSSPGAVILLVSPRHLAVAMQ

SEQ ID NO: 43936 - protein, 411 aa, Nicotiana plumbaginifolia
MNALAATNRNFKLASRLLGLDSKLEQCLLIPFREIKVECTIPKDDGSLATFIGFRVQHDNARGPMKGGIRYHPEVDPDEVNALAQLMTWKTAVANIPYGGAKGGIGCSPSDLSISELERLTRVFTQKIHDLIGVHTDVPAPDMGTNPQTMAWILDEYSKFHGYSPAVVTGKPIDLGGSLGRDAATGRGVLFAAEALLRDHGKSIAGQRFVVQGFGNVGSWAAQLITEQGGKIVAVSDITGAIKNKNGIDIASLLKHVKENRGVKGFHGADSIDPNSILVEDCDVLIPAALGGVINRDNAKDIKAKFIVEAANHPTDPEADEILAKKGVVILPDIYANSGGVTVSYFEWVQNIQGFMWDEERVNTELKAYMNRGFKDVKDMCKTHNCDLRMGAFTLGVNRVARATTLRGWEA

SEQ ID NO: 43937 - protein, 316 aa, Vibrio sp. Ex25
MSNKLEQLRKLTTVVADTGEIDAIKKYQPEDATTNPSLILKAAQIAEYAPLIDASIEYAKAQSNDKAQQVQDTCDMLAVNIGKEILKTIPGRISTEVDARLSYDMEGSVAKARQLVKMYNDAGITNDRILIKLASTWEGIRAAEILEKEGINCNLTLLFSFAQARACAEAGVFLISPFVGRIMDWYKAKEGRDFEASEDPGVLSVTKIYNYYKEYGYKTVVMGASFRNIGEILELAGCDRLTIAPALLAELEAAEGEVVEKLVDSKGAAERPAPMTHSEFLWEHNQDPMAVEKLAEGIRNFAVDQGKLEAMIEAKL

SEQ ID NO: 43938 - protein, 663 aa, Vibrio sp. Ex25
MDRKYLANAIRALSMDGVQQANSGHPGAPMGMADIAEVLWRSHLNHNPSNPEWADRDRFVLSNGHGSMLIYSLLHLSGYELSIDDLKNFRQLHSKTPGHPEYGYAPGIETTTGPLGQGITNAVGMALAEKALAAQFNKEGHDIVDHFTYVFMGDGCLMEGISHEACSLAGTLGLGKLIAFWDDNGISIDGHVEGWFSDDTPKRFEAYGWHVIPAVDGHDSEAINAAIEAAKADPRPTLICTKTIIGFGSPNKSGSHDCHGAPLGAEEIAATRKELGWEHGPFEIPQEVYAEWSAKETGAAKEAAWNEKFAAYEAAYPELAAEFKRRVNGELPAQWEEKASQIIADLQANPANIASRKASQNALEAFGTLLPEFMGGSADLAPSNLTMWSGSKSLEASDFSGNYIHYGVREFGMTAIMNGIALHGGFVPYGATFLMFMEYARNAMRMAALMKIQNIQVYTHDSIGLGEDGPTHQPVEQMASLRLTPNMSTWRPCDQVESAVAWKLAIERKDAPTALIFSRQNLAQQERDTEQLANIAKGGYILKDCEGKPELILIATGSEVELAVEAAAQLTAEGKKVRVVSMPSTDAFDKQDAAYREAVLPSDVTARIAIEAGIADFWYKYVGFDGRIIGMTSFGESAPAGELFKMFGFTTENVVNTAKELLA

SEQ ID NO: 43939 - protein, 476 aa, Bartonella quintana str. Toulouse
MLFDEKHNKLKRSLQNRHVQMIALGGVIGTGLFYGSTESIRLAGPSTILAYLFGGLIMYFIMRMLGEMSVEEPTSGAFSFFAYKYWGSLAGFITGWNYWFLYILVSMTELTVIGFYLDHWLLIDHWKSSFIVLLLVTLINLLNVRFYGEFEFGLALIKVAAVVGMIVFGIFLIVTEIGENQASISHLWDHGGFFPYGAMGVVLATCVVMFSFGGTELIGIAAGEVSNPQKTIPIAIRKVMWRIVIFYIGSISVIMMISPWNMIGKDVSPFVKIFEIIGIPAAGHILNFVVIMAAISVYNSGIYSNGRMLYSLAIQKNAPHIFSKLSAARVPYVAILFSSICTAIIIVMNAFVPNNSFMRIMALATAAAIITWSIIVIVHLKFRKVHKDRKGAFIYAFALYPYANYLCLCFLAALFCIMFVSGFGKNGLMAQLFNVVGISASSVESYIPAQMPDMSLAVIIIPLWCLLLLLGYKLKR

SEQ ID NO: 43940 - protein, 395 aa, Ralstonia eutropha JMP134
MYASHFAQAVDDAAGFGWRAPTPVHDWASLIAAKNAEIARLEAIYVRMLQSAGVDAITGRAQIVGPHRVEVNGVIFTAKVILVASGSVPVEPAIQGAELMITSNEAFYLDTLPKRIAIIGGGYIACEFAGIFNGLGSDVTQLYRGQQILRGFDDELRNHLGAEVSKSGVDLRVAVDVAAVGKRGDGLVVHLTTGQAIEVDAVMAATGRRSNTSGMGLESAGVLLDESGAIKVDEYSATSNPDIYAVGDVTNRLNLTPVAIHEGHAFADTVFGGRKRASAHDNVPFAVFSQPQAASVGLTEAQARRRHAKVDVYSSAFRPMRTALSGRDERALVKLVVDASTDRVLGAHIVAADAAEIILGIAVAIKAKATKADFDATLGVHPTLAEEFVTLRNRR

SEQ ID NO: 43941 - protein, 459 aa, Xanthomonas axonopodis pv. citri str. 306
MMAGRASIYALLAAIATTSIHASAADRAAEPNTQVPAGSMHYVADGFPDRIVATPAQDAATGFAVAWRTDASVERPWLELVVAGDSPDVGTPRRIRASTLTLASENGSSHHHRADVDGLQPDTMYAYRVQGQGTWGAWNHFRTAATATTPLTLLYFGDTQNKNLSLVSRVIRQAWRSAPDARLALFAGDLVSGKDGQDDNEWAEWFEAGRWLLEGTAVAPAPGNHEYHEEGEDTPQATRILGSHWPVTFALPRNGPSAAARTSYWFDYQGVRVAVLDGTSALDLGTGPAQAQWLDKVLADNPHPWSIVLIHQPFFSPRADRENEKLVEQVLPVIRRHKVDLVLQGHDHTYGRRGDAAGQATPVFVVSVAGPKQYRLSDMARTTMRPVGEDTQLYQVLRLDSQHLVYESRTATGRLYDAFELQRDSNGSKRLIEREAGRIAPRNCPRSATLKGRADRCWE

SEQ ID NO: 43942 - protein, 367 aa, Salmonella typhimurium LT2
MTSRNYLLLTPGPLTTSRTVKEAMLFDSCTWDDDYNIGVVEQIRQQLTALATASEGYTSVLLQGSGSYAVEAVLGSALGPQDKVLIVSNGAYGARMVEMAGLMGIAHHAYDCGEVARPDVQAIDAILNADPTISHIAMVHSETTTGMLNPIDEVGALAHRYGKTYIVDAMSSFGGIPMDIAALHIDYLISSANKCIQGVPGFAFVIAREQKLAACKGHSRSLSLDLYAQWRCMEDNHGKWRFTSPTHTVLAFAQALKELAKEGGVAARHQRYQQNQRSLVAGMRALGFNTLLDDELHSPIITAFYSPEDPQYRFSEFYRRLKEQGFVIYPGKVSQSDCFRIGNIGEVYAADITALLTAIRTAMYWTK

SEQ ID NO: 43943 - protein, 242 aa, Glycine max
MALEALNSPTTTAPSFPFDDPTIPWAKRKRSKRSRDHPSEEEYLALCLIMLARGGTTTVNNRHVSPPPPQPQPQPQPTPDPSTKLSYKCSVCDKSFPSYQALGGHKASHRKLAAAAEDQPPTTTTSSATATSSASGGKAHECSICHKSFPTGQALGGHKRCHYEGNGNGNNNNSNSVVTVASEGVGSTHTVSHGHHRDFDLNIPAFPDFSTKVGEDEVESPHPVMKKPRLFVIPKIEIPQFQ

SEQ ID NO: 43944 - protein, 910 aa, Streptomyces avermitilis MA-4680
MSSADDQTTTTSSELRADIRRLGDLLGETLVRQEGPELLDLVEKVRRLTREDGEAAAELLRGTELETAAKLVRAFSTYFHLANVTEQVHRGRELRTKRAAEGGLLARTADRLKDADPEHLRATVKNLNVRPVFTAHPTEAARRSVLNKLRRIAALLETPVIEADRRRYDTRLAENIDLVWQTDELRVVRPEPADEARNAIYYLDELHAGAVGDVLEDLTAELERVGVQLPDDTRPLTFGTWIGGDRDGNPNVTPEVTWDVLILQHEHGINDALELIDELRGFLSNSIRYTGATEELLTSLGTDLERLPEISPRYKRLNAEEPYRLKATCIRQKLENTKQRLAKGTAHQPGRDYLGTGELLHDLKLIQTSLREHRGGLFADGRMDRTIRTLAAFGLQLATMDVREHADAHHYALGQLFDRLGEESWRYADMPRDYRGKLLAKELRSRRPLAPSPAPLDAAGAKTLGVFHTVKRALAVFGPEVIESYIISMCQGADDVFAAAVLAREAGLLDLHAGWAKIGIVPLLETTDELKAADTILEDMLSDPSYRRLVALRGDVQEVMLGYSDSSKFGGITTSQWEIHRAQRRLRDVAHRYGVRLRLFHGRGGTVGRGGGPSHDAILAQPWGTLEGEIKVTEQGEVISDKYLVPSLARENLELTVAATLQASALHTAPRQSDEALARWDAAMDVVSDAAHSAYRRLVEDPDLPTYFLASTPVDQLADLHLGSRPSRRPGSGVSLDGLRAIPWVFGWTQSRQIVPGWFGVGSGLKALREAGLDTVLDEMHEQWHFFRNFLSNVEMTLAKTDLRIARHYVDTLVPDHLKHVFATIEAEHELTVREVLRITGGEKLLDTHPVLQQTFAIRDAYLDPISYLQVALLKRQRDAAAADTPPDPLLARALLLTVNGVAAGLRNTG

SEQ ID NO: 43945 - protein, 240 aa, Arabidopsis thaliana
  misc_feature (216)..(217): Xaa can be any naturally occurring amino acid
  unsure (1)..(240): unsure at all Xaa locations
MDPYKYRPSSAYNAPFYTTNGGAPVSNNISSPPVLLEDYHLIEKVANFTRERSPERVVHARGISAKGFFEVTHDISNLTCADFLRAPGVQTPVIVRFSTVVHERASPETMRDIRGFAVKFYTREGNFDLVGNNTPVFFIRDGIQFPDVVHALKPNPKTNIQEYWRILDYMSHLPESLLTWCWMFDDVGIPQDYRHMEGFGVHTYTLIAKSGKVLFXXGSTGKPTFWGSKKLKGAKFFGQL

SEQ ID NO: 43946 - protein, 739 aa, Silicibacter pomeroyi DSS-3
MSLVNKLAEERRARLAAERLLELKQAELSAANRKLGRHALALTKQIGEKQAEVATVRDENEKVKSDLTVANAKIEVAERRLWHSIQTIQDGFAFFDSDSKLIGANTAYLNVFDGLDEVAPGISYMRILQLMTEEGIIDTGELAAEEWRQMMHERWISPTPEPVVIRMWNDQYVKMIDQRGHGGDVVSLALNITSTVRYEAELRAAREKAEAANRAKSAFLANMSHEIRTPMNGVVGMAELLCDTALDEEQQLYASTIKNSGEALLVIINDVLDYSKIEAEKMMLHPEPFDLERCIHEVAMLMQPIVRDKGLTLLVDYDLFLPTLFVGDPGRVRQVLTNLLGNAVKFTTKGHILIRVTGVPDPATGRCAIHVAIEDTGIGIPREKLAHIFGEFNQVENERNRQFDGTGLGLAISQRLIQMMGGTVWVESEEGRGSCFGFRVTLPMSEEAQPVLPNLPGRLQHVLIVDDLAVNRAILEKQLAQLGVRVTCCASGAQALEKMSDCVDLVLSDHNMPEMDGLELAEALRGAGWSDLPIFLLSSNPGMAHADPAKRHVQGILQKPIPRAELFARLSDMRTEITSVQDPAAVSAPVTKPAQDAPGEPTERRQMRVLAAEDNRTNQLVFRKMVKTLDIDLRFANNGLEAVEIWQDFQPDLIFMDISMPKMDGKQATGEIRRLEAGTGRHVPIVALTAHAMAGDAEGILAAGLDQYLTKPLRKALIHQHIAEACPAGALPVEPESGE

SEQ ID NO: 43947 - protein, 155 aa, Lycopersicon peruvianum
MDLRLMGIDNTPLFHTLHHMMEAVGEDSVNAPSKKYVRDAKAMAATPVDVKEYPDSYVFVVDMPGLKSGDIKVQVEEDNVLLISGERKREEEKEGVKFIRMERRVGNFMRKFSLPENANTDAISAVCQDGVLTVTVQKLPPPEPKKPKTIQVKVA

SEQ ID NO: 43948 - protein, 414 aa, Xanthomonas campestris pv. vesicatoria str. 85-10
MTIKTLALQCRDAAQVVSQLSAPAKHALLDAMAAALEADAAAILAANARDLEAARAKGTGSAMLDRLALDDKRLAGIAAALREVAQLPDPVGRITREDVRPNGIRVQKVRVPLGVIAMIYEARPNVTADAAALCIKAGNGVILRGGSEAIHSNTAIARALQRALREANVPDAALTLVEDLRRETMLELLQLNDIVDLAIPRGGEGLIRFVAEHARVPVIKHYKGVCHLFVDASAEMELALRLLIDGKATRPSACNSLETLLVHAGIAERFLPLAAQALRERKVELRGDAATQAVLPDIAAASDDDYAAEFLDLILAIRVVPDLDTALAHIRQYGSDHTEVIATQDADNAERFVQSLRSAVVMVNASSRFSDGGELGLGAEIGISTTRLHSYGPMGLEALTVERFVVRGEGQVRH

SEQ ID NO: 43949 - protein, 441 aa, Triticum aestivum
  misc_feature (230)..(230): Xaa can be any naturally occurring amino acid
  unsure (1)..(441): unsure at all Xaa locations
VSAGNNYEIGNMIADAMSKIGRQGVVTLEEGKSAENNLYVVEGMQFDRGYISPYFVTDSEKMSVEYENCKLLLVDKKINNARDLITLLEDAIKGGYPILIIAEDIEQEALATLVVNRLRGELKIAAIKAPGFGERKSQYLDDIATLTGGTVIREEIGLSLDKADKEVLGNAAKVVITKDSTTIVGDGTTQEEVTKRVTQIRNQIEASEQEYEKEKLNERIAKLSGGVAVXIQVGAQTETELKEKKLRVEDALNATKAAVEEGIVVGGGCTLLRLASKVDAIKETLENDEQKVGAEIVRKSLSYPLKLIAKNAGVNGSVVPKKVLVNDNFRYGYNAATGNYEDLMAAGIIDPTKVVRCCLEHAASVAKTFITSDAVVVDIKESEKAPAANQWPVQVMGSKPLGNMLRPRLYFEQRTWVQCVAVETGNKFGANVQTKVESVLN

SEQ ID NO: 43950 - protein, 294 aa, Glycine max
MEQYEKVEKIGEGTYGVVYKARDRVTNETIALKKIRLEQEDEGVPSTAIREISLLKEMQHRNIVRLQDVVHSEKRLYLVFEYLDLDLKKHMDSSPEFVKDPRQVKMFLYQILCGIAYCHSHRVLHRDLKPQNLLIDRRTNSLKLADFGLARAFGIPVRTFTHEVVTLWYRAPEILLGSRHYSTPVDVWSVGCIFAEMVNRRPLFPGDSEIDELFKIFRILGTPNEDTWPGVTSLPDFKSTFPKWPSKDLANVVPNLDAAGLNLLSSMLCLDPSKRITARSAVEHEYFKDIKFVP

SEQ ID NO: 43951 - protein, 197 aa, Syrrhopodon albovaginatus
GGAKKVVISAPSKDAPMFVMGVNEEKYTSEDIVSNASCTTNCLAPLAKVINDKFGILEGLMTTVHATTATQKTVDGPSSKDWRGGRSAATNIIPSATGAAKAVGKVLPELNGKLTGMAFRVPTTDVSVVDLTVRLEKPASYDAIKTALKEASEGKLKGILGYTEDDVVSSDFITDSRSSIVDAKAGIALSDTFVKLV

SEQ ID NO: 43952 - protein, 384 aa, Xanthomonas campestris pv. vesicatoria str. 85-10
MSTPASTLSPFTEQALPPWRRAVLKVGSSLLAADGGGLSPRFALGLAQFVSANLAAGRELVIVSSGAVAAGRAILPKAADVGAPIAARQALAALGQAQLIALWQRFFERPVAQVLLTHDDLRNRRRYLNARATLGELLRLGALPVINENDTVSVDELKLGDNDNLAAIVAALVDADALFIATDIDGLYSADPRSNPLARPLDDVPELTPEVLAMAGGSGSNVGTGGMRTKLEAAAKAGAAGIETYLFNGRSGEVVRALAQDRLRGTRIHAARARIAARKYWLRHAPVEAGAILIDDGAAAALTGKGASLLPGGVAGAQGDFRRGDMVEIRLRDTAGDQCLARGVSQYSALDIRRIAGRHSREIENVLGYSYGENVVHRDDLVVL

SEQ ID NO: 43953 - protein, 453 aa, Candida albicans SC5314
MKFTTLATIASTLLFAANANADTCNPLKSSDCSPVPALGSSFLEKFDNGLGPHFESLKKQGTIDSGSNGLSLTMKKRFDNPSFKSNFYIMFGRVEVVLKGAEGKGIVSSFYLQSDDLDEIDIEMFGGDPYQWQSNYFIKGNTATYDRGGYHDIANPLKDYHTYVIDWTKDAVTWSVDGSVIRTIPKDNAQGFPQSPMAIYAGIWAGGDPSNQPGTIDWAGGITDYSQAPFTMGIKSVLVADYSSGKQYSYSDQSGSWESIKADGGKVNGRYDQAQDDIKKLESGQSVDSNDSSSSPSASSSDSSSTSSASSSSSSSSPSSTTSSSSSSSSSSSSSSSSSSEKSNAVPSASVIVFIGTKGGDKTTVTSSSGVSVPTSASVSTAAGTTSGSANSAPASAASSTASTVFISTGDAAPSSSASEKPSVSTTENNGAVSVAKTTSLFGFVALIGFLFV

SEQ ID NO: 43954 - protein, 520 aa, Antirrhinum majus
MQHQYYSLITMDDISITSLLVPCTFILGFLLLYSFLNRKVKPLPPGPKPWPIVGNLPHLGPKPHQSMAALARVHGPLIHLKMGFVHVVVASSASVAEKFLKVHDANFSSRPPNSGAKHVAYNYQDLVFAPYGPRWRMLRKICALHLFSAKALNDFTHVRQDEVGILTRVLADAGETPLKLGQMMNTCATNAIARVMLGRRVVGHADSKAEEFKAMVVELMVLAGVFNLGDFIPPLEKLDLQGVIAKMKKLHLRFDSFLSKILEDHKINSSDETKGHSDLLNMLISLKDADDAEGGRLTDVEIKALLLNLFAAGTDTTSSTVEWCIAELVRHPEILAQVQKELDSVVGKNRVVKEADLAGLPFLQAVVKENFRLHPSTPLSLPRIAHESCEVNGYLIPKGSTLLVNVWAIARDPNVWDEPLEFRPERFLKGGEKPNVDVRGNDFELIPFGAGRRICAGMSLGIRMVQLLTATLIHAFDFDLADGQLPESLNMEEAYGLTLQRADPLVVHPKPRLAPHVYQT

SEQ ID NO: 43955 - protein, 554 aa, Bacteroides thetaiotaomicron VPI-5482
MEQEHQFIDYIEQSIIKNWDKDALTDYKGITLQYKDVARKIAKFHIVLESAGIQPGDKIAVCGRNSAHWGVTFLATITYGAVIVPILHEFKADNIHNIVNHSEAKLLFVGDQAWENLNEDAMPLLEGIASLTDFTALVSRNEKLTYAFEHRNAIYGQRYPKNFRPEHICYRKDRPEELAIINYTSGTTGYSKGVMLPYRSIWSNVAYCFEMLPVKAGDHIVSMLPMGHVFGMVYDFLYGFSAGAHIYFLTRMPSPKIIAQSFAEIKPRVISCVPLIVEKIIKKDILPRVDSKIGKLLLKVPIVNDKIKSLARQAAMEIFGGNFDEIIIGGAPFNAEVEAFLKKIGFPYTIAYGMTECGPIICSSRWETLKLASCGKATTRMEVRIDSPDPKTHAGEIVCRGMNMMLGYYKNPEATAQIIDANGWLHTGDLGTIDDEGYVTVRGRSKNLLLTSSGQNIYPEEIESKLNNMPYVAESLIVLQHDKLVALIYPDFDDAFAHGLQQADIIKVMEANRVELNQQLPNYSQISKVKIHFEEFEKTAKKSIKRFMYQEAKG

SEQ ID NO: 43956 - protein, 197 aa, Syrrhopodon ciliatus
GGAKKVVISAPSKDAPMFVMGVNEEKYTSEDIVSNASCTTNCLAPLAKVINDKFGILEGLMTTVHATTATQKTVDGPSNKDWRGGRSAATNIIPSATGAAKAVGKVLPELNGKLTGMAFRVPTTDVSVVDLTVRLEKPASYDTIKSALKEASEGKLKGILGYTEDDVVSSDFITDSRSSIVDAKAGIALSDTFVKLG

SEQ ID NO: 43957 - protein, 249 aa, Arabidopsis thaliana
MTKNYPTVSEDYKKAVEKCRRKLRGLIAEKNCAPIMVRLAWHSAGTFDCQSRTGGPFGTMRFDAEQAHGANSGIHIALRLLDPIREQFPTISFADFHQLAGVVAVEVTGGPDIPFHPGREDKPQPPPEGRLPDATKGCDHLRDVFAKQMGLSDKDIVALSGAHTLGRCHKDRSGFEGAWTSNPLIFDNSYFKELLSGEKEGLLQLVSDKALLDDPVFRPLVEKYAADEDAFFADYAEAHMKLSELGYLS

SEQ ID NO: 43958 - protein, 378 aa, Zea mays
MGIESMSPTAAAPEDSSSAASTATTESAAAAQPPPAAAPPGGGAVGGGDAVAVSPAADEQAVTSQPSAVPQGSSRFKGVVPQPNGRWGAQIYERHARVWLGTFADEEAAARAYDVAALRYRGREAATNFPGAGASAPELAFLAAHSKAEIVDMLRKHTYADELRQGLRRGRSRAQPTPAWARVLLFDKAVTPSDVGKLNRLVVPKQHAEKHFPLKRAPPSVEAQAPTTAKGVLLNFEDGEGKVWRFRYSYWNSSQSYVLTKGWSRFVREKGLRAGDTIVFSHSTYGSEKQLFIDCKKTKTTTPATDGVPVPSPAPAEKPSEARVVRLFGVDIAGAGCHHQKRARPVEISFDHGPQAESFKKQCVAHHHRSPALGAFLL

SEQ ID NO: 43959 - protein, 455 aa, Bacillus anthracis str. A2012
MIALGGVIGTGLFLGSGYTIHEAGPGGAIVAYLVGGFVMYLTMLCLGELAVAMPDAGSYQTYATKHISPAAGYVVGWMSWLNWSATIGIELIAVSILMKRWFPDVPSWIWCVVFAVLLFAINALSSRSFAEVEFWFASIKVITIIAFIILGGAAMFGFLDMKGNEPAPMFSSFTDYGGLFPNGLSAILITMIAVNFSFQGTELVGIAAGESENPEKTIPKAINNTVWRILVFFVLSIFILAGLFPWQQAGVIESPFVVVFDKIGIPYAADIINFVIITAVLSVANSGLYATSRMLWSMSNQGMISPIFGKLSKNGVPIYALIVSTIVGCLSLLSGIYAEDTVYLWLLSIAGFGAILVWASIALSNLLARRSYIKQGGDVKDLKFKTPLYPFVPLLALVLNVTVIVGMAFIPEQRMALYCGIPFMIVCLLFYRATRNKAHKVEHIEKTDTTEVDSL

SEQ ID NO: 43960 - protein, 581 aa, Saccharophagus degradans 2-40
MKYKYTHLISVIILTAIALKSVPLLLLVLAAWIALALGAVALAYKYNWAMLFRKKKNGVIPASVRWVFTPYLVGVTLYNIYIKSKDSVPVIQKIEPNLYLGARMRAGELENLHSVKIQSVLDLTAEFDGLGDYAQEHDIDYLNIPVLDHGLPKLHQLVQACRWIDKNVKRKRSVLVHCALGRGRSVLVVAAYLLATKKAGDVEEALDEIRTIRATARLNKRQHSALNKWKEELQQSTIKKEQAWLIANPVSGTEQWPRYKQDIIARLENHFDLHVVETSKQLGADYWAKQALKAKVGLVIISGGDGTVGEAASVLANTDTVMGVLPLGTANALSHAIIGWQTKIIPVESACETIESGEPRRIDTALCNKKRMLLAMGIGIEAKMITEASAERKSKLGQLAYIDGFFRALKHGNEYKLDVKFDDEPVKRIVTKSLVVANAAPVTTLLAQGNGSPNYSDGFLDVTWLPKGGEVADEVMSLGALALSGLYERPFNGHVFHKRAKKISISSPGAIHYVLDGEPKCDQQITLELESKSLRIFVPVTEGNEGNEANSETEYRDNKAQAIEPLTPLNKQEQTDSVLER

SEQ ID NO: 43961 - protein, 161 aa, Pseudomonas syringae pv. syringae B728a
MSENLLSIPVTTIKGEQKTLADFSGKALLVVNTASQCGFTPQYKGLEKLWQDYRDQGLVVLGFPCNQFGKQEPGDEGAISGFCELNYGVSFPLFKKIDVNGEQAHPLFVQLKQQAPGLLGTERIKWNFTKFLIGQDGRLVKRFAPLTKPEELTGEIEALLR

SEQ ID NO: 43962 - protein, 131 aa, Pseudomonas syringae pv. syringae B728a
MDKLQKTLEEWKQMLDPEQYNVCRLKGTERPFSGKYDKVKTDGIYHCICCDEPLFDSTTKFDSGCGWPSFYAPLENSAVIEVRDMSHGMIRTEVVCAKCDAHLGHVFPDGPPPTGLRYCINSVCLDLVPRS

SEQ ID NO: 43963 - protein, 173 aa, Flaveria bidentis
MASIPATFATVAQANMVAPFTGLKANAAFPVTKKVNGFSTLPSNGGRVQCMKVWPPVGKKKYETLSYLPELTEAQLAKEIDYLIRNKWVPCLEFELEHGFVYRENARSPGYYDGRYWTMWKLPMFGCTDSAQVMKELQECKKEYPQAWIRIIGFDNVRQVQCVSFIASKPTGF

SEQ ID NO: 43964 - protein, 403 aa, Pseudomonas syringae pv. syringae B728a
MQFNKSNKLANVCYDIRGPVLKHAKRLEEEGHRILKLNIGNPAPFGFEAPDEILQDVIRNLPTAQGYSDSKGLFSARKAVMQYYQQKQVEGVGIEDIYLGNGVSELIVMSMQALLNNGDEVLVPAPDYPLWTAAVALSGGSPVHYLCDEQANWWPDLEDIKAKITPNTKAMVIINPNNPTGAVYSREVLLGMLELARQHNLVVFSDEIYDKILYDDAVHICTASLAPDLLCLTFNGLSKSYRVAGFRSGWIAISGPKHNAQSYIEGIDILANMRLCANVPSQHAIQTALGGYQSINDLILPPGRLLEQRNRTWELLNDIPGVSCVKPMGALYAFPRIDPKVCPILNDEKFVLDLLLSEKLLVVQGTAFNWPYPDHFRVVTLPRVDELEQAIGRIGNFLKGYRQ

SEQ ID NO: 43965 - protein, 387 aa, Mycobacterium avium subsp. paratuberculosis K-10
MPMRQWKRVKARSMIRTAVVGLGKMGLSHLAILRTHPDLDVVGVCDSAGYLRDILGKYTGLDCYDDLDRMLTHTRAQAVVVAVPSRLHAPMVEKALARGLHVFCEKPFVLDVRDGERLVTLAETNRLVTQVGYHCRFIGAFREAARIVASGGLGQVHHVRAEAYGPVVLRPKGSTWRGVKEEGGGALYDYACHAIDLMNFIAGVPHSVDGVVRHSVFSRDVDDEVYCTLRYDNGASGQLCVNWSDESFRKMSTKISVWGTNGRLVADRQECQIYLRETHPGLPELGPGWTIRYTTELTDEVWYYLRGEEYSAQIDYFAQSVKNNRRDGENTFRSALAVDRVVAMITGAALAGRPASPALPAVNGSPRGAFRREIAARIKKLAAMRAS

SEQ ID NO: 43966 - protein, 215 aa, Schizosaccharomyces pombe
MSAEQEKKTQGTTKEEQKSSFASEDVASKQTEEAKAVFGDGVAKQENKSGASTNDEKKPAEGDEDAEPASPEVHFEPIVKLSAVETKTNEEEETVEFKMRAKLFRFDKAASEWKERGTGDARLLKHKETGKTRLGMRRDKTLKVCANHLLMPEMKLTPNVGSDRSWVWTVAADVSEGEPTAETFAIRFANSENANLFKENFEKYQEENAKILKKN

SEQ ID NO: 43967 - protein, 220 aa, Zea mays
MADEIDTRPAPAGSRGRPAHATEDDDREEGEIATDAPSPALPAAHPLEHSWTFWFDNPHGKNKMAAWGSSIRPIHTFSTVEDFWGLYNNIHHPSKLIGGADFHCFKNKIEPKWEDPICANGGKWTISCGRGKSDTLWLHTLLAMIGEQFDYGDEICGAVVSVRSKQERIAIWTKNAANEAAQISIGKQWKEFLDYKDSIGFIVHDDAKKMDKGLKNRYTV

SEQ ID NO: 43968 - protein, 445 aa, Zea mays
MMEAEKNGNILMQKYEVGKLLGQGTFAKVYHARNIETSQSVAIKVIDKDKIFKVGLMEQIKREISVMKLVRHPNIVQLYEVMATKSKIYFVLEYVKGGELFNKIAKGKLREDASRKYFQQLVSAVDFCHSRGVYHRDLKPENLLVDENGNLKISDFGLSALAESRRQDGLLHTTCGTPAYVAPEVISRKGYDGAKVDTWSCGVILFVLMAGYLPFQDSNLMEMYRKIGKADFKCPPWFPSDVRKLVSRILDPNPRTRMPITKIVECFWFKKGIDNKLIRKNIEMKGKVSALTDVNVVFSSTGIGSNNNKLVDVEQDVAKITNLNAFDIISLSEGFNLSGLFEESEKRKEARFTSSQSASTIISKLEDAATCSKMTIKKKEGGVLKMEGANEGRKGVLSIDAEIFEVTPAFHLVEIKKNNGDTLEYENLFKQDMKPALKDIVWAWQ

SEQ ID NO: 43969 - protein, 173 aa, Flaveria bidentis
MASIPATVAAVPQTNMVAPFTGLKANAAFPVTKKVNGFSTLPSNGGRVQCMKVWPPVGKKKYETLSYLPELTEAQLAKEVDYLIRNKWVPCLEFELEHGFVYRENASSPGYYDGRYWTMWKLPMFGCTDSAQVMKELQECKKEYPQAWIRIIGFDNVRQVQCVSFIASKPTGF

SEQ ID NO: 43970 - protein, 488 aa, Ashbya gossypii ATCC 10895
MVHLGPKKPPTRKGSMADVPKTLVEQIASFERIFTVSAEKLQEITKHFVTELDKGLSKKGGNIPMIPGWVMDYPTGNETGDYLAIDLGGTNLRVVLVKLLGNHQFDTTQSKYRLPNRMRTTQNASELWDFIAESLKDFLEEQFPEGVHQTLPLGFTFSYPASQDKINMGILQRWTKGFDIPGVEGHDVVPMLQESLRKVNVPIEVVALINDTTGTLVASLYTDAETKMGVIFGTGVNGAYYDVVKDIEKLEGRLPEDIPPESAMAINCEYGSFDNEHLVLPRTKYDILIDEQSPRPGQQAFEKMTSGYYLGEVLRLALLDLHGQGLIFQGQDISKLETPYVMDTSFPARIEDDPFENLEETDDLFKDNLDIDTTRPERKLIRKLSEMIGNRAARLSVCGIAAICQKRGYETAHIAADGSVFNKYPGFQTRAAEGLRDIYGWEHSSSQDYPIKIVAAEDGSGAGAAVIAALTTKRLAAGKSVGLPEAQN

SEQ ID NO: 43971 - protein, 416 aa, Streptomyces avermitilis MA-4680
MSRAVPENDNGTTPERPRAVITGLGVVAPNGFDTDEYWDAVLHGRGGIDRVTRFDPEQYPATLAGEVADYDVRAYIPGRLVPQTDQTTRLVLMAADAAVRDSSLDPAALPEDQVGIVTGLSAGGLEYSQRELEKLWSLGSDHVSAYLSFSWFYAVNTGQISIRHGWHGPGGVLTGNTSGLDAIAQARRHVVDGLPVVMCGAVESAMCPLGWTIELTTGRMSTVADRTQAYLPFDTAASGYVPGEGGAMVVVEEAGHARGRGARPYSEIAGYATTFDPRPGSAREPGLRRAIESALADAGVTPDEVDVVFADAAGVGELDRAEAAAVTAVFGPRGVPVTAPKTMTGRLYSGGPALDVATASLSMRHGVIPPMINVTDPVRSDQLDLVLDRPRETTVSTALVLARSDGINSAVVLTAA

SEQ ID NO: 43972 - protein, 1690 aa, Candida albicans
MSFLRRDKSKANFRDGSATGLEEPVSPTTHFSPNAPPPLDGNHGDHYHDPDSPRSSVVSLPQLIHNSATHHLKENYRGFHANKRPKGIANVPPLAQPIKPRFKKKSNSLLNKLIYSTKKEDDETATSGKESRSSSIISDEKRKSASSASSGSSRQKFRFSSFDSNLSTSSSSPPKDKKVSVSDTVSDSSTVTASMSNMPTISIDLNLDEMHDIIKSPETPTPTAGLPTQKAEKKASPTAIKNWQAPESWDVKAPIKKEEPHAPKIEEVAENDVAIDNVLEKKRLPVLYGTHQVPHVTNSKDIKSSHIIRVFKEDNTFTTILCPLETTTSELLAIVQKKFFLESTTNFQLSVCIGNCVKVLEDFEKPLKIQMGLLLLSGYTEEDKLRMLGREDLSFVCKFVVENIFLRSLTHDEEVLLSRNYVDVNISSLNLKNVPIIFHQHTYEIEKLNVANNPSIYLPLDFIQGCTNLAYVDFSHNGCSKFPNNLLEAPQLTHLNLEMNFLDEIPQRISCLSNLTNLKLSSNQLYSLPHSFSTLTNLKQLDLSSNYFDSYPEAVNKLTNLVELNFSYNDLSIIPESIANLINLQKLNLCTNKLSGTLPGYLSQLKALKRLDIRYNYISNVDVLGIIPNLEVAYASKNAISTFSDQMKCLRLLHFDRNPITELKFNTQMQMLSVLDLSRAKITAFPAEFVEKVPNIEKLVLDKNHLVSLPNELCQLSKLVSLSVHANNLQSLPANIGDLRFLKYLDLHSNNLKSLPDQIWDLCHLTSLNVASNNLTSFPKAPYSVVKRLSSSLVDVHLESSQTLSLADSLLILILSDNRLSDDCFDEISFLIALKSLNVSYNDLIEIPQGTLSRLTRLNELYLSGNELTTLPADDLEVLKSLKLLYMNNNKLVSLPAELSRIANLQHLDVSSNQLKYNISNWPYDWSWHWNKNLKYLNFSGNKRFEIKQSHIKNPETGEDFDSLLVLKQLRVLGLIDVTLTTTNVPEQAVDLRLRTTASEFDNFGYGVSDSLGMRDHVSARDLFVQKFRGKENEMLLCAFDGKHGATNQGHRISLVAKNMFVRNFTKELDEIKNDDEIENALRKAFLNFNKEINGILTAKKNKSFTPVPNMSKEALELNLVDDGNAGCTVSVIYIKDKKLYSANIGDIEALLCRNNGDQFLLTEKHDPTNREEFERIRASGGYVSGGGELDGQLSVSRGVGFFNFLPHTHCGPTIRRFKITNDDDMIILGSKQLWDFISYESAVDIIRKDKNDPMVAAQKLRDFAICYGATDKICVIVLTFGNRQKQAANMYSNYGVDRRRRDKQQVVGGDSNLRKLEQEIEPPIGPLALVFTDIKNSTLLWDSYPAPMRSAIKIHNTIMRRQLRITGGYEVKTEGDAFMVAFPSPTAALLWCFQVQQNLVTADWPSEILETDQCCVVSDSENNTIFRGLSVRMGIHWGSPVCEPDVITGRMDYFGPMVNRASRISAIADGGQIAVSSDFLDVLNSLTVKHNNIKNNVESLIDAYQGNENAGMTIERELNALEDLGCNYFKIGERKLKGLETPEPITLVFTNRLKLRYDIFQKRLDANHSTRVAGTLPVEIIYGLRTVSLRLENLCSSINNGGNYCSEGFESSSGVISQKMNSSFKDSDLISLLNHVTTRIESCTTTLFLRQQLSQIKGNGGLIETNNSPSLDVIMDEVADIMKTVNELK

SEQ ID NO: 43973 - protein, 410 aa, Streptomyces avermitilis MA-4680
MRAPGGGNAKEFWELISSGTSAIRTISLFDASGFRSRIAGECDFDPVAEGFSAQEIRRMDRSAQLAVAATREAVADAGLDLAETDPHRCGVSVGSAIGGTMSLDREYNVLSDGGRKWLLDHEYAVPHMYNYLVPTSIAADVAWTVGAEGPVSLVSTGCTAGIESVSHAARLIREGSADVMLAGGSDASLSPICVACFDAIKATTPRNDEPATASRPFDRTRNGFVLAEGSAMLVLEELNHARERGARVYAEIGGWDVRANAYHMTGLRTEGPELAKAIEVALRMAGRVPEQVDYVNAHGSGTKQNDAHETDAFKRTLGDHAYRTPVSSIKSMIGHSLGAIGSIEIAACALAIDAGLIPPTANLHEPDPELGLDYVPLSARQADLRTVLKVGSGFGGFQSAMVLTQGGSDE

SEQ ID NO: 43974 - protein, 205 aa, Helianthus annuus
MEKLQNANAVLRRLPPGFRLHPTDEELVVQYLKRRVHSSPLPASIIPEVDVCKSDPWDLPGDSDQQEERFFFSTREIKYPNGNRSNRATQSGYWKATGLSRQIMGANQVGLVGIKKTLVFYKGKPPTGSRTDWIMHEYRLATTQPTQGLEKWVLCKIFLKKRGNYKDEKKNVPVFYDFLATPKVKTSSSSSSGSSGITEESSTNC

SEQ ID NO: 43975 - protein, 287 aa, Schizosaccharomyces pombe
MAESIARPSVLNATDDDIKNLLAADSHIGSKNLEVRMENYVWKRRSDGIHIINLGKTWEKLVLAARVIATIENPADVCVISSRPYGHRAVLKFAAHTGATAIAGRFTPGNFTNYITRTYREPRLIIVTDPRADAQAIKEASFVNIPVIALCDTDSILNHVDVAIPINNKGYKSIGLAWYLLAREVLRLRGNISRTTAWEVMPDLYFYRDPEEIEREEEQKAAAAAAAEEEAQLAAQTAAAEFEVTDSAAGTVDPTILDNATAGQVGQTTWEGDAEWNITGAAPSEWA

SEQ ID NO: 43976 - protein, 394 aa, Bacteroides thetaiotaomicron VPI-5482
MDSNNLTPLRKGVVGVQFLFVAFGATVLVPLLVGLDPSTALFTAGIGTLIFHAVTRGKVPIFLGSSFAFIAPIIKATELYGLAGTLSGMVGVALVYFVMSALVKWQGVRVIERLFPPVVIGPVIILIGLSLAGTGVNMAKENWVLALLSLVTAVVVSMKAKGLLKLIPIFCGIIVGYLAAWLFYDLDLSGVRDAAWIGLPQFVFPKFSWEPILFMIPVAIAPVIEHIGDVYVVNTVTGKDFVKDPGLHRTLLGDGLACCFAGLVGGPPVTTYSEVTGAMSLTKITNPQVIRIAAISAILFSVVGKISALLKSIPSAVLGGIMLLLFGTIACAGIGNLVNNCIDLSRTRNIIIVSLTLTVGIGGAVLTWGDFSLSGIGLAALVGVLLNLILPKDD

SEQ ID NO: 43977 - protein, 345 aa, Ralstonia eutropha JMP134
MAASARATRTPRATVKEQQMGLLVNGQWQDKWYDTASTGGRFVRKDAAFRNWITADGAPGPSGNGGFAAQAGRYHLYVSLACPWAHRTLIMRRLKGLDDMIGVSVVHWLMREEGWTFSEGPGVVPDTVNHARVLHQVYTAADPQYTGRVTVPVLWDRQRATIVNNESSEILRMMNSAFDAIGARPGDYYPAELREEIDAVNARVYDTVNNGVYKAGFATMQQAYEEAVWPLFETLDWLDNRLSMQRYLVGNRLTEADIRLFTTLVRFDPVYVGHFKCNLRRIADYPALSAFVRDIYQHSGIAETVNVEHIKRHYYESHRTLNPAGIVPAGPVLDLDAPHGRETLA

SEQ ID NO: 43978 - protein, 319 aa, Streptomyces avermitilis MA-4680
MSGKYLVTGGAGYVGSVVAQHLIEAGHEVVVLDNLSTGFREGVPAGASFVEGDIRDAAKWLDSSFDAVLHFAAFSQVGESVVKPEKYWDNNVGGTLALLAAMREAGVRKLVFSSTAATYGEPEEVPIVETAPTRPTNPYGASKLAVDHMITGEAGAHGLAAVSLRYFNVAGAYGSCGERHDPESHLIPLVLQVAQGRRDAISVYGDDYPTPDGTCVRDYIHVADLAEAHLLALDAATPGEHLVCNLGNGNGFSVREVIETVRQVTGHPIPEIVAPRRAGDPAVLVASAATARERLGWNPARADLAGIVADAWAFAQHKE

SEQ ID NO: 43979 - protein, 397 aa, Candida dubliniensis
MFLKNIFIALAIALLVDATPTTKRSAGFVALDFSVVKTPKAFPVTNGQEGKTSKRQAIPVTLHNEQVTYAADITVGSNQQKLNVIVDTGSSDLWVPDANVDCQVTYSDQTADFCKQKGTYTPSSSSASQDLNTPFKIGYGDGSSSQGTLYKDTVGFGGASIKNQVLADISSTSIDQGILGVGYKTNEAGGDYDNVPVTLKKQGVIAKNAYSLYLNSPNAATGQIIFGGIDNAKYSGSLITLPVTSNTELRISLGSVEVAGKTINTDNVDVLLDSGTTITYLQQDLADQVVKAFNGELTQDSSGNSFYLVDCNVSGDVVFNFSKNAKISVPASEFAAPLQTDDGQTYSKCQLLFDVNDANILGDNFLRSAYIVYDLDDNEISLAQVKYTSESSISAIN

SEQ ID NO: 43980 - protein, 730 aa, Cryptococcus neoformans var. neoformans B-3501A
MAAPRRSAGVTSSSGYADVAELEKYKLISNIGKGSFGVISKVQRVSDGKEFALKQLDYSKMTEKDRKQILAEVAILDSLKHRNIVQLIQKIKDPKNERIYIVMEYCTSGDLGTLIRRAQRNNSSLPEDKIWNIFLQIVLALHHCHWPAERPANTGGRQSVVAPSTDGGVARYQVLHRDLKPENVFLSDEFVKLGDFGLSKDMGTASFTSTYVGTPLYMPPEILAENRYDTKSDIWSLGCLVYEMCALHSPFSAAQTQAELITMVKSGKIPPLPARYSPALRSVIKAMLTLHPAKRPSTKDLLEMPEMKLHRKLFTVQNQTSLLFAKRDELKQFEDQIRARAVALDEREKELAGREASLQAREDLCDSREEEAKETQRKLNQAAESLRGQWERFREEKEQWERYRELEEEAKETAFGVTDVPDEKCQPHTGVVGIARPPLEERNTAPASPSVSRFTRCLDTPSKIPLATAAVSPAPLAPLEARFSTSHFQPRPATPLRRAATKSMGNLAGVVRAQTAQEWAGATQSTPAKQFSFPIRQQRISIGSPSELQSVCCEDVSMISAIPSPWVPRPRKSSVAPSIVVAQQECPASGESFSTGNNRLASVAPTQIPAPTFIYREAATPAKWSFDDPDLPSPFIRRPNSMPTQPQAASFPPSSNMVGMRQPLGSINPQATITAPSALGSPVAKKIPSRSGNLHQHVLKVNAARVSGEGVAPSVAPVGVVRGRTGNRIG

SEQ ID NO: 43981 - protein, 166 aa, Coxiella symbiont of Carios capensis
FTNVPEPSVISLSDVKSIYEIPLILRDQGLGNRVCEKLNIEATAADLDDWKKVVQAQKNPHHTVAVAVVGKYVDLEDSYKSLSEALIHAGIHTETRVVIEYIDSEAIELHGAELLKKVDAILVPGGFGSRGIEGKILAAQYARENGIPYLGICLGMQIAIIEFARD

SEQ ID NO: 43982 - protein, 127 aa, Arabidopsis thaliana
  misc_feature (86)..(86): Xaa can be any naturally occurring amino acid
  misc_feature (93)..(93): Xaa can be any naturally occurring amino acid
  unsure (1)..(127): unsure at all Xaa locations
ASAQFNSVVVNETVICPIRLLKRVSDVRRGKTKLRSSHCAWKLKSFPVFSESSPLNHIDAVSEPLTAVEEMELDSSHERIHELCRXCHESSVXCLTDAVDTFLEHAIDYMGYSSEITFNADYERPIV

SEQ ID NO: 43983 - protein, 615 aa, Geobacillus kaustophilus HTA426
MCGITGWVHFGRNLRRERTVIDSMTETLAKRGPDDTNTWLDTHVAFGHKRLVVVDPAGGKQPMVRQKNGHRYTIVYNGELYNTEDIRKELLRQGYRFDGHSDTEVLLAAYMEWKEKCVDWLNGIFAFAVWDGERELLFMARDRLGVKPLFYREDGGGLLFGSEVKAILAHPDVKAEVNYEGLAEVFGLGPSRTPGHGVFDGIRELRPAHALTFSRSGLRIWRYWNVESDVHRDSFEETVEKLRFLLTDAVTRQLVSDVPVCTFLSGGVDSSAITGIAANAFAADGKGPLHTYSIDYEGNDQYFKANDFQPNTDAPFIEQVSNKFQTVHHRCVITQEELFRHLHEAVIVRDVPGMADVDSSLLWFCKQIRERFVVSLSGECADEIFGGYPWFHRPDDLSRKGFPWMRSVDARMGLLKDEWRQKLRLDDYVQMRYEQTLAEVPRLEGESAEEAKRRELFYLNMIWFMTTLLDRKDRMSMGASLEVRVPFADHRIVEYVWNIPWDMKMYGGREKGLLRKALEGLLPEEVLYRKKSPYPKTHHPLYTKLVKQWLEQLLHDRSSVLHEFFDREKLLALIETEGKSFQVPWFGQLMTGPQLLAYLGQVHVWFDHYGIRIKE

SEQ ID NO: 43984 - protein, 205 aa, Oryza sativa
MASTSGSAAAVEERGNSERKRKRGATGESEGSEAQPSKWRTRRAHEIYSSKLLDAIRLVRSGSPSSSAAAPPRSRAVREAADRALAVSARGRTRWSRAILASHRRRIQAARRARLREAISPPSRHPSSSSGKGPKAPALARKAKVLGRLVPGCRKLPFPALLAEASDYIAALEMQVRAMTALAEVLSTVSGSGSASSSGGSSSPA

SEQ ID NO: 43985 - protein, 588 aa, Geobacillus kaustophilus HTA426
MRKEAIHHRSTDHFAYAYDSETLHLRLQTKKHDVDHVELLFGDPYEWHDGAWQFQTMPMRKTGSDGLFDYWLAEVKPPYRRLRYGFVLRAGGEKLVYTEKGFYHEAPSDDTAYYFCFPFLHRVDLFQAPGWVKDTVWYQIFPERFANGNPAISPKGARPWGSEDPTPTSFFGGDLQGIIDHLDYLADLGITGIYLTPIFRAPSNHKYDTADYFEIDPHFGDKETLKTLVKRCHEKGIRVMLDAVFNHCGYEFGPFQDVLKNGAASRYKDWFHIREFPLQTEPRPNYDTFAFVPQMPKLNTAHPEVKRYLLDVATYWIREFDIDGWRLDVANEIDHQFWREFRQAVKALKPDVYILGEIWHDAMPWLRGDQFDAVMNYPLADAALRFFAKEEISARQFADIMIRLLHSYPKQVNEAAFNLLGSHDTPRLLTVCGGDVRKVKLLFLFQLTFTGSPCIYYGDEIGMTGGNDPECRKCMVWDPEHQNRELLAHVKRLIALRKQHRALRRGDVSFLSADDNPNHLVYEKIDGAETVLVIINRSNDAADIPLPLDLRGKWLVDLLTGERFAAEAETLCASLPPYGFVLYKVESW

SEQ ID NO: 43986 - protein, 243 aa, Amborella trichopoda
MGRGRVELKRIENKINRQVTFAKRRNGLLKKAYELSVLCDAEVALIIFSNRGKLYEFCSTSSMVKTLERYQKCNYGALETNVPTRETQSSYQEYLKLKARVESLQRSQRNLLGEDLGPLSSKELEQLEQQLEMSLKQIRSTKTQCMFDQLADLRRRELALQETNKALKRKLEGASASNPPQLAWENNGQNIHYNRQPAHTEGFFHPLECDSTLQIGYHPSCPDQMPVAAPVQNVNAFLPGWLV

SEQ ID NO: 43987 - protein, 496 aa, Prochlorococcus marinus str. NATL2A
MTTALQSPPRRTTSRLQDASLLNGPMLLLRSIKGFRRSQSWAWLASIPLALLGLGVFTFSARAEVALSDLTGPQAASFLADNLWLFIATILVIFMNAGFAMVEAGMCRQKNAVNILAKNLFVFALAVTAYWVIGYSLMYGGSVIDGWLYFQGLFVDPDPSGALECAAAGDTGCLVPAVDFLFQSAFAGTAATIVSGLVAERVKFGEFVVFSIVLTAFIYPIAGSWQWNGGWLAELGFIDFAGSSIVHSVGGWAGLVGAMLLGPRIGKFVDGKAQAMPGHNMAIATLGALILWIGWYGFNPGSELAMDQYVAYVAVTTTLAAAGGAIAATVLSTITSGKPDLTMIINGILAGLVSITAGCGNMTFAGSWLAGAVGGLIVVVAVAALDSAGIDDPVGAFSVHGVCGVWGTVVIGLWGVDGMDPGAAGIGLLNGGGINQFFIQALGAAAYGIWTVVTCWIAWQIIGGFFGGIRVSEAEETQGLDIGEHGMEAYPDFASS

SEQ ID NO: 43988 - protein, 649 aa, Mycoplasma gallisepticum R
MLNYKQMVIKLIYQNKPFPKNSNSIVNSFRFLMFDTVNNNFVGSAAYGFGAASYLYVLFRNYFVMDLDNLDANYNDKLVVSKQLGGSNIRACFYLLKHPDIKIEDLMSFSHEKQIRNLYDFSTYQPGYNLAYAVGLAIDAKLVNQKSHDTITNKIYCIVSAADLNSSYGLAALKTAANQELNNLIIIYDNNHFEERGENQDYLVTDFSSLVKDMGFKYINVFNGNNIEKLDAGFHYAVNSKKPVFIDINTIVGHGYDSAGTKEVIKSSLTQDQLDQLTKRFEYTGEEFMVLYETANDLYPNIKERVNKLKELIADQVDQLKQNNLVIPNYLSAFKDWALSEDQIDANQSLAKLKADLIRCQSNSVLLNVSDHDDEFEREVEAIDPSRIVLLGNWIELAIIIANAISDNKIHLPVINLDINLIDKTIQNLKLEEKKDQILYLVDNCKELSRKYVNKVIDLISREKDGIVLQPGTNEELKYSLCNFKAKNKDKTYIILPSSDDLISIQADKINFGGYELYGDSYATVNIVTAGSDLIKALDLRQQLLENKITARIVSVISLTDFDQINAVSKSVLLKNLPSYFISRADKVAWGYVLSQNQPEVDHKSTENTTYIKKPRRAQKSNNKIKTLDNKTKVDESNKQLNATKEDKQ

SEQ ID NO: 43989 - protein, 563 aa, Erwinia carotovora subsp. atroseptica SCRI1043
MSTSLPWWQNGVIYQIYPKSFQDSTGNGIGDIAGVTARLDYLQQLGIDAIWLTPVYLSPQVDNGYDVADYCAIDPAYGTMADMETLIAEAHRRRIRIVMDMVFNHTSTQHHWFQNAQDRRSPYRHFYIWRDGNDGAPPNNWRSKFGGPAWLWHAESKQYYLHLFATEQADLNWEHPRVRDELKQVCGFWADKGVDGLRLDVINLVSKQQDFPSDTQGDGRRFYTDGPLIHDYLQEFSQDVFQPRGLMTVGEMSSTSLEHCRRYAALDGSELSMTFNFHHLKVDYPNGEKWTLAEPDFIQLKLIFNHWQQGMHNHAWNALFWCNHDQPRIVSRFGDEGEFRVQSAKMLAMVLHGMQGTPYIYQGEELGMTNPGYTQIEQYRDIESLNQFAEQRDRGQVDEQILAILASKSRDNGRTPMQWDESDHAGFTTGTPWITPSQNFPHINAEQSLADKESVFYTYQQLIAMRKALPLLTHGDYKDLLPDHPNVWCYQRTWEGQRLLVLANLSKQPLRWQPPMETHDRRWRLLFSNYSDAQPQPAILELRPFEAIYWIQGMQEKEDKIQE

SEQ ID NO: 43990 - protein, 540 aa, Clostridium difficile
MAKEIKFSEETRRALEAGVNKLADTVKVTLGPKGRNVILDKKFGSPLITNDGVTIAKEIELEDRFENMGAQLVKEVATKTNDVAGDGTTTATVLAQAIIREGLKNVTAGANPILLRKGIQKAVTVAVEELKNQSRIVETQEAISQVASISAGDEEVGKLIAEAMEIVGKDGVITVEESQTMNTELDAVEGMQFDRGFVSAYMVTDVDKMEAVLKDPYILITDKKISNIQELLPVVEQIVQQGKKLLIIAEDVEGEALSTLVVNKLRGTFDVVAVKAPGFGDRRKEMLQDIAILTGAQVISEELGYDLKEADLSMLGRASSVKVTKENTTIVDGSGDKKSIEDRVTQIKHQVEQTTSDFDREKLMERLAKLAGGVAVVKVGAATEVELKERKLRIEDALNATRAAVEEGIVAGGGTAFVSVIPAIGTLIESLEGEVKLGAQIVKKALEEPLRQIAINAGLEGAVIVQNVVNSEAETGFDALNEKYVNMIEAGIVDPTKVSRSALQNAASIASTFLTTEAAVADLPEKEDAGMPGTGMDGMY

SEQ ID NO: 43991 - protein, 360 aa, Triticum aestivum
  misc_feature (155)..(155): Xaa can be any naturally occurring amino acid
  misc_feature (162)..(162): Xaa can be any naturally occurring amino acid
  misc_feature (205)..(205): Xaa can be any naturally occurring amino acid
  misc_feature (245)..(245): Xaa can be any naturally occurring amino acid
  misc_feature (251)..(251): Xaa can be any naturally occurring amino acid
  unsure (1)..(360): unsure at all Xaa locations
MGSIAAGADEDACMYALQLVSSSILPMTLKNAIELGLLETLMAAGGKFLTPAEVAAKLPSAANPEAPDMVDRMLRLLASYNVVSCRTEEGKDGRLSRRYGAAPVCKYLTPNEDGVSMSALALMNQDKVLMESWYYLKDAVLDGGIPFNKAYGMSXAFEYHGXTDPRFNRVFNEGMKNHSIIITKKLLESYKGFEGLGTLVDVGGXGVGATVAAITAHYPTIKGINFDLPHVISEAPPFPGVTHVXGGDMFXRVPSGDAILMKWILHDWSDEHCATLLKNCYDALPAHGKVVLVECILPVNPEATPKAQGVFHVDMIMLAHNPGGRERYEREFEALAKGAGFAAMKTTYIYANAWAIEFTK

SEQ ID NO: 43992 - protein, 1481 aa, Ustilago maydis 521
MDASVTTTSPSSAVSQMPPSLNARVDDLAQASASTPPQSPLKHPASTFSASTSAIATAATPSTAAAASVSSPSNHMSPAHPPTESSRHSTPATSAAGSDPVQSTLPCSAQLATSQPSIDAAPTQPPQASSPRPPSEQLPHAPPDEHPLSSIQPAYFYPSDASTSSSHDGIPVFQPTMHQFQDFYAFCQAIDSWGMQYGILKVVPPPEWRDALPDLRPSPPTASNKLEPDEHADISKVRIRNAIMQHFTPAGSGVWRQINTTRSAKIWNAKQWAELCISSDQKGPEMDRMKWKVEVEGASNGGWGPKNIGAKHCAAPTILDEDGVRTRSGKARPSATPAAAEAKTNAKRKRTDNDHGHDHGHDHDKPPSVQSHEQPTISASVSAPTSPSSPERRSQRIVQNFAVAKPLPPVTFQDASPIKKKNWEAEATTPDEWRAFDYKNCWRKEALSQQQLARLGATPCASDDDDDDAAAAAAAAATTAETSQSSAAPLALPNPSEWTPEVCREIESEYWRNLNFGKPPMYGADLSGTLFDHRTKHWNVGKLDSILTRLHLRRKLPGVNTPYLYWGMWRATFAWHVEDMDLYSINYIHFGAPKQWYAIRQADRQRFESAMAGAFPADARRCPHFMRHKSYLASPSFLASHGIRPLKLVHNAGEFVITYPFGYHSGFNMGYNCAESVNFALESWLDIGRKANYCHCDMSQNSVRIDVDALLEESREMEELERKRELRRAKEEAVHATEEEELEKRRIRNERAKERRRLKKEADEAAAAANPAAPLPFQGGADFYVDPKHAAISPCVFCPANVHTDLVATPAEIDSTNPKLKAMSGRHAHRLCASFVPETWVGKHGKTDIVEGIGGIDKARFSLKCQICPHPSLQKLYPKIQCTRGKCPRSAHVSCALVEKHGWFIDVCPAQTADELEGKKASTTNSNVQQTDGLEDGDERLVVLCKAHNPLFREAEEARKAEELRERIYALPIPSMVKIKTSGGMFQALMVEIHEEEDEIVIEDEGRPSTVKFQQILLDDPVKQEPQSVGIPAADGQVALNGDDVSHPTKRRRKVTEKASEAKAAKSEAVDAGGTGVSEVTAKKPRKNRGAAAAAAATVPTTPASADTAATAAPPLGDKAASTLSGKKSANAADGQTKSKRQRQPKKKAEATNGDAVASMQWSDHPMHAGGQQQQQQQQQQVVQTIHVPSKRGPRATYAAQHPSVPQSSLSQYGEHHAYPPPLPQPQQQQQQQQQYAGGDGGPMHRTPLAGDGGTYAPAYALQQYAPGYGRSEYGAGVASAGYAHLLHQQQQQRAGNGGGHAYGSSSPYAPYQVGAHASYALAPGGSASNHSRHSGGGAQALEMKGASSTGGMHAGSQYGYLSAPVGGYERTPPLPTYAKSGAHANADLAGGGFPDYRPPYHHAAPAALQAGYASGVQYRQPPARYAGEYPACSYGHVGPADEMHQHMRAAHVASVGGSHVNAPTGTHAYSTPYQYAHRMQ

SEQ ID NO: 43993 - protein, 460 aa, Arabidopsis thaliana
MTVVGDVAPIPRRNSSTCSNDIAAPLLPECHGDEVAHDEFNGASFSGAVFNLATTIIGAGIMALPATMKILGLGLGITMIVVMAFLTDASIEFLLRFSKAGKNRSYGGLMGGSFGNPGRILLQVAVLVNNIGVLIVYMIIIGDVLAGKTEDGIHHFGVLEGWFGHHWWNGRAAILLITTLGVFAPLACFKRIDSLKFTSALSVALAVVFLIITAGISIMKLISGGVAMPRLLPDVTDLTSFWNLFTVVPVLVTAFICHYNVHSIQNELEDPSQIRPVVRSALMLCSSVYIMTSIFGFLLFGDDTLDDVLANFDTDLGIPFGSILNDAVRVSYALHLMLVFPIVFYPLRINIDGLLFPSARSLSTSNVRFGCLTAGLISVIFLGANFIPSIWDAFQFTGATAAVCLGFIFPASIILKDRHDKATNRDTTLAIFMIVLAVLSNAIAIYSDAYALFKKNAPRE

SEQ ID NO: 43994 - protein, 77 aa, Glycine max
MKLSMRLISAVLLLFMIFVATGMGPVSVEARTCESQSHRFKGPCVSDNNCANVCHNEGFGGGKCRGLRRRCFCTRHC

SEQ ID NO: 43995 - protein, 240 aa, Wolbachia endosymbiont of Drosophila simulans
GGTFLVFSDYCRPAIRLSALMKQQVMYVMTHDSIGVGEDGPTHQPIEHLASLRAIPNLYVFRPADAVETLECVSIALEKKESPALFALSRQNVSYMRKFYSDIDQSANLSKFGAYILCECSKELKVTIFATGSEVEIAVEAREKLQEKGIGTRIVSMPCWRLFDEQSDEYKAAILNNDSIKVAIEAGSEMGWHKYIGSNGIFIGMKSFGESAPYKTLYEHFNISADHVVKCVCEKLVYIQ

SEQ ID NO: 43996 - protein, 546 aa, Shewanella sp. ANA-3
MTTRYIFVTGGVVSSLGKGIAAASLAAILEARGLNVTIMKLDPYINVDPGTMSPTQHGEVFVTEDGAETDLDLGHYERFIRTKMNRRNNFTTGRIYEEVLRKERRGDYLGATIQVIPHITNAIKEKVIAGGEGHDVAIVEIGGTVGDIESLPFLESIRQLGVELGRDRTLFMHLTLVPFLGAAGEVKTKPTQHSVKELRSIGIAPDVLICRGDRAIPANERAKISLFCNVEERAVISLKDVDSIYKIPALLRSQGLDDLVVKRFGLECREADLSEWENVIYQEANPNGEVVIGMVGKYIELPDAYKSVNEALKHAGLKNRVSVSIKYIDSQTVEAKGDEVLQGLDGILVPGGFGERGVEGKILAAKYARENELPYFGICLGMQVALIEFARNVAGMTDAHSTEFNKATPFPVVGLITEWVDEEGNVEQRHEASDLGGTMRLGAQLCHLLEGSKAAQAYKGNTCVERHRHRYEVNNKYRERLEQAGLVFSGLSSDRKLVEMIELKDHPWFVAGQFHPEFTSTPRDGHPLFEGFVAAASAHQKRDLKK

SEQ ID NO: 43997 - protein, 344 aa, Yarrowia lipolytica CLIB122
MSTTPTTLITGATGFIAGHCIEQLLKADHKVIGTIRSQEKGQRLAAAFPEAIKTGQLVFETVSDVRSEQEFKTLFQKHTDIKYVLHTASPFHFNVEDPVKDMLEPAVEGTLTVLKTAKQYAPQVEKFVITSSFAAMMNWHEVGDSSAVVTEKSWNPVTWDEAAQKGNVVVTYLGSKKFAEKAAWDFMESEKPSFGLTTVNPAYVFGPGIAIDAKALNTSNEVIVQGALSTKPGQDAPAGPAQMWVDVRDVAKAHLSAISKTLDNQRLMLCVSKFCNQDLLDVINEKVPELKGKIATGKPGTGAETDKEGFQFDNDQTRKALNYDWIPLDKSVADFANQWLSFQN

SEQ ID NO: 43998 - protein, 1421 aa, Polyangium cellulosum
MADRPIERAAEDPIAIVGASCRLPGGVIDLSGFWTLLEGSRDTVGRVPAERWDAAAWFDPDPDAPGKTPVTRASFLSDVACFDASFFGISPREALRMDPAHRLLLEVCWEALENAAIAPSALVGTETGVFIGIGPSEYEAALPQATASAEIDAHGGLGTMPSVGAGRISYALGLRGPCVAVDTAYSSSLVAVHLACQSLRSGECSTALAGGVSLMLSPSTLVWLSKTRALARDGRCKAFSAEADGFGRGEGCAVVVLKRLSGARADGDRILAVIRGSAINHDGASSGLTVPNGSSQEIVLKRALADAGCAASSVGYVEAHGTGTTLGDPIEIQALNAVYGLGRDVATPLLIGSVKTNLGHPEYASGITGLLKVVLSLQHGQIPAHLHAQALNPRISWGDLRLTVTRARTPWPDWNTPRRAGVSSFGMSGTNAHVVLEEAPAATCTPPAPERPAELLVLSARTASALDAQAARLRDHLETYPSQCLGDVAFSLATTRSAMEHRLAVAATSREGLRAALDAAAQGQTSPGAVRSIADSSRGKLAFLFTGQGAQTLGMGRGLYDVWSAFREAFDLCVRLFNQELDRPLREVMWAEPASVDAALLDQTAFTQPALFTFEYALAALWRSWGVEPELVAGHSIGELVAACVAGVFSLEDAVFLVAARGRLMQALPAGGAMVSIEAPEADVAAAVAPHAASVSIAAVNAPDQVVIAGAGQPVHAIAAAMAARGARTKALHVSHAFHSPLMAPMLEAFGRVAESVSYRRPSIVLVSNLSGKACTDEVSSPGYWVRHAREVVRFADGVKALHAAGAGTFVEVGPKSTLLGLVPACMPDARPALLASSRAGRDEPATVLEALGGLWAVGGLVSWAGLFPSGGRRVPLPTYPWQRERYWIDTKADDAARGDRRAPGAGHDEVEEGGAVRGGDRRSARLDHPPPESGRREKVEAAGDRPFRLEIDEPGVLDHLVLRVTERRAPGLGEVEIAVDAAGLSFNDVQLALGMVPDDLPGKPNPPLLLGGECAGRIVAVGEGVNGLVVGQPVIALSAGAFATHVTTSAALVLPRPQALSAIEAAAMPVAYLTAWYALDRIARLQPGERVLIHAATGGVGLAAVQWAQHVGAEVHATAGTPEKRAYLESLGVRYVSDSRSDRFVADVRAWTGGEGVDVVLNSLSGELIDKSFNLLRSHGRFVELGKRDCYADNQLGLRPFLRNLSFSLVDLRGMMLERPARVRALLEELLGLIAAGVFTPPPIATLPIARVADAFRSMAQAQHLGKLVLTLGDPEVQIRIPTHAGAGPSTGDRDLLDRLASAAPAARAAALEAFLRTQVSQVLRTPEIKVGAEALFTRLGMDSLMAVELRNRIEASLKLKLSTTFLSTSPNIALLAQNLLDALATALSLERVAAENLRAGVQNDFVSSGADQDWEIIAL

SEQ ID NO: 43999 - protein, 148 aa, Nepenthes alata
MGSDLFGSYAESSCAALIVASISSFGVNHDLTAMMYPLLVSSVGILVCLLTTLFATDFFEIKTVKEIEPALKRQLIISTALMTVGIALVTWVSLPSSFTIFNFGTQKVVKNWQLFLCVAVGSWAGLIIGFVTEYYTSNAYSPVQDVAD

SEQ ID NO: 44000 - protein, 371 aa, Streptomyces fradiae
MTDASHPTAADDLGALSTLFRSEQGGHERVLLCQDRESGLKAVIALHSTALGPALGGTRFHAYASDEEAVLDALNLARGMSYKNALAGLPHGGGKAVIIGSPAPVSEGGLKSEALLRAYGRFVASLDGRYVTACDVGTYVADMDVVARECRWTTGRSPENGGAGDSSVLTAFGVFQGMRASAQALWGEPTLRGRTVGVAGVGKVGHHLVDHLVEDGARVVVTDVRPESVERVRARHPRVVAVPDTESLIRADLDVYAPCALGGALNDDTVPALTARVVCGAANNQLAHPGVEKDLAGRGILYAPDYVVNAGGVIQVADELLGFDFDRAKAKAAQIFDTTLAIFDRARTDGVPPAVAADRIAEQRMAEARTV

SEQ ID NO: 44001 - protein, 7257 aa, Polyangium cellulosum
MTTRGPTAQQNPLKQAAIIIQRLEERLAGLAQAELERTEPIAIVGIGCRFPGGADAPEAFWELLDAERDAVQPLDMRWALVGVAPVEAVPHWAGLLTEPIDCFDAAFFGISPREARSLDPQHRLLLEVAWEGLEDAGIPPRSIDGSRTGVFVGAFTADYARTVARLPREERDAYSATGNMLSIAAGRLSYTLGLQGPCLTVDTACSSSLVAIHLACRSLRAGESDLALAGGVSALLSPDMMEAAARTQALSPDGRCRTFDASANGFVRGEGCGLVVLKRLSDAQRDGDRIWALIRGSAINHDGRSTGLTAPNVLAQETVLREALRSAHVEAGAVDYVETHGTGTSLGDPIEVEALRATVGPARSDGTRCVLGAVKTNIGHLEAAAGVAGLIKAALSLTHERIPRNLNFRTLNPRIRLEGSALALATEPVPWPRTDRPRFAGVSSFGMSGTNAHVVLEEAPAVELWPAAPERSAELLVLSGKSEGALDAQAARLREHLDMHPELGLGDVAFSLATTRSAMSHRLAVAVTSREGLLAALSAVAQGQTPAGAARCIASSSRGKLAFLFTGQGAQTPGMGRGLCAAWPAFREAFDRCVALFDRELDRPLREVMWAEAGSAESLLLDQTAFTQPALFAVEYALTALWRSWGVEPELLVGHSIGELVAACVAGVFSLEDGVRLVAARGRLMQGLSAGGAMVSLGAPEAEVAAAVAPHAASVSIAAVNGPEQVVIAGVEQAVQAIAAGFAARGARTKRLHVSHAFHSPLMEPMLEEFGRVAASVTYRRPSVSLVSNLSGKVVTDELSAPGYWVRHVREAVRFADGVKALHEAGAGTFVEVGPKPTLLGLLPACLPEAEPTLLASLRAGREEAAGVLEALGRLWAAGGSVSWPGVFPTAGRRVPLPTYPWQRQRYWIEAPAEGLGATAADALAQWFYRVDWPEMPRSSVDSRRARSGGWLVLADRGGVGEAAAAALSSQGCSCAVLHAPAEASAVAEQVTQALGGRNDWQGVLYLWGLDAVVEAGASAEEVAKVTHLAAAPVLALIQALGTGPRSPRLWIVTRGACTVGGEPDAAPCQAALWGMGRVAALEHPGSWGGLVDLDPEESPTEVEALVAELLSPDAEDQLAFRQGRRRAARLVAAPPEGNAAPVSLSAEGSYLVTGGLGALGLLVARWLVERGAGHLVLISRHGLPDREEWGRDQPPEVRARIAAIEALEAQGARVTVAAVDVADAEGMAALLAAVEPPLRGVVHAAGLLDDGLLAHQDAGRLARVLRPKVEGAWVLHTLTREQPLDLFVLFSSASGVFGSIGQGSYAAGNAFLDALADLRRTQGLAALSIAWGLWAEGGMGSQAQRREHEASGIWAMPTSRALAAMEWLLGTRATQRVVIQMDWAHAGAAPRDASRGRFWDRLVTATKEASSSAVPAVERWRNASVVETRSALYELVRGVVAGVMGFTDQGTLDVRRGFAEQGLDSLMAVEIRKRLQGELGMPLSATLAFDHPTVERLVEYLLSQALELQDRTDVRSVRLPATEDPIAIVGAACRFPGGVEDLESYWQLLTEGVVVSTEVPADRWNGADGRVPGSGEAQRQTYVPRGGFLREVETFDAAFFHISPREAMSLDPQQRLLLEVSWEAIERAGQDPSALRESPTGVFVGAGPNEYAERVQELADEAAGLYSGTGNMLSVAAGRLSFFLGLHGPTLAVDTACSSSLVALHLGCQSLRRGECDQALVGGVNMLLSPKTFALLSRMHALSPGGRCKTFSADADGYARAEGCAVVVLKRLSDAQRDRDPILAVIRGTAINHDGPSSGLTVPSGPAQEALLRQALAHAGVVPADVDFVECHGTGTALGDPIEVRALSDVYGQARPADRPLILGAAKANLGHMEPAAGLAGLLKAVLALGQEQIPAQPELGELNPLLPWEALPVAVARAAVPWPRTDRPRFAGVSSFGMSGTNAHVVLEEAPAVELWPAAPERSAELLVLSGKSEGALDAQAARLREHLDMHPELGLGDVAFSLATTRSAMNHRLAVAVTSREGLLAALSAVAQGQTPPGAARCIASSSRGKLAFLFTGQGAQTPGMGRGLCAAWPAFREAFDRCVALFDRELDRPLREVMWAEPGSAESLLLDQTAFTQPALFTVEYALTALWRSWGVEPELVAGHSAGELVAACVAGVFSLEDGVRLVAARGRLMQGLSAGGAMVSLGAPEAEVAAAVAPHAASVSIAAVNGPEQVVIAGVEQAVQAIAAGFAARGARTKRLHVSHASHSPLMEPMLEEFGRVAASVTYRRPSVSLVSNLSGKVVADELSAPGYWVRHVREAVRFADGVKALHEAGAGTFVEVGPKPTLLGLLPACLPEAEPTLLASLRAGREEAAGVLEALGRLWAAGGSVSWPGVFPTAGRRVPLPTYPWQRQRYWPDIEPDSRRHAAADPTQGWFYRVDWPEIPRSLQKSEEASRGSWLVLADKGGVGEAVAAALSTRGLPCVVLHAPAETSATAELVTEAAGGRSDWQVVLYLWGLDAVVGAEASIDEIGDATRRATAPVLGLARFLSTVSCSPRLWVVTRGACIVGDEPAIAPCQAALWGMGRVAALEHPGAWGGLVDLDPRASPPQASPIDGEMLVTELLSQETEDQLAFRHGRRHAARLVAAPPQGQAAPVSLSAEASYLVTGGLGGLGLIVAQWLVELGARHLVLTSRRGLPDRQAWCEQQPPEIRARIAAVEALEARGARVTVAAVDVADVEPMTALVSSVEPPLRGVVHAAGVSVMRPLAETDETLLESVLRPKVAGSWLLHRLLHGRPLDLFVLFSSGAAVWGSHSQGAYAAANAFLDGLAHLRRSQSLPALSVAWGLWAEGGMADAEAHARLSDIGVLPMSTSAALSALQRLVETGAAQRTVTRMDWARFAPVYTARGRRNLLSALVAGRDIIAPSPPAAATRNWRGLSVAEARVALHEIVHGAVARVLGFLDPSALDPGMGFNEQGLDSLMAVEIRNLLQAELDVRLSTTLAFDHPTVQRLVEHLLVDVLKLEDRSDTQHVRSLASDEPIAIVGAACRFPGGVEDLESYWQLLAEGVVVSAEVPADRWDAADWYDPDPEIPGRTYVTKGAFLRDLQRLDATFFRISPREAMSLDPQQRLLLEVSWEALESAGIAPDTLRDSPTGVFVGAGPNEYYTQRLRGFTDGAAGLYGGTGNMLSVTAGRLSFFLGLHGPTLAMDTACSSSLVALHLACQSLRLGECDQALVGGVNVLLAPETFVLLSRMRALSPDGRCKTFSADADGYARGEGCAVVVLKRLRDAQRAGDSILALIRGSAVNHDGPSSGLTVPNGPAQQALLRQALSQAGVSPVDVDFVECHGTGTALGDPIEVQALSEVYGPGRSGDRPLVLGAAKANVAHLEAASGLASLLKAVLALRHEQIPAQPELGELNPHLPWNTLPVAVPRKAVPWGRGARPRRAGVSAFGLSGTNVHVVLEEAPEVEPAPAAPARPVELVVLSAKSAAALDAAAARLSAHLSAHPELSLGDVAFSLATTRSPMEHRLAIATTSREALRGALDAAAQQKTPQGAVRGKAVSSRGKLAFLFTGQGAQMPGMGRGLYETWPAFREAFDRCVALFDREIDQPLREVMWAAPGLAQAARLDQTAYAQPALFALEYALAALWRSWGVEPHVLLGHSIGELVAACVAGVFSLEDAVRLVAARGRLMQALPAGGAMVAIAASEAEVAASVAPHAATVSIAAVNGPDAVVIAGAEVQVLALGATFAARGIRTKRLAVSHAFHSPLMDPMLEDFQRVAATIAYRAPDRPVVSNVTGHVAGPEIATPEYWVRHVRSAVRFGDGAKALHAAGAATFVEVGPKPVLLGLLPACLGEADAVLVPSLRADRSECEVVLAALGAWYAWGGALDWKGVFPDGARRVALPMYPWQRERHWMDLTPRSAAPAGIAGRWPLAGVGLCMPGAVLHHVLSIGPRHQPFLGDHLVFGKVVVPGAFHVAVILSIAAERWPERAIELTGVEFLKAIAMEPDQEVELHAVLTPEAAGDGYLFELATLAAPETERRWTTHARGRVQPTDGAPGALPRLEVLEDRAIQPLDFAGFLDRLSAVRIGWGPLWRWLQDGRVGDEASLATLVPTYPNAHDVAPLHPILLDNGFAVSLLSTRSEPEDDGTPPLPFAVERVRWWRAPVGRVRCGGVPRSQAFGVSSFVLVDETGEVVAEVEGFVCRRAPREVFLRQESGASTAALYRLDWPEAPLPDAPAERIEESWVVVAAPGSEMAAALATRLNRCVLAEPKGLEAALAGVSPAGVICLWEAGAHEEAPAAAQRVATEGLSVVQALRDRAVRLWWVTMGAVAVEAGERVQVATAPVWGLGRTVMQERPELSCTLVDLEPEADAARSADVLLRELGRADDETQVAFRSGKRRVARLVKATTPEGLLVPDAESYRLEAGQKGTLDQLRLAPAQRRAPGPGEVEIKVTASGLNFRTVLAVLGMYPGDAGPMGGDCAGVATAVGQGVRHVAVGDAVMTLGTLHRFVTVDARLVVRQPAGLTPAQAATVPVAFLTAWLALHDLGNLRRGERVLIHAAAGGVGMAAVQIARWIGAEVFATASPSKWAAVQAMGVPRTHIASSRTLEFAETFRQVTGGRGVDVVLNALAGEFVDASLSLLSTGGRFLEMGKTDIRDRAAVAAAHPGVRYRVFDILELAPDRTREILERVVEGFAAGHLRALPVHAFAITKAEAAFRFMAQARHQGKVVLLPAPSAAPLAPTGTVLLTGGLGALGLHVARWLAQQGVPHMVLTGRRGLDTPGAAKAVAEIEALGARVTIAASDVADRNALEAVLQAIPAEWPLQGVIHAAGALDDGVLDEQTTDRFSRVLAPKVTGAWNLHELTAGNDLAFFVLFSSMSGLLGSAGQSNYAAANTFLDALAAHRRAEGLAAQSLAWGPWSDGGMAAGLSAALQARLARHGMGALSPAQGTALLGQALARPETQLGAMSLDVRAASQASGAAVPPVWRALVRAEARHTAAGAQGALAARLGALPEARRADEVRKVVQAEIARVLSWSAASAVPVDRPLSDLGLDSLTAVELRNVLGQRVGATLPATLAFDHPTVDALTRWLLDKVLAVAEPSVSSAKSSPQVALDEPIAIIGIGCRFPGGVADPESFWRLLEEGSDAVVEVPHERWDIDAFYDPDPDVRGKMTTRFGGFLSDIDRFDPAFFGISPREATTMDPQQRLLLETSWEAFERAGILPERLMGSDTGVFVGLFYQEYAALAGGIEAFDGYLGTGTTASVASGRISYVLGLKGPSLTVDTACSSSLVAVHLACQALRRGECSVALAGGVALMLTPATFVEFSRLRGLAPDGRCKSFSAAADGVGWSEGCAMLLLKPLRDAQRDGDPILAVIRGTAVNQDGRSNGLTAPNGSSQQEVIRRALEQAGLAPADVSYVECHGTGTTLGDPIEVQALGAVLAQGRPSDRPLVIGSVKSNIGHTQAAAGVAGVIKVALALERGLIPRSLHFDAPNPHIPWSELAVQVAAKPVEWTRNGVPRRAGVSSFGVSGTNAHVVLEEAPAAAFAPAAARSAELFVLSAKSAAALDAQAARLSAHVVAHPELGLGDLAFSLATTRSPMTYRLAVAATSREALSAALDTAAQGQAPPAAARGHASTGSAPKVVFVFPGQGSQWLGMGQKLLSEEPVFRDALSACDRAIQAEAGWSLLAELAADETTSQLGRIDVVQPALFAIEVALSALWRSWGVEPDAVVGHSMGEVAAAHVAGALSLEDAVAIICRRSLLLRRISGQGEMAVVELSLAEAEAALLGYEDRLSVAVSNSPRSTVLAGEPAALAEVLAILAAKGVFCRRVKVDVASHSPQIDPLRDELLAALGELEPRQATVSMRSTVTSTIMAGPELVASYWADNVRQPVRFAEAVQSLMEDGHGLFVEMSPHPILTTSVEEIRRATKREGVAVGSLRRGQDERLSMLEALGALWVHGQAVGWERLFSAGGAGLRRVPLPTYPWQRERYWVDAPTGGAAGGSRFAHAGSHPLLGEMQTLSTQRSTRVWETTLDLKRLPWLGDHRVQGAVVFPGAAYLEMALSSGAEALGDGPLQVSDVVLAEALAFADDTPAAVQVMATEERPGRLQFHVASRVPGHGGAAFRSHARGVLRQIERAEVPARLDLAALRARLQASAPAAATYAALAEMGLEYGPAFQGLVELWRGEGEALGRVRLPEAAGSPAACRLHPALLDACFHVSSAFADRGEATPWVPVEIGSLRWFQRPSGELWCHARSVSHGKPTPDRRSTDFWVVDSTGAIVAEISGLVAQRLAGGVRRREEDDWFMEPAWEPTAVPGSEVMAGRWLLIGSGGGLGAALHSALTEAGHSVVHATGRGTSAAGLQALLTASFDGQAPTSVVHLGSLDERGVLDADAPFDADALEESLVRGCDSVLWTVQAVAGAGFRDPPRLWLVTRGAQAIGAGDVSVAQAPLLGLGRVIALEHAELRCARIDLDPARRDGEVDELLAELLADDAEEEVAFRGGERRVARLVRRLPETDCREKIEPAEGRPFRLEIDGSGVLDDLVLRATERRPPGPGEVEIAVEAAGLNFLDVMRAMGIYPGPGDGPVALGAECSGRIVAMGEGVESLRIGQDVVAVAPFSFGTHVTIDARMLAPRPAALTAAQAAALPVAFMTAWYGLVHLGRLRAGERVLIHSATGGTGLAAVQIARHLGAEIFATAGTPEKRAWLREQGIAHVMDSRSLDFAEQVLAATKGEGVDVVLNSLSGAAIDASLSTLVPDGRFIELGKTDIYADRSLGLAHFRKSLSYSAVDLAGLAVRRPERVAALLAEVVDLLARGALQPLPVEIFPLSRAADAFRKMAQAQHLGKLVLALEDPDVRIRVPGESGVAIRADGAYLVTGGLGGLGLSVAGWLAEQGAGHLVLVGRSGAVSAEQQTAVAALEAHGARVTVARADVADRAQMERILREVTASGMPLRGVVHAAGILDDGLLMQQTPARFRAVMAPKVRGALHLHALTREAPLSFFVLYASGAGLLGSPGQGNYAAANTFLDALAHHRRAQGLPALSIDWGLFADVGLAAGQQNRGARLVTRGTRSLTPDEGLWALERLLDGDRTQAGVMPFDVRQWVEFYPAAASSRRLSRLMTARRVASGRLAGDRDLLERLATAEAGARAGMLQEVVRAQVSQVLRLSEGKLDVDAPLTSLGMDSLMGLELRNRIEAVLGITMPATLLWTYPTVAALSAHLASHVVSTGDGESARPPDTGSVAPTTHEVASLDEDGLFALIDESLARAGKR

SEQ ID NO: 44002 - protein, 2439 aa, Polyangium cellulosum
MATTNAGKLEHALLLMDKLAKKNASLEQERTEPIAIVGIGCRFPGGADTPEAFWELLDSGRDAVQPLDRRWALVGVHPSEEVPRWAGLLTEAVDGFDAAFFGTSPREARSLDPQQRLLLEVTWEGLEDAGIAPQSLDGSRTGVFLGACSSDYSHTVAQQRREEQDAYDITGNTLSVAAGRLSYTLGLQGPCLTVDTACSSSLVAIHLACRSLRARESDLALAGGVNMLLSSKTMIMLGRIQALSPDGHCRTFDASANGFVRGEGCGMVVLKRLSDAQRHGDRIWALIRGSAMNQDGRSTGLMAPNVLAQEALLREALQSARVDAGAIGYVETHGTGTSLGDPIEVEALRAVLGPARADGSRCVLGAVKTNLGHLEGAAGVAGLIKAALALHHELIPRNLHFHTLNPRIRIEGTALALATEPVPWPRAGRPRFAGVSAFGLSGTNVHVVLEEAPATVLAPATPGRSAELLVLSAKSAAALDAQAARLSAHIAAYPEQGLGDVAFSLVSTRSPMEHRLAVAATSREALRSALEVAAQGQTPAGAARGRAASSPGKLAFLFAGQGAQVPGMGRGLWEAWPAFRETFDRCVTLFDRELHQPLCEVMWAEPGSSRSSLLDQTAFTQPALFALEYALAALFRSWGVEPELVAGHSLGELVAACVAGVFSLEDAVRLVVARGRLMQALPAGGAMVSIAAPEADVAAAVAPHAALVSIAAVNGPEQVVIAGAEKFVQQIAAAFAARGARTKPLHVSHAFHSPLMDPMLEAFRRVTESVTYRRPSIALVSNLSGKPCTDEVSAPGYWVRHAREAVRFADGVKALHAAGAGLFVEVGPKPTLLGLVPACLPDARPVLLPASRAGRDEAASALEALGGFWVVGGSVTWSGVFPSGGRRVPLPTYPWQRERYWIEAPVDREADGTGRARAGGHPLLGEVFSVSTHAGLRLWETTLDRKRLPWLGEHRAQGEVVFPGAGYLEMALSSGAEILGDGPIQVTDVVLIETLTFAGDTAVPVQVVTTEERPGRLRFQVASREPGERRAPFRIHARGVLRRIGRVETPARSNLAALRARLHAAVPAAAIYGALAEMGLQYGPALRGLAELWRGEGEALGRVRLPEAAGSATAYQLHPVLLDACVQMIVGAFADRDEATPWAPVEVGSVRLFQRSPGELWCHARVVSDGQQASSRWSADFELMDGTGAVVAEISRLVVERLASGVRRRDADDWFLELDWEPAALGGPKITAGRWLLLGEGGGLGRSLCSALKAAGHVVVHAAGDDTSTAGMRALLANAFDGQAPTAVVHLSSLDGGGQLGPGLGAQGALDAPRSPDVDADALESALMRGCDSVLSLVQALVGMDLRNAPRLWLLTRGAQAAAAGDVSVVQAPLLGLGRTIALEHAELRCISVDLDPAEPEGEADALLAELLADDAEEEVALRGGDRLVARLVHRLPDAQRREKVEPAGDRPFRLEIDEPGALDQLVLRATGRRAPGPGEVEISVEAAGLDSIDIQLALGVAPNDLPGEEIEPLVLGSECAGRIVAVGEGVNGLVVGQPVIALAAGVFATHVTTSATLVLPRPLGLSATEAAAMPLAYLTAWYALDKVAHLQAGERVLIHAEAGGVGLCAVRWAQRVGAEVYATADTPENRAYLESLGVRYVSDSRSGRFVTDVHAWTDGEGVDVVLDSLSGERIDKSLMVLRACGRLVKLGRRDDCADTQPGLPPLLRNFSFSQVDLRGMMLDQPARIRALLDELFGLVAAGAISPLGSGLRVGGSLTPPPVETFPISRAAEAFRRMAQGQHLGKLVLTLDDPEVRIRAPAESSVAVRADGTYLVTGGLGGLGLRVAGWLAERGAGQLVLVGRSGAASAEQRAAVAALEAHGARVTVAKADVADRSQIERVLREVTASGMPLRGVVHAAGLVDDGLLMQQTPARFRTVMGPKVQGALHLHTLTREAPLSFFVLYASAAGLFGSPGQGNYAAANAFLDALSHHRRAQGLPALSIDWGMFTEVGMAVAQENRGARQISRGMRGITPDEGLSALARLLEGDRVQTGVIPITPRQWVEFYPATAASRRLSRLVTTQRAVADRTAGDRDLLEQLASAEPSARAGLLQDVVRVQVSHVLRLPEDKIEVDAPLSSMGMDSLMSLELRNRIEAALGVAAPAALGWTYPTVAAITRWLLDDALVVRLGGGSDTDESTASAGSFVHVLRFRPVVKPRARLFCFHGSGGSPEGFRSWSEKSEWSDLEIVAMWHDRSLASEDAPGKKYVQEAASLIQHYADAPFALVGFSLGVRFVMGTAVELASRSGAPAPLAVFTLGGSLISSSEITPEMETDIIAKLFFRNAAGFVRSTQQVQADARADKVITDTMVAPAPGDSKEPPVKIAVPIVAIAGSDDVIVPPSDVQDLQSRTTERFYMHLLPGDHEFLVDRGREIMHIVDSHLNPLLAARTTSSGPAFEAK

SEQ ID NO: 44003 - protein, 280 aa, Chlamydomonas reinhardtii
MPPQTSFGLQDPHYFLGRAEILGWINDTLGLRLTKVEDTCNGAVACQLLDVLHPGAVPMAKVDYNANSEYQMINNYKVLQDCFNKLKIDKYVEVARLVKGRPLDNMEFMQWFKAYWDQIIPPGSAPAPYDGPSRRALCKTGDMKHSGGGPAPPKAGGIKAGPPAVSAAPRAAPAAAPRVAAGPKGSPGDRDQMDKLNHQLEDLRLKADGYEKEKDFYYSKLRDVELLCQTPTVCELPIMKRVQEILYAATAEDGGRIMRETQVEFAGREYTEEELSAADG

SEQ ID NO: 44004 - protein, 278 aa, Cladonia rangiferina
VEHGAVKVVAVNDPFIEPHYAAYMLKYDSQHGQFKGTIEVEGSDLIVNGQKVKFYTEKDPGAIPWKDTGAYYIVESTGVFTTTEKAKAHLKGGAKKVVISAPSADAPMFVMGVNNETYKSDLEVISNASCTTNCLAPLAKVMHDEFTIIEGLMTTIHSYTATQKTVDGPSAKDWRGGRTAAQNIIPSSTGAAKAVGKVIPSLNGKLTGMSMRVPTSNVSVVDLTCRLEKSVTYDEIKEAMKKASDGELKGIMAYSEDDLVSTDLNGDNHSCIFDAKAG

SEQ ID NO: 44005 - protein, 360 aa, Atriplex nummularia
MAKVKIGINGFGRIGRLVARVILQSDDCELVAINDPFITTDYMTYMFKYDSVHGQWKHHELKVKDEKTLLFGERPVTVFGNRNPEEIPWGQTGADYVVESTGVFTDKDKAAAHLKGGAKKVIISAPSKDAPMFVVGVNEHEYKSELNIVSNASCTTNCLAPLAKVINDKFGIVEGLMTTVHSITATQKTVDGPSAKDWRGGRAASFNIIPSSTGAAKAVGKVLPALNGKLTGMSFRVPTVDVSVVDLTVRLEKEATYEQIKAAIKEESEGKMKGILGYTEDDVVSTDFVGDNRSSIFDAKAGICLNGNFVKLVSWYDNEWGYSSRVVDLIRHMSKTTSKLDSVALACVDAVSTLILSSEC

SEQ ID NO: 44006 - protein, 278 aa, Cladonia subtenuis
VEHGAVKVVAVNDPFIEPHYAAYMLKYDSQHGQFKGTIEVEGSDLIVNGQKVKFYTEKDPGAIPWKDTGAYYIVESTGVFTTTEKAKAHLKGGAKKVVISAPSADAPMFVMGVNNETYKSDLEVISNASCTTNCLAPLAKVMHDEFTIIEGLMTTIHSYTATQKTVDGPSAKDWRGGRTAAQNIIPSSTGAAKAVGKVIPSLNGKLTGMSMRVPTSNVSVVDLTCRLEKSVTYDEIKEAMKKASNGELKGIMAYSEDDLVSTDLNGDNHSCIFDAKAG

SEQ ID NO: 44007 - protein, 209 aa, Gloeobacter violaceus PCC 7421
MVKFLEKVGGYARDVLESAKYIGQGMGVVFDHMRRKPVTVQYPYEKLIPSERFRGRIHFERPKCISCEVCVRVCPINLPVVDYEFNKETKKKELNSYSIDFGVCIFCGNCVEYCPTSCLSMTEEYELSVYDRHELNYDDVALGRLPTRVTDDPVVRPIRELAYLPKGVMDGHLEDPGSRRAGELPEEIVARLRPADHSSGTDANKKEGE

SEQ ID NO: 44008 - protein, 241 aa, Eschscholzia californica
MGRGRVELKRIENKINRQVTFAKRRNGLLKKAYELSVLCDAEVALIIFSNRGKLYEFCSSSSMFKTLERYQKSNYGAPETNVSVRESQEHSSHQEYLKLKARVEALQRSQRNLLGEDLGPLSGKELESLERQLDMSLKQIRSTRTQYMLDQLTDLQRREQMLSDANKTLRRRLEEGTVTCHQWEQNMQYGQQQAHAQGEGFFHPIECEPTLQMGYQQDQITVAAAAGPSMTMNSYMPGPGW

SEQ ID NO: 44009 - protein, 1239 aa, Cochliobolus heterostrophus
MAAETYSGVAAIIRNLARQHDPARDPSFSAQVSANGAKTAANAIALPGPESEEKTQLEQELSALCSRIDFLEHKCSHAAAKSGQFPLTPAQESPDDGVLYTPAGAIRNSSAPPGQARRGSNKERAIWVSNWLAAKETNGGPEEPAAALTEEQLNYLRVHLNQQADQIRNQREHIDNLSREVNKQLTTQSMVFEHGIEDIGALKRELGKHQQANLAFQKALREIGAIVTAVAMGDLSKKVLIHAKEMDPEITLFKRTINTMVDQLQEFASQVTFLAREVGTEGRLGGQANLPGVAGIWAELTDSVNMMANNLTEQVREIAVVTTAVAHGDLSRKIERPARGEILQLQQTINTMVDQLQSFATEVTKVARDVGTEGKLGGQAEIAGVKGMWNELTVNVNAMAQNLTTQVRDIAQVTTAVAQGNLTRKVEAQCKGEILELKNTINRMVDQLQQFAHEVTKIAREVGSEGRLGGQATVHGVEGTWKDLTENVNGMAMNLTTQVREIAEVTTAVARGDLSRKVKAEVQGEILSLKITINTMVDRLNTFAQEVSKVAREVGTDGILGGQAQVDNVEGKWKDLTNNVNTMAQNLTLQVRSISEVTQAIAKGDMSRRVHVDAEGEIRLLKDTVNDMVMRLDEWSLAVKRVARDVGVDGKMGGQADVRDIDGRWKEITTDVNTMAQNLTSQVRAFGDITNAAMEGKFTQITVEASGEMDELKRKINQMVSSLRESIQRNTAAREAAELANKTKSEFLANMSHEIRTPMNGIIGMTQLTLDTDLTHAQREMLTIVHNLAGQLLTIIDDILDISKIEANRMVMEEIPFSMRGTIFNALKSLASRANERKLNLAYDVSYTVPDYVVGDSFRLRQIILNLVGNAIKFTEHGEVKVAISMAQEQDCGPDHYVFQFAVSDTGIGIRGDKLNLIFDTFQQADGSTTRKFGGTGLGLSISKRLVTLMGGRMWVESDFGKGSVFYFTCRVRLGKPEITAIQPQLVAYKQHTVLFVDQGNTGFSDQIIEHLKALDLVPMVVNSVEEVPETTKRADMPYDCVIVDNDKTARELRIAERFKYIPLVMLTPHVCISLRSALENGISSYMTTPCLPIDLGNALIPALDGRAAPLVSDHSKSFQILLAEDNAVNQKLAVRILEKYHHRVTVANNGLEAFEHIQKKRYDCVLMDVQMPVMGGFEATAKIREWERENGIPSTPVIALTAHAMVGDREKCLAAQMDDYLSKPLRQNQLIQTILRCA

SEQ ID NO: 44010 - protein, 396 aa, Triticum aestivum
MYRAAASLASKARQAGSSARQVGSRLAWSRNYAAKDIRFGVEARASMLRGVEELADAVKVTMGPKGRTVIIEQSFGAPKVTKDGVTVAKSIEFKDRVKNVGASLVKQVANATNDTAGDGTTCATVLTKAIFTEGCKSVAAGMNAMDLRRGISMAVDDVVTNLKGMARMISTSEEIAQVGTISANGEREIGELIAKAMEKVGKEGVITIVDGNTLYNELEVVEGMKLDRGYISPYFITNQKTQKCELEDPLILIHDKKVSNMHAVVKVLEMALKKQKPLLIVAEDLESEALGTLIINKLRAGIKVCAVKAPGFGENRKANLQDLAILTGGEVITEELGMNLENFDPEMLGTCKKGTVSKDDTVILDGAGDKKNIEERADQIRSAIEQSTSDYDKEKL

SEQ ID NO: 44011 - protein, 513 aa, Geobacillus kaustophilus HTA426
MEMGNRLFMLLVLPFLLFYAWPVQAAEKEERTWQDEAIYFIMVDRFNNMDPTNDQNVNVNDPKGYFGGDLKGVTAKLDYIKEMGFTAIWLTPIFKNMPGGYHGYWIEDFYQVDPHFGTLGDLKTLVKEAHKRDMKVILDFVANHVGYNHPWLHDPTKKDWFHPKKEIFDWNDQTQLENGWVYGLPDLAQENPEVKTYLIDAAKWWIKETDIDGYRLDTVRHVPKSFWQEFAKEVKSVKQDFFLLGEVWSDDPRYIAEYGQYGIDGFVDYPLYGAVKQSLARRDASLRPLYDVWEYNKTFYDRPYLLGTFLDNHDTVRFTKLSIDNRNNPISRIKLAMTYLFTAPGIPIMYYGTEIAMNGGEDPDNRRLMDFRADPEIIDYLKKIGPLRQQLPSLRRGDFTLLYEKDGMAVWKRQYEDETTVIAINNTGETQHVHLTNDQLPKNKELRGFLLDDLVRGDGDGYDLVLDRETAEVYKLREKTGINVPFIAAIVSVYVLFLLFLYLVKKRAKRMPE

SEQ ID NO: 44012 - protein, 403 aa, Oryza sativa
MAAMPGGPDLAGAGGAVAVAVDAMQVDDPPRASAEEKHGPTIMGGNDPVTGHIISTTIGGKNDEPKRTISYMAERVVGTGSFGVVFQAKCLETGETVAIKKVLQDKRYKNRELQIMRSMDHCNVISLKHCFFSTTSRDELFLNLVMEFVPESLYRVLKHYKDMKQRMPLIYVKLYMYQIFRGLAYIHTVPGVCHRDIKPQNILVDPLTHQVKLCDFGSAKMLIKGEANISYICSRYYRAPELIFGATEYTTSIDIWSAGCVLAELLLGQPLFPGESAVDQLVEIIKVLGTPTREEIRCMNPNYTEFKFPQIKACPWHKIFHKRMPPEAIDLVSRLLQYSPNLRCTALEACAHSFFDELREPHAKLPNGRPFPPLFNFKQELANTHPELVSRLLPEHAQRHSGF

SEQ ID NO: 44013 - protein, 248 aa, Eschscholzia californica
MGRGRVELKRIENKINRQVTFAKRRNGILKKAFELSVLCDAEVALIIFSSRGKLYEFCSSSSILKTLERYQRCSSNASQASRSIKDNDETYQNYLKLKSRVEVLQQNQRNLLGLDLEPLSLKELDQLESQLEVSLKQVTSTKTQFMLDNLSDLQTKEEVLQEANRSLNRKMEENMAEIPQQLRWEAGDGHNIPYNRHIPITDGFYQPLECNPTFQIGSSSMKSFDHLTDPPPTVQNLLGYFPSWSFET

SEQ ID NO: 44014 - protein, 475 aa, Fusobacterium nucleatum subsp. vincentii ATCC 49256
MSSLKKTKIVCTIGPVTESVETLKELLNRGMNVMRLNFSHGDYEEHGIRIKNFRQAMSETGIRGGLLLDTKGPEIRTMTLKDGKDVSIKAGQKFTFTTDQSVVGDNERVAVTYENFAKDLKVGNMVLVDDGLLELDVTEIKGNEVICVARNSGDLGQKKGINLPNVSVNLPALSEKDIEDLKFGCQNNVDFVAASFIRKADDVRQVRKVLKENGGERIQIISKIESQEGLDNFDEILAESDGIMVARGDLGVEIPVEEVPCAQKMMIKKCNRAGKVVITATQMLDSMIKNPRPTRAEANDVANAIFDGTDAIMLSGETAKGKYPLAAVEVMNKIAKKVDATIPAFYVDGVINKHDITSAVAEGSADISGRLNAKLIVVGTESGRAARDMRRYFPKANILAITNNEKTANQLVLSRGVISYVDASPKTLEEFFILAEVIAKKLNLVENNDIIIATCGESVFIQGTTNSIKVIQVKA

SEQ ID NO: 44015 - protein, 326 aa, Rickettsia conorii str. Malish 7
MDIKLGKYKPTKEEYIKSFKDMLLLRRFEEKCGQLYGMGEIGGFCHLYIGQEAVISAIDMVKQKGDSTITSYRDHAHIILAGTEPKYVLAELMGRATGCSKGKGGSMHLFNVPNKFYGGHGIVGAQVPIGTGLAFVEKYNDTHNICFTFLGDGAVNQGQVYEAFNMAALWGLPVVYIIENNEYSMGTSVARSTFMRDLYKKGASFGIKGFQLDGMDFEEMYDGSKQAAEYVRENSFPLILEVKTYRYRGHSMSDPAKYRSKEEVEQYKERDPLVIIRKTILDNKYVTEADLKAIEQSVKEIVKEAVEFSENSPLPDEGELYTQVYC

SEQ ID NO: 44016 - protein, 242 aa, Liriodendron tulipifera
MGRGRVELKRIENKINRQVTFAKRRNGLLKKAYELSVLCDAEVALIIFSNRGKLYEFCSTSSMFKTLERYQKCNYGAPEAAVTTREIQSSHQEYLKLKARVEALQRSQRNLLGEDLGPLNGKELDTLERQLDVSLKQIRSTRTQYMLDQLTDLQRREQMLSEANKALKRRLDEGMQANPHQGWNHNPHAMEYVRQQGPPQGDGFFHPLDCEPTLQIGYQTDQITMSTAPGPSLNNYMPGWLA

SEQ ID NO: 44017 - protein, 350 aa, Arabidopsis thaliana
MATTKLVYILLILFTFTVSPAISTAPEHCDSGFDNPCINKAKALPLKIVAIVAILTTSLIGVTSPLFSRYISFLRPDGNGFMIVKCFSSGIILGTGFMHVLPDSFEMLSSKCLSDNPWHKFPFAGFVAMMSGLVTLAIDSITTSLYTGKNSVGPVPDEEYGIDQEKAIHMVGHNHSHGHGVVLATKDDGQLLRYQVIAMVLEVGILFHSVVIGLSLGATNDSCTIKGLIIALCFHHLFEGIGLGGCILQADFTNVKKFLMAFFFTGTTPCGIFLGIALSSIYRDNSPTALITIGLLNACSAGMLIYMALVDLLATEFMGSMLQGSIKLQIKCFTAALLGCAVMSVVAVWA

SEQ ID NO: 44018 - protein, 1114 aa, Azoarcus sp. EbN1
MDLLPAMAAPDKETDDGLWYKDAVVYELHVKAFFDANDDGVGDFNGLTRKLDYIRDLGVNTIWLLPFYPSPLKDDGYDVADYHGVLPAYGTRADFRQFVREAHRRGLRVITELVVNHTSDQHAWFQAARRAPAGSSKRNYYVWSDDPTRYSGTRIIFTDTETSNWAWDPVAKSYYWHRFFSHQPDLNFENPNVLKAVLRTMRFWLDMGVDGFRLDAIPYLREREGTNNENLPETHDVIREIRKCIDAHYRGRVLLAEANQWPEDVREYFGDGDECHMAYHFPLMPRLFMAVAQEDRFPVVDIMRQTPDIPENCQWAIFLRNHDELTLEMVTDRERDYMWQFFANDPRMRINVGIRRRLAPLLENSRDRVELMSFLLLTMPGSPILYYGDELGMGDNVFLGDRDGVRTPMQWTPDRNAGFSRADPQQLYLPPIMDPIYGFQAINVEAQARNPHSLLNFTRRLIAMRNSSRAFGRGMLRFLEPGNRKVLAYLREYRDQSVLCVANLARTPQAVELDLARFEGRVPVEIVGRVPFPPVGKLPYLLTLAGHGFFAFELSADAPPPNWHEERLPQTELPILVLTEGWRTFFRGHQGGSAVRRAIATRSRDQLQNEVLLPYLQARRWFAAKGETVTRIEVVEEQEWAAGGGNWLLALLEVSLASGSSHLYFLPLGIAWETAGDNPVDRFGAAALARVREKARIGILYDAFIDPVYCRALGQSMGGGGPQPLGGGSLRFTASEHYARFAEALGDEVRQPLQEQTNTGVFFGSRLYLKGYRRLQFGTNPEIEVGYFLGSAPEFSRVAAVAGSVEYIAPDGRVAALAMLQEFVDNQGNAWDYTLNHLDRLFSPDTWPAAAADEPEAEGMDRVYLLLAQTLGRRIGEMHAAFAHGTDPAFVPEPLGDAEVEAWRAQVIGDVERTLSLLEAALPRLDERARDEARQVLAAHHLLVARLAGLDLASPGLVKTRLHGDLHLGQVLIVQNDFVIVDFEGEPARSIDERRCRHSPLRDVAGMLRSFDYAVRTVGYHHLQARPEHAEALARALPEWKEGVVRSFMQAYGEVVAPLPSVPPDAAVAADFVTLFVIEKLLYELRYELDNRPEWVRIPLSALAEIAASPQGSH

SEQ ID NO: 44019 - protein, 328 aa, Geobacillus kaustophilus HTA426
MAISKDHLLWMYETMYKIRCYEDKMAEAYAEGKSPVFNIGAGPVPGEMHLATGQEPAAAGMCVHLKKEDTVTAPHRPHHHAIAKGVDLNRMTAEIFGKATGLGKGKGGHMHLFDPDVKFSCGGIVGAGIPHALGAALAAKKRGTDWVAVAFIGEGAANQGAFHESLNMAALWKLPFIVVIENNQYGISVPKTASTAVPSNDVRAAAYGIKGYYVKDNDPIDMYNVSKEAVERARTGQGPSIIEIETYRYLGHFQGDPEVYRDKNEVTLLRQKDPIIRLRNYLLNECGVTEETIAQLENKATFEVDQAYAFARESDYPKPEEALEDVFV

SEQ ID NO: 44020 - protein, 237 aa, Acorus americanus
MGRGRVELKRIENNINRQVTFAKRRNGLLKKAYELSVLCDAEVALIIFSNRGRLFEFCSSSSMLKTLDRYQKCSFHAAESSAPSRELQSSYQEYLKLKAKVEALQRSQRNLLGEDLGPLNSKELEQLESQLEMSLKQVRSTKTQYMLDQLCDLKRKEQMLQEANKSLKRKLDEYNSENPLQLSWDNGGSNVPYGRQPTHSEDFFQPLSVDPSLHIGYQVNAAATGQNVNGFIPGWMT

SEQ ID NO: 44021 - protein, 295 aa, Oryza sativa (japonica cultivar-group)
MAGKEIYHKMKDKVKDAFSSSGPETGKGKTKLSGKRVKHGYHLVKGKSNHPMEDYLVAEYRQEGEHDLGLFAIFDGHLGHTVPDFLRSHLFDNILKQPEFLSNPQAAIRNAYQLTDAKILESAAELGRGGSTAVTAILISSENSVNLVVANVGDSRAVISKSGVAKQLSVDHEPNKERHSIEKKGGFVSNLPGDVPRVDGQLAVARAFGDRSLKKHLSSEPDVVEEPIDENTDFLILASDGLWKIIHIQVMSNQEAVDEIKDFKDAQAAAKHLTEQAVNRKSKDDISCIVVKFLC

SEQ ID NO: 44022 - protein, 325 aa, Arabidopsis thaliana
AMEGEKMVHVIDLDASEPAQWLALLQAFNSRPEGPPHLRITGVHHQKEVLEQMAHRLIEEAEKLDIPFQFNPVVSRLDCLNVEQLRVKTGEALAVSSVLQLHTFLASDDDLMRKNCALRFQNNPSGVDLQRVLMMSHGSAAEARENDMSNNNGYSPSGDSASSLPLPSSGRTDSFLNAIWGLSPKVMVVTEQDSDHNGSTLMERLLESLYTYAALFDCLETKVPRTSQDRIKVEKMLFGEEIKNIISCEGFERRERHEKLEKWSQRIDLAGFGNVPLSYYAMLQARRLLQGCGFDGYRIKEESGCAVICWQDRPLYSVSAWRCRK

SEQ ID NO: 44023 - protein, 180 aa, Erwinia carotovora subsp. atroseptica SCRI1043
MTLKELVVGFGTQIRSICMVGSNAFKKRETRMYPEEPVNPPPRYRGRIVLTRDPDGEERCVACNLCAVACPVGCISLQKAETKDGRWYPEFFRVNFSRCIFCGFCEEACPTTAIQLTPDFEMGEYKRQDLVYEKEDLLISGPGKYPEYNFYRMAGMAIDGKDKGEAENEAKPIDVKGLLP

SEQ ID NO: 44024 - protein, 411 aa, Saccharophagus degradans 2-40
MENSIFELQYALDTFYFLVCGALVMWMAAGFAMLEAGLVRSKNTTEILTKNVALFAIACIMYFVCGYAIMYGGDYFLTTITGDGVTGAEEPASYAPSADFFFQVVFVATAMSIVSGAVAERMKLWAFLAFAVVMCGVIYPVEGGWTWGGNSVFGMYTLGDLGWSDFAGSGIVHMAGAAAALAGVLVLGARKGKYGPNGQINAIPGANLPLATLGTFILWMGWFGFNGGSVLATASVESANSVAIVFMNTNAAAAGGLVSALILARILFGKADLTMALNGALAGLVAITAEPSTPSALQATLFGGLGGLLVVFSILTLDKLKIDDPVGAISVHGVVGLLGLLLVPVTNDASSFSGQIIGALTIFTWVFGTSLAVWFLIKLVIGVRVSEEEEFEGVDLSECGMEAYPEFTNGK

SEQ ID NO: 44025 - protein, 236 aa, Zea mays
MQIFVKTLTGKTITLEVESSDTIDNVKAKIQDKEGIPPDQQRLIFAGKQLEDGRTLADYNIQKESTLHLVLRLRGGMQIFVKTLTGKTITLEVESSDTIDNVKAKIQDKEGIPPDQQRLIFAGKQLEDGRTLADYNIQKESTLHLVLRLRGGMQIFVKTLTGKTITLEVESSDTIDNVKAKIQDKEGIPPDQQRLIFAGKQLEDGRTLADYNIQKESTLHLVLRLTGGYEDISRRT

SEQ ID NO: 44026 - protein, 634 aa, Rickettsia sibirica 246
MSNSNIDNDLDKIDSLLKKAKSKKIPVTYDDINNALPLNKNPSIRQLEEAILKFSDAGVDILESNEDDEIKLDIGMDEEFKLSTNVDNEPEDEVEEENIGTTDDPVRLYLKDMGGVDLLTREHEVEIAKRIEEGHKTMTASLCRSPIAMRCFIVWYEDLVNEKMLLRDLIDLEANMLHDETPENDEENSSETEGEEHEDNHLSMSRVETQILPNVIERMKKIAFICEELLIEAKKCYEKSFEPKVLQNSKKYNNLELLINEVSEIHFNSKRTEEILGKMYGINRDLINKETAFLKLAEKYGVTRQNFLDEYIGSVINAAWKEKMLKNKKVAWKELMTKESDYIDQMIAELSVIESKTGLLVNDFKKLVNTIQKSERQTLQAKKDMIEANLRLVISIAKKYANRGLQFLDLIQEGNIGLMKAVDKFEYRRGYKFSTYATWWIRQAITRAIADQARTIRIPVHMIETINKILRTSRQMLNELGYEPTATEIANRLSMPLDKVRKVMKIAKEPISLENPVGDDSDGGQLGDFIEDKNAVAPIDAAIQSNLREVTTRVLATLTPREERVLRMRFGIGMNTDHTLEEVGQQFKVTRERIRQIESKALRKLQHPIRSKKLNSFRSGGKRGDGNPSDLLEA

SEQ ID NO: 44027 - protein, 652 aa, Ustilago maydis 521
MDEVVPGLWVGGVRAAMDVSYLSHAGITHIITCMKQQIPVPPRLEDGRTITRAEMKHVRIDDDEKAPILVHFAGCNEWIARQLQEEWIADSDTHSQVGQDDDHVELVAQLVQGRQKRGGRWGSWQTTGAGTVLVHCQAGCSRSVAIVAAYLMHTRRISAVTAIDMIQRRRSDAEPNRGFVAQLELYEQVGFEIDMKYQAVRRFLMSKTDILNGDSMDDMLLSYYPSPYPSPALNASGIKELATIRQEDDDNDAVAAVPKSCHNANQNQSQHQNPNPNSNSNSTALLNENSALAKHKPLLPCRSASCCSTSCHSCTTVNTQRIGDVCSTRLAPSAVDQVDRYAASDRVESLCNMSNASSNSNSNSNSNSNSNSNSNSNSNSNSNSNSNSNSNSSSTTEVKVTANSSGRLPGGVDHVRGHEGVLNRGSLAQPKFSGPKLRCKACRRELAALDHVVIHEPGKGQMAFEHRKRDVGYAGPSVVTNGADASDSSVDRAMQPPRSNPTADVRMASVERESGSAAASTSTVSSRPKIQSGASLALQLAPHLAALRGARPRAVGDCAPESTRAQQGTAHSASTTSLKPGMLIHASCSSYFVEPMEWMSSLSSGQVTGRLDCPSPKCGAKLGSWDWAGIQCACGAWVTPAFSLHRSKVDQV

SEQ ID NO: 44028 - protein, 204 aa, Viburnum suspensum
CDKPVKGRKINWMKAGILESDQILTVSPYYAEELVSGANKGVELDNILRKTGILGIVNGMDVQEWNPLTDKYTGIKYDVTTVMNAKPLIKEALQAEVGLPVDKDIPVIGFIGRLEEQKGSDILVEAISQFIGENVQIIILGTGKKAMEKQLEQLEIEYPDKARGVAKFNVPLAHMIIAGADFILVPSRFEPCGLIQLHAMRYGT

SEQ ID NO: 44029 - protein, 408 aa, Candida glabrata CBS138
MLSIASKRPLALSARSVVGIGRTMATAKEKSQPVPDENENVEISLPETSFEGYMLEPPSLNYSATKGSLLQMFKDMVIIRRMEMACDALYKAKKIRGFCHLSVGQEAIAVGIENAITKRDSVITSYRCHGFTYMRGASVQAVLAELMGKRSGVSFGKGGSMHLFAPGFYGGNGIVGAQVPVGAGLAFAHQYKNEDACSFTLYGDGASNQGQVFESFNMAKLWNLPVVFCCENNKYGMGTAAARSSAMTEYFKRGQYIPGLKVNGMDILAVYQASKFAKEWCLSGKGPLVLEYETYRYGGHSMSDPGTTYRTRDEIQHMRSKNDPIAGLKMHLLELGIATEEEVKAYDKAARKYVDEQVELADKSAPPEAKLSILFEDVYVKGTETPTLRGRIPEDTWDFTKNDFLVRD

SEQ ID NO: 44030 - protein, 204 aa, Viburnum opulus var. americanum
YDKPVKGRKINWMKAGILESDQILTVSPYYAEELVSGEDKGVELDNILRKTGILGIVNGMDVQEWNPLTDKYTGIKYDATTVMNAKPLIKEALQAEVGLPVNKDIPVIGFIGRLEEQKGSDILVEALSQFISKNVQIIVLGTGKKAMEKQLEQLEIEYPDKARGVAKFNVPLAHMIISGADFILVPSRFEPCGLIQLHAMRYGT

SEQ ID NO: 44031 - protein, 403 aa, Ashbya gossypii ATCC 10895
MSSRLNNIKDHVTGQSQATVKGTSPDDVVIVAAYRTAIAKAFKGGFHEMPSDQLLYEFLVKFFEKVDVDKKLIQEVTCGNVLNLGAGANEHRAACLAAGVPFNVPFMAINRQCSSGLTAVNDIANKIKVGQINVGLALGVESMSVNYPRMNFDHTSPDLQENKEARKCYIPMGITNENVAKAFKIPRAVQDEFAADSYKKAEAAVKGGLFQEEILPITNPDGKVINTDEGPRKGVTAESLGKLRPAFIPEKGVTTAGNASQVSDGAAGVLLARRSVAEKLGLPILGKYVAFQAVGVPPEIMGVGPAYAIPAVLEQTGLQVGDVDIFEINEAFAGQALYCVEKLGIDKTKLNPRGGAIALGHPLGCTGARQIATIMRELQPGQIGLTSMCIGSGMGAAAIFVKE

SEQ ID NO: 44032 - protein, 453 aa, Pseudomonas putida KT2440
MQDQSTPERLQRGLKNRHIQLIALGGAIGTGLFLGIAQTIQLAGPSVLLGYAIAGLMAFLIMRQLGEMVVEEPVAGSFSHFAHQYWSEFAGFVSGWNYWVVYVLVGMAELTAVGIYVQYWWPDFPTWATAAIFFVVINLINLTQVKVYGEMEFWFALVKVVAIVSMIGFGAWLLGSGHGGPDASVANLWQYGGFFPNGVTGLVMALAVIMFSFGGLELVGITAAEADNPRESIPKATNQVVYRILIFYIGALAVLLSLYPWQKVVQGGSPFVMIFHELDSDLVATILNIVVLTAALSVYNSCVYANSRMLFGLASQGDAPRQLLKVSRSGVPLTALAVSAFATGLCVLINYLMPGGAFGLLMALAVSALVINWASISITHLKFRKAKLAAGITPFYKSLGHPLTNYLCLAFIVLILVVMYLTPPIRISVMLIPAWIAVLWVAFKLKKARQAKG

SEQ ID NO: 44033 - protein, 204 aa, Viburnum utile
YDKPVKGRKINWMKAGILESDQILTVSPYYAEELVSGEDKGVELDNILRKTGILGIVNGMDVQEWNPLTDKYTGIKYDATTVMNAKPLIKEALQAEVGLPVDKDIPVIGFIGRLEEQKGSDILVEAISQFIGENVQIIVLGTGKKAMEKQLEQLEREYPDKARGVAKFNVPLAHMIIAGADFILVPSRFEPCGLIQLHAMRYGT

SEQ ID NO: 44034 - protein, 499 aa, Hordeum vulgare
MIGTRVLAHSRVDPAIRWGVAARGRVVFAAIRWGAAARGRVVFAAVRWGAAARGTKREAGQETSTSETKKTKRKWGRGFCGMASHEVEEPLTSETKKTKRKWGRGFCGMASHEAEEPLTSETKKKRKNVAASSEPDKKRWFKNKIWKKKKAKNEQLATLVKEISLATKLNSAMHVNINLSMNICPTQTYEEHSGTYLRNLAVIAVKQLDKDGLQGNREFLVEVLMLSLLHHPNLVTLLGYCTECDQKILVYEYMPLGSLQDHLLDLTPKSQPLSWHTRMKIAVDAARGLEYLHEVANPPVVYRDLKASNILLDGNFSAKLADFGLAKLGPVGDKTHVTTRVMGTYGYCAPEYAMSGKLTKMSDIYCFGVVLLELITGRRAIDTTKPTREQILVHWAAPLFKDKKKFTKMADPLLDSKYPLKGLYQALAISSMCLQEEAISRPLISDVVTALTFLADPNYDPPDDIEPLPISVPNYDKGISLREAEISLSGFEEKQVEDS

SEQ ID NO: 44035 - protein, 388 aa, Bacillus cereus G9241
MSSAFIYSDDFRGYSFSPDHPFNQLRVTLTYDLLQKGGFISPSQIISPRMATDEEIAYIHTEEYINAVKRAGEGKLEKSIAMTYGLGTEDTPMFPNMHEASALLVGGTLTAVDAVLSGKVKHALNLGGGLHHGFRGKASGFCIYNDSSIAMKYIQKKYGLRVLYIDTDAHHGDGVQWSFYDDPNICPISLHETGRYLFPGTGAVNERGQGNGYSYSFNVPLDAFTEDESFLDSYRTVVKEVAAYFKPDIILTQNGADAHYYDPLTHLCATMNIYREIPKLAREIANEYCEGRWIAVGGGGYDHWRVVPRAWALIWLEMNNIQNISGYLPPEWIDAWKGQAETELPLTWEDPDNMYKPIPRKPEIEEKNALTVAKSLEIIRNNMTKSLY

SEQ ID NO: 44036 - protein, 536 aa, Glycine max
MRSLVPKGSSRSMTCLCLTHSLTQTHSHNLLATTFSSSLYNSNNRNPLFQLFSGILRPRIRAFSTDFRSAPTPTASSSAFAQSMANFDADSVTYLKQRDAAEIDETLMGPLGFSVDQLMELAGLSVATSISEVYKPSEYSRVLTICGPGNNGGDGLVAARHLHHFGYKPFVCYPKRTPKPLYAGLVTQLEALSIPFFSVEELPSDLSNGFDVVIDAMFGFSFHGSPRPPFDDLIQRLVSLHNNNNNQIGQKRSVIVSVDIPSGWHVEEGDVDGTGIKPDMLVSLTAPKLGAKKFGGPHHFLGGRFVPPAIAEKYKLILPPYPGTSMCVRIGKPPRIGISALRENYISPEFLEEQVEADPFNQFHKWFNDALAAGLKEPNAMSLSTVGKDGKPSSRMVLLKGLDKEGFVWYTNYESRKARELSENPRASLLFYWDGLNRQVRVEGPVQKVSDEESEQYFHSRPRGSQIGAIVSKQSTVVPGRHVLYQKYKELEEKYSDGSLIPKPKNWGGYRLTPQLFEFWQGQKSRLHDRWLLPRL

SEQ ID NO: 44037 - protein, 215 aa, Haemophilus somnus 2336
MQINSVIFDMDGVMIDSEPQWAKAQIAVLAEFGIAITEKECEKFTRGKRIDELSETWIKKFNLSVSNQKLSEAILENGCNAIAQTGIALKGLYELLAFLKSNHIKLAVATSSPPVVIKTIFDRLKLWDYFPIQCSAMDEEYGKPHPAVYLRAVKKLGIEKQECIVIEDSITGLIAAKAANLTTFLVNSNYENEKFSIADERMASLLDVMTKLKLY

SEQ ID NO: 44038 - protein, 471 aa, Arabidopsis thaliana
MVSSQCSVANKNQTGKPFQKHLSLSISPPKSVLGDNLELQFSDVFGPMPEANSEEACDVAYDEPAVVYSRSHSLVGPSLVVSHSLKMNKLTLRETEDSVDLVECVEGESIKENDEFSGNDDTDSEKSPEEVSGVVGIEDFEVLKVVGQGAFGKVYQVRKKDTSEIYAMKVMRKDKIVEKNHAEYMKAERDILTKIDHPFIVQLKYSFQTKYRLYLVLDFINGGHLFFQLYHQGLFREDLARVYTAEIVSVVSHLHEKGIMHRDLKPENILMDVDGHVMLTDFGLAKEFEENTRSNSMCGTTEYMAPEIVRGKGHDKAADWWSVGILLYEMLTGKPPFLGSKGKIQQKIVKDKIKLPQFVFNEAHALLKGLLQKEPERRLGSGPSGAEEIKKHKWFKAINWKKLEAREVQPSFKPAVSGRQCIANFDKCWTDMSVLDSPASSPNSDAKANPFTNFTYVRPPHSFLHRTTSNL

SEQ ID NO: 44039 - protein, 204 aa, Viburnum dentatum
YDKPVKGRKINWMKAGILESDQILTVSPYYAKELVSGEDKGVELDNILRKTGILGIVNGMDVQEWNPLTDKYTGIKYDATTVMNAKPLIKEALQAEVGLEVDKDIPVMGFIGRLEEQKGSDILVEAISQFIGENVQIIILGTGKKVMEKQLEQLEIEYPDKARGVAKFNVPLAHMIIAGADFILVPSRFEPCGLIQLHAMRYGT

SEQ ID NO: 44040 - protein, 278 aa, Cladonia arbuscula
  misc_feature (2)..(2): Xaa can be any naturally occurring amino acid
  unsure (1)..(278): unsure at all Xaa locations
VXHGAVKVVAVNDPFIEPHYAAYMLKYDSQHGQFKGTIEVEGSDLIVNGQKVKFYTEKDPGAIPWKDTGAYYIVESTGVFTTTEKAKAHLKGGAKKVVISAPSADAPMFVMGVNEETYKSDIEVISNASCTTNCLAPLAKVMHDNFTIIEGLMTTIHSYTATQKTVDGPSAKDWRGGRTAAQNIIPSSTGAAKAVGKVIPSLNGKLTGMSMRVPTSNVSVVDLTCRLEKSVTYDEIKEAMKKASDGELKGIMAYSEDDLVSTDLNGDNHSCIFDAKAG

SEQ ID NO: 44041 - protein, 278 aa, Cladonia arbuscula
  misc_feature (274)..(274): Xaa can be any naturally occurring amino acid
  unsure (1)..(278): unsure at all Xaa locations
VEHGAVKVVAVNDPFIEPHYAAYMLKYDSQHGQFKGTIEVEGSDLIVNGQKVKFYTEKDPGAIPWKDTGAYYIVESTGVFTTTEKAKAHLKGGAKKVVISAPSADAPMFVMGVNEETYKSDIEVISNASCTTNCLAPLAKVMHDNFTIIEGLMTTIHSYTATQKTVDGPSAKDWRGGRTAAQNIIPSSTGAAKAVGKVIPSLNGKLTGMSMRVPTSNVSVVDLTCRLEKSVTYDEIKEAMKKASDGELKGIMAYSEDDLVSTDLNGDNHSCIFXAKAG

SEQ ID NO: 44042 - protein, 324 aa, Arabidopsis thaliana
RTSVSTDGDTDHNNLMFDEGHLGIGASDSSDRSKSKMDQKTLRRLAQNREAARKSRLRKKAYVQQLENSRLKLTQLEQELQRARQQGVFISSSGDQAHSTAGDGAMAFDVEYRRWQEDKNRQMKELSSAIDSHATDSELRIIVDGVIAHYEELYRIKGNAAKSDVFHLLSGMWKTPAERCFLWLGGFRSSELLKLIACQLEPLTEQQSLDINNLQQSTQQAEDALSQGMDNLQQSLADTLSSGTLGSSSSGNVASYMGQMAMAMGKLGTLEGFIRQADNLRLQTYQQMVRLLTTRQSARALLAVHNYTLRLRALSSLWLARPRE

SEQ ID NO: 44043 - protein, 563 aa, Cryptococcus neoformans var. neoformans B-3501A
MDPPRASSTRSSSSSMPTSSSASASANKLKKFKLDPMSMLLPHERPGYRGSPAAGRSMPPLHPQFQLQSQPGSPAYFAMLQSQQVQQDSGTQRIGIQTRTTAGVGEQGGKRGEGSGSQIPTQVPVGSQHPAQGVPLSPPASMASTPPSGSWEDSASQWSSMEGVVEGTPAPGQRSQPSRHYAPRMTQNKMRLEDWEIVETLGTGTFGRVLLVRQRPSYRPTPYHPIFPHLYRSRHPFSPSPSTTQKSDDHLPHFAMKVLRKSEIVRLKQVEHINSERIILERVRHPFIVELHATYQDQINVSYIPGGELFSHLRRAGRFSADVTRFYLASIVLAIEYLHSQNIIYRDLKPENLLLDRHGYLRIADFGFAKVVQDRTFTLCGTPEYLAPEIVLSQGHGKAVDWWALGILGFEMLAGYPPFFDDHPLGIYEKILRGDIAFPSHVDPYAKDLIRGFLTADRSKRLGNLRGGAKDVMGHPWFAGVDWRSLERKEIGAPIVPRVASMGDSQNFQRYPPPRPQDLPGVFGQTYNTSNDPCGELFSDFSFPGGGSERGSASGSTEVLSRD

SEQ ID NO: 44044 - protein, 257 aa, Cladonia arbuscula
AYMLKYDSQHGQFKGTIEVEGSDLIVNGQKVKFYTEKDPGAIPWKDTGAYYIVESTGVFTTTEKAKAHLKGGAKKVVISAPSADAPMFVMGVNEETYKSDIEVISNASCTTNCLAPLAKVMHDNFTIIEGLMTTIHSYTATQKTVDGPSAKDWRGGRTAAQNIIPSSTGAAKAVGKVIPSLNGKLTGMSMRVPTSNVSVVDLTCRLEKSVTYDEIKEAMKKASDGELKGIMAYSEDDLVSTDLNGDNHSCIFDAKAG

SEQ ID NO: 44045 - protein, 540 aa, Xanthomonas axonopodis pv. citri str. 306
MNDPGHGELRAPHISESRSLPVEKHRSDIFFAAVETTRMPMTVTDPHLPDNPIVFANRAFLEMTGYAADEVIGNNCRFLQGPETDPASISDVRESIESRREFATEVLNYRKDGSSFWNALFISPVFDDKGNLVYFFGSQLDVSRRRDAEDALRQAQKMEALGQLTGGIAHDFNNLLQVMSGHLEVIQTMASAGGSSAERIAFSAEHAAAAAAKAATLTQQLLAFSRKQKLRGRVVNLNGLVAGMTNMAERALGGGVTLRQSLEEGLWNCQIDTTQAEVALLNVLINARDAMAQAERKEVTVQTQNVEITGHDLAMYHQLAPGRYVSIAVTDTGSGMPPEVVSRVMEPFFTTKEEGQGTGLGLSMVYGFVKQSGGTVRIYSEVGEGSTVRLYFPASSEFENDLQIAKSRAIDKGGNETILVVEDKQDVAVVARMFLENAGYRILSASSGREAMEILEKNPEVDALFTDLIMPGGMNGVMLAREARRMLPKIKILLTTGYADASIQRTDVGGAEFDVVNKPYTQKELLKRIRMLLDGPTGVG

SEQ ID NO: 44046 - protein, 237 aa, Persea americana
MGRGRVELKRIENKINRQVTFAKRRNGLLKKAYELSVLCDAEVALIVFSTRGKLYEFCSTASMLKTLERYQKCNYGAPETTVSSRELQSSHQEYMKLKARVEALQRSQRNLLGEDLGPLTGKELDTLEKQLDVSLKHIRSTRTQYMLDQLGDLQRREHMLSEANKSLRRRLEEGMQENPNHAWDPNGYVRQQAPPQSDGFFHPIECEPTLQIGYQSSQITIAAPGPNVNNYMPGWLA

SEQ ID NO: 44047 - protein, 635 aa, Cochliobolus heterostrophus
MLENPSDESVVRWGNDGDSFVVLENEKFTKHILPKHFKHSNFASFVRQLNKYDFHKVRHNNEENGQSPYGPGVRFAHALCGYCPLGAWEFKHPDFKMNNKDALDNIRRKAPAPRKPNQAAAEDFAPSQQMDMVSGQLMATQAQLHQLEGRYNELNIHHSMLLQEVIGLQKTVVNHEHVMQQIMTFLHGVDATQRRNSKLVFNGGEAQNGNMDPPSNNDDDNPASPLQHASKLLSETNADAMLNPRNLEHMNEITMRMNGTLTTPPPDFARAQMRPTSRGPPSATSTNSMRLDNLDNLVYPVGSSNGIDPMYSEHINNIPYAAPPKAVDQNEPKVPEGKKKSAFPDPGWIRPPQILLVEDDPTCRRIGSKFLYAFHCSIDSALDGLEAVNKMNAGSKYDLVLMDIIMPNLDGVSACHLIRQFDTTPIVAMTSNIRSDDISMYFQHGMNDVLPKPFTKEGLLHMLEKHLVHLKKPSAQGDGSMVAPQPVPIARQLVLKEEESPGKSPQAVSNWNSPNQIPGVSPVGTSVPEDFAQAMRGQPVQHPNSYGVNPMQGNMGYNASSHMQIQSQQQQQQQQQQQQQQQQQQQQQQQAQLQGHRRQVSEISGGDDMNNPAKRQQMYPPQMQQQMGGMQPRPH

SEQ ID NO: 44048 - protein, 404 aa, Thermoanaerobacter tengcongensis MB4
MKSSKNRRKWGLAMDNLKVTVFTNEYPPNIYGGAGVHVDYLTRELSKLMKVDVRCFGDQKFFSENLTVKGYKEWEELKEGLDPRYQKVLGPFSIDLAMVKDPVDSDVLHCHTWYTFMAGFLAKKLYDKPLVVTIHSLEPLRPWKEEQLGNGYKLSSWMEKTGIKAADRIIAVSQGSKEDILKYYDVPEEKIEVIYNGIDLKEYKKIDRNVARKKYGIEGRYILFVGRISRQKGITHLIDAVKYLPKDVKVVLCASSPDTPEVLEEVEQKVKLHDNIIWINKMVEKEDIVELYSNAEVFVCPSIYEPFGIINLEAMACETPVVASATGGIKEVVVHEETGFLVEPGNSEELAKYINILLENRELAKKFGINGRKRVEEMFSWGSIAKKTYEMYRKVVQEYKKAKK

SEQ ID NO: 44049 - protein, 242 aa, Persea americana
MGRGRVELKRIENKINRQVTFAKRRNGLLKKAYELSVLCDAEVALIIFSNRGKLYEFCSSSSMLKTLERYQKCNYGAPETTVSTRETQSSHQEYLKLKARVEALQRSQRNLLGEDLGPLTSKELDTLEKQLDASLKQIRSTRTQYMLDQLADLQRREQMLSEANKNLKRRLEEGMQANPQVWDPNGHPVTYGRQQAPPQSDGFFHPLDTCEPTLHIGYQPADQITIAAPGPSVNNYMPGWLA

SEQ ID NO: 44050 - protein, 183 aa, Fusobacterium nucleatum subsp. vincentii ATCC 49256
MKIYDFSVKNRKDEDISLKSYKGKVLLIVNTATRCGFTPQYDELENLYEKYNKEGFEVLDFPCNQFGNQAPESDEEIHTFCQLNYKVKFDQFAKVEVNGENALPLFQYLKEQKGFSGFDPKHKLTSVLTEMLSKNDPDFAKKSDIKWNFTKFLVDKSGNVVARFEPTTSVKVIEQEIKKLLEK

SEQ ID NO: 44051 - protein, 641 aa, Gossypium hirsutum
MCFRFSNLLTLLLISFAAAEDVGFIYNGFRSANLNLDGIAELTSNGLLKLTNKTVQETGHAFYPHPVDFKNSTNGSVFSFSSTFVFAILPEYPTLSGHGIAFVIAPTKGLPGSLPSQYLGLFNGSNNGNDTNHVVAVELDTIRSTEFDDINDNHVGIDINGLKSPTSSPAGYYEDDSHDFKNLTLISGKQMQVWVEYHGLEKRMDVTLAPFKVPKPDTPLLSLSRDLSSIVNRENVCWFFIVNWFGPHISLCFGLELSRLMVQAEELTLSQLPKLPRLGPKKKPKVLTIGLPLILVSLALAGVSGAAYLVRRKRKFADVVEDWELEYGPHRFKFKDLYIATKGFKDKELLGAGGFGRVYRGVLPSNKLEVAVKRVSHESRQGMREFVAEIVSIGRLRHRNLVQLLGYCRRKDELLLVYDYMPNGSLDKYLHDQPKVTLNWRQRFRVIKGVASGLFYLHGEWDQVVVHRNVKASNVLLDGELNGRLGDFGLARLYDHGTDPQTTHVVGTLGYLAPEHTRTGKATPSTDVFAFGAFLLEVACGRRPIEAKSPTEDVILVDWVYSCWSNGDIMEAKDPNLGSGYEAEEVELVLKLGLLCSHSEPEARPTMRQSPSVFRRGSSISRNVITQSHFQWTNIWTSTRV

SEQ ID NO: 44052 - protein, 323 aa, Pichia stipitis
  misc_feature (58)..(58): Xaa can be any naturally occurring amino acid
  unsure (1)..(323): unsure at all Xaa locations
MSSNSLEQLKATGTVIVTDTGEFDSIAKYTPQDATTNPSLILAAAKKPEYAKVIDVAXEYAKDKGSSKKEKAEIALDRLLIEFGKNILAIVPGRVSTEVDARLSFDKEATIKKALELIALYESQGISKDRILIKIASTWEGIQAARELEAKHGIHCNLTLLFSFVQAVACAEAKVTLISPFVGRILDWYKASTGKTYEGDEDPGVISVRAIYNYYKKYGYKTIVMGASFRNTGEIKALAGCDYLTVAPKLLEELLNSTEPVPQVLDAASASATDVEKVSYVDDEATFRYLFNEDAMATEKLAQGIRAFGKDAVTLLEQLEARF

SEQ ID NO: 44053 - protein, 123 aa, Lactobacillus delbrueckii subsp. lactis
  misc_feature (99)..(99): Xaa can be any naturally occurring amino acid
  misc_feature (109)..(109): Xaa can be any naturally occurring amino acid
  unsure (1)..(123): unsure at all Xaa locations
MKLQTKAMLITYPDSLGHNLKDLSQVMDRYFSKAIGGIHLLPFFPSHGDRGFSPMTYEKVAPEFGTWSDVEKLGEQYYLMFDFMINHISAHSDYYLDLXKNKEKSPWRXLFLSWDKFWPAGRP

SEQ ID NO: 44054 - protein, 585 aa, Staphylococcus epidermidis RP62A
MDNNKKQVIPRSQYRRKRREYFHNVEREERIRREKIEKENQAKREQHQTKVNEERVKDNLRKARIEKLTQEEIHQQRDDKSYKQKTLNQNNQMNKSKDDDNKIGEESLHDVRVSSDTSTLPHQNKSIKDYDDSGNESKQHTKLTSKESMLGVNSNHTEQDSRSTQPYSSKHSYSQPKDKDNDNTQQAQFLKKEDKQRNRAENIKKVNEFKQLVVAFFKEHWPKMLIIIGIIVLLLILNAIFTTVNKNDHTNDSAFNGTAKDETTAMKIAENSVKSVVTVENDLSNDTTVSDNKNESDNEIGSGVVYKKVGDSIYIFTNAHVVGDQEKQKVTYGNDKSVTGKVIGKDKWSDLAVVKAKVADENIKPMTMGDSNNIKLAEPILVIGNPLGTDFKGSVSQGIVSGLNRHVPVDIDKNDNYDALMKAFQIDAPVNPGNSGGAVVDRDGRLIGIVSLKIDMHNVEGMAFAIPINDVRKIAKELEHKGKVNYPNTEIKIKNVGDLDDSERNAINLPAKVNHGVLIGEVKENGLGDKAGLKKGDVIVELDGKKIEDNLRYRQVIYSHYDDQKTITAKIYRNGAEKNIKIKLK

SEQ ID NO: 44055 - protein, 684 aa, Oryza sativa (japonica cultivar-group)
MSDSASMAAAIEARFSGRDLIGRGSFGDVYKGFDKELHKEVAIKVIDLEEAEDDIEDIQKEISVLSQCRCPYITDYYGSYLHQTKLWIVMEYMAGGSVADLLQTGPPLDELSIACILRDLLHAVEYLHSEGKIHRDIKAANILLTESGDVKVADFGVSAQLTKTMSRRKTFVGTPFWMAPEVIQNSDGYNEKADIWSLGITAIEMAKGEPPLADIHPMRVLFMIPRENPPQLDEHFSKPMKEFVSLCLKKNPAERLSAKDLLKHRFVRNARKSPKLLDRIRERPKFPVKSSADATQNGRTHVEEDDGTGTIKVERATRDVVSPSSQGTVRKAAGWNLPDRSEGTGTVRGGLKPSQVTSTKDSRSDASHSPNTPKRTADRENQWRTSWTGSEESISTNPSQRDAQSEYGRLESSTEDNDQSISGSGTVVLRSPRASQVYPAATNHSSKPPSRFSSYEDTSISGTVVRNQIEEPETPRSSRSRLGIQEKSPNASLEDSATNLAEAKAALQAAFKKGNARERHVISKHEKESHEPRISAVNSHDAPSENADMEKGRKPRQIHDGQSAPQASGSVSSPALSSLIIPSLKEATGDKFNGPVVHTFLDSLMHLEKELPGSCEVLIGRMLHRLGSSKESSLQSLQETATSVFAKKSEPPSEPPSNKKMANTPSLAAPTVSPLARFLLTRFV

SEQ ID NO: 44056 - protein, 450 aa, Ralstonia solanacearum
MTPSTTSVFHRDPRKTLPTAVGGESMMLIDAEGKRYLDASGGAAVSCLGHGHPRVVEAICKQVRALAYAHTSFFTTAVAEELAARLAAAAPGDLGHVYFVSGGSEAIEAALKLARQYFVEIGQPQRQYFIARRQSYHGNTLGALAIGGNAWRREPFLPLLVPAHHVSPCFAYRERRDGETDAQYVQRLADELDAKIVELGADRVAAFIAETVVGATAGAVPPVADYFRKIRAVCDRHGVLLILDEVMSGMGRTGHLFACEEDGVVPDLIAIAKGLGGGYQPIGAMIASDRIYDAITRGSGFFQHGHTYIGHATACAAALEVQKVIAEENLLANVLARGEQLRAALRERFAAHPHVGDVRGRGLFVGVELVADRGTKAPLPPARKTHARVRAEAMQRGLMVYPMGGTIDGQRGDHILLAPPFIATAQDIDAIVARLGDAVEAATANALEAA

SEQ ID NO: 44057 - protein, 1390 aa, Oryza sativa
MSAQGNTEMATANTAAPLSPAPHDDPKPTTETVAGASAKPANALTPPTSEEMNHETKDSDSELSDLDLSDDEDDGEPIEPDHYWDGGNIPVFKPTMAQFKSFKKFIEKVDKYGMKSGIVKVIPPEEWRNKLPDLDEKVKRIRIKNPITQEFNGTFGTYTQQNVEKMRSYNLPEWKALTHETQHQPPARRGERRRNQEKVVRGGGGLRGRAAAAAARAASEVGDDETPEKPKEKRKPGRPKRNVVIKDEADSDDSTTKKATPTPADKKKSRGGGRGTGTNKSVSSRRLNNTAESVDHIDDKAFRNFDYRMEGLEEFTPERCAELETHYWKSLAFNQPMYAADMPGTLFNDDEETWNVAKLEYILDVLGTKVPGVNTAYLYLGMWKATFAWHLEDVDLYSINYIHFGAPKQWYNISQEDARRFEKAMRQAWPGDAKNCDQFLRHKTYLISPDVLQKQYNVKVNKLVHYEGEFVITYPYGYHSGYNLGYNCAESVNFATESWLEYGRIARKCNCEADNVWVDVAEIERKMRGEPTPEYYEETDDESELEEEDSKLPTPPASVKGKPASKKRKRETKNEAPKKKKIRIRIKAPSAEPCVMCPNDNPWEPLLPTDNGKKAHRSCALYTPETFITIDDGKEMVRGVANIDRARLDLKCNYCRSKRGACFQCSAKKCARAFHATCALAAGVQIDAGPVPTFDEDGKEYFEEGFDFRCKMHRPKMPKNATSNTLEKDERVMKFAEQLKPKDVVQVQLIGREVFGALVIENRPAEMTVLVDVMLEGERVEVEWKYICVLDPYLSQRPQPSANAVPMPEGMNKQLVSASNRQDGVPSQDEVFTDDAAYKWQEFYNSECPPGGYRPNKDKLPKVKVDLERVDQLYYYLPKKSTEAKCFFTDKVGGTEHAPRSNFLDRVAPPKPTYSYTAPRPSLAAAPPVPRTQPTYSTMQTFQQALDKPYAYKPRVPSHPNTLAIDTQVLANQSNFATQAGQPGPYGRMQSPTPYGQPNSRPGGGSRRGSESEAAPPLRPFSQDHYYSTRVLPAAWQGEYSSFQREVRKSQGAQTLPRPTFPQGSLPPIYNPGPQQQPAHAYAPSGLMGRPAGSPQPTMQAPYGQAASDSMQPVPYTHSPYGAPPTPATTASEASRQPPRPQASQDHSTSQTPAEKQPAVARTPSHSISSGSNSRPMSQQWTPPSQRPGATPTHQQPLYPLQPPRQDEQKPGWPTAVHQTPQEFQTQLTYAPSIASREGAHLRALRDKGYMQPVYQQHVSPYAPYQPPYQPMPQQQHRNSLGQPFVPGPDTHVWTSPRAPTASPISDPNTPGMHQQKQQQQRDHYYGSTLFNPPAWGQNPSRPDLALLTAHGQAQNPNGQGPMLPQMQPAPSNGPSTGPSHGNEAWRYTG

SEQ ID NO: 44058 - protein, 571 aa, Ashbya gossypii ATCC 10895
MCGIFACYRKDDIESFKPTALRLSKRVRHRGPDWSGNVIKNDTILVHERLAIVGLDSGAQPINSPDGNYVLCVNGEIYNHIHLREECSDYEFTSLSDCEPIIPLYLKYDVETPQHLDGMFAWCLYDVQRDRIVAARDPIGVTTLYMGKSSSSPRTRYFASELKCLVDECDEITAFPPGHVYDSDTDKLTRYFKPDWIDETRIPSQPVDYKAVRTTLEKAVRKRLMAEVPYGVLLSGGLDSSLIASIAARETERANREAGDVYADGKHLAGMDDRGLLHTGGWSRLHSFAIGLPNAPDLQAARKVAKFIGSIHHEHTFTLQEGLDALDDVIHHLETYDVTTIRASTPMFLLSRKIKAQGVKMVLSGEGSDEIFGGYLYFAQAPSPAEFHTETVKRVNNLHLADCLRANKSTMAWGLEARVPFLDREFLQLCMNIDPAEKMIAPQKGRIEKYILRKAFDTSDEPGVDPYLPEEILWRQKEQFSDGVGYSWIDGLKDAAERAISDEQFANPNPAWGDDIPTTKEAFWYRLKFDALFPQPTAAATVMRWVPKADWGCAEDPSGRYAKIHDQHISS

SEQ ID NO: 44059 - protein, 273 aa, Zea mays
MGRRACCAKEGVKRGAWTSKEDDALAAYVKAHGEGKWREVPQKAGLRRCGKSCRLRWLNYLRPNIRRGNISYDEEDLIIRLHRLLGNRWSLIAGRLPGRTDNEIKNYWNSTLGRRAGAGAGAGGSWVVVAPDTGSHATPAATSGACETGQNSAAHRADPDSAGTTTTSAAAVWAPKAVRCTGGLFFFHRDTTPAHAGETATPMAGGGGGGGGEAGSSDDCSSAASVSLRVGSHDEPCFSGDGDGDWMDDVRALASFLESDEDWLRCQTAGQLA

SEQ ID NO: 44060 - protein, 553 aa, Azospirillum brasilense
MAWLGHRRLSINDLSPAGNQPLLHAGGGTGDVLALVCNGEIYNAPTLRTELEALGHAFASRSDNEVILHGYRAWGDAVVDRLTGMFAFVLWDDRRRRLLAARDRVGIKPLYWAEPGDGGIAFASEARPLATLPGIGPAVELRALGHALTLGYVPAPLSAWRGIHKLEPGRLLVWEPGQGAALRRYWEAPRSLAAAGDGDAGWAGLFDRAVADHLLSDVPAGLFLSGGLDSAAVATAAVGAGLRPAAYTLCYPGRPDAEAEVAAAVARHLGLEHRLVPAPTDGLADRLAGVAALFDEPQGYSALVTMAGIARAAAAEHKVVLSGDGGDEVLGGYAWYAGLDPDGPPPGAEAGDAHAAFAARSVLHRHAMRLFPRFLPDEVEALFAPAGLRFGEEEMLAPLEAAFEPGLPLRRALQRVDLATFCADSILAKVDRASMAYGLEVRVPFLDHRLVEWGLSRPPAAEEAVHGKPVLRRYLAGRVPERVFGHPKTGFSLKDTGPFDWNAALDRVAAGPLVRHGLLDPGFRRIVEARSPYRQARIWALLALSLWAGSWME

SEQ ID NO: 44061 - protein, 579 aa, Bacillus anthracis str. A2012
  misc_feature (449)..(449): Xaa can be any naturally occurring amino acid
  unsure (1)..(579): unsure at all Xaa locations
MQFVKPYRWLIAITIMIGLVKFGIPLIMPWLLKYIIDDVIQGAGSLQDKTSQLVTAIGIAFFIFAVLRPPIEYYRQYFAQRIANTILYDLRKHIFGHLQKLSLRYYSNTKTGEIISRVIHDVEQTKDFVITGLMNVWLDTATIAIAIIVMFSMNIKLTFVALLILPIYVVAVKYFFGRLRKLTKERSQALATMQGYLHERIQGMQVTRSFALEEYEGKQFEKRNNEFLTKALTHTSWTARTFSAVNTLTDLGPLLVIGFAAYEVIQGQLTLGTMVAFVGYMDSLYSPLRRLVNSSTTLTQSFASMDRVFELLDEKYDIVNVPSAVQTKKLNGEVIFDNVSFRYNADEKEILHNLSLTMLPGEKVALVGASGGGKSSLASLIPRFYDVSSGAVYVDGIDVRKYDMRNLRSHIGIVLQDNLLFSDTIGANILYGNPKATEEEVIAAAKAAXIHDFIIELPDGYDTVVGERGVKLSGGQRQRVAIARVFLKNPSLLILDEATPALDLENERYIQEALQTLAADRTTIIIAHRLATITHVDTIIYIEDGEIKETGSHEELMKKRGYYYNLYQLQHITETAPLA

SEQ ID NO: 44062 - protein, 404 aa, Erwinia carotovora subsp. atroseptica SCRI1043
MSPIEKSKKLENVCYDIRGPVLKEAKRLEEEGNKVLKLNIGNPAPFGFEAPDEILVDVIRNLPTAQGYCDSKGLYSARKAIVQHYQARDMRDMTVEDVYIGNGVSELIVQSMQALLNPGDEMLVPAPDYPLWTAAVSLSNGNAVHYLCDESSDWFPDLDDIRKKITSNTRGIVIINPNNPTGAVYSKELLLDIVAIAREHSLIIFADEIYDKILYDDAQHHSIAALAPDLLTVTFNGLSKTYRVAGFRQGWMVLNGPKKHAKGYIEGLEMLASMRLCANVPMQHAIQTALGGYQSISEFIQPGGRLYEQRNRSWELINQIPGVSCVKPRGALYMFPRIDAKRFNIHDDQKLVLDLLLQEKVLLVQGTAFNWPYPDHVRIVTLPRIDELDMAIHKLGRFLGHYHQ

SEQ ID NO: 44063 - protein, 493 aa, Prochlorococcus marinus str. NATL2A
MTKFQSIFWHRRDLRFGDNIGLFEASKNSKSLIGVYVLDPKLLDLNRTTSEAKNWFLGESLIELQKNWEIRGSRLLILNGDPIELISKLAELVHAECIYWNENIEPYEINRDKQIAEKLSKEKRKVYTFLDQLIVNPSNIKTNNDEPYKVYGPFYRKWIDLINITKSSENNLIQTSETAKQLTGLNERELSSIKNSDLNYCITNKSKSIYELLSLNRFNKTNLCPCKPGESESIKQLNSFIHSGVINSYNKARDIPSLENTSHLSAALSLGTISCRVVWNGAQVSKNATDDEYKINSIDTWIKELAWREFYQNALINFPELEKGPYREKWLDFPWQNRPDWFEAWGDGLTGIPIIDAAMRQLKCSGWMHNRCRMIVASFLVKDLLIDWRLGELFFMKSLVDGDLAANNGGWQWSASSGMDPKPMRIFNPFRQASKFDEDGEYIRKWIPELSHISTPNLLSGEISSAERNSYPKPIISHKNQTSIFKELYSNIK

SEQ ID NO: 44064 - protein, 355 aa, Verticillium dahliae
MSRSNAPNPSGSRKISFNVSEQYDIQDVVGEGAYGVVCSAIHKPSGQKVAIKKITPFDHSMFCLRTLREMKLLRYFNHENIISILDIQKPRGYDTFNEVYLIQELMETDMHRVIRTQDLSDDHCQYFIYQTLRALKAMHSANVLHRDLKPSNLLLNANCDLKVCDFGLARSAASQEDNSGFMTEYVATRWYRAPEIMLTFKEYTKAIDVWSVGCILAEMLSGKPLFPGKDYHHQLTLILDVLGTPTMEDYYGIKCRRAREYIRSLPFKKKVPFRTLFPKTSDLALDLLEKLLAFNPVKRITVEEALKHPYLEPYHDPDDEPTAPPIPEEFFDFDKHKDTLSKEQLKQLIYQEIMR

SEQ ID NO: 44065 - protein, 678 aa, Bordetella parapertussis 12822
MSNPTAPKLALADAIRVLAMDAVQKANSGHPGAPMGMAEIAQALWLGNLRHNPADPAWANRDRFVLSNGHGSMLIYALLHLTGYDLPLEELKNFRQLHSRTPGHPEVGITPGVETTTGPLGQGLANAVGMALAEALLAAEFNRAGHTVVDHHTYVFLGDGCLMEGISHEACSLAGTLKLSKLVALYDDNGISIDGHVEHWFADDTATRFEGYGWNVIRGVDGHDVAAVDAAIKQARAQSEKPTLIVCRTVIGKGSPNMAGTHNVHGAPLGNDEIAATRAALGWSAGPFEVPQDIYAAWDSRPAGALAQAAWEDKFQAYAAQYPAEAAEFTRRMKGELPEGFAARFEAFLQATVAKGETVATRKASQFAIAELAGLLPEMLGGSADLTGSNFTDWKGVAPLRAGHHGVHFGRHINYGVREFGMAAIMNGIALHGGYLPFGGTFLTFSDYSRNAIRMAALMKQRVVHVFTHDSIGLGEDGPTHQSIEHAASLRLIPNLSVWRPCDTVETAAAWGAAVTRPASIGMDVHDGGPTALLLSRQNLPFVARDEATQKAIVRGGYVLRDAHDARAAIIATGSEVAIALAAQELLAADGIAVRVVSMPSTDVFDRQDAEWKREVLPAGMPRVAVEAGVTAFWHKYVGLEGAVVGIDRYGESAPDGALFKFFGLTAEKVAEAVKQVL

SEQ ID NO: 44066 - protein, 456 aa, Desulfovibrio vulgaris subsp. vulgaris str. Hildenborough
MTYDVVILGAGPGGSRAALEAAAAGLRVAIVDKGSFGGTCLNWGCIPTKLLLGGTAAHPLLEVQKKLKTAQGTIDFDLTALQARKTRFINGTRQALEKQLRQAGIEVITGTARLAGPGHVEVVDGEGTRELAARNVIVATGSVPASFPGLAPDGEAVLDSTALLDVTEVPDSLIIVGGGAIGLEMGDFFSRLGTAITIVEGLDRLAPTEDPEIGQTLGKLLKREGWAIHTGRRVASLSTVEGKAQLRFEDGTELVADKALMAVGRRPATAGLGLETAGATLLGAGWVETNDHLLAAPGLYAIGDVNGRTLLAHAADHQARFVISHIASGSASSASGYPAPVMPSCIYGHTEVMRAGATVAELVASGHDVHVSTSQLIANPIAQAYGTTGGFIRVLWVEGQVRGISAVGHGVSHLVTLATVIVSQRWRWEDVHGIIFAHPTLDEALEAALLAPSQKV

SEQ ID NO: 44067 - protein, 434 aa, Bacillus anthracis str. A2012
MVVKFTKSEALHKEALEHIVGGVNSPSRSFKAVGGGAPIAMERGKGAYFWDVDGNKYIDYLAAYGPIITGHAHPHITKAITTAAENGVLYGTPTALEVKFAKMLKEAMPALDKVRFVNSGTEAVMTTIRVARAYTGRTKIMKFAGCYHGHSDLVLVAAGSGPSTLGTPDSAGVPQSIAQEVITVPFNNVETLKEALDKWGHEVAAILVEPIVGNFGIVEPKPGFLEKVNELVHEAGALVIYDEVITAFRFMYGGAQDLLGVTPDLTALGKVIGGGLPIGAYGGKKEIMEQVAPLGPAYQAGTMAGNPASMASGIACLEVLQQEGLYEKLDELGAMLEKGILEQAAKHNIDITLNRLKGALTVYFTTNTIEDYDAAQDTDGEMFGKFFKLMLQEGVNLAPSKYEAWFLTTEHTKEDIEYTIEAVGRAFAALADNK

SEQ ID NO: 44068 - protein, 567 aa, Kluyveromyces lactis NRRL Y-1140
MLHKEKDIEESKRFFHHSTSGMEGNPDGFGLLPDGSKLESVKDTRIDKFAVPKKGLHSEHVYNLVKNELKLDGNPVLNLASFVNTFTDQFAQKLIDENLNKNLADNDEYPQLIHMNERCISMLAKLWQSDTDRDTPLGCATTGSSEAIMLGGLAMKRQWEKKMRAANKSTEKPNIIMSSACQVALEKFARYFDVECRLVPVDTEHGYHLNPNKLWDYVNENTIGIFVILGTTYTGHLENIEQVAEVLEHIEAQHPDWSNKDIPIHVDGASGGFIVPFAFTEAQMESYGLGRWGFNHPRVVSINTSGHKFGLTTPGLGWIVWKNDEYLLPELRFKLKYLGGIEETFNLNFSRPGFQVIHQYYNLLTLGQQGYYEKFNQSIFVARAFAWKLLQDPDMRDVFEVVSCLHENLDNSSIAESLDDYWKNPHDYKPGIPLCAFKLSEKFKSEHPEIPQSIISTLLRQKGWIIPNYPLPESTDGSDKKEVLRVVFRIEMKLDMALLLVQDVFEVVQKLLKSYEYLNIRTENDNHAVFKVLSTLSNADVSELEHELTDSQKEKEQHIKKNYRGTC

SEQ ID NO: 44069 - protein, 665 aa, Arabidopsis thaliana
MATGRYIVEVEKGKQGVDGGSPSVGPVYRSIYAKDGFPEPPDDLVSAWDIFRLSVEKSPNNPMLGRREIVDGKAGKYVWQTYKEVHNVVIKLGNSIRTIGVGKGDKCGIYGANSPEWIISMEACNAHGLYCVPLYDTLGAGAIEFIICHAEVSLAFAEENKISELLKTAPKSTKYLKYIVSFGEVTNNQRVEAERHRLTIYSWDQFLKLGEGKHYELPEKRRSDVCTIMYTSGTTGDPKGVLLTNESIIHLLEGVKKLLKTIDEELTSKDVYLSYLPLAHIFDRVIEELCIYEAASIGFWRGDVKILIEDIAALKPTVFCAVPRVLERIYTGLQQKLSDGGFVKKKLFNFAFKYKHKNMEKGQPHEQASPIADKIVFKKVKEGLGGNVRLILSGAAPLAAHIESFLRVVACAHVLQGYGLTESCGGTFVSIPNELSMLGTVGPPVPNVDIRLESVPEMGYDALASNPRGEICIRGKTLFSGYYKREDLTQEVFIDGWLHTGDVGEWQPDGAMKIIDRKKNIFKLSQGEYVAVENLENIYSHVAAIESIWVYGNSYESYLVAVVCPSKIQIEHWAKEHKVSGDFESICRNQKTKEFVLGEFNRVAKDKKLKGFELIKGVHLDTVPFDMERDLITPSYKMKRPQLLKYYQKEIDEMYKKNREVQLRV

SEQ ID NO: 44070 - protein, 204 aa, Viburnum hartwegii
YDKPVKGRKVNWMKTGILESDQILTVSPYYAKELVSGEDKGVELDNILRKTCILGIVNGMDVQEWNPLTDKYTGIKYDATTVMNAKPLIKEALQAEVGLPEDKDIPVIGFIGRLEEQKGSDILVEAISQFIGENVQIIVLGTGKKAMEKQLEQLEIEYPDKARGVAKFNVPLAHMIIVGADFILVPSRFEPCGLIQLHAMHYET

SEQ ID NO: 44071 - protein, 336 aa, Pyrococcus furiosus DSM 3638
MKPKVFITRAIPENGINMLEEEFEVEVWEEEREIPREKLLEKVKDVDALVTMLSERIDQEVFENAPRLRIVANYAVGYDNIDVEEATRRGIYVTNTPDVLTNATADHAFALLLATARHVVKGDKFVRSGEWKRKGIAWHPKWFLGYELYGKTIGIVGFGRIGQAIARRAKGFNMRILYYSRTRKSQAEKELGAEYRPLEEVLKESDFVILAVPLTKETMYMINEERLKLMKPTAILVNIARGKVVDTKALIKALKEGWIAGAGLDVFEEEPYYNEELFSLDNVVLTPHIGSATFEAREAMAELVARNLIAFKRGEIPPTLVNKEVIKIRKPGFNEQ

SEQ ID NO: 44072 - protein, 204 aa, Viburnum jucundum
YDKPVKGRKVNWMKAGILESDQILTVSPYYAKELVSGEDKGVELDNILRKTGILGIVNGMDVQEWNPLTDKYTGIKYDATTVMNAKPLIKEALQAEVGLPVDKDIPVIGFIGRLEEHKGSDILVEAISQFIGENVQIIVLGTGKKAMEKQLEQLEIEYPDKARGVAKFNVPLAHMIIVGADFILVPSRFEPCGLIQLHAMRYET

SEQ ID NO: 44073 - protein, 204 aa, Viburnum stenocalyx
YDKPVKGRKVNWMKAGILESDQILTVSPYYAKELVSGEDKGVELDNILRKTGILGIVNGMDVQEWNPLTDKYTGIKYDATTVMNAKPLIKVALQAEVGLPVDKDIPVMSFIGRLEEQKGSDILVEAISQFIGENVQIIILGTGKKAMEKQLEQLEIEYPDKARGVTKFNVPLAHMIIAGADFILVPSRFEPCGLIQLHVMRYGT

SEQ ID NO: 44074 - protein, 283 aa, Pseudomonas putida KT2440
MKAAVIQMVSQDDVQTNLQRAGALLEQAALGGARLAVLPENFAAMGRKDAAAIGRAEALGEGPILPWLKRTARDLKLWIVAGTLPLPPFGHPDAKAHACSLLVDEHGEVAARYDKLHLFDVDVADNRGRYRESDDYAQGAQVVVADTPVGRLGLSVCYDLRFPELYSALRAAGAELITAPAAFTAVTGAAHWEVLVRARAIETQCYLLAAAQGGAHPGPRETHGHAAIVDPWGRILAEQAQGEAVLLAERDIEEQASIRTRMPVVSHRRFFSQGALRPAHTSE

SEQ ID NO: 44075 - protein, 574 aa, Candida glabrata CBS138
MLRSTTSKSLSKMPHAIPPQCRRSHSSSIFQTKKRLAHLESDRPYLTHLPRSMNSSPNLRFHSSASSSSLRSSFLNTEIHHHSHNNLPFLPAEQATLKDVNECVLNAKYAVRGAIPMRAEELKTQLMENPHSLPFNDIINANIGNPQQLKQKPLSFYRQVLSLLQYPELIPTLENNPQTMIKQDAIDRAKRLLDDIGGSVGAYSSSQGVLGIRKTVADFITNRDDGIIAYPEDIFLTAGASSAVDYLLSIFCRGEETGVLIPIPQYPLYTATLALQNSHALPYYLNEETGWSTDPEELESIILDSIENNIKPSVLVVINPGNPTGAVLSEEAIEQIFTLAAKYGIIVIADEVYQENVFEDVKFHSMKKVLRQLQMKQPGLYDNVQLASLHSTSKGVSGECGQRGGYMELVGFTHDIRQVVLKLASISLCPVVTGQALVDLMVCPPQKGEESYEQDQEERRNIHKELHKRATLLHDAFVKLDGISCQKPQGAMYLFPKLELPYKAIQEALHQDMSPDEFYCKSLLEKTGICTVPGSGFGQEPGTYHLRTTFLAPGTKWIEDWVDFHQEFYNKFKN

SEQ ID NO: 44076 - protein, 447 aa, Solanum tuberosum
SGPTSGEVTSSFVRKIEKTIDMPLDSDVFRVPPGYNAPQQVHITQGDHVGKAVIVSWVTMDEPGSSTVVYWSEKSKLKNKANGKVTTYKFYNYTSGYIHHCNIKNLKFDTKYYYKIGIGHVARTFWFTTPPEAGPDVPYTFGLIGDLGQSFDSNKTLTHYELNPIKGQAVSFVGDISYADNYPNHDKKRWDTWGRFAERSTAYQPWIWTAGNHEIDFAPEIGETKPFKPYTHRYHVPFRASDSTSPLWYSIKRASAYIIVLSSYSAYGKYTPQYKWLEEELPKVNRTETPWLIVLVHSPWYNSYNYHYMEGETMRVMYEPWFVQYKVNMVFAGHVHAYERTERISNVAYNVVNGECSPIKDQSAPIYVTIGDGGNLEGLATNMTEPQPAYSAFREASFGHATLAIKNRTHAYYSWHRNQDGYAVEADKIWVNNRVWHPVDESTAAKS

SEQ ID NO: 44077 - protein, 568 aa, Crocosphaera watsonii WH 8501
MSSLIKIPKSSSGANEMSSNPMTNPALWQALEAELVYIQDRSGKYLSFYGDLGEELAIEPEDIIGFFPEQSLKPASPDAYDERIKRVLERKIPEQCYCQFEYKGQTFALELVISPILPKQKQATTVLVMGHPLQDNDLSLINNSALPTHPDPYQKLLTKIARKIRRTLNLETIWQQTVDSLGEALQVSRCLMIAIGPEQGYLDVKAEYCLPYCPSELGSRLIPQEEPLWQQALNQREPLIFEQLLENSSQVQSNLIVSTFYQNQRNGLICLQQCDRSRYWSPAEIELIQELADQVGTAIAHATLYQELEQATLAAEEASRLKSDFLASTTHELRTPLNGIIGFLKLILDGMADDAEEQQEFLEEAHKSALHLLNLINDILDIAKIEAGKMDLELGAVELAELFQAVDNFTLPQAQRKHLEFRSKLPSTLTPIVVYGNYQRLLQVMLNLVSNAIKFTHEGSIVVNAEIVKKKIHHQNQEFPGHVKVSVTDTGIGVSLDKQAKLFEKFVQVDGSHTKAYGGTGLGLAISQKLVEAMGGQVEFYSMGEGLGSTVTFTVPLEQMPVIKTAKA

SEQ ID NO: 44078 - protein, 438 aa, Streptococcus pneumoniae R6
MLTYDLIVIGFGKAGKTLAGKLASAGKKVALVERSKAMYGGTCINIGCIPTKTLLVAAEKDLSFEEVIATKNTITGRLNGKNYTTVAGTGVDIFDAEAHFLSNKVIEIQAGDEKQELTAETIVINTGAVSNVLPIPGLATSKNVFDSTGIQSLDKLPEKLGVLGGGNIGLEFAGLYNKLGSKVTVLDTLDTFLPRAEPSIAALAKQYLEEDGIELLQNIHTTEIKNDGDQVLVVTEDETYRFDALLYATGRKPNVEPLQLENTDIELTERGAIKVDKHCQTNVPGVFAVGDVNGGLQFTYISLDDFRVVYSYLAGDGSYTLEDRLNVPNTMFITPALSQVGLTESQAADLKLPYAVKEIPVAAMPRGHVNGDLRGAFKAVVNTETKEILGASIFSEGSQEIINIITVAMDNKIPYTYFTKQIFTHPTLAENLNDLFAI

SEQ ID NO: 44079 - protein, 1113 aa, Pseudomonas fluorescens PfO-1
MAKKPKAATFIKDPLWYKDAVIYQVHVKSFFDSNNDGIGDFPGLIAKLDYIADLGVNTIWLLPFYPSPRRDDGYDIAEYRGVHSDYGTMADAKRFIAEAHKRGLRVITELVINHTSDQHPWFQRARKAKPGSAARDFYVWSDDDQKYDGTRIIFLDTEKSNWTWDPVAGQYFWHRFYSHQPDLNFDNPQVMKAVLSVMRYWLDMGIDGLRLDAIPYLIERDGTNNENLPETHDVLKQIRAEIDANYPDRMLLAEANQWPEDTQLYFGDTDAEGVNGDECHMAFHFPLMPRMYMALAQEDRFPITDILRQTPEIPANCQWAIFLRNHDELTLEMVTDKERDYLWNYYAADRRARINLGIRRRLAPLMERDRRRIELLNSLLLSMPGTPTLYYGDEIGMGDNIYLGDRDGVRTPMQWSIDRNGGFSRADPASLVLPPIMDPQYGYQSVNVETQAGDPHSLLNWTRRLLAVRKQSKAFGRGTLKMLSPANRRVLAYTREYTGPDGKHEIILCVANVSRSAQAVELDLSAYVGMVPVEMLGGNAFPPIGQLSFLLTLPPYGFYWFGLAAENQMPSWHVEPAQSLPDFTTLVLKKRMEELLEAPSRATLEQAILPSWLQNRRWFAGKDADIEQVKLAYGVRFGDAQHPVLFSEIEVQSGGQTSRYQLPFGFISEDQVGPALPQQLALARVRRVRQVGLITDAFSLEAFIRAVLQGMQGGTVLESIEGEIRFEATPQLEKLGLGAESEVRYLSAEQSNSSVVIGNSLVLKLIRKVASGVHPELEMSAYLTAAGFANISPLLGSVIRRDGKGEDNLLMIAQGYLSNQGDAWEWTQNNLERALRDELADAVSEQAQHYNALGELKDFAGMLGQRLGEMHQVLAAPSDNQDFAPQVSSAKDAQATGKDVAAQVEHALKLLKQHQGELDAADQKLVGRLLDHKKAILAHVQELAKQSAGGLRIRVHGDLHLGQVLVIKGDAYLIDFEGEPARPLAERRGKHSPYKDVSGVLRSFDYAAAMALNVHNVDNSPEAEAARRRVTERYLREAREAFLQAYRQAAASLDHAWQDPEGADAALALFGLEKAAYEVAYEAENRPTWLPVPLHGLYGLLTGLKPFSDLGGE

SEQ ID NO: 44080 - protein, 204 aa, Viburnum triphyllum
YDKPVKGRKVNWMKTGILESDQILTVSPYYAKELVSGEDKGVELDNILRKTCILGIVNGMDVQEWNPLTDKYTGIKYDATTVMNAKPLIKEALQAEVGLPVDKDIPVIGFIGRLEEQKGSDILVEAISHFTGENVQIIVLGTGKKAMEKQLEQLEIEYPDKARGVAKFNVPLAHMIIVGADFILVPSRFEPCGLIQLHAMRYET

SEQ ID NO: 44081 - protein, 391 aa, Populus tremuloides
MSWWWSGAIGAAKKKTEDDEASRGYPSVALILGVTGIVGNSLAEILPLSDTPGGPWKVYGVARRPRPNWNEDHPVEYIQCDISNTAETQSKLSKLTDVTHVFYVTWASKSTEEENCEINGLMFRNVLQAVIPNAANLRHVCLQTGGKQYVGPFALLGKIEAHDPPFTEDLPRLNDFPNFYYTLEDVMYEEVAKKEGVTWSVHRPDIIFGFSPHSLMNLIVTISVYAAICKHEGAPLIFPGTKEAWNGYAIASDANLIAEHEIWACVEPKAKNEAFNINNGDLFKWKHMWTVLAQEFGIEKYGFVEGESSVTFAEKMKDKGPVWEEIVKKNQLLSNKLEQVGGWWFGDLIFSGSGYVASMNKAKEHGFLGFRNSKKSFVSWIHKMRAYKVVP

SEQ ID NO: 44082 - protein, 342 aa, Candidatus Phytoplasma solani
MNTLEKIITLAKQTGFIFAGSEIYGGLANSRDYGSLGSLLKNNIKKAWLQKFVQEQNHNILLDSSILLNSSVWRSSSHLDSFSDPLTENKDNNKRFRADKLIEAHEPGIDITTWSYEQMHQYLVKNKVLGTSNWTAIKPFNMLFQTHQGVVLKNSKPVYLRPETAQGIFIQFKNILKTTRKKIPFGVCQIGKVFRNEVTPGNFIFRTCEFEQMELEFFCQPGTQNKWFEYWKNFMYDFLVNLGIKKENLTLKNHKTEELSHYSDKTTDILFKFPWGFDELWGIASRTDFDLKNHHNHSKKDLTYFDEATKKRYFPYVIEPSLGVERLFLAFLVNNYHEDTTV

SEQ ID NO: 44083 - protein, 454 aa, Streptomyces avermitilis MA-4680
MTKRDVAALFGNRFLTEPAPSQTFPEEGMTATDTMRLLDEDLVMEGDPQRNLATFVTTWMEPEAQRIIAENLHRNFIDHAEYPISAEIEQRCVRMLADLFHAPGKTTGCRTQGSSEAIMLGALSLKWKWRERRQAANLPADRPNLVFGGDVHVVWEKFCRYFDVEPRIVPLAEDKYTIGPEDVEPHIDENTIGVVAVVGTTFTGHKDDVVGIDKLLRDVRKERDLDIPIHVDGASGGFVWPFLYPDSKWDFRLEQVRSINVSGHKYGLVYPGIGWLVFREESDLAKDLVFYENYLGKTDATFTLNFSTGASMVLAQYYNFVRLGRQGYTYVMETMQKNAHALADNLRSSGRFEVIGSDLEQLPLVAFRLAGEHAYDESDIAWQLSAERGWMVPAYTLPPNAERVKILRALVKETLSREQIERLTQDIADACATLDHKGGTTEVERAQIKRGTGY

SEQ ID NO: 44084 - protein, 284 aa, Vibrio parahaemolyticus RIMD 2210633
MTTNKHPSLLGECLAEFIGTGLLIFFGVGCVAALVLTGASFGQWEISIVWGLGVSIAIYCTAGVSGAHINPAVTIALAMFHGFDKAKVVPYIIAQMLGAFFSAALVYSLYSNLFTDYEIAHNFVRSSQDALATAGIFSTYPHASLSFFGAFAVEFVITAVLMFAILALGDENNGAARGAMNPLLIGILIAVIGGSLGPLTGFAMNPARDFGPKLFAYFAGWDYALTGAKDIPYFIVPLLAPIAGACFGGWLYPKAIAAYLPRQGHGCTIPNQCDTEEETEEARA

SEQ ID NO: 44085 - protein, 131 aa, Lotus corniculatus var. japonicus
YQWAFAIAAAGITSGSIAERTQFVAYLIYSSFLTGFVYPVVSHWLWSSDGWASPTRTTGSLLFGSGAIDFAGSGVVHMVGGIAGLWGAFIEGPRIGRFDRTGRSVALRGHSASLVVSRFVSTMVRLVRLQS

SEQ ID NO: 44086 - protein, 283 aa, Saccharomyces cerevisiae
MGTTTSHPAQKKQTTKKCRAPIMSDVREKPSNAQGCEPQEMDAVSKKVTELSLNKCSDSQDAGQPSREGSITKKKSTLLLRDEDEPTMPKLSVMETAVDTDSGSSSTSDDEEGDIIAQTTEPKQDASPDDDRSGHSSPREEGQQQIRAKEASGGPSEIKSSLMVPVEIRWQQGGSKVYVTGSFTKWRKMIGLIPDSDNNGSFHVKLRLLPGTHRFRFIVDNELRVSDFLPTATDQMGNFVNYIEVRQPEKNPTNEKIRSKEADSMRPPTSDRSSIALQIGKDP

SEQ ID NO: 44087 - protein, 572 aa, ASPERGILLUS NIDULANS FGSC A4
MASSVVPVALQNKLLGYGRAPSAQLAVLNLDLVRNIVFALFLFRYVRKTFYSLRGYGFFGSIHNVYLAIRLFLYSIFLRFPGVRGQVDKQVTAAIEGLESKLVANGPGVTRYLTLPKEGWTHEQVRAELAKLGNMEHTRWEDGRVSGAVYHGGKDLLKIQAEAFEQFGVANPIHPDVFPGVRKMEAEVVAMVLAMFHGPSDGAGVTTSGGTESILMACLAARNKARAERGVTEPEMIIPDTAHAAFIKASSYFGIKLHRVPCPAPDHKVDIAKVRRLINSNTVLLVGSAPNFPHGIVDDIPALSRLATHYKIPLHVDCCLGSFVIALLKKAGFPSPYEEEGGFDFRQPGVTSISVDTHKYGFAPKGNSVLLYRNKTYRSHQYFIYPDWSGGVYASPSVAGSRPGALIAGCWASLMSVGESGYIKSCLDIVNAAKKFESAINEDARLSPNLQVVGQPMVSVIAFESKNDAVDIYDIADDLSAKGWHLNALQSPPAMHVAFTIPTAAAVDTLISDLVAVVEKELEKAEERKRQGKSYVVKRGDTSALYGVAGSMPDKSIVSRLAEGFLDTLYKA

SEQ ID NO: 44088 - protein, 316 aa, Cryptococcus neoformans var. neoformans B-3501A
MADQAASLEPFLILARSTKGAAAAKIILDVTAAPGVYVFSELLEMPNIQELSSDASFGGHFQLLQLFAYGTLQDYEENKAIFPLLKEAHINKLRQLTLISLASQHRSLRYQDITQTLQLKTLRQVEDIVIDTIYAGLLNGKLHHDKKVFHIDWVAGRDVREEDLAVIQKSLENWCQTAQTLLGALDTEITHLRQEAVNEASKLARYRLHRDEVYETVANELRNDKAEKSAKRGTEPGAEFDAQQWSAHGRGYEEQVGSATGAGATFGGKAGQNILQTLAHVGSLGGAFSGRNNLTRNVSGGSDELENYRAFKRSRD

SEQ ID NO: 44089 - protein, 329 aa, Salmonella typhimurium LT2
MKLAVYSTKQYDKKYLQQVNEAFGFELEFFDFLLTEKTAKTANGCEAVCIFVNDDGSRPVLEELKKHGVKYIALRCAGFNNVDLDAAKELGLQVVRVPAYSPEAVAEHAIGMMMTLNRRIHRAYQRTRDANFSLEGLTGFTMHGKTAGVIGTGKIGVAALRILKGFGMRLLAFDPYPSTAALDLGVEYVDLQTLFAESDVISLHCPLTPENYHLLNHAAFDQMKNGVMVINTSRGALIDSQAAIEALKNQKIGSLGMDVYENERDLFFEDKSNDVIQDDVFRRLSACHNVLFTGHQAFLTAEALISISETTLQNLSQLEKGEACPNALF

SEQ ID NO: 44090 - protein, 401 aa, Cryptococcus neoformans var. neoformans JEC21
MSFSRASSNALKQALKSTASRQVARRSYSLLSGAAPRAAMATRLGATRGIKTLDFAGTKEVVYERADWPLDKLQDYFKNDTLAMIGYGSQGHGQSLNARDNGLKVIVGVRKGGESWKQAQEDGWVPGETLFDIPEAINKGTIIMNLLSDAAQSQTWNEIAPLITKGKTLYFAHGFSVVYKEDTHVIPPKDVDVILVAPKGSGRTVRTLFLEGRGINSSIAVYQDVTGHAKEKAVALGIAVGSGYLYETTFEKEVYSDLYGERGVLMGGIQGMFLAQYEVLRKNGHSPSEAFNETVEEATQSLFPLIGKYGMDYMYNACSTTARRGALDWAPKFKEANLPVFEALYNSVRDGSETRRSLEFNSRKTYREDLQKELDEIDNQEIWRAGKTVRGLRPDVNKDEL

SEQ ID NO: 44091 - protein, 180 aa, Nicotiana plumbaginifolia
MASSVLSSAAVATRSNVAQANMVAPFTGLKSAASFPVSRKQNLDITSIASNGGRVQCMQVWPPINKKKYETLSYLPDLSQEQLLSEIEYLLKSGWVPCLEFETERGFVYREHHHSPGYYDGRYWTMWKLPMFGCTDATQVLAEVEEAKKAYPQAWVRIIGFDNVRQVQCISFIAYKPEGY

SEQ ID NO: 44092 - protein, 606 aa, Candida albicans SC5314
MQSVYPHKTTLHIEPSYFDNGVPVFQPTMHEFRDFYNFNKAINNYGMQSGIVKVIPPTQWVSRVQKCYTESNLEQVSIHNPIVQSINTNAPGIYQSQNIERYKKYSIFQWKEMAKTRKPPRRKQRGKSETETHSKDIPFYNINTSEYTDDRCKELESNYWRSLSYSEPMYGADTMGSVFDKSITAWNVAHLPNLLDLMEEKLPGVNQAYLYAGLWKALFAWHLEDQDLYSINYLHFGAPKQWYSIPQSQHEEFYALMVDLFHDEFKQCSEFLRHKTFMVSPAYLEKHGIRVNHTIHREGEFIITYPYGYHAGFNYDYNLAESVNFALDDWFEFGKRTKKCECISDSVGINIKHLWEKYYGTKYEAVKEEDGRDGGLEADSDGSIEVVKVEKIQRKCRKRKQDNVHTTNTHERVSTKRPHKEPDISRECALCPNTLQQTKYSHSALFELLQADTYGTTPERPRRVHKICASMFPHQLKCDFKTNTVHGLDDITKNQKKLRCGVCRQSEMGACFQCSYKKCTRAFHGSCGLVDGVQYDFDSGEAFCKFHRQGPTSAEFKVGMYVQFLFNHGVYFGQLVNLGDGDVEVEVYPSAQDVIEIPTTSIINVV

SEQ ID NO: 44093 - protein, 389 aa, Zea mays
MDAASASSSWQDLPPRLQSYDNRAPLLLPVKIMDAAADDKPEISDDTAHQISVGPKIYGLTWALQYINLFMINTGFIILAGQALKATYGLFSDDGVLKLPYCIAISGFVCALFAIGIPYLSALRIWLGFSTLFSLMYIVIAVVLSSRDGITAPARDYSIPKSSQSTRVFTTIGSIADLVFAYNTGMLPEIQATIRPPVVKNMEKALWFQFTIGSLPLYAVVFVGYWAYGSSTSGYLLNSVTGPVWVKAVANLSAFFQTVIALHIFASPMYEFLDTKYGSGRGGPFEIHNVAFRVAVRGGYLTVNTLVAAVLPFLGDFMSLTGALSTFPLTFVLANHMYLMVKGPKLGAIQKSWHWLNVLGFTALAVAAAVSAIRLIMRDSSTYHFFADL

SEQ ID NO: 44094 - protein, 296 aa, Ostreococcus tauri
MENYEKVAKIGEGTYGVVYKAKSLRDDAMVALKRIRLDQDDEGVPSTAIREISLLKELRHENVVSLLEVIHEETKLYLVFEYLDLDLKKHMDSSPHISNDRMVIKGYVYQICAGIAFCHSHRVLHRDLKPQNLLIDTTNNVLKLADFGLARAFGIPVRAYTHEVVTLWYRAPEILLGVRTYSTPVDVWSIGCIMAEMVNHAPLFPGDSEIDELFKIFKTLGTPGETLWPEAKQLPDYQEGFPKWKAKPWESLCPALDEAGVDLLRSLLQYSPEKRISAKYATQHRWFDDYREHIGR

SEQ ID NO: 44095 - protein, 261 aa, Debaryomyces hansenii CBS767
MPAKVYSHAQHDDVVNAVGKHILKIQDESLKSSSTFKIAVSGGSLGKVLKQCLIDNSSIAPHIQWDKWEVYFSDERLVPLDHPDSNYGLFNEMVLSNLPTNTTKPKVNAIDESLLTGKDGQIASASQLHDESIAKRYEASLPENAKFDLILLGCGPDGHTCSLFPDHRLLKERDELISAISDSPKPPPRRITFTFPVLERASSIAFVAEGAGKAPIMEKIFVDKSSQLPSKLVNELKTGVDVLWFVDDSAIEGVNVISSKY

SEQ ID NO: 44096 - protein, 351 aa, Thermotoga maritima
  misc_feature (1)..(1): Xaa can be any naturally occurring amino acid
  misc_feature (13)..(13): Xaa can be any naturally occurring amino acid
  misc_feature (22)..(22): Xaa can be any naturally occurring amino acid
  misc_feature (57)..(57): Xaa can be any naturally occurring amino acid
  misc_feature (193)..(193): Xaa can be any naturally occurring amino acid
  misc_feature (197)..(197): Xaa can be any naturally occurring amino acid
  misc_feature (267)..(267): Xaa can be any naturally occurring amino acid
  misc_feature (304)..(304): Xaa can be any naturally occurring amino acid
  unsure (1)..(351): unsure at all Xaa locations
XGSDKIHHHHHHXKVVTFGEIXLRLSPPDHKRIFQTDSFDVTYGGAEANVAAFLAQXGLDAYFVTKLPNNPLGDAAAGHLRKFGVKTDYIARGGNRIGIYFLEIGASQRPSKVVYDRAHSAISEAKREDFDWEKILDGARWFHFSGITPPLGKELPLILEDALKVANEKGVTVSCDLNYRARLWTKEEAQKVXIPFXEYVDVLIANEEDIEKVLGISVEGLDLKTGKLNREAYAKIAEEVTRKYNFKTVGITLRESISATVNYWSVXVFENGQPHFSNRYEIHIVDRVGAGDSFAGALIYGSLXGFDSQKKAEFAAAASCLKHTIPGDFVVLSIEEIEKLASGATSGRVER

SEQ ID NO: 44097 - protein, 411 aa, Pseudomonas syringae pv. tomato str. DC3000
MRALTYHGANSVKVDSVPDPELQEADDIILRVTATAICGSDLHLYRGKIPTVEHGDIFGHEFMGIVEETGSAVTAVQKGDRVVIPFVIACGSCFFCNIDLFAACETTNTGRGAIMNKKSIPPGAALFGFSHLYGGIPGGQAEYVRVPKANVGPFKVPGTLADEKVLFLSDILPTAWQAVTNAGIGPGSSVAIYGAGPVGLMSAACAKMLGAERIFMVDHHPYRLAYAQKTYGVIPINFDDDDDPADTIIRQTPGMRGVDGVVDAVGFEAKGSTTETILATLKLEGSSGKALRQCIAAVRRGGVVSVPGVYAGFIHGFMFGDAFDKGLTFKMGQTHVHRFMPELLEHIEAGRLAPEAIISHRMSLEDAAKGYKLFDKKEEDCRKVILTPGDNTIVVPDTQTEALVGGVVPAM

SEQ ID NO: 44098 - protein, 208 aa, Erwinia carotovora subsp. atroseptica SCRI1043
MIDLYYAPTPNGHKITLFLEEANLPYQLHRVNISKGEQFKPEFLAISPNNKIPAIVNTQLTEGDTPISLFESGAILLYLAEKHGVLLSSSLRERTATLQWLFWQVAGFGPMLGQNHHFNHYAPQPVPYAIERYQQETQRLYRVLDKHLQDSPWLAGENYSIADIATYPWVVPYARQRVDLDDYPAVKAWYTRISDRPATQRAYQLAEQ

SEQ ID NO: 44099 - protein, 377 aa, Zea mays
SDEDQDSVRLLAVEGCAALGKLLEPQDCVAHILPVIVNFSQDKSWRVRYMVANQLYELCEAVGPEPTRADLVPAYVRLLRDNEAEVRIAAAGKVTKFCRILNPQLSIQHILPCVKELSSDSSQHVRSALASVIMGMAPVLGKDATMEQLLPIFLSLLKDEFPDVRLNIISKLDQVNQVIGIDFLSQTLLPAIVELAEDRHWRVRLAIIEYIPLLASQLGVGFFDDKLGALCMQWLEDKVFSIRDAAANNLKRLAEEFGPEWAMQHIIPQVLEKINNPHYLYRMTILQAISLLAPVMGAEITCQKLLPVVINSSKDRVPNIKFNVAKVLQSLVPILDQSVVEKTVKPCLVELSEDPDVDVRYYANQALQACDQMMVSS

SEQ ID NO: 44100 - protein, 389 aa, Ostreococcus tauri
MERYERGRTLGEGTYGVVHEARVKETNEVVAIKKIRLGKLKEGVNFTAIREIKLLQEIKHEHVIELVDVFAHKKNLNLVFEYCGGDLEMVIKDKATPLSAGEVKSYARMTLRAVAHCHENWVLHRDLKPNNLLIAPNGCLKLADFGLARIFGSPDRRFTHQVFARWYRAPELLLGSKTYGPGVDVWAVGCILAELMLRKPFFAGSSDIDQLGKVYAALGTPTETNWPGVSALPDFIEFIYVPPPNLHDTFPNETNESLDLLKRMLEYDPNKRITAAQALEHPYFHTKPAPIPFEELPKRFATKNFTQHASGGTSPSREAKTGEKRRLEDADEAPDSTDPNFRPKPRRRRTGEGVAAVAKGAFGTPPFARRSRGDELKTRRFSPTPLAGN

SEQ ID NO: 44101 - protein, 204 aa, Viburnum erubescens
YDKPVKGRKINWMKAGILESDQILTVSPYYAEELVSGEDKGVELDNILRKTGIIGIVNGMDVQEWNPLTDKYTGIKYDATTVMNAKPLIKEALQAEVGLPVDKDIPVIGFIGRLEEQKGSDILVEAISQFIGENVQIIVLGTGKKAMEKQLEQLEIEYPDKARGVAKFNVPLAHMIIAGADFILVPSRFEPCGLIQLHAMRYGT

SEQ ID NO: 44102 - protein, 480 aa, Photobacterium profundum SS9
MSSSVETSSKKHNLSYIIRICCIAALGGILLGYDTAVISGAIGPIREYFNLTAAQTGWAVSSVVLGSIIGAISSGWCALKYGRRKALFLAALLFIISAIGSALAATFTIYVLFRIVGGIAVGLACVVSPMYMSEVAPKDFRGRAVSMFQQSAVIGQTGVFYVNYLIAKGMSEAWLVDIGWRWMLASEVLPALLFGSLLIIIPESPRWLVLKGHLDQAKETLSRISNPEHADRVILEIQKSLVPTNASKNNKVSLRSPLLFSILVIGTFVAAAQQLTGINVIMYYTPEILNPIAGGTENALLQTTFVGVVFIFGNALGMYLIDKVGRLPLMKYGTFGCALGMTIVGYVLYTGTEGYAALFALCLYVVAYAASWGCACWTMISEIFPNSIRSRAMAIAVGAQWFTGFIVTQSFPMLNENAYLKEHFNGAFSFWVFAVLSIMCMYVVVKYVPETKGVSLEDMEKVMAEKLGKNKKRQVAEASA

SEQ ID NO: 44103 - protein, 204 aa, Viburnum odoratissimum
YDKPVKGRKINWMKAGILESNQILTVSPYYAEELVSGEDKGVELDNILRKTGIIGIVNGMDVQEWNPLTDKYTGIKYDATTVMNAKPLIKEALQAEVGLPVDKDIPVIGFIGRLEEQKGSDILVEAISQFIGENVQIIVLGTGKKAMEKQLEQLEIQYPDKARGVAKFNVPLAHMIIAGADFILVPSRFEPCGLIQLHAMRYGT

SEQ ID NO: 44104 - protein, 314 aa, Zea mays
MENPASVLVLPAQFTKLTFRNLYIRRAGPGSREITEEGRCDLDKRYVSDFPVYDGRGPDASLVARVQGITSEIGNAHQLFVVVFDTDSCSLKGSTLVTNGVITAGSDEWAIYGGTGVFAMARGVIRRRYLADRAGGNTDELNMDVFCRPFGSQSELQDKMQVQGQGSSVTKIGLWGGPGGSAQDITAERPPQRLHSVTVRAGVAVDSIEFTYTDSAGQRRAAGRWGGLGGNVRTIDLGDAEDVREVSGTYGAFEGATTLTSLRLVTSSRTWGPWGVENGTRFSVTAPIGSSIVGFYARAGTRLVDAIGVYLRQI

SEQ ID NO: 44105 - protein, 204 aa, Viburnum sieboldii
YDKPVKGRKINWMKAGILESDQILTVSPYYAEELVSGEDKGVELDNILRKTGIIGIVNGMDVQEWNPLTDKYTGIKYDATTVMNAKPLIKESLQAEVGLPVDKDIPVIGFIGRLEEQKGSDILVEAISQFIGENVQIIVLGTGKKAMEKQLEQLEIEYPDKARGVAKFNVPLAHMIIAGADFILVPSRFEPCGLIQLHAMRYGT

SEQ ID NO: 44106 - protein, 331 aa, Photobacterium profundum SS9
MTKIALQQDRPLDAIVLGRAGVDLYAREANTDMADISGFNKFVGGSAANIAVAISKLGGKVGFIGCVADDAFGGYVRGYMTEQGINLDGMMTDNSGSRTSVAFTEMKPNDCTVLIYRNKASDLTLKPEQVDPAYIAQSKMLVVTGTALSESPSREATLIAMEHARRSNTVVVLDVDYRPYSWRTDVDASIYYGIAAGLSDIVIGNREEFDMMETVLAPGNTDDDATADRFLRANTQVVIVKAGELGSKVYCKDGHKFQQGIFRVEVKKPFGSGDSFAGGLIWTLVNGGELEDGVKHGSAAAAINVSGNSCTEAMPTKEVLFDFIETREQDL

SEQ ID NO: 44107 - protein, 193 aa, Cucumis sativus
  misc_feature (193)..(193): Xaa can be any naturally occurring amino acid
  unsure (1)..(193): unsure at all Xaa locations
TGDEGNNEYKKGLWTVEEDKILMDYVKAHGKGHWNRIAKKTGLKRCGKSCRLRWMNYLSPNVKRGNFTEQEEDLIIRLHKLPGNRWSLIAKRVPGRTDNQVKNYWNTHLSKKLGIKDQKTKQSNGDIVYQINLPNPTETSEETKISNIVDNNNILGDEIQEDHQGSNYLSSLWVHEDEFELSTLTNMMDFINX

SEQ ID NO: 44108 - protein, 204 aa, Viburnum odoratissimum
YDKPVKGRKINWMKAGILESDQILTVSPYYAEELVSGANKGMELDNILRKTGILGIVNGMDVQEWNPLTDKYTGIKYDVTTVMNAKPLIKEALQAEVGLPVDKNIPVIGFIGRLEEQKGSDILVEAISQFIGENVQIIILGTGKKAMEKQLEQLEIEYPDKARGVAKFNVPLAHMIIARADFILVPSRFSLVVSSSYMRCAMEP

SEQ ID NO: 44109 - protein, 711 aa, Photorhabdus luminescens subsp. laumondii TTO1
MSTESPHSSPGLDTGLICLAMLARFHNIAISTEQLSHEFSTASQGFTLKELLLAARHSGLKARAVHTTLARLEHTPLPAIAIDRDGQFFILAKLDKEQALIQDPRSARPEVISFEQLEQRWTGQLVLVRSSNGLPGETSRFDFTWFIPAIVKYRKLLGEVLLGSFALQLFALVTPLFFQVVMDKVLVHHGLTTLDVVAAGLLGIMLFESALSGLRSYVFAHTTSRIDVQLGSNLFRHLINLPLAYFQARRVGDSVARVRELENIRSFLTGNAITLMLDVLFSLVFILVMFYYSGWLTLIVVLSLPLYALVSGLVTPLLRKRLQDSFTRNAENQAFLVETVNGIDTLKSMAVEPQAIRKWDNQLAAYVAAGFKTQTLSTIANESVSLIGKLVTVATLWLGARLVIDGQLSVGELIAFNMLAGRVSGPIMRLAQLWTSFQQTGVSVQRLGDILNSRTELSQATRSTVPPLKGQVEFEQVHFRYRADGSEVLRGVNLVIGAGEIIGVVGRSGSGKSTLTRLLQRLYVPERGRVMVDGMDLALADVSSLRRQIGVVLQDNMLFNRSIRENIALSDPGAPLEVVMHAARMAGAHEFILELPEGYDTIVGEHGASLSGGQRQRVAIARALIGNPRILIFDEATSALDYESERVVQQNMQSICKGRTVIIIAHRLSAVRDAHRILVMDRGQIVEQGAHAELLARQDGHYSRLHRMQQG

SEQ ID NO: 44110 - protein, 528 aa, Pseudomonas fluorescens PfO-1
MISAALDIQGERAHQPMGESSTVSVPGSRSINVPSTKTLTPMASQNPNKKKVLFVTSEIADLVKTGGLGDVSAALPRAMAHLHDVRVLIPGYPQVMNSENPIHIIGELGGHAALPPCKIGRMDMPDGLVIYVLICPELYARDGGPYGANNGRDWPDNHIRFARLGLAAADIAANLAQIHWCPDLVHAHDWPAGLAPAYMHWRGQRTPTLFTIHNLAYQGVTSLGSCPELGIPAHALQQEGMEFYGKMSFLKAGMAYSSHITTVSATYAQEITTPDFGCGLDGFLAAKTQQGLLSGIPNGIDESWDAATDPHLFAPFAIGDWEGKAINAAHVRELFGLKDSEGPLFAVVSRLVYQKGLDLTEAVSEYIVQNGGQIAIIGRGEPEEEQAMRELALRFPGQIGVRIGFNETDARRMFAGSDFLLMPSRYEPCGLSQMYAQRFGSLPVARNTGGLADTIENGVTGFLFNESTADSYREALSRAFKVFAFPELLNAMRCRAMAAPFNWCKAVEPYAELYEKLVAKALGKTHHK

SEQ ID NO: 44111 - protein, 183 aa, Acacia mangium
VLCDAEVALIIFSPRGKLYEFASSSMREAIERYRSHNRDVQTATRFVEQNMQYLKQETETMMKKIGQLGILKRKLLGEDCGSCSVKELEEIEQQLESSVRKVRERKSQVYNEQMEQLKEKRKTLAAENARLSEKYNSLAKQAREKNDGENAASLENIPTSEVETDLLIGLPETRSITLPIHVL

SEQ ID NO: 44112 - protein, 429 aa, ASPERGILLUS NIDULANS FGSC A4
MLSTLKVASRQAASRNASVRSVFAGARCASTWSNVPQGPPDAILGITEAYKADSFKEKINLGVGAYRDDQGKPYVLPSVRAAEDKVVASRFDKEYAGITGIPSFTKAAAQLAYGADSPVLKEDRLVITQSISGTGALRIGGAFLQRFYPGAKKIYLPTPSWANHNAVFKDSGLEVEKYRYYNKDTIGLDFEGLVEDLKAAPNNSIILLHACAHNPTGVDPTQDQWRQISNVMKEKGHFAFFDMAYQGFASGNADTDAFAPRHFVEQGHNIALCQSFAKNMGLYGERVGAFSLVCESAEEKKRVDSQIKILIRPFYSNPPVHGARVASTIMNDPALNKQWLGEVKGMADRIIEMRALLKKNLEELGSKHDWTHITSQIGMFAYTGLKPEQMEALAKEHSVYATKDGRISVAGITTGNVKRLAESIYKVTG

SEQ ID NO: 44113 - protein, 483 aa, Arabidopsis thaliana
MEDIQEEENGTDEEVLGSSLTMEKVAAAKQYIENHYKAQNKNIQERKERRWILERKLASSGVPKEEQINMIKDLERKETEFMRLKRNKISVDDFELLTIIGRGAFGEVRLCRERKSGNIYAMKKLKKSEMVMRGQVEHVRAERNLLAEVESHYIVKLYYSFQDPEYLYLIMEYLPGGDMMTLLMREDTLREDVARFYIAQSVLAIESIHRYNYIHRDIKPDNLLLDKDGHMKLSDFGLCKPLDCRNLPSIQENRATDDETMSEPMDVDRCFPDTDNKRSWRSPQEQLQHWQMNRRKLAFSTVGTPDYIAPEVLLKKGYGMECDWWSLGAIMYEMLVGYPPFYADDPISTCRKIVHWRNHLKFPEDAKFSSEAKDLICRLLCNVDHRLGTGGGAQQIKDHPWFKDVVWEKLYEMEAAYKPEVNDELDTQNFMKFDEVNSPAPERTRSGLSRKMLLAPKDLSFVGYTYKNFDAVKGLRHSLGKFT

SEQ ID NO: 44114 - protein, 455 aa, Debaryomyces hansenii CBS767
MVDRKRNSSVISDNEENGRVDKKTKIKDEIEGDEVERDVKNEEANGADTDDKEEVRKDNEEENAENGGGEGDDDDDDDDEAEEEKKRTTTFNFDGVTYSFKERPSVLEEKEGKIEFRVVNNDNTKESLMVLTGLKNIFQKQLPKMPREYISRLVYDRSHLSMAVVRKPLTVVGGITYRPFDNREFAEIVFCAISSTEQVRGYGAHLMNHLKDYCRATSNVKYFLTYADNYAIGYFKKQGFNKEITLDKSVWMGYIKDYEGGTLMQCSMLPPILRYLDLAKILLLQKAAIEKKIKLRSKAHVVRPGLQVFKTNKDAKLNPAKDIPGLAESGWLEEMDKLAQKPKRGPHYNFMVTLLSELTNHPSAWPFSTPVNKEEVGDYYDVIKEPMDLSTMELKLENDKYDSFDQFLYDARLIFNNCRSYNADSTTYFKNATKLEKFMNNKIKDSAEYSHFLDQ

SEQ ID NO: 44115 - protein, 230 aa, Triticum aestivum
  misc_feature (170)..(170): Xaa can be any naturally occurring amino acid
  misc_feature (205)..(205): Xaa can be any naturally occurring amino acid
  misc_feature (217)..(217): Xaa can be any naturally occurring amino acid
  unsure (1)..(230): unsure at all Xaa locations
MEKYEPVREIGSGNFGVAKLMRNRDTRELVAMKFIERGYRIDENVFREIVNHRSLRHPNIIRFKEVVLTPTHLGIVMEYAAGGELFERICDAGRFHEDEARYFFQQLVCGVSFCHAMQICHRDLKLENTLLDGSPAPRLKICDFGYSKSSVLHSRPKSTVGTPAYIAPEXVLSRREYDGKHADVWSCGVTLYVMLVGGYPFEDPXDPKNFRKTIARXIMSVQYKIPEYVH

SEQ ID NO: 44116 - protein, 218 aa, Nicotiana plumbaginifolia
MAGYRADDEYDYLFKLVLIGDSGVGKSNLLSRFTKNEFNLESKSTIGVEFATKSLNIDNKVIKAQIWDTAGQERYRAITSAYYRGAVGALLVYDVTRHVTYENVTRWLKELRDHTDPNIVVMLIGNKSDLRHLVAVSTDEAKGLAEREGLYFMETSALEATNVENAFTEALTQIYRIVSKKAVEAGDEGATSSAPPKGETINIKDEGSSWKKFGCCSS

SEQ ID NO: 44117 - protein, 492 aa, Hordeum vulgare subsp. spontaneum
YFHETIWKGVPKFLRRVDTALKNIGINERVPYNAPLIQFSSWMGGDRDGNPRVTPEVTRDVCLLARMMAANLYCAQIEDLMFELSMWRCNDELRARADELHRSSKKDAKHYIEFWKKVPPNEPYRVILGDVRDNLYNTRERSRELLSSGHSDIPEEATLTNLEQLLEPLELCYRSLCACGDRVIADGTLLDFLRQVSTFGLSLVKLDIRQESDRHTDALDAITSYLGIGSYREWSEERRQEWLLSELNGKRPLFGADLPMTEEVADVMGAFQVIAELPGDNFGAYVISMATSPSDVLAVELLQRECHIKTPLRVVPLFEKLADLEAAPAALARLFSIDWYRERINGKQEVMIGYSDSGKDAGRLSAAWQMYKAQEDLVKVAKQFGVKLTMFHGRGGTVGRGGGPTHLAILSQPPDTINGSLRVTVQGEVIEQSFGEEHLCFRTLQRFTAATLEHGMRPPISPKPEWRALLDEMAVVATEEYRSIVFQEPRFV

SEQ ID NO: 44118 - protein, 390 aa, Nostoc punctiforme PCC 73102
MYQTKQQSLKETMNIVELGKMEILENAADIEEPSLDSLDAVADEEPPIVVENLESDERDGDDMAAARPSGYNKTEHDDAVGAFFKEMARYPLLKADEEVELARRVRFLEEIRELQAALNLKLGQEPTKLEIASELEMTEKQLESRLYQGRVAKRKMIRSNLRLVVSIAKRYLNRGVPFLDLIQEGAMGLNRATEKFDPDKGYKFSTYAYWWIRQAITRAIANDARTIRLPIHIVEKLNKLKKAQRELKQKLCRNPTEGEMAEALDISVQQLRQLQQLRRQALSLNHRVGKEEDTELMDLLEDEDNLSPEAKMNENMMRQEIWEVLGDVLTPREKDVISLRYGLTTSEPCTLEEVGNMFNLSRERVRQIQSKAMRKLRRPHIAKRLKGWLI

SEQ ID NO: 44119 - protein, 395 aa, Azoarcus sp. EbN1
MNPLLISRYTATSCLGRGIGPMRDALVAGRSGLKPCDFDGVALETWVGEVAGADDETLPSHLRRFDCRNNRLAQIGFEQDGFSDAVRGAMGRYGAERIGVFLGTSTAGILETELAYQRRDPANGALPAGFNYAGSHNPFSVAAFVQAAFGLGGPASVVSSACSSSAKVFASARRMIEAGLIDAAIVGGVDSLCLTTLYGFASLELTSRQACRPFDLRRDGISIGEAAAFALLERVDGPLADDAILLLGVGESSDAYHMSSPHPEGLGARRAMEAALAAAGLESGDIDYINLHGTATPSNDSAESRAVRALFGAATACNSTKGATGHTLGAAGGVEAVIAALALRDGFLPGSPNTREPEPDMNYLLASRPARVRRVLSNSFGFGGTNCSLVIGRAQ

SEQ ID NO: 44120 - protein, 439 aa, Oryza sativa
MEGVGGGKRRGDDGAEATPRWRFSRPSSQGGPLAAAGLTSIRAVLNRVNSSVDAAAAGGPRPVLRLGNGDPTASACYRTAPAAEDAVVDALRSGAHNGYSLTVGVLSARRAIAEYLSRDLPYELSANDIYLTSGCVQAIEVMISVLAQPGSNILLPKPGFPLYESRTTFSNLEVRHFDLIPERGWEVDLEGVQAIADENTVAIVVINPSNPCGSVYSYDHLAKIAETARKLGLLIIADEVYDHLAFGNNPFIPIGVFGKTVPVITLGSISKRWLVPGWRLGWIATCDPNGILKEAKVNQSIENYINISTDPATFVQGAIPQIIANTKEDYFNKILDQLRNAADLCYDKIKDIKGITCPHKPEGSMFVMVKLDLSYLDGFHDDMDFCCRLAKEESVIVLPGSALGLKNWVRITFAIDIPSLVDAFERIKSFCQRHGKLET

SEQ ID NO: 44121 - protein, 160 aa, Synechococcus elongatus PCC 7942
MAPQVTDIAVTTIDGAAKSLSDYAGQVLLIVNVASYCGYTSQYSGLEALYRQYRDRGLQVLAFPCNDFGAQEPGSNEEIKTFCSTRFDVSFELFDKVHAKGADQHPLYAALTQTDPAGDVAWNFEKFLVGKDGTVLARFKSGVAPNDASLIQAIEAALAA

SEQ ID NO: 44122 - protein, 488 aa, Archaeoglobus fulgidus DSM 4304
MDSSSVDIVLNKGGHNKSFEVKIYRIHTTKIMSFPNGSDAEGVLKRLEDYAKNDFEPHSRRMWGHIYYAGLKDVVELARKAYLMYMDKTMLDFTCFPSLLRMEREVVRMASSLLNGDEEVVGNFTYGGTESIMLALKAAREKFRKEEGGNVVPEIVLPATAHPAFWKSAEYLGMRCLRAKLDDELRADVETVKELVGDKTAMIVGSAPNYPFGVVDDIKALSDIAVDGKLWLHVDACLGGFHLPFFRELGEKIPDFDFSVEGVHSISADFHKYGLSPRGASVILYRNAKLREGQIFVMASWPGYPLVNTAVLSTRSAGTLAAAWAVMSYLGFDGYLKLAKKTLYAKKRLIDGLTELGLELLGSPEGAVLAFTSERHNLFKVSTLMAEKGWYVQSQPGSKKLGFPRSLHFSVIPGHAEVVDEFLEDMREVLPECECSYPEMSSFDVSKLKFGEDGLPEDSELISELIHSMPPEIVESVFKQFINELIFR

SEQ ID NO: 44123 - protein, 365 aa, Bacillus cereus ATCC 10987
MTENHYLLLTPGPLTTTKTVKEVMLYDWCTWDVEYNTMVQDVRAKLVSLATKEEEKYTTVLMQGSGTFSVEAVIGSVIPKNGKLLVCTNGAYGKRIVQMAEMLHIDVVVSQTEEWEPTNVVEVEKILQQDKEITHIAIVHCETTTGIINPIVDVCKLGKQYGKVTLVDAMSSFGGIEIDIAELQIDFLISSANKCIQGVPGFGFVIAKRDELLKCKGQARSLSLDLYDQWETMENQNGKWRFTSPTHVVHAFYQALLELEKEGGVKARYNRYDNNQKLLVNRMREIGFKPLVDEKYQSPIITSFIYPEEWFDFEQLYNELKRDGFVIYPGKISKVDTFRIGNIGDVHEADINRLVDSIAKGVVIG

SEQ ID NO: 44124 - protein, 133 aa, Glycine max
MATVANFSANRITTVIPRPTSAVASTSSFVFFDPKPNSLILKQRWVKNPSKRSFSAVKVKAGAASPGKVGTPAVNDEKVQKIHSGEEFDEALKKAKNKLVVVEFATSKSDQSNKIYPFMVELSRTCNDVDFLL

SEQ ID NO: 44125 - protein, 289 aa, Rhizobium sp. TAL11145
MHMKNMSADRRMIKIAMAAPYLGRDEEHDLAIRWKDHDDRGARNKIATAHMRLVISMAGKFRNFGLPMSDLVQEGYVGLLEAAARFEPEREVRFSTYASWWIRASIQDYILRNWSIVRGGTSSAQKALFFNLRRLRAKLARGNTGVTVQSIHEEIAVALGVSLADVQTMDARLSSNDASLQAPSISGDAESAERMDFLISDEPLPDEQVSNMIDGERRRVWLASALKHLNEREMKIIRARRLVEDGATLEELGADLGISKERVRQIESRAMEKLRSALVDADPRMASYA

SEQ ID NO: 44126 - protein, 361 aa, Streptomyces avermitilis MA-4680
MSQSSSPQQIPVVVLAGFLGSGKTTLLNHLLHRSGGSRIGAIVNDFGAIEIDAMAVAGALGDSTVSLGNGCLCCAVDAGELDLYLERLAHPSARVDVIVIEASGLAEPQELVRMVLASENARVVYGGLVEVVDAAEFDATRAKHPEVDRHLAMADLVVVNKIDRADDGERVLRAVRSLTDRAAVVPATYGRVDPELLFDCRPTGERIGQLSFDDLHEHRGEEDHHGHLHAAYDSVSFTSEAPMNPRRMMDFLDSRPEGLYRIKGYVDFGTADPRNRYAVHAVGRFLRFYPEPWAPAGPRLTQLVLIGSGIDTAALHKELDACTNDAPHADEHSMWGVLRYVQEQEQEQEQRQETAEAEQAG

SEQ ID NO: 44127 - protein, 456 aa, Triticum aestivum
MGEQKGNILMGKYEMGKMLGQGTFAKVYHARNIETSQSVAIKVTDKEKVLKGGLTDQIKREISVMKLVKHPNIVQMYEVMATKTKIYFVLEHVKGGELFNKVQRGRLKEDAARKYFQQLICAVDFCHSRGVYHRDLKPENLLLDENSNLKVSDFGLSTISECRRLDGLLHTSCGTPAYVAPEVINRKGYDGAKADIWSCGVILFVLLAGYLPFQDKNLMNMYKKIGKAEFKCPSWFSSDIRRLLLRILDPNPSTRISIERIMEHPWFRKGLDAKLLRYNLQAKDAVPAADMTATSDSLSCSNSATEGKEQEAKKLSNLNAFDIISLSTGLDLSGMFEDNDKKRESKFTSTNSASTIVSKIEDIAKCMRLKLVKKDGGMMRMESFKPGRKGVMSIDAEIFEVTPDFHLVELKKTNGDTIEYQKVLNQEMRPALKDIVWAWQGEQQPQPQPQPQQQPC

SEQ ID NO: 44128 - protein, 184 aa, Pseudomonas syringae pv. syringae B728a
MMKLRFFSIPLLLLAMSGAAMAADCPPLLQGELPKLRAKENIDLCKRFAGKPLVVVNTASFCGFAPQFKGLEALSQRYKGQGLEVLGVPSNDFKQEAKDGEETAKVCYVNYGVTFTMTEPQAVRGDDATHLFKVLAEQSSAPRWNFYKYVVDRQGKVIANFSSMTKPDDPELIAAIEKAIASKP

SEQ ID NO: 44129 - protein, 388 aa, Streptomyces avermitilis MA-4680
MPINRAASTSVDVPRGLAGVVVTDTSLGDVRGLEGFYHYRQYSAVELAQTRGFEDVWHLMVHGELPDAEQRAVFTARTAALRWLPDGVRATLPAVAAAAGRSGPLAGLRTALSLLGAAKGFRPVYDIDREQRRADTVMASAAVPTLLTALYRLGQGLDPVEPREDLSYAANYLYMLTGSEPDAARTRAIEQYLISTIDHGFNASTFTARVITSTGADVAAALVGAVGALSGPLHGGAPSRALDTLDAIGTPERIDSWIRERVLAGDRIMGFGHPVYRTEDPRSRMLRGVAEQFGGPLVDFAVEVERHVEAILAELKPGRELHTNVEFYAGVVMELCGLPREMFTPTFAAARVVGWSANILEQAEDPKIIRPAARYVGPVPPVAVPLMV

SEQ ID NO: 44130 - protein, 365 aa, Kalanchoe pinnata
SDSGKDAGRLSAAWQLYKAQEELIEVAKKHGVKLTMFHGRGGTVGRGGGPTHLAILSQPADTIQGSLRVTIQGEVIERSFGEAQLCFKTLQRYTAATLEHGMIPPLTPKPEWRALMDEMAVVATERYRSIVFREPRFVEYFRLATPELEYGRMNIGSRPSKREPSGGIESLRAIPWIFAWTQTRFHLPVWLGFGEAFKHVIDKDNKNLLMLQQMYNEWPFFRVTIDLVEMMFAKGNPGIAALYDKLLVSEELLPLGEELRTAYNDTKSYLLKITGHNEILEGNPFLKQRHKLRTAYITTLNVCQAYTLKRIRDPSYRGPVRPPIAKEISEGSVSSAKKLVKLNPTSEYAPGLEDTLILTMKGIAA

SEQ ID NO: 44131 - protein, 635 aa, Photobacterium profundum SS9
MKHDSKTLDLICMGRVAVDLYGQQIGARLEDMGSFSKYLGGSSGNVAYGTARQGLKSSMLARVGDEHMGRFLREELNSVGVDTSHLITDEERLTALVILGIKDEETFPLIFYRDNCADMAITADDVSEEYIASARCLAITGTHLSNPQTRDAVLTALKYARRHGVKTALDIDYRPVLWGLTSLGDGENRFIESGKVTDQLQEVLGLFDLIVGTEEEFHIAGGSTNSIDALRAVRQVSQAELVCKRGALGCSVFSNDIPNDLDDGITIQGVRVDVLNVLGAGDAFMSGLLRGYLSDEGWEKACAYANACGALVVSRHGCAPSMPTKVELDDYLSRANDVPRPDIDARLNHLHRVTTRKPNWEELCVLAFDHRIQFVDMVREAGVDFDSIKPLKKLILQASQEVVEEAGLQGKAGILCDGTFGQDVLNEVTGSGWWIGRPIELPGSRPLRLEHGNIGSQLVNWPLEHVVKCLAFFHPDDQHPLRLEQEKMIKEVYTACCQSGHELLLEVILPADMSSSDDLYLRAVQRFYNLGVKPDWWKLPPQSVEGWNNISAVITERDTYCRGVVILGLDAPEAELKAGFAAAANQPLVKGFAVGRTIFGQPSRDWLAGKIDDRALIEKIKVNYHNLITLWRQRG

SEQ ID NO: 44132 - protein, 187 aa, Brassica napus
VDPASDQIKSPDVSMNAPRIDKIEFPLASYEEEPFVPVVRGKKKKKKASSRGSYSPPPEPPLDCSVTKDKFTLEPGQNFEGAIMKAVYQYEEAYPENKSESSDQNATAGASSRGSSGIRRQRFDPSSYQQRAEALEGLLEFSARLLQDERYDELNVLLRPFGPGKVSPRETAIWLSKSFKETTKLED

SEQ ID NO: 44133 - protein, 364 aa, Kalanchoe pinnata
SDSGKDAGRLSAAWQLYKAQEDLVKVAKEFGVKLTMFHGRGGTVGRGGGPTHLAILSQPPDTIHGSLRVTVQGEVIEQSFGEEHLCFRTLQRYTAATLEHSMCPPASPEPEWRELLDEMAVAATKEYRLFVSHEPRFVEYFRLATPELEYGRMNIGSRPSKRKPSGGIESLRAIPWIFAWTQTRFHLPVWLGFGAAFKHVIDKDIKNLLMLQEMYTRWPFFRVTIDLVEMVFAKGDPGIAALYDKLLVSEDLWPFGEQLRNNYNETKNLLLQVAGHKDLLEGNPYLRQRLRLRDSYITTLNACQAYTLKRIRDPNYHVTVRPPLSKEIMESNKAAAELVKLNPTSEYAPGLEDTLILTMKGIAA

SEQ ID NO: 44134 - protein, 339 aa, Vibrio parahaemolyticus RIMD 2210633
MKVLVTGGMGYIGSHTCVQMIEAGIEPIIVDNLCNAKLEVLNRIEALTGKQPAFHQGDIRDEAFLDTVFAQHDIQAVIHFAGLKAVGESVAKPLEYYDNNVNGSLVLARSMRKSGVKSIVFSSSATVYGDPEIVPITEDSPTGATTNPYGRSKYMVEQCFSDLFHAENDWSITLLRYFNPVGAHSSGSMGEDPQGIPNNLMPFIAQVAVGRREKLAVFGSDYPTPDGTGVRDYIHVMDLADGHIAALKSVGKTSGLHIYNLGTGKGSSVLEMVDAFAAACGKPVPYELCPRRPGDIAECWASTEKAERELGWKATRTVAEMTADTWNWQSKNPNGYSPA

SEQ ID NO: 44135 - protein, 275 aa, Desulfovibrio desulfuricans G20
MASISVRQAGCYYYPHRHAKSHTTSDHADIRGAACYAGSNIRHNSCPFHHAVRSVSKETYMEFFLDTADLDEIRLAGKQGLIDGVTTNPTLLSRQGGDWKKRMQQICDEVDGPVSLEVISPDAEGMLREAEELVRYGDNVVIKVPMTAEGLIATRTLTGKGIKTNVTLVFSAMQALLAAKAGATYVSPFLGRLDGIGHEGMEIVSQIRTIFDNYGYETKILAASIRHAQHVLDSALVGADVVTVPYSVLRQLMHHPLTDSGLDAFLADWNKLTQS

SEQ ID NO: 44136 - protein, 364 aa, Kalanchoe pinnata
SDSGKDAGRLSAAWQLYKAQEDLVKVAKEFGVKLTMFHGRGGTVGRGGGPTHLAILSQPPDTIHGSLRVTVQGEVIEQSFGEEHLCFRTLQRYTAATLEHSMCPPASPEPEWRELLDEMAVAATKEYRSIVFHEPRFVEYFRLATPELEYGRMNIGSRPSKRKPSGGIESLRAIPWIFAWTQTRFHLPVWLGFGAAFKHVIDKDIKNLLMLQEMYTRWPFFRVTIDLVEMVFAKGDPGIAALYDKLLVSEDLWLFGEQLRNNYNETKNLLLQVAGHKDLLEGNPYLRQRLRLRDSYITTLNACQAYTLKRIRDPNYHVTVRPPLSKEIMESNKAAAELVKLNPTSEYAPGLEDTLILTMKGIAA

SEQ ID NO: 44137 - protein, 454 aa, Oryza sativa
MVKGGREALLGGYEMGRTLGEGNFGKVKYARHLATGGHFAVKILDRGRVVSLRAGDQIRREIATLKLLRHPHVVRLHEVAASKTKIYMVLEFVNGGELFERIAVKGKLSEKEGRRLFQQLIDGVSYCHDRGVYHRDLKPENVLVDQKGNIKISDFGLSALPQHLGNDGLLHTTCGSPNYIAPEVLQNKGYDGSLSDIWSCGVILYVMLIGYLPFDDRNIVVLYQKIFKGDTQIPKWLSHSAQNLLRRILEPNPMKRIDMAGIKSHEWFQKDYIPVLPYDDDDEDVQFGARLPAKEQINDEPGDKNSHQINAFQLIGMASSLDLSGLFEDEEVSQRRIRFTSTHPPKDAFDKIESSATELGFQVQRGHSKLKLMRNCKGSKNPESFMVSAEVFELGPSVNVVELRKSNGDPALYRQLCERISSDMGARNTEQIFATASLEDDLQNSNAGTPLFAL

SEQ ID NO: 44138 - protein, 365 aa, Kalanchoe pinnata
SDSGKDAGRLSAAWQLYKAQEELIEVAKKHGVKLTMFHGRGGTVGRGGGPTHLAILSQPADTIQGSLRVTIQGEVIERSFGEAQLCFKTLQRYTAATLEHGMIPPLTPKPEWRALMDEMAVVATERYRSIVFREPRFVEYFRLATPELEYGRMNIGSRPSKRKPSGGIESLRAIPWIFAWTQTRFHLPVWLGFGEAFKHVIDKDNKNLLMLQQMYNEWPFFRVTIDLVEMVFAKGNPGIAALYDKLLVSEELLPLGEELRTAYNDTKSYLLKITGHNEILEGDPFLKQRLKLRTAYITTLNVCQAYTLKRIRDPSYQVPVRPPIAKEISEGSVSSANQLVKLNPTSEYAPGLEDTLILTMKGIAA

SEQ ID NO: 44139 - protein, 489 aa, Arabidopsis thaliana
MAEKITRETSLPKERSSPQALILGRYEMGKLLGHGTFAKVYLARNVKTNESVAIKVIDKEKVLKGGLIAHIKREISILRRVRHPNIVQLFEVMATKAKIYFVMEYVRGGELFNKVAKGRLKEEVARKYFQQLISAVTFCHARGVYHRDLKPENLLLDENGNLKVSDFGLSAVSDQIRQDGLFHTFCGTPAYVAPEVLARKGYDAAKVDIWSCGVILFVLMAGYLPFHDRNVMAMYKKIYRGEFRCPRWFSTELTRLLSKLLETNPEKRFTFPEIMENSWFKKGFKHIKFYVEDDKLCNVVDDDELESDSVESDRDSAASESEIEYLEPRRRVGGLPRPASLNAFDIISFSQGFDLSGLFDDDGEGSRFVSGAPVSKIISKLEEIAKVVSFTVRKKDCRVSLEGSRQGVKGPLTIAAEIFELTPSLVVVEVKKKGGDKTEYEDFCNNELKPKLQNLTADDVVAEPVAVSAVDETAIPNSPTISFLPSDTE

SEQ ID NO: 44140 - protein, 472 aa, Lactococcus lactis subsp. lactis Il1403
MVVGAQATEVDLVVIGSGPGGYVAAIRAAELGKKVTIIEKDNVGGVCLNIGCIPSKALINIGHHYQESLEEEKGENPFGLSVGNVKLNWESAQKWKQDKVVNQLTGGVKMLLKKHKVDVIQGTAEFIDNNTINVEQEDGFQLLQFNDVIISTGSRPIEIPSFPFGGRIIDSTGALSLPEVPKHLIIVGGGVIGSELGGAYRMLGSKITIVEGLDHILNGFDKEMSDIIANRVKSAGSEIFTSAMAKSATQTDKDVTLTFEVDGKEQTVTGDYLLVSVGRRPNTDLIGLNNTDVKLTDRGLIEVDDSYATNVPHIYAIGDVVPGPMLAHKASFQAKVAAAAIAGAEDDVDLHVALPAVAYTTTELATVGETPESVKDRKDVKISKFPFAANGRAISMNDTTGFLRLITETKEGALIGAQIVGPGASDLISGLSLAIENGLTSKDISLTIQPHPTLGEAIMDTAELADGLPIHV

SEQ ID NO: 44141 - protein, 373 aa, Kalanchoe pinnata
SDSGKDAGRLSAAWQLYKAQEELVKVAKEYGVKLTMFHGRGGTVGRGGGPTHLAILSQPPDTVHGSLRVTVQGEVIEQSFGEEHLCFRTLQRFTAATLEHGMNPPVAPKPEWRALLDEMAVVATEKYRSIVFKEPRFVEYFRLATPELEYGRMNIGSRPSKRKPSGGIESLRAIPWIFAWTQTRFHLPVWLGFGAAFKHAIEKDVRNLHMLQAMYNEWPFFRVTIDLVEMVFAKGDPGIAALYDKLLVSEDLWSFGERLRTHYDDTKSYLLQIAGHKDLLEGDPYLKQRLRLRDSYITTLNVCQAYTLKRIRDPSYSVTVRPHISKEIMESSSSSSSSSTSNPAYELVKLNTTSEYAPGLEDTLILTMKGIAA

SEQ ID NO: 44142 - protein, 374 aa, Lactococcus lactis subsp. lactis Il1403
MSNSEQILDFKAQLELQDTTFPMLQILNEEGKIVDEDGLKRAGLSDEKLVELFKSMLFARQVDIRSMKLAKQGRMGFFGPHAGQEASQMASSFAFTDEDWLFPGYRDLPQIYAKGWPIWKGLLWSRGHQLGNEYTTDDGKPVNSWFPQIIIGAQYVEAAGVALGLKKRKKDAVAFVYTGDGGSSQGDTYEGINFAGAYKAPLVAFIQNNGYAISTPRSLQSAAPHLAAKGWAAGAPSIVVDGMDAIAMYLASKEARAWAVAGNGPVVIEAITNRLEPHSTAGDDPLRYRTKEDIEAWWKKEPLVRMRNFLTEKGLWDTEKEEAYIAELDAGIDADIKKANNVEKQKISSFIKNTLEVPSQAMAEQIAKFESEGK

SEQ ID NO: 44143 - protein, 921 aa, Oryza sativa
MASKGTEGGHGGVERKEQQQQRGYQLPRDSRGSLEVFNPSSASSFRTAAAAPKSASPFLAIPDREEDNVVAQQRAAEWGLVLQTDHHTGLPQGVSARPSSGSARTSSEDNPQQQQSAAAIPRVSEELRAALSVFQQTFVVSDATHPNHPIMYASAGFFNMTGYTSKEVVGRNCRFLQGSGTDPHEIDKIRQSLANGSNYCGRILNYKKDGTPFWNLLTIAPIKDEDGRLLKFIGMQVEVSKYTEGKKDTVVRPNGLSESLIKYDARQKDHARSSVSELLLALKNPRSLSESSNNTLKRKSQESLSMSMTEVPSKRSSESGSRRNSRSGTRSSLQKINEVPDQGNRTRKSGLRAFMGFLGMGHGSVEKNMLKPRDEDPLIDSDDERPESFEDEFRRKEMRRGIDLATTLERIEKNFVITDPRLPDNPIIFASDSFLQLTEYNREEILGRNCRFLQGPETDRATVRKIRDAIDNQAEVTVQLINYTKSGKKFWNLFHLQPMRDQKGDVQYFIGVQLDGTEHVQDDAAKEGVVLVKKTADNIDEAAKELPDANLRPEDLWANHSKVVLPNPHMKDTASWRAIQKVLESGESIGLKHFRPVKPLGSGDTGSVHLVELLNTGEYFAMKAMDKSIMLNRNKVHRATAERQILDLLDHPFLPTLYASFQTKTHICLITDYCPGGELFVLLDNQPLKVLHEDAVRFYAAEVVVALEYLHCQGIIYRDLKPENILLHRDGHISLTDFDLSCLTSCRPQVFLPEDADEKKGRKNGSYPIFFAEPMRASNSFVGTEEYIAPEIITGAGHTSAVDWWALGILLYEMLYGYTPFRGKTRQRTFANILHKDIRFPASISVSLAARQLMYRLLHRDPANRLGSYEGANEIKGHPFFRGINWPLIRATAPPKLEIPLFSKDDMEKKGLVTNTRTDMF

SEQ ID NO: 44144 - protein, 469 aa, Prosthecochloris vibrioformis
MQQSESSSAQFDVAVIGSGPGGYEAALHAARHGMKVCLVEKRSLGGVCVNWGCIPTKALLRSAEVYDLAKNPSEFGVNVSELSFDLAQAVKRSRKVSLKSSKGVEFMLKKAKVEVWRGEAVLTGSKGVKVTAEDGSERSLEAANIIVATGAQPRVIPGLEPDGKKIITSREALILKDVPESMIVVGGGAIGVEMAWFYAKAGAKVTIVELMPRLLPAEEAEVSEALKRSFEKVDITVQCGAKLGNVAISEFGVNADLLAEGKEPQKIEASCMLVAVGVTGVIDGLGLDAAGIETERGFIRTDELCRTSASGIYAIGDVRGGMLLAHKASAEAAIAVEAIAGKLPEPLSEPLIPRCVYAQPSVASVGLTEEAAIAAGYKVLVGRSQFAASGKANAYGQLEGFVKLVFNAETGKMLGGHLIGHDAVELIGELGLACRYGVTAEGLVGTVHAHPTLSETVREAAFSALPNKG

SEQ ID NO: 44145 - protein, 323 aa, ASPERGILLUS NIDULANS FGSC A4
MAAYKSIRVASVALVVDIMQIFVKTLTGKTITLEVESSDTIDNVKTKIQDKEGIPPDQQRLIFAGKQLEDGRTLSDYNIQKESTLHLVLRLRGGMQIFVKTLTGKTITLEVESSDTIDNVKTKIQDKEGIPPDQQRLIFAGKQLEDGRTLSDYNIQKESTLHLVLRLRGGMQIFVKTLTGKTITLEVESSDTIDNVKSKIQDKEGIPPDQQRLIFAGKQLEDGRTLSDYNIQKESTLHLVLRLRGGMQIFVKTLTGKTITLEVESSDTIDNVKTKIQDKEGIPPDQQRLIFAGKQLEDGRTLSDYNIQKESTLHLVLRLRGGN

SEQ ID NO: 44146 - protein, 973 aa, Pseudomonas syringae pv. phaseolicola 1448A
MKLTKNNLSRLDADIALPAYTVESTRQGIAHIGVGGFHRAHQAFYTDALMNSGEGFEWSICGVGLRTEDKAVRDALAQQDYLYTLYELGDTPDTETRVIASISGMLLAEDSTQALIDKLSSPDIRIVSLTITEGGYCIDDSNGQFMAHLPQIQHDLAHPDQPKTVFGFLCAALARRRAEGTPAFTLMSCDNLPHNGAVTRKALLAFATLRDADLHDWIKDNVSFPNAMVDRITPMTSAAHRLKLADEKHIDDAWPVVCEPFVQWVLEDKFVNGRPAWEKVGVQFTDDVTPYEEMKIKLLNGSHLALTYLGFLKGYRFVHETMNDPLFVRYIRAYMDLDVTPQLASVPGIDLEGYKDTLIERFSNQAIADQLERVCSDGSSKFPKFTIPTINRLIVDQGNFERASLVVAAWSLYLQGVDENGTTYKIPDPRAEFCQALVADDELITQRLLQVEEIFGVAIPKSAEFVAAFEQNLNDLRTLGVSGTIDCGTQGTKVLVLDTESSTVLGEGSASHSLISDHNGRREQDVGQWLDALQQATRDALAQSGVSGQQILGIGVSGQQHGLVLLDAQGEVLRPAKLWCDTESAPENQRLLDYLGGAQGSLQRLGLVIAPGYTVSKLLWTKEQYPQLFERIDKVLLPHDYLNYWLTGRCCTEFGDASGTGYFNVRTREWDLPLLAHIDPSDRLGKALPQLVQAHEAVGVLRPEIARLLDLNPAALVSSGGGDNMMGAIGTGNIQPGLITMSLGSSGTVYAYADEARVSEHESVATFCSSSGGWLPLICTMNLTNATTAIRELFALDIAGFNQAVAQAPIGAEGVLILPFLNGERVPALPDATGSIVGLDSTNLTQANLSRAVVEGTTFGLRYGLDLLRDSGIKSEKIRLIGGGSKSAVWRQIVADIMNTPVICTDHAEAAALGAAIQAAWCWSHADGKAEGLQQLCERCVSLDQSSETHPVVHNVAAYQQVYQRYQAQLRKV

SEQ ID NO: 44147 - protein, 364 aa, Hypocrea jecorina
MKGLILVGGFGTRLRPLTLTLPKPLVEFCNKPMIVHQIEALVAAGVTDIVLAVNYRPEIMEKFLAEYEEKYNINIEFSVESEPLDTAGPLKLAERILGKDDSPFFVLNSDVICDYPFKELLEFHKAHGDEGTIVVTKVEEPSKYGVVVHKPNHPSRIDRFVEKPVEFVGNRINAGMYIFNPSVLKRIELRPTSIEKETFPAMVADNQLHSFDLEGFWMDVGQPKDFLSGTCLYLSSLTKKGSKELTPPTEPYVHGGNVMIHPSAKIGKNCRIGPNVTIGPDVVVGDGVRLQRCVLLKGSKVKDHAWVKSTIVGWNSTVGRWARLENVTVLGDDVTIGDEIYVNGGSVLPHKSIKANVDVPAIIM

SEQ ID NO: 44148 - protein, 221 aa, Pseudomonas syringae pv. phaseolicola 1448A
MKHIVDGFVHFRNEVFPQQEELFKKLATAQSPRAMFITCADSRIVPELITQSSPGDLFVTRNVGNVVPPYGQMNGGVSTALEYAVVALGVQHIIVCGHSDCGAMRAVLNPDSLDKMPTVKAWLRHAEVARTVVEQNCSCSGELETMQVLTQENVISQLHHLRTHPSVAAKMASGQLFIHGWVYSIETSEILAYDAELDRFIPLDGSGPTPMASPKARFSAD

SEQ ID NO: 44149 - protein, 1033 aa, Ashbya gossypii ATCC 10895
MSFEGEKPLIPGDGEKLGRVHALQWRYEGFAGAESVPNLSLESGAHGVPQAHGAGHSYGERLFRPEIGRALTDAAHFIKMSAGGGGGRNNSDSEDSDSVDGLSAGPGAVGRSDCYSVLSGEDAEEDDAYSLESEHMVEGGKAPVEGPMPMQYTSLSVAEAYRRRQEEWAERGAAKLMKDVRDPQTGQITRQLIKKGIKDFKFGEALGDGSYSTVVLATCIESGKKYAAKILNKEYLIKQKKVKYVNIEKNTLQRLNSSRVPGVIKLYFTFQDEANLYFLLEYAPNGDFLSVMKRFGTLSEECTKYYGAQILDAIHHLHKQGIIHRDVKPENILLDKTMKIKLTDFGTAKLIGREDENKPYDLNTRSKSFVGTAEYVSPELLNDNYVDSRCDIWAFGCILFQMVAGKPPFKATNEYLTFQKVMRVQYAFTAGFPMILRDLIKQLLVKKPEQRLTILQIEKHHFFNDINFRNGSVWSNPAPQIAPYKVTAKAMQSVPVKSTKSQLYGDSSRKQSISKPSSSSSSVPSSQRQTQTAPGTSSSVAEPVKLSAPTSKLDSQTARILEHARNEIRERKNMRGTSASAAAAALYGRRPSNSSVWNGNHSPPSASVKTPHSAPAHTAQSSSSHGSPTSTANSGQKSSTQMSKADILWSFYLLKLDERIIKTGDVQITTIKNIDLEGQLTKLNGLLVQPLKNNSKPSFLTNVVRNGKSTNGQTNSDRKLQSMNEQDYYVESEIAWDNVKDERRDRVTVESGDDSGTMFNRLRRFFGSRSDDSFDGFRENTRPLHRTMVLTSYGRCLIFTKMIKPSPVTDLPYEIQYELNLCKEGVSIKEIVTDGNETGLFVIQTPFRSFIFKCGMSDVDQWTAALQKSIRLNNERLALEGKDEGPSEVANLAARMSVGRQASTPKTPNNPIMRSPSKQQHASTTPVKNRAGTQHVTPNNKTISAPGTPALKPNGEGKHERLFESFINRKNTEKQPVQPVPQSSTLVHGLPLSSPRVRVVTPRSSVSASSPHSTRHKSVSSRMFTRTDRSLRR

SEQ ID NO: 44150 - protein, 403 aa, Pseudomonas syringae pv. phaseolicola 1448A
MQFNKSNKLANVCYDIRGPVLKHAKRLEEEGHRILKLNIGNPAPFGFEAPDEILQDVIRNLPTAQGYSDSKGLFSARKAVMQYYQQKQVEGVGIEDIYLGNGVSELIVMSMQALLNNGDEVLVPAPDYPLWTAAVALSGGSPVHYLCDEQANWWPDLEDIKAKITPNTKAMVIINPNNPTGAVYSREVLLGMLELARQHNLVVFSDEIYDKILYDDAMHICTASLAPDLLCLTFNGLSKSYRVAGFRSGWIAISGPKHNAQSYIEGIDILANMRLCANVPSQHAIQTALGGYQSINDLILPPGRLLEQRNRTWELLNDIPGVSCVKPMGALYAFPRIDPKVCPIFNDEKFVLDLLLSEKLLVVQGTAFNWPYPDHFRVVTLPRVDELEQAIGRIGNFLKGYRQ

SEQ ID NO: 44151 - protein, 591 aa, Listeria monocytogenes str. 4b F2365
MEKAGIYHQPASSYAYSYDAKTLHIRIRTKRLDISEVTLIAADPYLWKDGKWQSESYTMRKIAETEEHDYWFFAITPEHRRLQYGFLLTDTEGETTFYGGRGFFEPTEANLATMDYYFKFPFIHAVDTFEAPEWVGNTIWYQIFPERFANGNPAISPENALPWGSKDPNTTDFFGGDIEGIIEHLDYLAELGINGVYLTPVFEAPTNHKYDTVDYKKIDPHFGDKETFRKLVQEAHKRGIRIMLDAVFNHIGDTSAEWQDVVLNEEKSAYRDWFHIHSFPVRQNENGNIEGEPTLSYDTFAFTTHMPKLNTANPEVQKYLLDIATYWIREFDIDGWRLDVANEVDHAFWKEFKKAVQAEKEDIYILGEIWHDSWIWLLGDEFHAVMNYPFTQTIIENFIEEKITPEQMVSGINEQYMRYPNQVNEVMFNMLDSHDTARILTRANNDEDKVKQALAFMFAHTGSPCIYYGTEIGMDGGNDPGCRKCMEWDETKQNQDMLAFTKQLIALRKDNQAIITSGELTWLGASSETGITAFSKELNGEKLHFLFNQAKEDKDFTISFENTATDIWNNRAVTENLVVPAKGFLVIKENS

SEQ ID NO: 44152 - protein, 413 aa, Agrobacterium tumefaciens str. C58
MSTDKTQQHASRNTGGLIDHAQDYFNAAHQQGLMALYARPRAARQVDIVFDGFPSQRITDFVRCSYLGLDNHPLIIDGAIKAIEEYRALHWSCARTRLNFAILRDLENSLSDLFQARVITYTTVLAANMGALPIVASGHLTGGIRPMMVFDRHAHATLAFHKGTIALETQVRTLAHNDLDALEELCRSNRAVAYVCDGVYSMGGNAPIRDLRYLQDRYGLFLYIDDAHGVSICGKNGEGFVRSQYGNELGERTIIAASLGKGFGASGGMLMLGTARQEELFRRFAVAHAFSASLNVAAIGAVSGSLTIHRSDELLRRQLALSSNIALLDSMLVTEQSGAPLPIRTVNLGTEERAVNGTRALLDRGIYGSAIFFPTVAKGKAGIRVCVTSDHTPEEITGLCTALSEIMDDQAIS

SEQ ID NO: 44153 - protein, 174 aa, Dendrobium grex Madame Thong-IN
MGRGRVEMKRIENKINRQVTFAKRRTGLLKKAYELSVLCDVEVALIIFSNRGKLYEFCSSRSMLKTLEKYQKCSDGAPEMTMTSRETQSSQVEYLKLKSQVEALQRSQRNLLGEDLNPLGGKDLDQLERQLEASLKQIISTRMQYMLDQLGDLQQRELLLFETNKSLGTRVSAL

SEQ ID NO: 44154 - protein, 304 aa, Staphylococcus aureus subsp. aureus MRSA252
MTNKVVILGSTNVDQFLTVERYAQPGETLHVEEAQKAFGGGKGANQAIATARMQADTTFITKIGTDGVADFILEDFKAAHIDTSYIIKTAEAKTGQAFITVNAEGQNTIYVYGGANMTMTPEDVINAKDAIINADFVVAQLEVPIPAIISAFEIAKAHGVTTVLNPAPAKALPNELLSLIDIIVPNETEAELLSGIKVTNEQSMKDNANYFLSLGIKTVLITLGKQGTYFATKNQSQHIEAYKVNAIDTTAAGDTFIGAFVSRLNKSQDNLADAIDFGNKASSLTVQKHGAQASIPLLEEVNQV

SEQ ID NO: 44155 - protein, 247 aa, Dendrobium grex Madame Thong-IN
MGRGRVQLKRIENKINRQVTFSKRRSGLLKKAHEISVLCDAEVALIVFSNKGKLYEYSTDSSMEKILERYERYSYAERALFSNEANPQADWRLEYNKLKARVESLQKSQRHLMGEQLDSLSIKELQRLEQQLESSLKFIRSRKTQLILHSISELQKMEKILLEQNKTLEKEIIAKEKAKALVQHAPWEKQNQSQYSSALPPVISDSVPTPTSRTFQARANEEESPQPQLRVSNTLLPPWMLSHMNGQ

SEQ ID NO: 44156 - protein, 174 aa, Archaeoglobus fulgidus DSM 4304
MARKPARMWRRLERPYTRTEYIDGAPGTRVRMFDMGNKSADFPVMLTLVAKEAVQIRENALEAARVVANKYVSRRAGASNYKLKLRIFPHHILREHKMAVGAGADRISQGMRAAFGKPVGRAARVKPGTKIMSVWVKPEHFEIAKEALRRAAMKMPTPTKIVVEKGHELLKGKI

SEQ ID NO: 44157 - protein, 372 aa, Archaeoglobus fulgidus DSM 4304
MKDGLEDVIACKTTISRIALENGRAILEYRGYDIRDLARKASYEEVAYLLLYGELPKKYELQDFKIELAERRELPPQIIGLLTHLPPYTHPMVVLRTATSYLGSLDKKIAVRTREETFNKAKDLIAKFPTIVAYYHRIRTGRNIIPPALEFSHAANFLYMLHGEEPTKTAERALDMDLILHAEHELNASTFAARIAASTLADIYACVVAATGTLMGPLHGGAAQEVMRMLREVASPRRAEEYVKRKIEAGERIMGFGHRVYRGVMDPRAELLRYLAKRLAAEGSTKWFEISEAIAKAAYKYKKLLPNVDFYSASVYANLGIPDDLFVNIFAMGRISGWTAHIIEQYENNRLIRPRAEYVGEKEKKFIPLSKR

SEQ ID NO: 44158 - protein, 373 aa, Kalanchoe pinnata
SDSGKDAGRLSAAWQLYKAQEELVKVAKEYGVKLTMFHGRGGTVGRGGCPTHLAILSQPPDTVHGSLRVTVQGEVIEQSFGEEHLCFRTLQRFTAATLEHGMNPPVAPKPEWRALLDEMAVVATEKYRSIVFKEPRFVEYFRLATPELEYGRMNIGSRPSKRKPSGGIESLRAIPWIFAWTQTRFHLPVWLGFGAAFKHAIEKDVRNLHMLQAMYNEWPFFRVTIDLVEMVFAKGDPGIAALYDKLLVSEDLWSFGERLRTHYDDTKSYLLQIAGHKDLLEGDPYLKQRLRLRDSYITTLNVCQAYTLKRIRDPSYRVTVRPHISKEIMESSSSSSSSSTSNPAYELVKLNTTSEYAPGLEDTLILTMKGIAA

SEQ ID NO: 44159 - protein, 220 aa, Dendrobium grex Madame Thong-IN
MGRGRVELKRIENKINRQVTFAKRRNGLLKKAYELSVLCDAEVALIVFSNRGRLFEFCSSTSMTKTLERYQKCSYNASESAVPSKDAQNSYHEYLTLKAKVEYLQRSQGNLLGEDLIELSSKELDQLELQLEMSLKQIRSTKTQLMLDQLCDIKRKEQMLHEANRALSMKLKEDGPEIPLELSWPGGETNGSSERQQPQSDKFFQPLPCSNPSLQIGYSP

SEQ ID NO: 44160 - protein, 544 aa, Buchnera aphidicola str. Bp (Baizongia pistaciae)
MKKRFIFITGGVVSSLGKGITTAALAAVLEARNLNVTIIKLDPYINIDPGTISPEQHGEVFVTEDGAETDLDLGHYERFIRTKMTRKNNFTTGSIYSEVLNKERKGEYLGATIQIIPHITNTIKKRIISCAHNVDIVFVEVGGTVGDIESLPFLEAIRQIAIDIGRENTIYIHLTLVPYISITKEIKTKPTQHSVKELLSIGIQPDILICRSQYTIPIQARSKIALFCNVLKESVISLINVDSIYKIPKLLNLQKVDQIICHHFKLKVPPADLSEWDEVIYNELNTNNVVTIGIIGKYIKSPDAYKSVIEALKHGGIKNKTVVKIKLINSEKIEKNGTNRLNCLHGILIPGGFGHRGITGKLITVEYARINNVPFFGICLGMQIALIEFFRNVIGLKDANSTEFSQNCQHPIISLIPKGNRNLPNINNNVKKKLGGTMRLGNQTCYLKQDSISHKLYGKNIISERHRHRYEVNNKFINKIEKYGLKITGKSKKNKLVEIIELSNHLWFIACQFHPEFTSTPRDGHPLFIDFIKAAIQYKKIKQK

SEQ ID NO: 44161 - protein, 373 aa, Kalanchoe pinnata
SDSGKDAGRLSAAWQLYKAQEELVKVAKEYGVKLTMFHGRGGTVGRGGGPTHLAILSQPPDTVHGSLRVTVQGEVIEQSFGEEHLCFRTLQRFTAATLEHGMNPPVAPKPEWRALLDEMAVVATEKYRSIVFKEPRFVEYFRLATPELEYGRMNIGSRPSKRKPSGGIESLRAIPWIFAWTQTRFHLPVWLGFGAAFKHAIEKDVRNLHMLQAMYNEWPFFRVTIDLVEMVFAKGDPGIAALYDKLLVSEDLWSFGERLRTHYDDTKSYLLQIAGHKDLLEGDPYLKQRLRLRDSYITTLNVCQAYTLKRIRDPSYRVTVRPHISKEIMESSSSSSSSSTSNPAYELVKLNTTSEYAPGLEDTLILTMKGIAA

SEQ ID NO: 44162 - protein, 454 aa, Saccharomyces bayanus
MSEPEFQQAYDEVVSSLEDSTLFEQHPKYRKVLPIVSVPERIIQFRVTWENDKGEQEVAQGYRVQYNSAKGPYKGGLRFHPSVNLSILKFLGFEQIFKNSLTGLDMGGGKGGLCVDLKGRSNNEIRRICYAFMRELSRHIGQDTDVPAGDIGVGGREIGYLFGAYRTYKNSWEGVLTGKGLNWGGSLIRPEATGYGLVYYTQAMIDYATNGKESFEGKRVTISGSGNVAQFAALKVIELGGTVVSLSDSKGCIISETGITSEQVADISSAKVNFKSLEQIVGEYSTFTENKVQYISGARPWTHVQKVDIALPCATQNEVSGDEAKALVAQGVKFVAEGSNMGSTPEAIAVFETARATASTLKESVWYGPPKAANLGGVAVSGLEMAQNSQRITWSSERVDQELKKIMVNCFNECIDSAKKYTKEGNALPSLVKGANIASFIKVSDAMFDQGDVF

SEQ ID NO: 44163 - protein, 119 aa, Oryza sativa
MAKSSFKLDHTLERRQAEANRIREKYSDRIPVIVEKAERSDIPDIDKKKYLVPADLTVGQFVYVVRKRIKLSPEKAIFIFVKNTLPPTAALMSAIYEENKDEDGFLYMTYSGENTFGLL

SEQ ID NO: 44164 - protein, 396 aa, Glycine max
  misc_feature (55)..(55): Xaa can be any naturally occurring amino acid
  unsure (1)..(396): unsure at all Xaa locations
NKFILCSHASVRLREDDRRGFPIHRCLRLLLSLSPLPYRNKVVLSSAEGTVGCSXAMDLASNLGGKIDKAEVLSAVQKYEKYHVCYGGQEEERKANYTDMVNKYYDLVTSFYEFGWGESFHFAPRWKGESLRESIKRHEHFLASQLGLKPGQKVLDVGCGIGGPLREISRFSLTSITGLNNNEYQITRGKELNRIAGVDKTCNFVKADFMKMPLPDNSFDAVYAIEATCHAPDAYGCYKEIFRVLKPGQCFAAYEWCMTDSFDPQNPEHQKIKAEIEIGDGLPDIRLTAKCLEALKQAGFEVIWEKDLAVDSPLPWYLPLDKSHFSLSSFRLTAVGRLFTKNMVKVLEYVGLAPKGSLRVQDFLEKAAEGLVEGGKREIFTPMYFFLARKPDSDRN

SEQ ID NO: 44165 - protein, 431 aa, Oryza sativa
MRAVSMAATHRRHRRTDGRLQHNTVTVTEEAGATIPAANMLAAAASVKLSTAGTATAPKMALFKPLHLPPLFAAAAAAAGPRPLSLSARPLYRQQDPLFLASRVASPAPPPPSATADGARPVEAAPAGAAPEEAARRAKIGVYFATWWALNVIFNIYNKKVLNAFPYPWLTSTLSLAAGSAIMLASWATRIAEAPATDLDFWKALSPVAIAHTIGHVAATVSMAKVAVSFTHIIKSGEPAFSVLVSRFFLGEHFPAPVYFSLLPIIGGCALAAITELNFNMIGFMGAMISNLAFVFRNIFSKKGMKGKSVSGMNYYACLSMLSLVILLPFAFAMEGPKVWAAGWQKAVAEIGPNFVWWVAAQSVFYHLYNQVSYMSLDEISPLTFSIGNTMKRISVIVASIIIFHTPVQPINALGAAIAILGTFIYSQAKQ

SEQ ID NO: 44166 - protein, 177 aa, Nostoc punctiforme PCC 73102
MRQQEPGVTVWFTGLSGAGKTTICQFVEKELRIQGYRVEVLDGDAVRQNLCKGLSFSKEDREENIRRIGFVAHLLARNNVIVLVSTISPYRKVREEVRQNIPSFIEVYVNASLEVCEQRDVKGLYKKARMGEIKNFTGIDDPYEIPLRPEVECKTNQETLYQSATKVLEKLEELGYI

SEQ ID NO: 44167 - protein, 325 aa, Pseudomonas aeruginosa UCBPP-PA14
MKKNVFVFSRLAPEHLERLQRQFNVRVLEPKQGDIDAQYAAALPDTHGMIGVGRPLGARQLEQAKQLEVISSVSVGYDNYDLDYLNRRGIALTNTPDVLTETTADLGFALLISAARRVAELDAWVKAGNWKRTVDAPQFGTDVHGKKLGILGLGRIGAAIARRGRFGFGMQVLYHGNNRKPELEQELGARFLGFDELLGEADFVCVVVPLGAQTRRLIGARELGLMKPSAILVNVARGQVVDEAALVAALREKRILGAGLDVYEKEPLAESPLFALDNVVTLPHIGSATHETRRAMAERALQNFEAALRGERPLDLVNPQVWRRG

SEQ ID NO: 44168 - protein, 310 aa, Triticum aestivum
  misc_feature (136)..(136): Xaa can be any naturally occurring amino acid
  misc_feature (177)..(177): Xaa can be any naturally occurring amino acid
  misc_feature (201)..(201): Xaa can be any naturally occurring amino acid
  misc_feature (228)..(228): Xaa can be any naturally occurring amino acid
  misc_feature (237)..(237): Xaa can be any naturally occurring amino acid
  misc_feature (246)..(246): Xaa can be any naturally occurring amino acid
  misc_feature (255)..(257): Xaa can be any naturally occurring amino acid
  misc_feature (261)..(261): Xaa can be any naturally occurring amino acid
  misc_feature (266)..(266): Xaa can be any naturally occurring amino acid
  misc_feature (268)..(268): Xaa can be any naturally occurring amino acid
  misc_feature (276)..(276): Xaa can be any naturally occurring amino acid
  misc_feature (286)..(286): Xaa can be any naturally occurring amino acid
  misc_feature (290)..(290): Xaa can be any naturally occurring amino acid
  misc_feature (308)..(308): Xaa can be any naturally occurring amino acid
  unsure (1)..(310): unsure at all Xaa locations
RNGTNESPANLVSDRPQARRILLPRRLKMQIFVKTLTGKTITLEVESSDTIDNVKAKIQDKEGIPPDQQRLIFAGKQLEDGRTLADYNIQKESTLHLVLRLRGGMQIFVKTLTGKTITLEVESSDTIDNVKAKIQXDKEGIPPDQQRLIFAGKQLEDGRTLADYNIQKESTLHLVLXRLRGGMQIFVKTLTGKTVTLEVEXSDTIDNVKAKIQDKEGIPPDQQRLIFXAGKQLEDGXRTLADYNIXKESTLHLVXXXSGGXMRSFXKXLTGKTFTXLEGESFETIXNVKXKIQDKGGIPPDQQGLFFXGK

SEQ ID NO: 44169 - protein, 99 aa, Arabidopsis thaliana
ARAAREKIGYWRYITIYRHLKENPEFQCYPIFKYFENWCQDENRHGDFFSALMKAQPQFLNDWQAKLWSRFFCLSVYVTMYLNDCQRTNFYEGIGFKHK

SEQ ID NO: 44170 - protein, 307 aa, Pseudomonas fluorescens PfO-1
MPKSIVAALQIGALPGGKAETLEQILSWETAIIESGAALVVMPEALLGGYPKGEGFGTQLGYRLPEGREAYARYFANAIDVPGAETEALAGLSARTGANLVIGVIERAGSTLHCTALYFDPQAGLVAKHRKLMPTGTERLIWGKGDGSTLPVLDTQVGKLGAVICWENMMPLLRTAMYAKGIEVWCAPTVDEREMWQVSMRHIAHEGRCFVVSACQVQASPNDLGVEIDNWPGDRPLIAGGSVIVGPMGDVLAGPLRGEAGLLTAEIDTEELVRARYDYDVVGHYARPDVFELSVDERAKPGVRFTT

SEQ ID NO: 44171 - protein, 488 aa, Pseudomonas fluorescens PfO-1
MTVSEKAPRNNDLIYGLNDRPHFTATVFAALQHVLASFVGIITPTLIMGGALGLQSEIPYLISMALFVSGLGTFVQAKRFGPVGSGLLCLQGTSFSFISVILSAGFMVKARGGGTDEILSTIFGVCFFAAFIEVVLSQFIGKLRMLITPVVTGTIITLMGLSLIKVAMTDIAGGFGAADLGAASHVFLAALVLGTIVVLNRVDVPFLRLGAIVIGLTLGYVVAWLMGTVDFANLPEVPVVSVPVPFKYGFNFDWVAFVPVAVIFLVSPLEAAGDLTANSMISRQPVKGPLYIRRIKSGLLADGLNSAMAAVFNSMPMVTFAQNNGVIQLTGVASRYVAFFIAGLLVLLGLFPMIGAVLQLMPKPVLGGAELVMFGTVAVAGIKILAEAGLHRRNMLIVAISVGMGLGIAAVPEVLRELPQALRNIFESPITVGALCAIVLNIFLPEEFIELEEDDFDPEASILQVMENPDLPAKAEPATKAAVAQLNR

SEQ ID NO: 44172 - protein, 606 aa, Candida albicans SC5314
MQSVYPHKTTLHIEPSYYDNGVPVFQPTMHEFRDFYNFNKAINKYGMQSGIVKVIPPTQWVSRVQKCYTESNLEQVSIHNPIVQSINTNAPGIYQSQNIERYKKYSIFQWKEMAKTRKPPRRKQRGKSETETHSKDIPFYNINTSEYTDDRCKELETNYWRSLSYSEPMYGADTMGSVFDKSITAWNVAHLPNLLDLMEEKLPGVNQAYLYAGLWKASFAWHLEDQDLYSINYLHFGAPKQWYSIPQSQHEEFYALMVDLFHDEFKQCSEFLRHKTFMVSPAYLEKHGIRVNHTIHREGEFIITYPYGYHAGFNYDYNLAESVNFALDDWFEFGKRTKKCECISDSVGINIKHLWEKYYGTKYEAVKEEDGRDGGLEADSDGSIEVVKVEKIQRKCRKRKQDNVHTTNTHERVSTKRPHKQPDIPHECALCPNTLQHTKYSHSALFELLQADTYGTTPERPRRVHKICASMFPHQLKCDFKTNTVHGLDDITKNQKKLRCGVCRQSEMGACFQCSYKKCTRAFHGTCGLVDGVQYDFDSGEAFCKFHRQGPTSAEFKVGMYVQFLFNHGVYFGQLVNLGDGDVEVEVYPSTQDVIEIPTTSIINVV

SEQ ID NO: 44173 - protein, 107 aa, Lactobacillus delbrueckii subsp. lactis
GNYQEDFKKVKDLDNVKQMQYIDLHHFMLNDIEQKADKISMAHSLELRVPYLDVKIAKLANSIPSKYLVNKYDTKYALRKASEQVLPDEWAKRPKLGFPTPIKQWLQ

SEQ ID NO: 44174 - protein, 110 aa, Lactobacillus delbrueckii subsp. lactis
  misc_feature (101)..(101): Xaa can be any naturally occurring amino acid
  unsure (1)..(110): unsure at all Xaa locations
LQPDTKIRTFAIGMDQNPIDLKYAREVADYLGTDHTEFIMTREDVLGVLREVIYTLETWDITTIRASIGMYILCKKIHETTDLKVILTGECSDELFGYKYXDFAPSPEEF

SEQ ID NO: 44175 - protein, 169 aa, Nicotiana sylvestris
MASQSSKPQSIYDFTVKDAKGNDVDLSIYKGKVLIIVNVASQCGLTNSNYTDLTEIYKKYKDQGLEILAFPCNQFGGQEPGSIEEIQNMVCTRFKAEYPIFDKVDVNGDNAAPLYKFLKSSKGGFFGDSIKWNFSKFLVDKEGNVVDRYSPTTTPASMEKDIKKLLGVA

SEQ ID NO: 44176 - protein, 468 aa, Agrobacterium tumefaciens str. C58
MLQQNCKWRAQIACLPPGQGFYGSMLSSSNTPLTGPNDRQTSIAFFERASTVFPGGVTRATIELDPHPIFVAYGEGAFVTDVDGHRMLDLNNNFTTLIHGHAYPPITEAIAGLLRTGSCFANPMNHEIDLAELLVGRIPAVEQVRFVASGTEAVMFAIKAARATTGRVAIARVEGAYHGAYDWAEAGQHASSNTPCAAYPGMPASVIDDVVLLQFNCPAELEQQIAMNAGRLAAILIDPMPSRAGLIEPTEEFIATINKVAKQHGIVIIADEVLNLRQGFAGASARYGLKPDLVTMGKIIGGGFPIGAVGGRREIMSAFGKQGSKAPLTQGGTFAANPVSMVAGRLAMEALTQDAFQRLEHMGNLVREGLRSRIERHGANLSVTGAASLFRIHAKKVAPVSYQDSIPTASEDVVLKLLRRHFANNGILMPYGAAASLSTPMTDNDMGDIVSVFDDFLVNLDRHAWEAA

SEQ ID NO: 44177 - protein, 421 aa, Nostoc punctiforme PCC 73102
MSVEVLDDHPEPITSAQRAYQASLKLGITKGADRSRAVLAMAQALERSFDDILEANTLDLEASREMAVPELILDWLKLTPTRLEMTVDVLQRLGELSDPLRRVRTADYQLEDSQSYTQLMPLGVIGFIYEAFPDLGAIAAGFCIKTGNSIILKGSTEASHSNAAIAEALQNAIAEVGLPLGCVELITAEHGASIRDLVTQDQYVNLVIPYGRSSLVQQVVRQSTCPVLKSAMGNCYLYWSLNSSLEMVRWMILDSHQSEPDQVNAIEKVLIHRQALPSSLAVLWNSLMEKGFEIRGDAELVQAFPQLQLVKEGEWGNPYLTKTVAFKLVDSLESAIAWINEHSSGHADSIVTESYQESRQFALGVNSASTYINTSPRFSRNPSRGDSVFLGMSNQKGHRRGFISLETLTTVKHIVQGNGRF

SEQ ID NO: 44178 - protein, 364 aa, Candida tropicalis
MTPNPSLVLNKVDDISFEEYEAPKLESPRDVIVEVKKTGICGSDIHYYAHGSIGPFILRKPMVLGHESAGVVSAVGSEVTNLKVGDRVAIEPGVPSRFSDETKSGHYHLCPHMSFAATPPVNPDEENPQGTLCKYYRVPCDFLFKLPDHVSLELGAMVEPLTVGVHGCKLADLKFGEDVVVFGAGPVGLLTAAVARTIGAKRVMVVDIFDNKLKMAGDMGAATHTFNSKTEGDYEALIKKFDGVQPAVVLECSGAQPCIYMGVKILKAGGRFVQIGNAGGDVNFPISDFSTRELSLHGSFRYGYGDYQTSIDILDRNYANGKDKAPIDFELLITHRFKFKDAIKAYDLVRAGNGAVKCLIDGPE

SEQ ID NO: 44179 - protein, 374 aa, Leptospira interrogans serovar lai str. 56601
MLKIYKVQITKHLVNFSRVISVVILSFFKCLVKRKHSRKEKMANIYYDSDCDLNSLKGKTIAVIGYGSQGHAQAQNMKDSGLKVIIGLKEGSKSIQDAKNAGFEVYSVSEASQKADIIQILAPDTIQADLYKKDIEPNLKKGDALVFSHGFNIHYDFIKPPKEVDVYMVAPKGPGHLVRRVYTEGGGVPCLIAIYQDSSGEAKKRALAHAAGVGGGRAGILETSFREETETDLFGEQVVLCGGLSNLIMAGFETLTEAGYDPEIAYFECLHEVKLITDLIYEGGLARMRFSISDTAEYGDYVSGPRVIDPGVKQRMKEVLNDIQKDKGAKFATNWMAETKAGYPNFKNMRDKNASHPIESVGKKLRSMMKWLSK

SEQ ID NO: 44180 - protein, 512 aa, Streptomyces avermitilis MA-4680
MSASTSRTLPPEIAESVSVMALIERGKAEGQIAGDDVRRAFEADQIPATQWKNVLRSLNQILEEEGVTLMVSAAEPKRTRKSVAAKSPAKRTATKTVAAKTVTAKKATATAAPAVPVGDDPAEDASAKKAAAKKTTAKKAVAKKTVAKKTAAKKTTGKKDDVELLDDEAVEETAAPGKAGEEPEGTENAGFVLSDEDEDDAPAQQVAAAGATADPVKDYLKQIGKVPLLNAEQEVELAKRIEAGLFAEDKLANADKLAPKLKRELEIIAEDGRRAKNHLLEANLRLVVSLAKRYTGRGMLFLDLIQEGNLGLIRAVEKFDYTKGYKFSTYATWWIRQAITRAMADQARTIRIPVHMVEVINKLARVQRQMLQDLGREPTPEELAKELDMTPEKVIEVQKYGREPISLHTPLGEDGDSEFGDLIEDSEAVVPADAVSFTLLQEQLHSVLDTLSEREAGVVSMRFGLTDGQPKTLDEIGKVYGVTRERIRQIESKTMSKLRHPSRSQVLRDYLD

SEQ ID NO: 44181 - protein, 168 aa, Zea mays
  misc_feature (66)..(66): Xaa can be any naturally occurring amino acid
  unsure (1)..(168): unsure at all Xaa locations
PPCLTAFTSRKQLRHEHPAQLDKMVPVTILTGFLGAGKTTLLKRILTEFHGRRVAVIENEFGPESXIDDDLLVRDGDEEIVELSDGCVCCTVRGDLMRTLSDLRAKREAGALNFERVFLETTGVADPGPVCRTFFVDDDVAEYYRLDAVVSVEFDLGKFSDSVTLQGV

SEQ ID NO: 44182 - protein, 586 aa, Arabidopsis thaliana
  misc_feature (489)..(489): Xaa can be any naturally occurring amino acid
  unsure (1)..(586): unsure at all Xaa locations
MKPFVIRNLPRFQSTLRSSLLYTNHRPSSRFSLSTRRFTTGATYIRRWKATAAQTLKLSAVNSTVMMKPAKIALDQFIASLFTFLLLYILRRSSNKNKKNRGLVVSQNDTVSKNLETEVDSGTDVIIVGAGVAGSALAHTLGKEGRRVHVIERDFSEQDRIVGELLQPGGYLKLIELGLEDCVKKIDAQRVLGYVLFKDGKHTKLAYPLETFDSDVAGRSFHNGRFVQRMREKALTLSNVRLEQGTVTSLLEEHGTIKGVRYRTKEGNEFRSFAPLTIVCDGCFSNLRRSLCKPKVDVPSTFVGLVLENCELPFANHGHVVLGDPSPILMYPISSSEVRCLVDVPGQKLPPIANGEMAKYLKTRVAPQVPTKVREAFITAVEKGNIRTMPNRSMPADPIPTPGALLLGDAFNMRHPLTGGGMTVALADIVVLRDLLRPIRNLNDKEALSKYIESFYTLRKPVASTINTLADALYKVFLASSDEARTEMXREACFDYLSLGGVFSSGPVALLSGLNPRPLSLVLHFFAVAIYAVCRLMLPFPSIESFWLGARIISSASSIIFPIIKAEGVRQMFFPRTIPAIYRAPP

SEQ ID NO: 44183 - protein, 482 aa, Desulfovibrio vulgaris subsp. vulgaris str. Hildenborough
MVRTPRYFALLLLMVAVVLSSTAQAASLPDFRELAKNAGAAVVNISTEKTVQAPENPFGDMLRNAPQGTPFDRFFEQFERFHGKMRPQKQRSLGSGFILSADGYIVTNNHVIADADVIHVNIENETGKSASYDAKVIGTDEETDLALLKIDAKRQLPVLRFGDSDSLEVGEWLMAIGNPFGLDHSVTAGILSAKGRDIRSGPFDNFLQTDASINPGNSGGPLINMKGEVIGINTAIVASGQGIGFAIPSNMAARIIDQLKSDKKVRRGWIGVTIQDVDENTARALGLGEPRGALVGSVMPGEPADKAGIKAGDILLKVEGEDIADSGRLLRRVAALKPGETAKITLWRNGQTKTVNLTLGERTAEHLAAQGGTPRQTPESKQQASSSLGLTVRPPNAEEARALKLDRPQGLLVIAVEEGRPAADADIRAGDVVLSANLHPVNSTADLAKVVQEDAKRRGAVMLQIQRRGQTFFRTIPIEAEK

SEQ ID NO: 44184 - protein, 699 aa, Adiantum capillus-veneris
MAKPCTIVWLRRDLRLEDNPALCAAGRIGNVVPVFIWSPEEERQFHPGRVSRWWLKQSLIQLDVSLRSFGVPLVMRKSTDTLGTLQELIKATGATQVFYNHLYDPISLVRDHHVKQGLTQSGIQVQSFNGDLLYEPWEVLNDDGKPFTSFESYWQKCLNMPFEPDSPLLPPRRLTSIAGSIPTYTPEELGLEDETEKSSNALLARAWAPGWSNADRALEAFLAGPLLEYSRNRHKIDGPTTSLLSPHMHFGEVSVRKVYHSVRRLQLLWAKDGSKLGEESIYFFMRSIGFREYSRYLSFNFPFTHERSLLSNLKSFPWRVDEGFFKAWRQGRTGYPLVDAGMRELWATGWLHNRVRVIVSSFCVKFLQLPWRWGMKYFWDTLLDADLESDVLGWQYISGSLPDGHELDRMDNPQTEGYKHDPVGEYVRRWLPELVRLPTEWIHHPWDAPPAVLRAAGVELGSNYPRPIVEVAAARERLRQAVAQMWEQEAALKAAGVATDAEALDENLEVKVVTPPLVSTHSLKTAVAGTLSRSSLRDQRVPTCGKQLSMENGVPHEGDNSPDIAMSPQQDNLLATTAPPEAHSTAEKCDNKSMNCDQTPEPKHNVPPPAVSDGNSTAESSSSPKQVNDELRNGVPLVWVPSIVNQQPVVEPSCVPYAGDAGQLRKHLLALQNSRTENKMEEKSPLSEWRRRTKRKAKA

SEQ ID NO: 44185 - protein, 393 aa, Solanum commersonii
MALNFNSPTFQSIKTTRRPCSPLRSPRVFMASTLRPPSVEDGNVKKPFSPPREVHVQVTHSMPPEKREIFDSLHGWADNNILGHLKPVEKCWQASDFLPDPASEGFEDQVKELRERCKEIPDDYFVVLVGDMITEEALPTYQTMLNTLDGVRDETGASLTPWAIWTRAWTAEENRHGDLLNKYLYLSGRVDMRQIEKTIQYLIGSGMDPRTENNPHLGFIYTSFQERATFISHGNTARHAKEHGDMKLAQVCGIIAADEKRHETAYTKIVEKLFEVDPDGTVLAVADMMRKKISMPAHLMYDGRDDNLFEHFSTVAQRLGVYTAKDYADILEFLVGRWEIEKLTGLSGEGHKARDYVCGLAPRIRKLEERAQARAKQKAPVPFSWVFGKDIKL

SEQ ID NO: 44186 - protein, 487 aa, Adiantum capillus-veneris
MTTSTTIVWLRRDLRLDDNPALKEASKIGNAVVPVFVWVPEEEGQFQQGRMSRWWLKQSLKQLAQSLDSLGSPLIIRRSSSSLQALMDLVIHTQASQVFFNHLYDPISLVRDQRVKEGLLQTGIHVRTFNADLLYEPWQVNDPSGKAFTTFNEFWDKCLNMPEEPHAPLLPPTRSLLAFAGHLPGCTVEDLELENNSEKDSNALLARSWTPGWINAEKALEAFVERHLLQYAANQHMVDGSTTSFLSPHLHFGELSVRKVFYNVRIKAVQWTKEGKPDGEQSVNLFLRSIGLRDYSRYICFNFPFTHERLILQNRRPFPWRVDEGLFKAWRQGRTGYPLVDAGMRQIWATGWLHNRIRVIVSSFFVKVLQLPWTWGMKYFWDALLDADLENDILGWQYISGGLPDGHELERMDDLQIEGYKYDPRGEYVRKWLPELSRLPTEWIHHPWDAPPRALRAAGVELGSNYPRPLVEFAAAWSRLQTALREA

SEQ ID NO: 44187 - protein, 149 aa, Gloeobacter violaceus PCC 7421
MERTFIAIKPDGVQRGLVGEILQRFERRGFKLVGLKLMQVSEALAQKHYAEHKERPFFGGLVAFITSSPVVAVVLEGKGVVATARAMMGVTNPLNSPLGTIRGDYGIDIGRNIIHGSDSLESAEREIALWFAPAELLEWQATLGSWVYE

SEQ ID NO: 44188 - protein, 568 aa, Vibrio parahaemolyticus RIMD 2210633
MESPNMNQPKINSTAGCALPPPNEMILKWAAERPNEVYLKQIINRQFVEFTYAEVADQALKLVSALRGLGIQPGDKVALVSKNCAEWFICDLAMMLGDYVSVPIFPTAGADTIEYCVTHSESKALIGGKLDDPAATQQVIDAMPELISIALPYDSAPQCQYQFNALIADAVPSEERPQHYDDKLMSLVYTSGTSGLPKGAMLTYGAFSWSVQQLINHIGIQANDRLFSYLPLAHITERVYIFGSSIMGGVPTAFPESLDTFIEDVKMHRPTLFISVPRLWTLFQQRIQDKLPQKKLNFLLKIPFVNSLIKKKLAEGLGLDQARVLGCGSAPVSPALLDWYHSVGLNITEAWGMTESFAYSTINYPFRADKIGTVGNAGPGIELKIADDSEIMVRGKGLFSGYYKNDIATQESFDSDGWLHTGDIGAIDKDGYLTIQGRKKDTFKTAKGKFVSPVPIEKKLFEYSRVEMMCLIGLGLPGPILLVVPHDFPHFDKERYARTTRKVIARMNQELASHEQIKGVLMIKEPWSIENGVLTPTLKIKRHVLEQKYHELGHNWPKDELVLWEEDL

SEQ ID NO: 44189 - protein, 289 aa, Nocardia farcinica IFM 10152
MTLTGTDAGIDRRARVDEFAYRIRHNVLDMGEEQGQGYVGQALGAADILATVYGHYLRYRPDDPHWPGRDRFLLSTGHYAIGLYAALAEAGIVPRAELASYGSDDSRLPMSGMASYTPGMEISGGSLGHGLTVAVGMALGLRHQGSAARVFNFLSDGELDEGSTWEAAMSAHHHRLGNLIAMVDINALQADGATAGVLSTEPVADKWLACGWRTVRVDGNDTGALLEAFDEALDGTAAHGAPAVVLCDTKVGKGVPLLENRTKAHFMRIDEHEWQICRDQLTAGHEDRR

SEQ ID NO: 44190 - protein, 499 aa, Oryza sativa
MSDHRTHASDYHPVASQPDVQCLVCTRPFTLDAQVTDTFEALAICRDCKMTVLNDDERDEITSTYRQNTRRRQISRTASIDFLEDAFLQEFSQLIDLARRQGRETDIDSSSVAPQHASFNSTPSQSQRWHASDDESDGLNYVDSVFGEIESAISLGDYGGDSDTSIEEHSVMTRRRISIQLDNDSYMNTDTDIDPMNARLDQWDSDDQEDVEESGFDEIVNTMTQHQQQSHDIQLSGLSEDESEDGVWNWSVSVRQRANVTNLLDDMEEPEMRTTFVGNPDDYVDARQFEMLLEQFAEDNDSRRGAPPAATSFIENLPSVIISASHQTNGDVICPVCKDPIPTRARAKQLPCMHLYHSSCILPWLSSRNTCPVCRYELPTDDAEYERSKQATTNVRDIQVVEEISDEQEVQVTRQMAAGVIEETNTSEHNVRVDEQPNSARRRSGWLFIAAAPVVSLIGFALVLCFTNPARSGRRQLYCRSPSATEVHVDTKKSWWSMF

SEQ ID NO: 44191 - protein, 462 aa, Bacillus subtilis subsp. subtilis str. 168
MANKELKRGLGARHIQMIALGGTIGVGLFMGSASTISWTGPSVLLAYAICGIFIFFIMRAMGEMLYVEPSTGSFATFGHQYIHPMAGYITAWSNWFQWIIVGMSEIIAVGSYTKYWFPDLPAWIPGIVAMVILGAANLISVKSFGEFEFWFAMIKIVTIILMIIAGIGIIFFGFGNGGDAIGLSNLWSHGGFFAGGFSGFFFALSLVIAAYQGVELIGITAGEAKDPQNTLRNAIQSIIWRILIFYIGAIFVIVTVYPWDELNSLGSPFVSTFSKIGITAAAGIINFVVITAAMSGCNSGIFSAGRMLYTLGVNGQAPKFFKKISRNGVPLYGTIAVLIGLAVGVVLNYIAPPKIFVYVYSASVLPGMIPWFIILISHIGFRKAKGAALDKHPFKMPFAPFTNYLTIAFLLMVLVGMWFNDDTRISLIVGVIFLALVVISYYVFGIGKRTQANLTKSEQAAE

SEQ ID NO: 44192 - protein, 250 aa, Bacillus cereus E33L
MNALAGKTVLVTRAQHQAKQMSVAVKEMSGIPLEIPLLRMEGMSHRQIQHIAEQLHSYDWVIFTSKNGVAFFLDCLRQKLPVTTKIAAVGVKTKLELEKRGYEVDFVPTSFVAEVFAEEFVKRLSGNECILFPKGNLARDVIPVALREIGVSLDELIVYGTKENVEKKQELIEALEVGKVDIITFTSPSTVTSFVRLLEGTNWREWTKKCTIACIGPITEKEASLYFPHIIMPKEYTVEALLQCVCESIK

SEQ ID NO: 44193 - protein, 179 aa, Glycine max
VFFPGFSEVKDVVAFCNWFSNTFFFPRILLLGFSAGAPIPGSPVDQIDQAIGYVSMGFPFGRTPPILFGGPHKAFFQSPKPKFFFLGPQEGFPSVKQLGTKFIFAPGGVEPHLMEGVGPFQMEGPGYDAERGDLFTKFFAPLGSQITDCAEWDLPLLLGMGISLCTKFCGFWDSNVFLG

SEQ ID NO: 44194 - protein, 426 aa, Arabidopsis thaliana
  misc_feature (37)..(37): Xaa can be any naturally occurring amino acid
  unsure (1)..(426): unsure at all Xaa locations
MLPSGLKETQLRESNNNQKVHPQPMEESINQNPEAMXEALISNLFGNISSLKSAYIELQSAHTPYDPEKIQAADKVVISELKNLSEMKHFYRENNPKPVCVSPQDSRLAAEIQEQQSLLKTYEVMVKKFQSEIQNKDSEITQMLQKIEEANQKRLKLDKNLKLRGMSTNEGSNGDGNMQFPDLTTELYVSTYEAAAKAVHDFSKPLINMMKAAGWDLDSAANSIEPDVVYAKRPHKKYAFESYICQRMFSGFQQKNFSVNSESAAVMADDDTDTFFRQFLALKDMDPLDALGTNPDSNFGIFCRSKYLLLVHPKMEASFFGNLDQRDYVTGGGHPRTAFYQAFLKLAKSIWILHRLAYSFDPAAKIFQVKKGSEFSDSYMESVVKNIVVDEKEENPRVGLMVMPGFWIGGSVIQSRVYVSGVKVLE

SEQ ID NO: 44195 - protein, 407 aa, Glycine max
  misc_feature (260)..(260): Xaa can be any naturally occurring amino acid
  unsure (1)..(407): unsure at all Xaa locations
LPTSLEKSPLTNQIEPHRLRLQKVQSSNPGTILVGNTDNQEESAMADASPRTDISTDGDTDDKNQPYDRNEALAAVSDSSDRSKDKSDQKTLRRLAQNREAARKSRLRKKAYVQQLESSRLKLTQLEQELQRARQHGIFISSSGDQAHTLSGNGAMQFDAEYARWLEEQNRQINELKAAVNSHASDTELRMIVDGILAHYDEIFRLKGVAAKADVFHLLSGMWKTPAERCFLWLGGFRSSELLKIYQYRYKNKNLLGWWXEVPKEQLNCALSKALSLLVSQLEPLTEQQLMGITNLQQSSQQAEDALSQGMEALQQSLAETLSTGAPASSGSSGNVANYMGQMAMAMGKLGTLEGFIQQADNLRQQTLQQMHRILTTRQSARALLAIHDYFSRLRALSSLWLARPRD

SEQ ID NO: 44196 - protein, 359 aa, Capsicum annuum
MDSTNQNLTQTEDEAFLFAMQLASASVLPMVLKSALELDLLEIMAKAGPGAAISPSELAAQLPTKNPEAPIMLDRMLRLLATYSVLNCTLRTLPDGRVERLYSLAPVCKLLTKNADGVSVAPLLLMNQDKVLMESWYHLTDAVLDGGVPFNKAYGMTAFEYHGTDPRFNKVFNRGMSDHSTMTMKKILEDYKGFEGLNSIVDVGGGTGATVNMIVSKYPSIKGINFDLSHVIEDAPAYPGVEHVGGDMFVSVPKADAIFMKWICHDWSDEHCLKFLKNCYEALPANGKVLVAECILPETPDTSAATKNAVHVDIVMLAHNPGGKERTEKEFEALAKGAGFTGFRRACCAYQTWVMEFHK

SEQ ID NO: 44197 - protein, 333 aa, Aeromonas hydrophila
MRVLVTGGSGYIGSHTCVQLLQSGHDVVILDNLCNSKRSVLPVIERLSGKQPTFVEGDIRNEALMTEILHDHAIETVIHFAGLKAVGESVAKPLEYYDNNVNGTLRLISAMRAANVKNFIFSSSATVYGDQPKIPYVESFPTGTPQSPYGKSKLMVEQILTDLQKAQPEWSIALLRYFNPVGAHPSGDMGEDPQGIPNNLIPYIAQVAVGRRDSLAIFGNDYPPEDATAVRDYIHVMDLADGHVAAMQQLADKPGVHIYNLGAGIGSSVLDVVNAFSKACGKPVKYHFAPRRDGDLPAYWADATKADKELNWRVTRTLDEMAQDTWHWQSDIG

SEQ ID NO: 44198 - protein, 118 aa, Zea mays
MAGLQRSSQTFRRSGSSGLVWDERLTSQDDDQSGPEDADAATDLKELRHSRSVGSVGLQPQPQPQPQRRRSDDSGQGFRTRRVAPALDPPSPKVPGCIFCGIFRKAGASEPKSKPRRY

SEQ ID NO: 44199 - protein, 368 aa, Prunus cerasus
MGKGGMSSQGGALEPMDGEQENMAAWLVGVNTLKIQPFKLPTVGPNDVRVKIKAVGICGSDVHYLKTMKCADFIVQEPMVIGHECAGIVDEVGSMVKNLLPGDRVALEPGISCWRCEQCKGGRYNLCPDMKFFATPPVHGSLANQIVHPADLCFKLPENVSLEEGAMCEPLSVGVHACRRANIGPETNVLVIGAGPIGLVSVLSARAFGAARIVIVDVDDERLSIAKSLGADDSVKVSTNPQDLENEVSKISKAMRGGVDVSFDCVGFNKTMSTALSATRPGGKVCLVGMGHGVMTVPLTPAAAREVDVVGIFRYKNTWPLCLEFLRTGKIDVKPLITHRFGFTQKEIEEAFETSARGGNAIKVMFNL

SEQ ID NO: 44200 - protein, 429 aa, Bacillus cereus E33L
MKKFDKSIAAFEEAQDLMPGGVNSPVRAFKSVGMNPLFMERGKGSKVYDIDGNEYIDYVLSWGPLIHGHANDRVVEALKAVAERGTSFGAPTEIENKLAKLVIERVPSIEIVRMVNSGTEATMSALRLARGYTGRNKILKFIGCYHGHGDSLLIKAGSGVATLGLPDSPGVPEGVAKNTITVAYNDLESVKYAFEQFGDDIACVIVEPVAGNMGVVPPQPGFLEGLREVTEQNGALLIFDEVMTGFRVAYNCGQGYYGVTPDLTCLGKVIGGGLPVGAYGGKAEIMRQVAPSGPIYQAGTLSGNPLAMAAGYETLVQLTPESYVEFERKAEMLEAGLRKAAEKHGIPHHINRAGSMIGIFFTDEPVINYDAAKSSNLQFFAAYYREMVEQGVFLPPSQFEGLFLSTAHSDADIEATIAAAEIAMSKLKA

SEQ ID NO: 44201 - protein, 452 aa, Pseudomonas syringae pv. phaseolicola 1448A
MAFDFDLFVIGAGSGGVRAARFAAGFGAKVAVAESRYLGGTCVNVGCVPKKLLVYGAHFSEDFDHAKGFGWSLGEASFDWSTLIANKDREINRLNGIYRKLLVDSGVTLLEGHARLVGPQRVEINGQSYSAERILIATGGWPQVPDVPGREHAITSNEAFYLKTLPKRVVVVGGGYIAVEFASIFNGLGADTTLVYRRELFLRGFDGGVRTHLHEELLKRHMTIRFNSDIERIDKQADGSLLLSMKGGGTLETDCVFYATGRRPMLDNLGLDSVDIKLDEHGYIKVDEHYQSSEPSILAIGDVIGGVQLTPVALAEGMAVARRLFKPEQYRPVDYNHIPTAVFSLPNIGTVGLTEEDAIKAGHDVQVFESRFRPMKLTLTDDQERTLMKLVVDAKTDRVLGCHMVGPDAGEIVQSLAIAIKAGATKQVFDDTIGVHPTAAEEFVTMRTPAKR

SEQ ID NO: 44202 - protein, 586 aa, Methylobacillus flagellatus KT
MFSDLWPLLRPYRWQILLAFCLLSLASAILLLVPWAFRDLIDQGFGTGTAAAQNAQDINRHFVFICGLVIVWALIVACRYYIVSWIGERVTADLRSLVYERVLTQSPQFFETLQTGEVLSRLTADTTLIQTVVGSSISLGLRSLFQFIGGMIMLAVTSWYLFSLNLGLMLLLTLPIMLIGRSVKTLSRESQDRIADSSAMAGEILNAMPTVQSFTQEPREQQRFRHSVETSFKAAVRRIRVRAFLAAFVIAGISAAIIFVLWLGAHQVTQGELSGGELASFILYAALVAGSVSTIAEVWGDIMRAAGAAERLLELLNSKPAIRDPSTPVLPSSTDMASIKFDNVSFYYPAKPDQPALDHISLEINAGETVALVGPSGAGKTTLFQLLLRFYDIFEGSISINGLDIRNLSLDTLRGMIAIVPQDPVIFSANALENIRYGRPDASDEEIKHAAQAAQAHAFIERLPQGYDTFLGERGTRLSGGQRQRIAIARAMLKNAPILLLDEATSALDAESETLVQQGLASAMHGRTTLVIAHRLATIQNADRVVVLEHGRIVETGTPNELRRQSGLYSRLAKLQLDIHPDHAPQ

SEQ ID NO: 44203 - protein, 225 aa, Glycine max
  misc_feature (170)..(170): Xaa can be any naturally occurring amino acid
  unsure (1)..(225): unsure at all Xaa locations
MENNQQQGAQAQSGPYPGGAGGSAGAGAGAGAGAAPFQHLLQQQQQQLQMFWSYQRQEIEHVNDFKNHQLPLARIKKIMKADEDVRMISAEAPILFAKACELFILELTIRSWLHADENKRRTLQKNDIAAAITRTDIFDFLVDIVPRDEIKDDAALVGATASGGAYYYPXPIGQPAGMMIGRPAVDPATGVYVQPPSQAWQSVWQSAAEDTPYGTGAQGNLDGQS

SEQ ID NO: 44204 - protein, 334 aa, Triticum aestivum
  misc_feature (50)..(50): Xaa can be any naturally occurring amino acid
  unsure (1)..(334): unsure at all Xaa locations
AYLGDTTEQVCTKKQAGTGPEFPADRRPTRPLGTVHHELHFTVQEGIDAXEEVIYHIETYDVTTIRASTPMFLMSRKIKSLGVKMVLSGEGSDEIFGGYLYFHKAPNKKELHEETCRKIKALHLYDCLRANKATSAWGLEARVPFLDKNFINVAMDLDPECKMIRRDLGRIEKWVLRNAFDDDEKPYLPKHILYRQKEQFSDGVGYSWIDGLKDHANAHVSDSMITNASFVYPENTPTTKEAYYYRTVFEKFYPKNAARLTVPGGPSVACSTAKAVEWDAAWSKLLDPSGRAALGVHDAAYEEEKAPALADHVFRPPAHGESILVETGVPAAAV

SEQ ID NO: 44205 - protein, 717 aa, Arabidopsis thaliana
MEELDRSRTFARDVKRIVVKVGTAVVTGKGGRLALGRLGALCEQLAELNSDGFEVILVSSGAVGLGRQRLRYRQLVNSSFADLQKPQTELDGKACAGVGQSSLMAYYETMFDQLDVTAAQLLVNDSSFRDKDFRKQLNETVKSMLDLRVIPIFNENDAISTRRAPYQDSSGIFWDNDSLAALLALELKADLLILLSDVEGLYTGPPSDPNSKLIHTFVKEKHQDEITFGDKSRLGRGGMTAKVKAAVNAAYAGIPVIITSGYSAENIDKVLRGLRVGTLFHQDARLWAPITDSNARDMAVAARESSRKLQALSSEDRKKILLDIADALEANVTTIKAENELDVASAQEAGLEESMVARLVMTPGKISSLAASVRKLADMEDPIGRVLKKTEVADGLVLEKTSSPLGVLLIVFESRPDALVQIASLAIRSGNGLLLKGGKEARRSNAILHKVITDAIPETVGGKLIGLVTSREEIPDLLKLDDVIDLVIPRGSNKLVTQIKNTTKIPVLGHADGICHVYVDKACDTDMAKRIVSDAKLDYPAACNAMETLLVHKDLEQNAVLNELIFALQSNGVTLYGGPRASKILNIPEARSFNHEYCAKACTVEVVEDVYGAIDHIHRHGSAHTDCIVTEDHEVAELFLRQVDSAAVFHNASTRFSDGFRFGLGAEVGVSTGRIHARGPVGVEGLLTTRWIMRGKGQVVDGDNGIVYTHQDIPIQA

SEQ ID NO: 44206 - protein, 489 aa, Agrobacterium tumefaciens str. C58
MRERSMIKLKNAALLRDACLVNGRWLKAADGKTIAVENPANSMIIGHVPSLSADEVKAAVESAGKAFSEWSRRSAKDRAAILRRWFDLMVANADDLGALMTAEQGKPFAEAKGEALYAASFVEWFAEEAKRVYGDTIPSPTTDKRITILKQPIGVCAAITPWNFPAAMITRKAAPALAAGCAMIVKPAEQTPLTALALGVLAEEAGVPAGVFQVVTGAARDIGKVFTESDTVRKISFTGSTEVGRLLMAQSAPTIKKLSLELGGNAPFIVFDDADLDAAVEGAIVSKYRNAGQTCVCSNRIYVQDGVYDAFAEKLVKRVESLSVGEGTEPGVLIGPLIDQEAVAKVEDHVADALGKGAKIVIGGKRHALGGTFYEPTVLTGATQAMKVAREETFGPVAPLFRFGTEDEAVAMANDTEFGLAAYFYTENVRRTWRVAEALEYGMVGHNTGLISNEVAPFGGVKQSGLGREGSHYGIDEYLEIKYLCSAIG

SEQ ID NO: 44207 - protein, 187 aa, Zea mays
  misc_feature (124)..(124): Xaa can be any naturally occurring amino acid
  unsure (1)..(187): unsure at all Xaa locations
NHDGDPPRDRHDQQPRTRRQTTTNADAPEGNDNDALTERPPGPSLREDHHRTDKVGHSTRERIPESVAHARGATAQDDCECTHDETTQTCADIPRAPGARTPKSGRCATAIHERPCPETIRDPXGIAKKLDTRESNGDLLRNNLTVYFIRDGGKFAEENHAIKPNPRPHRQEYRRENDNLAHHPQSL

SEQ ID NO: 44208 - protein, 461 aa, Candida albicans
MAPTSTKNSIKHFDYLVIGGGSGGVASARRAAKYGAKVLLIESNFKKFGGTCVNVGCVPKKVMWYTADLAHKKHDLYAYGLDKEPESIKYGDFDWAKLKHKRDAYVTRLNGIYENNLKREKVDYAYGFAKFINSEGEVEVTLSGDQELPFLDEGKTYKKGEKLVFSADMTLIATGGTAIVPPSVPGAELGTTSDGFFALEKQPKKVAIVGAGYIGVELSGVFSSLGSETHFFIRGDTVLRSFDEVIQNTVTDYYIDNLGINIHKQSTITKIEGSKDGKKVVHLKDGTSVEVDELIWTVGRKSLIDIGLDKVGVKINDKQQIVADEYQVTNNPKIFSLGDVVGKVELTPVAIAAVSSIDIVSDCKIMDIHIHQCILTSRAGLWFITREPLKIRGGNLKYIILNLSPMYYAMMMIKKINHLSSTRSFVSDPEEKVIKMGATKKDFDNCVAIHPTSAEELVTMT

SEQ ID NO: 44209 - protein, 209 aa, Trichodesmium erythraeum IMS101
MFKFLKQVSDYAKETFQSAKYIGQGLSVTFDHMSRRPVTVQYPYEKLIPSERFRGRIHFEYDKCIACEVCVRVCPINLPVVDWEFNKETKKKKLKHYSIDFGVCIFCGNCVEYCPSNCLSMTEEYELAAYDRHELNYDNVALGRLPYKVTNDPMVTPMRELAYLPKGVIDPHTVPHTSRRAGLRPEEILEQIEAEKTAAEKTAAEITDK

SEQ ID NO: 44210 - protein, 435 aa, Glycine max
MTLISNSDVESHADVQIPDTAHQISTDSWFQVGFVLTTGINSAYVLGYSGTIMVPLGWAGGVVGLILATAISLYANALIARLHEYGGTRHIRYRDLAGFIYGRKAYSLTWALQYVNLFMINAGYIILAGSALKATYVLFREDDGMKLPYFIGIAGFVCAMFAICIPHLSALGIWLGFSTVFSLVYIVIAFVLSIKDGIKSPPRDYSIPGTSTSKISTTIGASANLVFAYNTGMLPEIQATIRQPVVKNMMKALYFQFTVGVLPLYLVTFAGYWAYGSSTATYLMSDVNGPVWAKAMANIAAFLQSVIALHIFASPMYEYLDTKYGIKGSALAFKNLSFRVLVRGGYLTLNTFVSALLPFLGDFMSLTGAISTFPLTFILANHMYLVANANKLTSIQKLWHWINICFFAFMSVAATIAALRLIDLDSKTYHVFADI

SEQ ID NO: 44211 - protein, 383 aa, Trichodesmium erythraeum IMS101
MSVVCIEFKPGLEGVPATQSSVSYVDGQKGILEYRGINIEELAKKSSFLEAAYLLIWGNLPTQEELQSFEQEICLNRRIKYRIRDMMKCFPETGHPMDALQTSAAALGLFYSRRALDNPEYIRKAVVRLLANIPTMVAAFELMRKGNDPVKPRDDLGYAANFLYMLNEREPDPLAAKVFDICLTLHAEHTINASTFSAMVTASTLTDPYGVIASAVGTLAGPLHGGANEDVISMLSEIGSVENVKPYLKRCFETKAKIAGFGHRVYKVKDPRAIILQELAVDLFEKFGDDKYYQIALEMEKVVEEKLGHKGIYPNVDFYSGLVYRKLGIPSDLFTPVFAIARVAGWLAHWKEQLAANRIFRPTQIYSGDHNIAYTSLEERALI

SEQ ID NO: 44212 - protein, 576 aa, GIBBERELLA ZEAE PH-1
MANEIIRDERAEPESGAEKGAMLTITQDADSDPAIIEKAETESLQDMGRWRRMGIIFVLNTVTMISAFDATSICVILPAMARQLNASFSISLSMGSAVLLTSAISQPIFAELAHVIGRRPAYLAALVFFMTGSIISGFSNSSVMLLVGRAIQGVGSGGPQALSGLVMADLYSARKRSGSMAYQQMSWALGTIAGPLVGGTIVQSKDSAWRWIFRASLPFLVLSFIGAWALMGYDKHQRNCRDIKQIDWIGVFLYMISSVSLILPLTWGGSRFPWKSPAIIVPFVVSFFAFIALGVYEKKVERPMFRRGLFRKCSTICHLTMSALHGLLMWMVLYYLAVYFMGVKSQTPLMTGVWALPATISVAPMAALVGLVTQKTGKYQGFLIGGWSLLVTIFGVLTILDKDSSTATILVLAMFMGIAMGLIFPVMTIGVQATCNEEDAGHSISLILVLRTMGQCLGIAIGMSIFSTQLAKELKKVGLGNVQVSNAMQLMRASMEDGGIDHTFMNMAVAAALKKLWMAGSIMAGVGLILCLFARCPKLPRDSEPHEKGISGPASARQLNDGPVAPRAIRQQTVTF

SEQ ID NO: 44213 - protein, 856 aa, Gloeobacter violaceus PCC 7421
MAVGFSLRVLVVAANGPLVHALEKTLLSGGYDLALRWAAGTASLHQALMSERPEMILAADGPGEIDALLLLRSLTVHNCCELPLVWIGDAPSTPEGGYLNGADLHLLVLTVERALHQAQQRRETGVARAALRRSEQRLDLFFSQSLDGFFFMMLDRPVRWDATVDKERTLDYVFAHQRLTRVNDALLAQYRASGEQLLGRTPADLFAHDLELGRRLWREFFDRGKLHVETDERRFDGSPMWVEGDYSCLYDEQGRITGHFGIQRDVTVRKLAQEALRTSEAALQEQLQRTLLLQRICEQIRSSLESRQIFQATVDQVGQALGVNCVRILVYSPTPKPELHFAAEYLEAGYPPVHHGSVPVAGDPHAQRVLECDRAVCSPDVYADPQLAPVHELCRSVGLKSLLAVRTSYQGKPNGVITVQQRDRFRRWTPEEIALLEAVAAQVGIALNQAKLLEQEKAQSLLLAEQNAALARARQAAEAASRTKNEFLATMSHEIRTPMNGVIGLADVLLADGGLTHRQRDSIETIRASGETLLTIINDILDFSKAESGCIELETKRFDLHALLAGCVDLLRPEATQKHLQLCCTLHGQVPQAVVGDAARLRQILVNLIGNAVKFTTSGAVSVNVTAARPAAEPPQKWELHFAVRDTGIGIPAERMDRLFKPFSQVDASTTRRYGGTGLGLAICKRLAELMDGRIWVESEPGRGSTFSFTIVAAAATDAPAPAPPVEASWSKPLPLRILLAEDNPLNQKVALQLLRRLGYRANVATDGEEVLRALRRQRYDLVLMDVQMPMIDGLEATRRIASEFAAAERPRIIALTAGATLQDEQACLRAGMDGFISKPIRIGELRRALERWGTG

SEQ ID NO: 44214 - protein, 531 aa, Pleurotus sapidus
MFPGARILATLTLALHLLRGTHAAIGPIDDMYIVNEDVSPDGFTRSAVVARSVPATGPAPATVSIPGVLVQGNKGDNFQLNVVNQLSDTTMLKTTSIHWHGFFQFGTSWADGPAFVTQCPIASGDSFLYNFNVPDQAGTFWYHSHLSTQYCDGLRGPFVVYDPSDPHLSLYDIDNADTVITLEDWYHVVAPQNAVLPTPDSTLINGKSRYAGGPTSPLAIINVESTKRYRFRLVSMSCDPNFMFSIDGHSLQVIEADAVNIVPITVDSIQIFAGQRYSFVLTADQTVGNYWIRANPNLGSTGFAGGINSAILRYAGATEDDPTTTSSTSTPLLETNLVPLENPGAPGPAVPGGADININPAMAFDFTNFELTINGAPFHAPTAPVLLQILSGATTAASLLPSGSIYELEANKVVEISIPALAVGGPHPFHLHGHTFDVIRSAGSTTYNFDTPARRDVVNTGTGANDNVTIRFVTDNPGPWFLHCHIDWHLEIGLAVVFAEDVTSISAPPAAWDDLCPIYDALSDSDKGGIV

SEQ ID NO: 44215 - protein, 95 aa, Zea mays
SPRQGLLRVREFTLAEIEHFVDPEDKSHPKFGDVSDLEFWMFPREDQMAGRSATRLKLGNSISEVLSPDISLLYIFDNMISELFFCYCRYHSINL

SEQ ID NO: 44216 - protein, 5826 aa, Streptomyces halstedii
MSESENPVSATTAGADETPDTRTALARRLAGLSPAEQEQHLVDMVHRHTVAALQAVAPLTPDQVDVQRPFLELGFDSLAAVDLHKRLTGETGLELPVTVAFDFPTPVLVAEEIRRIAFGIRPAPLAPVVATGNLDDDPIAIIGIGCRFPGGINSAEELWQLVMDEAEVLSGFPTNRGWDVEGIYDPDPGKPGKSYVREGGFLQDAGDFDADFFGISPREALAMDPQQRLVLETAWEAFERAGIDPGSLHGSKAGVFIGAEVHEYGTRVHEAPEGLDGYLMTGNAPSVASGRIAYSLGLEGPAVTIDTACSGSLVALHLAAHSLRQGESSLAIAGGVTVMGNPGMFAAFSRQRGLAADGRCKPFAAAADGTGFSEGVGVFVVERLADARRNGHPVLGIVKGSAINQDGASNGLTAPNGPSQQRLILQALANAGLKPADVDTMEAHGTGTKLGDPIEAQAILATYGQEREEGRPLWLGSIKSNLGHTQAAGGAASLIKMLMGMRHGKLPRSLHIDAPTPHVDWTTGDVALLTETRDWDAPDRPRRAGVSAFGISGTNAHVIIEEAPEFEPSAVEPVAGSGVTPPWVLSARSADALRGQAERLLSFVSTDADVSVVDVAYSLGVSRAGLEHRGVVLGESREELIAALESLASGAEAPGVVTGRVAEGRLAFLFTGQGAQRVGMGRELAAEFPVFAASLEETCDLLDVGLEDQDHSLREVLFAEEGSAEAALLTRTVYAQAALFAVEVALFRLVESFGVVPDFVAGHSVGEIAAAHVAGVFSLEDATMLVAARGRLMDALPEGGTMVAVQATEEDVLALLEGVEDASIAAINGPDAVVVSGTETGVARVVDVLRDRGAKTKRLDVSHAFHSPLMEPMLTEFRRVAEVLEYQAPRIAVVSNVSGSVAGTELATPEYWVTHVREAVRFSAGVRTLLGAGVSSFLEIGPDGVLSGMARGSVSDGADVGCVPVMRRGRGEVREFLTGLSRIAVRGVPVTWEPLIEGARRVELPTYAFQRRWFWLEAGRSTTDALGLGQTAAEHPLVGAVVGLAGGDGVVLTGRVSLHTHPWLADHQVAGVTLLPGTGFVELAVRAGDEVGCGRLEELTLEAPLVVPDRGAVQLQVVVGALEESDVRTVSVYSRAEEDDVWTRHATGFVGAAVDGGLNLEAWPPPGARAVDVSDVYAGLADQGYGYGPVFQGLRSVWRGDGEVFAEVVLPEGAQADASAFGLHPALLDAALHATDYLDPESAVEGTHLPFAWTGVSLHATGASELRVRITATGNDGYALDLADTTGRPVATVQSLVLRPVTEEQLRSAQGGNGPDSLFRVEWAPVTADLTASGAGWAVLGAGAPELAAALTAAGTPGTAYHGTAELSAAVDGGTTPDVVAVQLPSAGAADADLPDAVRATLNTALEFVQNWLADERLAETRLVVVTRDAVTVDTAAGGPDLTVAPVWGLIRSAQAENPGRILLADIDGTDQSRTALAAITAADEPELAFRNGNAYAPRLVRSVSEGGLVPPSDAASWRLDVLSQGTLENLALIPSDADERTLAPGEVRIAVRAAGVNFRDVLVALGMYPTKADIGGEAAGLVLEVGPGVTDFTPGDRVMGLFDTAFGPHAITDHRTLVPMPTGWTYAQAATAPLVFATAYYGLVDLAELRSGESALIHAAAGGVGMAAVQIARHLGAEVYGTASPGKWNALRAAGLDDNHIASSRDTTFEQKFLANSGGRGVDVVLDALTGEFIDASLRLLPRGGRFAEMGKTDVRDPERVAAEYPGVRYRAFDLFEADLDRLREILRELLALFESGALRPLPVRAWDIRKSKDAFRHIAQARHIGKVALTMPTGGLGDGVVLVTGGTGGLGALVARHVVVVHGVRRLVLVSRRGLGAPGAVGLVAELEGLGAVVEVVACDVSDRVALAGVVGGIGSDLSAVVHTAGVVDDGVVGSLSVGRLSSVLGPKADAAWYLHELTVGLDLSAFVLFSSVAGVVDGAGQGNYAAANVFLDGLAVVRRGLGLPGTSVAWGLWEGAGMGAVLGEADVLRMSRSGVLGLSVGEGLGLFDVALGEDVAALVPVRLDLGALRSRVDGVPAVFRSLVRVPVRRSVGVGVSGGGEVSLERRLVVLDAGERERVLLELVRSHVAAVLGYEGAGSIEPGRAFSDIGFDSLSAVELRNRLNGETGLRLPATLIFDYPTPQALAEYVIVALLGEEAANAPALPPTEAPTVTGTDDDPVVIVGMGCRFPGDVRTPEDLWRLVSNGSDAVTPFPDNRAWDIEGIYDPLPGVSGKTYAREGGFLHDAAEFDPEFFGISPREALAMDPQQRLLLETSWEAIERAGIDPNSLRGTQTGVFAGVMQTDYGNGGARLAEDVEGYIANGTLGSIVSGRVSYALGLEGPAVTIDTACSSSLVAMHWAAHALRQGECSLALAGGVTVMSTPETFVDFSLQRGLAPNGRCKAFSADADGTGWGEGVGVLVLERLSDARRNGHQVLAVIRGSALNQDGASNGLTAPNGPSQQRVIRQALVSAGLTTSDVDAVEAHGTGTTLGDPIEAQALLATYGQERDADQPLWLGSVKTNVGHTQAAAGVAGVIKMVLAMRAGVLPKTLHVTEPSPHVDWSAGAVELLTETRDWPETGRPRRAGVSSFGVSGTNAHVIVEQAPAVEEEPTRALPALPVPWSISAKSADALRGQAQALSSFVSAAGDVSVVDVAYSLGVSRAGLEHRGVVVGESRAELLVALESLASGVESPGVVTGRVAEGRLAFLFTGQGAQRVGMGRELAAEFPVFAASLEQTCDLLERAGVAVREVLFAEEGSAEAALLTRTVYAQAALFAVEVALFRLVESFGVVPDFVAGHSVGEIAAAHVAGVFSLEDAVSLVAARGRLMDALPEGGAMVAVQATEEDVLALLEGVEDASIAAINGPDAVVVSGTETGVARVVDVLRERGAKTKRLVVSHAFHSPLMEPMLADFATVVEGLSYKAPAIPVVSGSVVGSELSTPGYWVRHVREAVRFGAGVETLLGAGVSSFLEIGPDGVLSGMARTSVPEGADVECAPLMRRDRAEVREFLTGLSRLAVRGVPVAWESLVEGGRRVELPTYAFQRRRFWLEAGRSVTDASGLGQTAAEHPLVGAVVGLAGGDGVVLTGRVSLHTHPWLADHQVAGVTLLPGTGFVELAVRAGDEVGCGRLEELTLEAPLVVPDRGAVQLQVVVGALETSGVRTVSVYSRVEEESADDTWVRHATGALMAAAEEPGFDLTAWPPAGARAVDVSDAYAGLASQGYGYGPVFQGLTAAWRKGREVFAEITLPEAAQVDASAFGLHPALLDAALHATDYLDQESAEGTHLPFAWSGVSLHAAGASALRVRIVATGKDGYALDLADSTGRPVATVQSLVTRPVTADQLSEASATQHQSLFRMEWTATTAPAATADVRWALLGEPVAELGDLAGFGRTTAYASLADLAAADADTVPDLVVLPLGSRMAEGSDVPEAVRENLGQVLATIQQWNDDSRFDGSRLVVLTHGAVSVSDDESLTALDLAPVWGLVRSAMAETPGRFLLVDTDGTDPSTDALRHLAELQEAEFALREGEIRVPRLARVPVAGAGADITGGLGDGVVLVTGGTGGLGAVVARHAVVVHGVRRLVLVSRRGLGAPGAVGLVAELESLGAVVEVVACDVSDRVALAGVVGGIGSDLSAVVHTAGVVDDGVVGSLSVGRLSSVLGPKADAAWYLHELTVRLDLSAFVLFSSVAGVVDGAGQGNYAAANVFLDGLAVVRRGLGLPGTSVAWGLWEGAGMGAVLGEADVLRMSRSGVLGLSVGEGLGLFDVALGEDVAALVPVRLDLGALRSRVDGVPAVFRSLVRVPVRRSVGVGVSGGGEVSLERRLAVLDAGERERVLLELVRSHVAAVLGYEGAGSIEPGRAFSDIGFDSLSAVELRNRLNGETGLRLPATLIFDYPTPQALADLIQEKTLGLVDAAAATVSTTVSRTDDEPIAIVGMGCRYPGDVRTPEELWRLVASGTDAVSLFPEDRGWNVDSIYDPTPGLSGKTYTREGGFLHDAAEFDAGFFGISPREALAMDPQQRLLLETSWEAMERAGIDPNSLRGTQTGVFAGIMYHDYGSRVTQPSEEVEGYLGNGSAGSIASGRVSYTFGFEGPAVTVDTACSSSLVALHWAAQALRQGECSMALAGGVTVMSTPETFVDFSLQRGLATNGRCKAFSSDADGTGWGEGAGMLLLERLSDARKNGHEVLAVIRGSALNQDGASNGLTAPNGPSQQRVIRQALANAGLSAAEVDAVEAHGTGTKLGDPIEAQALLATYGQERDGDQPLLLGSIKSNVGHTQAAAGVGGVIKMVMAIRNGVLPKTLHVTEPSPHVDWSAGAVELLAEAREWPETGRPRRAGVSSFGISGTNAHVIVEQAPTDQPAPLSEPVGDVPGLPVPWIVSAKSAEALRAQAGRLGSFLGETGVVDVPAVGWSLVRGRSVFAHRAVVVGGEWDELLAGVARVAEGVDDSVVSGVADVSGRRVFVFPGQGSQWVGMAQGLLDSSVVFTERMTECAAALDPLVEWSLLDVVRGVEGAASLERVDVVQPVLWAVMVSLASVWRSVGVVPDAVVGHSQGEIAAAVVGGWLSLVDGARVVALRSLAIREVLAGGGGMVAVQAAEDEVAGWLEGVEGVGIAAVNGPRSVVISGTRAGLDACVELWSGRGTWVKRVPVDYASHSAEVERVRERVLADLASVTGLSGSVPMLSTMTGDWIVEGQVGAGYWVENLRRPVLFADATRRLASEGFGAFVEVSAHPVLVMGIEETIEALRSGAADGAKSGAGEESSSAVVAVGTLRRGEGGWDQFLRSLAGLFVRGAVAPDWESLLGGVRPRVDLPTYAFQRERLWLDAGVVAGDVSGLGQVVVGHPLLGAGVGVAGEGGGVLFTGRLGLGSHPWLGDHAVSGVVLLPGAAFVELVVRAGDEVGCGRLEELTLAAPLVVPERGSVRIQVVVGAGDGSGARSVGVWSSVGDEGVGGEWVCHASGLLTADVGVAPVLGGVWPPVGGVAVDVSGVYEGLALEGYEYGSVFRGLRSVWRRGDEVFAEVALGEGVGVEGFGLHPALLDAALQAAGFGSFVPESEAGSEAGSGGVRLPFSWSGVSLFASGASVGRVRLWPVGGDGFGVELFDGVGMPVARVDALVTREISAGQLGAAAGAGSLVGGESLFRVEWAPVSGVAPASAGVGGCVVVGAGSVLSGFGEVVPDLAAVSAGSADGVGVPGWVLVDVDAWLGADLAVGVVSGEGVPVVARGVVARVLGLVREWLGDERWVSSRLVWVTRGAVGARVLDEVSGVVSSGLWGLVRAAQSEHPDRFALLDLDSATAVDAVRDGVLGLLAAGEPQLVVREGEVLAARLTPAHTTDEPTGQEFGKAATGTVLVTGGTGGLGAVVARHLVTEHGAQRLLLTSRRGINAPGAAELVAELAELGARADVAACDVSDRAALKELLAGVPGDAPLTAVVHAAGVLDDGVIESMTADRLDAVMRPKVDAAWHLHELTADRELDAFVLFSSAAGTLDGAGQSNYAAANVFLDALAQYRRGQGLAGLSLAWGLWGESTGMVGALEGSDLDRIGRSGVRALSSAEGLALFDAAAVLGEPAVLPVALDLGVLRTQPRNQVPAILRGFAAGPTRRTAVTGGPETDQEALTRRLASLSPADRDRFLLDLVRTQVAGVLGYSGPDAIDPQRGFQELGVDSLAAVQIRNRLGAATGVRPPTTLVFDYPTPDAVAGYFKEHLVIEEEDSTAELMREIARLEAAVTSAASSAGGAGLAPAVDRLRAMAAKLADADAQRADEDDPGLESATADELFDILDGELSTD

SEQ ID NO: 44217 - protein, 1671 aa, Gloeobacter violaceus PCC 7421
MSPLALRVSPNGEASRFWMLLVGVDGYLDPGLADLRYCVADCEALAGALQAVCCETISPMLFVHHDGTDAGASLERVRASLRQIVDAAGAEDTVLFYFSGHGLLHRGQAVLCLANTRLADLEGTGLRFAELMAGFERCRAERQLVWLDACHSGGIDLGVTEAQSADPTGPLVEALRQRAARSRCFYALLSCDRQQVSWAFPELGHGVFTHFLLKGLEGAAADAQGRIEADALYRYVYHRTLRYVDRLNQQQRLISQQRRGGAPLPEYRLQTPQKIVNVVGELLIGSIPGPAPGGPVGRALVVDGSVGSEAVLAFGRLLLGASGYRDQTQYWSPAHQGLSLREALSRALAYDASVPPLQTVLIYLHGRIEASADGESWLVLREGVRLSRSALRLELRRAAASRQIVVLDCPGACDLDDWVGELRLEGDQSQCLIAAAAPLSDPDRFTRVLVHTLESSGDARSGLAVTEWIKLIDRELAPGGIRLHLWLAGSQGVIEVLPGTAGQSPTAATVDLGVSPYKGLRPFQEADSAFFCGRDALVGKLVAAVRSQPFVAVIGASGSGKSSLVQAGLVAQLRQGKQVLGSEGWWIKTLLPGSYPFAALARLLFEGRTAEEDEMALGVEDFVRRLRERPEPIVLLVVDQFEELFTLAAAEERDRFVELLEGALRYAPDRFKLVITLRADSITPCLEYPILAAALQRSSVLVPPRLSREDYRAVILEPASKVGLQVEAELVEILLDELNHSAGELPLLEFVLEQLWKQRSGPLLTRRAYEGDIGGLRGALERKADEVYESLKELDARECARWLMLNLVQLGEGTEDSRRHLPRNRLISRRYSSKLVERVLNAFLKAKLLVVDAAEEEESGSSTATVEVAHEVLIRSWGRLREWLADNRSRLRTQRQIEQAADHWQSKNRETDYLLRGSDLTEAEQLFLRDEDMLSPKETAFIEISLQLRAQQLQLERKRTHQLRRLAGVLALLAVVAMGFGITAYWQSLKSQEREIDALINSAQLRFANHQHLEALVELMRAQSLVQQTWTSSLQLREKTRIALQQSVYSNRQINRLEGHSDFISQVSFSSSRKLMASASWDRTIRLWQLDGMPIKILKGHANNITSICFSPDGEFMASADDRGSIYLWTSKGELRTVIRGHNATIWSLRFSPDSKLLASASQDKTVRLWNRNGKILRTLMGHQDEVMSVDFSPDGQTLASASWDGTVRMWGIQGNLISILKEHKDGIWSVAFSPDGQRLASAGQDKTLRLWNVHGQLLHTLSDNTTPFLSVRFSPDGSILASGSVDKTVRLWSREGVLLSSLHGHTGRVNSLDFSADGRILASASDDKTLLLWRLYGPPLTAFRGHGQWVSCVGFSPDSQAFATAGGDGTLDLWDRQGRLENRVIPPATIFALAYSPDGTIIASGGNDRAVRLWTRHGSYLSQFDKQGAAVTSLSFSPNGNLIAAGGPDGLVWLWGHKGKLFKKISTGHAELAVVRFGPRGLFLATAGGVDRTIRIWSQTGTLLRTLRGHPDLITDLTFSPDNQVLVSASRDGTLRYWTIAGQLLKTINAHSNRVTSIDFSADGKTVASAGADGTVRLWGPVGESVAVLYGHKDSVGAVRFSPDSKILLSGAADGSVFLWQAWRTEANWLLNESCKQLQSYLRSNITAQSFIQDLCSVSIHRINSDAQTP

SEQ ID NO: 44218 - protein, 463 aa, Zea mays
MATAAVLAATLALFLGAAAATAATAATEADRIGRLPGQPPVNFSMYSGYVTVDAAAGRALFYWFIEAAGVPAESAPLVLWLNGGPGCSSVGYGASEELGAFRINADGRTLYLNPYPWNKVANMLFLDSPAGVGYSYSNSTSDLYTAGDNKTAHDSYNFLVNWLERFPQYKHRDFYITGESYAGHYVPQLSQLVYRNNKGIEKPILNFKGFMVGNAVIDDYHDFIGTFEYLWTHGLISDETYEKLRLACQIDVSEHASKECNKVFDIAEAEEGNIDAYSIYTPTCKKTSLHKRRLIRGRTPWLPRGYDPCTEKYSTKYYNLPEVQRALHANVTGIPYPWVTCSDPVYDFWKDSPRSMLPIYRELIAAGIRIWVFSGDADSVVPLTATRYSIDALFLPTITNWYPWYDDEEVGGWCQVYEGLTLVTVRGAGHEVPLHRPRQGLKLFEHFLRGEPMPRPVDSVQSF

SEQ ID NO: 44219 - protein, 468 aa, Saccharomyces cerevisiae
  misc_feature (1)..(1): Xaa can be any naturally occurring amino acid
  misc_feature (13)..(13): Xaa can be any naturally occurring amino acid
  misc_feature (91)..(91): Xaa can be any naturally occurring amino acid
  misc_feature (110)..(110): Xaa can be any naturally occurring amino acid
  misc_feature (170)..(170): Xaa can be any naturally occurring amino acid
  misc_feature (273)..(273): Xaa can be any naturally occurring amino acid
  misc_feature (384)..(384): Xaa can be any naturally occurring amino acid
  unsure (1)..(468): unsure at all Xaa locations
XGSDKIHHHHHHXSSSQQIAKNARKAGNILKTISNEGRSDILYKIHDALKANAHAIEEANKIDLAVAKETGLADSLLKRLDLFKGDKFEVXLQGIKDVAELEDPVGKVKXARELDDGLTLYQVTAPVGVLLVIFESRPEVIANITALSIKSGNAAILKGGKESVNTFREXAKIVNDTIAQFQSETGVPVGSVQLIETRQDVSDLLDQDEYIDLVVPRGSNALVRKIKDTTKIPVLGHADGICSIYLDEDADLIKAKRISLDAKTNYPAGCNAXETLLINPKFSKWWEVLENLTLEGGVTIHATKDLKTAYFDKLNELGKLTEAIQCKTVDADEEQDFDKEFLSLDLAAKFVTSTESAIQHINTHSSRHTDAIVTENKANAEKFXKGVDSSGVYWNASTRFADGFRYGFGAEVGISTSKIHARGPVGLDGLVSYQYQIRGDGQVASDYLGAGGNKAFVHKDLDIKTVTL

SEQ ID NO: 44220 - protein, 450 aa, Miscanthus sinensis
MREFISIHIGQAGIQVGNSCWELYCLEHGIQPDGTMPSDTSVGVAHDAFNTFFSETGSGKHVPRAIFVDLEPTVIDEVRTGSYRQLFHPEQLISGKENAANNFARGHYTVGKEIVDLCLDRVRKLADNCTGLQGFLVFNAVGGGTGSGLGSLLLERLSVDYGKKSKLGFTIYPSPQVSTAVVEPYNSVLSTHSLLEHTDVAVLLDNEAIYDICRRSLDIERPTYTNLNRLISQIISSLTTSLRFDGAINVDVTEFQTNLVPYPRIHFMLSSYAPVISAEKAYHEQLSVPEITNAVFEPSSMMAKCDPRHGKYMACCLMYRGDVVPKDVNAAVATIKTKRTVQFVDWCPTGFKCGINYQPPSVVPGGDLAKVQRAVCMISNNTAVAEVFSRIDHKFDLMYAKRAFVHWYVGEGMEEGEFSEAREDLAALEKDYEEVGAEGADDEGDEGDDY

SEQ ID NO: 44221 - protein, 338 aa, Azoarcus sp. EbN1
MKVYYDKDADLSLIKGKQITIVGYGSQGHAHAQNLKDSGCKVTVGLRKSGASWKKAEAAGLDVREVAEAVSNADIVMILLPDENIPGVYYNDVEPNIKQGATLAFAHGFNVHYNQVVPRDDLDVIMVAPKGPGHTVRSEYLKGGGVPSLIAVHQDRSGKAKDIALSYAAANGGTKGGVIETNFREETETDLFGEQAVLCGGAVELVKMGFETLTEAGYAPEMAYFECLHELKLIVDLMYEGGIANMNYSISNNAEYGEYVTGPEVINEQSREAMRAALKRIQTGEYAKMFIQEGRTNYPSMTARRRLNAAHPIEQVGGQLRDMMPWIKKNKLVDQSKN

SEQ ID NO: 44222 - protein, 450 aa, Miscanthus sinensis
MREIISIHIGQAGIQVGNACWELYCLEHGIEPDGTMPSDTSVGVAHDAFNTFFSETGSGKHVPRAIFVDLEPTVIDEVRTGSYRQLFHPEQLISGKEDAANNFARGHYTVGKEIVDLCLDRVRKLADNCTGLQGFLVFNAVGGGTGSGLGSLLLERLSVDYGKKSKLGFTIYPSPQVSTAVVEPYNSVLSTHSLLEHTDVAVLLDNGAIYDICRRSLDIERPTYTNLNRLISQIISSLTTSLRFDGAINVDVTEFQTNLVPYPRIHLMLSSYAPVISAEKAYHEQLSVPEITNAVFEPSSMMAKCDPRHGKYMACCLMYRGDVVPKDVNAAVATIKAKRTVQFVDWCPTGFKCGINYQPPSVVPGGDLAKVQRAVCMISNNTAVAEVFSRIDHKFDLMYAKRAFVHWYVGEGMEEGEFSEAREDLAALEKDYEEVGAEGADDEGDEGDDY

SEQ ID NO: 44223 - protein, 450 aa, Miscanthus floridulus
MREFISIHIGQAGIQVGNACWELYCLEYGIEPDGTMPSDTSVGADDDAFNTFFSETGSGQHVPRAIFVDLEPTVIDEVRTGSYRQLFHPEQLISGKEDAANNFARGHYTVGKEIVDLCLDRVRKLADNCTGLQGFLVFNAVGGGTGSGLGSLLLERLSVDYGKKSKLGFTIYPSPQVSTAVVEPYNSVLSTHSLLEHTDVAVLLDNEAIYDICRRSLDIERPTYTNLNRLISQIISSLTTSLRFDGAINVDVTEFQTNLVPYPRIHFMLSSYAPVISAEKAYHEQLSVPEITSAVFEPSSMMAKCDPRHGKYMACCLMYRGNVVPKDVNAAVATIKTKRTVQFVDWCPTGFKCGINYQPPSVVPGGDLAKVQRAVCMISNNTAVAEVFSRIDHKFDLMYAKRAFVHWYVGEGMEEGEFSEAREDLAALEKDYEEVGAEGADDEGDEGDDY

SEQ ID NO: 44224 - protein, 450 aa, Miscanthus floridulus
MREFISIHIGQAGIQVGNACWELYCLEHGIEPDGTTPSDTSVGVAHDAFNTFFSETGSGKHVPRAIFVDLEPTVIDEVRTGSYRQLFHPEQLISGKEDAANNFARGHYTVGKEIVDLCLDRVRKLADNRTGLQGFLVFNAVGGGTGSGLGSLLLERLSVDYGKKSKLGFTIYPSPQVSTAVVEPYNSVLSTHSLLEHTDVAVLLDNEAIYDICRRSLDIERPTYTNLNRLISQIISSLTTSLRFDGAINVDVTEFQTNLVPYPRIHFMLSSYAPVISAEKAYHEQLSVPEITNAVFEPSSMMAKCDPRHGRYMACCLMYRGDVVPKDVNAAVATIKTKRTVQFVDWCPTGFKCGINYQPPSVVPGGDLAKVQRAVCMISNNTAVAEVFSRIDHKFDLMYAKRAFVHWYVGEGMEEGEFSEAREDLAALEKDYEEVGAEGADDEGDEGDDY

SEQ ID NO: 44225 - protein, 192 aa, Glycine max
MTSSNKRLEVQTEDQTPHKWCVSLGEEAFKRFFSQTNPTVHKVFGDGSLFSPLLFGKFFDPSDAFPLWEFESDVLLSHLRSSSQNTVDWCQTGEGYVLKAEIPGTGKNNIQVHVDKGKVVEIRGQWKEQRDSKAHDWRCGHWWEYGYVRRLEMPEDADWKNIEAYIHNDTYLEIRIPKSQQGRDLPQGKDMA

SEQ ID NO: 44226 - protein, 218 aa, Bdellovibrio bacteriovorus HD100
MIKSKVRTASKGFPRAFSCDLPPPPLEYAHQGETMRIFTLIALILCTSFAWAKDTPSSFFDLSANSLSGKKVNFSTYRGKVVLVVNTASQCGFTPQLKELEEMYKKYADRGFVVLGFPSNDFKQEKGTNDEVQTFAAKEFGVTFPLFDKAPVSGKDIQPVYQFLTTQKPGLIFKDVAWNFEKFLINRKGQVVERWSSITKPSSDSITKSVEKALNEPL

SEQ ID NO: 44227 - protein, 450 aa, Miscanthus sinensis
MREIISIHIGQAGIQVGNACWELYCLEHGIEPDGTMPSDTSVGVAHDAFNTFFSETGSGKHVPRAIFVDLEPTVIDEVRTGSYRQLFHPEQLISGKEDAANNFARGHYTVGKEIVDLCLDRVRKLADNCTGLQGFLVFNAVGGGTGSGLGSLLLERLSVDYGKKSKLGFTIYPSPQVSTAVVEPYNSVLSTHSLLEHTDVAVLLDNEAIYDICRRSLDIERPTYTNLNRLISQIISSLTTSLRFDGAINVDVTESQTNLVPYPRIHFMLSSYAPVISAEKAYHEQLSVPEITNAVFEPSSMMAKCDPRHGKYMACCLMYRGDVVPKDVNAAVATIKTKRTVQFVDWCPTGFKCGINYQPPSVVPGGDLAKVQRAVCMISNNTAVAEVFSRIDHKFDLMYAKRAFVHWYVGEGMEEGEFSEAREDLAALEKDYEEVGAEGADDEGDEGDDY

SEQ ID NO: 44228 - protein, 623 aa, Magnaporthe grisea 70-15
MADAPNANDELYPIAVLIDELKHDDVLLRLNAIHRLSTIALALGPDRTRDELIPFLDESVEDEDEVLVALSEELGNFVEYVGGSQWGHVLLSPLENLAAIEEPVVRDKAVESLNKICAELSPKQVEEYFIPLTSRLSKADWFTSKISGCGLYTTPYSKVAPPLQEQLRRDFGHLVHDETPMVRRQSATHLAKFVKEMPAAVVVDEMIPMFQHLASDDQDSVRLLTVEVLISVAEVVPKEQQSSHGVLLTTLRNLIEDKSWRVRYMIADRFEKIAKAVDDEVVSRDLVPAFVKLLKDNEAEVRTAIAGQIPGFCALIDRTTLLNEVMGSIEDLVSDSSQHVRAALGTQISGLAPILGKQETIDHLLPMFLQMLKDEFPEVRLHIISKLELVNNVIGIELLSQSLLPAIVQLAEDKQWRVRLAIIEYIPLLASQLGVKFFDEKLSSLCMGWLGDTVFSIREAATHNLKKLTEVFGVEWASEAIIPKVMAMGNHPNYLYRMTTCFAISTLATVVSMDVIGKNILPMLDKLVVDDIPNIRFNVAKTYGVLIDVLRRLPEEGTVYSLEKAGTPFSPSSRGAELIQQRVMPSLEKLQKDDDVDVRYFATTAAAAASGPLPGGEPMNTSP

SEQ ID NO: 44229 - protein, 413 aa, Listeria monocytogenes str. 1/2a F6854
MDKRRVVVTGVGAVTPIGNDAETSWENAKKGVNGVAKMTRLNPDDFPVKIAAELKDFDVEKYLEKKEARKMDRFTHYAIASAEMAVQDSGLVIDDSNANRVGVWIGSGIGGMETFETQYEIFLNRGHRRVSPFFVPMMIPDMGSGQVSIRFGAKGINSTTVTACATATNSIGDAFKVIERGDADAMITGGAEAPITKMSLAGFTANKALSLNPDPETACRPFDKDRDGFIIGEGAGIVILEEYEHAKARGAKIYAEIVGYGATGDAYHITAPAPNGEGAARAMKMAIDDAGITPDKVDYINAHGTSTPYNDEYETQAIKTVFGEHAKKLAISSTKSMTGHTLGASGGIEAIFALLTIRDNIIAPTIHLKNQDEVCDLDYVPNEAREANVNVVISNSFGFGGHNATLVFKRIED

SEQ ID NO: 44230 - protein, 302 aa, Glycine max
MGRSPCCEKEHTNKGAWTKEEDERLINYIKLHGEGCWRSLPKAAGLLRCGKSCRLRWINYLRPDLKRGNFTEEEDELIINLHSLLGNKWSLIAARLPGRTDNEIKNYWNTHIKRKLYSRGIDPQTHRPLNASATPATTATATAVPSANSSKKINNNNNNIDNDINNNNNGFQLVSNSAYANTKIGTNLVAAEDSNSSSGVTTEESVPHHQLNLDLSIGLPSQPQGSSLNPEKLKPEPQEHDDQKPQVLYKWYGNITSQQGVCLCYNLGLQSNQTCYCKTMGTATTTTATDSNLYRFYRPMNI

SEQ ID NO: 44231 - protein, 158 aa, Streptococcus pneumoniae R6
MTSLYDFSVLNQNNQATPLDSYRGKVLLIVNTATGCGLTPQYQGLQELYERYQDQGFEILDFPCNQFMGQAPGSAEEINTFCSLHFQTTFPRFAKIKVNGKEADPLYVWLKDHKSGPLGKRIEWNFAKFLIGRDGQVFERFSSKTDPKQIEEAIQTLL

SEQ ID NO: 44232 - protein, 316 aa, Bifidobacterium longum DJO10A
AVGYGAKEAGTSCFMTPKTFKLISRLREEGVKRGLEILIEVHSYYKKQVEIASKVDRVYDFALPPLLLHSLFTGHVEPVAHWTEIRPNNAVTVLDTHDGIGVIDIGSDQLDRSLKGLVPDEDVDNLVNTIHANTHGESQAATGAAASNLDLYQVNSTYYSALGCNDQHYLAARAVQFFLPGVPQVYYVGALAGRNDMELLRRTNNGRDINRHYYSTAEIDENLERPVVKALNALAKFRNELPAFDGEFSYEVDGDTSITFRWTAADGTSTAALTFEPGRGLGTDNATPVASLAWSDAAGDHETRDLLANPPIADID

SEQ ID NO: 44233 - protein, 528 aa, Mycobacterium tuberculosis H37Rv
MDTRVDTDNAMPARFSAQIQNEDEVTSDQGNNGGPNGGGRLAPRPVFRPPVDPASRQAFGRPSGVQGSFVAERVRPQKYQDQSDFTPNDQLADPVLQEAFGRPFAGAESLQRHPIDAGALAAEKDGAGPDEPDDPWRDPAAAAALGTPALAAPAPHGALAGSGKLGVRDVLFGGKVSYLALGILVAIALVIGGIGGVIGRKTAEVVDAFTTSKVTLSTTGNAQEPAGRFTKVAAAVADSVVTIESVSDQEGMQGSGVIVDGRGYIVTNNHVISEAANNPSQFKTTVVFNDGKEVPANLVGRDPKTDLAVLKVDNVDNLTVARLGDSSKVRVGDEVLAVGAPLGLRSTVTQGIVSALHRPVPLSGEGSDTDTVIDAIQTDASINHGNSGGPLIDMDAQVIGINTAGKSLSDSASGLGFAIPVNEMKLVANSLIKDGKIVHPTLGISTRSVSNAIASGAQVANVKAGSPAQKGGILENDVIVKVGNRAVADSDEFVVAVRQLAIGQDAPIEVVREGRHVTLTVKPDPDST

SEQ ID NO: 44234 - protein, 375 aa, Shewanella sp. ANA-3
MSDAKKLSGAGLRGQSAGETALSTVGVSGSGLTYRGYDVKDLAENATFEEVAHLILYGELPTTAQLEAYKTKLKGMRGLPQALKEVLERIPADAHPMDVMRTGCSMLGNLEAEHSFSEQSQIADRLLAAFPSIICYWYRFSHDGVRIDTETNDEQIGAHFLHLLHGKAPSALHAKVMDVSLILYAEHEFNASTFTARVCASTLSDMHSCVTGAIGSLRGPLHGGANEAAMELIQDMKDEADARDVLMGKLERKEKIMGFGHAIYRESDPRNAIIKEWSEKLAADYGDDRLYRVSVACEALMWEQKKLFCNADFFHASAYHFMGIPTKLFTPIFVCSRVTGWTAHVMEQRSNNRIIRPSADYVGVALRKVVPISDR

SEQ ID NO: 44235 - protein, 544 aa, GIBBERELLA ZEAE PH-1
MTAAVMKDEQGRPFIVVRDQGRKKRQFGNEAVKSHILAARTVANIVKSSLGPRGLDKILISPDGDITVTNDGATILQQMEITNHVAKLLVELSKSQDDEIGDGTTGVVVLAGALLEQAADLIDKGIHPIRIADGYDQACDIAVAELDKISDTIEFSREETSNLVKVARTSLGSKIVSKSHDQFANIAVDAVLSVADLERKDVDFELIKVDGKVGGALEDTLLVKGVIVDKDFSHPQMPSEVRDAKIAILTCAFEPPKPKTKHHLDITSVEEFKKLQNYEKEKFIEMIQQIKDTGANLAICQWGFDDEANHLLLQNELPAVRWVGGPEIELIAIATNGRIVPRFEDLSAAKLGTAGIVREMSFGTTREKMLVIEECANTRAVTVFVRGSNKMIIDEAKRSLHDALCVVRNLVRDNRVVYGGGAAEIACSLAVEDAAVKTPGLEQYAMRAFSEALDTVPMTLAENSGLNPIATLAEVKSQQVKAGPEGRGKLGVDCMGRGDNDMKEAFVIDPLIGKKQQLQLATQLCRMVLKVNNVIVSGADDNDF

SEQ ID NO: 44236 - protein, 190 aa, Zea mays
  misc_feature (120)..(120): Xaa can be any naturally occurring amino acid
  unsure (1)..(190): unsure at all Xaa locations
WRLSGSLPAVDLLSPPPDGDYGRPSPARCTEAARHFSRTRAFCLACHHGVPRLLIYHRSTKCIYTATSRHTTTRSRPLPLYGTHSTSAGDTFYWMRALLTSNRACGREVPITPTVTSRLXHMQLLIGSKIIVRHNHLTEDPPLLNAAQKHVAIFIAIDELVQYALPGMHGSARLLATGNAILLILQLFFG

SEQ ID NO: 44237 - protein, 677 aa, Klebsiella pneumoniae
MKLAALATLFVPGMAFAAWTTTDFPAFTEEGTGRFISQKVVEKGTRPLQLNFDQQCWQPSGGIKLNQMLSMEPCRGTPPQWRIFRQGLYTLEVDTRSGTPTMMISLEEKETSAAAPQIRQCPKWDGKPLTIDVSKTFAEGSKVRDFYSGNVATVSGGKITLQPAFGSNGLLLLERAETAAPAPFDWHNATVYFVLTDRFVNGNPANDNSYGRHKDGMQEIGTFHGGDLQGLTSKLDYLQQMGVNALWISSPLEQIHGWVGGGTKGDFPHYAYHGYYTQDWSKLDANMGTEADLRRLVDEAHKRGIRILFDVVMNHAGYATLADMQEFQFGSLYLQGDELKKTLGERWTDWKPGAGQTWHSFNDYINFSDKAGWEKWWGKKWIRIDIGDYDNPGYDDLTMSLAFLPDLKTESKEISGLPNFYSHKPDTAAKAIPGYTPRDYLTHWLSQWVRDYGIDGFRVDTAKHVEMDAWQQLKTQATAALAEWKKANPDKALDAAPFWMTGEAWGHGVMQSDYYRHGFDAMINFDYQDQAAKAATCMANIDLTWQQMADKLQSFNVLSYLSSHDTRLFREGGATAAELLLLAPGAVQIFYGDESSRPFGPTGSDPLQGTRSEMNWQDVNGKAARSVTHWQKIGQFRARHPAIGMGKQTTLSMSRGYGFVRESGEDKVMVIWAGQQQ

SEQ ID NO: 44238 - protein, 305 aa, ASPERGILLUS NIDULANS FGSC A4
MEDAHAAVLDLQAKQSGSNDQPTDPDRRLAFFGVYDGHGGDKVALFAGENVHKIVAKQETFLKGDIEQALKDGFLATDRAILEDPKYEEEVSGCTAAVSIISKKKIWVANAGDSRSVLGVKGRAKPLSFDHKPQNEGEKARISAAGGFVDFGRVNGNLALSRAIGDFEFKKSPELSPEQQIVTAYPDVTVHELTEDDEFLVIACDGIWDCQSSQAVVEFVRRGIAAKQDLYRICENMMDNCLASNSETGGVGCDNMTMVIIGLLNGKTKEEWYNQIAERVANGDGPCAPPEYGKSLEEPTASNPY

SEQ ID NO: 44239 - protein, 327 aa, Nostoc sp. PCC 7120
MRVFVTGATGFVGANLVRLLLQQGYTVKTLVRPQSNLGNLRGLDVEIVEGDFDNQFLWQQMSGCRYLFHVAAQYSLWQKDRDLLYQNNVLGTFQVLEAAQKAGIERTVYTSSVAAIGVNPSGEIADETYQSPVDKLIGHYKKSKFLAEQEAVQAAAKGQDIVIVNPSTPIGPWDIKPTPTGDIILRFLRRQMPAYVNTGLNLIDVRDVAWGHLLALEKGKSGDRYILGHQNLSLQQLLEKLAEITGLPAPQWTVPGWLPLSVAWMEEKILAPLGKTPSVPIDGVRMAQQTMYYDASKAVKELGLPQSPVDIALKDAVNWFVSQGYVK

SEQ ID NO: 44240 - protein, 745 aa, Streptococcus agalactiae NEM316
MVKVSNLGYPRLGEQREWKQAIEAFWAGNLEQKDLEKQLKQLRINHLKKQKEAGIDLIPVGDFSCYDHVLDLSFQFNVIPKRFDEYERNLDLYFAIARGDKDNVASSMKKWFNTNYHYIVPEWEVETKPHLQNNYLLDLYLEAREVVGDKAKPVITGPITYVSLSSGIVDFEATVQRLLPLYKQVFQDLIDAGATYIQIDEPIFVTDEGELLVDIAKSVYDFFAREVPQAHFIFQTYFESAVCLDKLSKLPVTGFGLDFIHGRAENLAAVKQGLFREKELFAGIVNGRNIWAVNLEETLALLEEIGPFVKRLTLQPSSSLLHVPVTTKYETHLDPVLKNGLSFADEKLKELELLASAFDGNKTKGYHEALSRFSALQAADFRHVALESLAEVKLERSPYKLRQALQAEKLQLPILPTTTIGSFPQSPEIRKKRLAWKRGNLSDSDYKDFIKTEIRRWIAIQEDLDLDVLVHGEFERVDMVEFFGQKLAGFTTTKLGWVQSYGSRAVKPPIIYGDVKHIQPLSLEETVYAQSLTKKPVKGMLTGPITITNWSFERDDISRSDLFNQIALAIKDEIQLLEQSGIAIIQVDEAALREGLPLRQQKQQAYLDDAVAAFKIATSSVKDETQIHTHMCYSKFDEIIDSIRALDADVISIETSRSHGDIIESFETAVYPLGIGLGVYDIHSPRIPTKEEIIVNIQRSLKCLSKEQFWVNPDCGLKTRREAETIAALEVLVSATKEVRQQLDN

SEQ ID NO: 44241 - protein, 261 aa, Oceanobacillus iheyensis HTE831
MRHAIYQMDIVPGNPEANRTKVKTWIEQTVSKNDIDIIVLPEMWTTGYTLADLNEVADEGEEPTCSFLQQLARENQVHIIAGSIANKRNGKIYNTAIVVNRNGEKVYTYDKIHLVPMLDEPTYLNGGEEKVRTFELDGIKMGLIICYDLRFPELTRSLAVSGAEVIYIVAEWPSARKDHWKNLQLARAIENQCFIISANRVGIFNNVEFCGLSLVINPWGDIRTLGSENHEETIVDNIDLQKVREARKNVPIFESRVPELY

SEQ ID NO: 44242 - protein, 450 aa, Miscanthus sinensis
MREFISIHIGQAGIQVGNACWELYCLEHGIEPDGTMPSDTSVGAAHDAFNTFFSETGSGQHVPRAIFVDLEPTVIDEVRTGSYRQLFHPEQLISGKEDAANNFARGHYTVGKEIVDLCLDRVRKLADNCTGLQGFLVFNAVGGGTGSGLGSLLLERLSVDYGKKSKLGFTIYPSPQVSTAVVEPYNSVLSTHSLLEHTDVAVLLDNEAIYDICRRSLDIERPTYTNLNRLISQIISSLTTSLRFDGAINVDVTEFQTNLVPYPRIHFMLSSYAPVISAEKAYHEQLSVPEITSAVFEPSSMMAKCDPRHGKYMACCLMYRGDVVPKDVNAAVATIKTKRTVQFVDWCPTGFKCGINYQPPSVVPGGDLAKVQRAVCMISNNTAVAEVFSRIDHKFDLMYAKRAFVHWYVGEGMEEGEFSEAREDLAALEKDYEEVGAEGADDEGDEGDDY

SEQ ID NO: 44243 - protein, 574 aa, Thermoanaerobacter ethanolicus
MIKEAIFHKSDVPYAYPLNENQLKIVLRTAVFDVDRVYVLYKDRYDWLGKFKIKPMVLTHTNELFDYYETTLELNKKFVYFFYLVSDGGEKLYYTEAGFYKKRPENHFWGFFHYPYIGEKDVFFAPEWTSDCMVYQIFPERFNNGDKSNDPENVKPWGEKPTADSFFGGDLQGIIDKIDYLKDLGINAIYLTPIFLSHSTHKYDTTDYYTIDPHFGDTQKARELVQKCHDNGIKVIFDAVFNHCGYDFFAFQDVIKNGKKSKYWDWFNIYEWPIKTHGKPSYEAFADTVWRMPKLMTKNPEVQKYLLEVAEYWIKEVDIDGWRLDVANEIDHHFWRKFREVVKAAKPEAIIVGEVWHDASPWLRGDQFDSVMNYPFRNAVVDFFAKRKISASRFNTMITEQLMRHMDSVNRVMFNLIGSHDTERFLTLANGMVARMKLALVFQFTFVGIPYIYYGDEVGMVGDYDPDCRRCMIWEEEKQNKSIFNFYKKLISIRRENEELKYGSFCTLYAIGRVFAFKREYKGKSIIVVLNNSSKQEVIFLNEVEGKEDILKMKELKRSGNLLYLQPNSAYILK

SEQ ID NO: 44244 - protein, 450 aa, Miscanthus transmorrisonensis
MREIISIHIGQAGIQGGNACWELYCLEHSIEPDGTMPSDTSVGAAHDAFNTFFSETGSGQHVPRAIFVDLEPTVIDEVRTGLYRQLFHPEQLISGKEDAANNFARGHYTVGKEIVDLCLDRVRKLADNCTGLQGFLVFNAVGGGTGSGLGSLLLERLSVDYGKKSKLGFTIYPSPQVSTAVVEPYNSVLSTHSLLEHTDVAVLLDNEAIYDICRRSLDIERPTYTNLNRLISQIISSLTTSMRFDGAINVDVTEFQTNLVPYPRIHFMLSSYAPVISAEKAYHEQLSVPEITNAVFEPSSMMAKCDPRHGKYMACCLIYRGDVVPKDVNAAVATIKTKRTVQFVDWRPTGFKCGINYQPPSVVPGGDLAKVQRAVCMISNNTAVAEVFSRIDHKFDLMYAKRAFVHWYVGEGMEEGEFSEAREDLAALEKDYEEVGAEGADDEGDEGDDY

SEQ ID NO: 44245 - protein, 575 aa, Debaryomyces hansenii CBS767
MKYVVVSGGVISGIGKGVLASSTGLLFKTLGYRVTSIKIDPYMNIDAGTMSPLEHGECFVLNDGGEVDLDLGNYERYLNTTLTKDHNITTGKIYSHVIERERRGDYLGKTVQVVPHVTGSIQDWIERVAVVPVDDSGSEPDICIIELGGTVGDIESAPFVEALRQFQFRVGVENFALIHVSLVPVIHGEQKTKPTQAAIKDLRSLGLTPDMIACRCQEQLEIATIEKIGMFCHVGPEQVIAVHDVNSTYHVPLLLKELRMMKFLEKKLNLDANKLSKEALSKGEHLLTRWRTLTSQHDNSFETTTIALVGKYTNLKDSYLSVIKALEHSSMSCKRKLKIEWVESTDLEEASKENNLADYHKAWHSICQADGILVPGGFGNRGIEGMVAAAKYARENNVPYLGVCLGLQIAVIEFVRNVLGYSNSTSMEFDATVEEKTASVVYMPDVDQVKLGGTMRLGIHSTKFTDGSEWSKLRKLYGGADSVLERHRHRYEVNPQLIDEIETKGLNFIGKDETEKRMELFELKDHKFFCGTQYHPEYLSKVLDPSRPFLGLVAAASGMLDEVLSRKDLNYKGEF

SEQ ID NO: 44246 - protein, 319 aa, Legionella pneumophila str. Paris
MGILIDGIWHDENNINTDKEGRFVRAESGFRQHITASGESGFKAEPDRYHLYLSYACPWACRTLIMRKLKGLEKIISVSFSDPVMGKNGWSYGESGNETADEINHIHYLKELYLLARKDYTGRVTVPVLWDKKKKTIVNNESSEIMRMLNSEFNAFSSTDHDYYPKQWRQKIDEINQLVYENINNGVYKCGFAKSQKAYEEAFDALFNTLNQIENILATQRYLIGEQLTEADWRLFTTLIRFDAVYHGHFKCNLQRIIDYPHLSNYLRELYQFPGIKETVNFNHIKQHYYRSHLSINPTGIVPKGPKLNLDEPHNRHEF

SEQ ID NO: 44247 - protein, 438 aa, Miscanthus transmorrisonensis
MREIISIHIGQAGIQGGNACWELYCLEHGIEPDGTMPSDTSVGAAHDAFNTFFSETGSGQHVPRAIFVDLEPTVIDEVRTGLYRQLFHPEQLISGKEDAANNFARGHYTVGKEIVDLCLDRVRKLADNCTGLQGFLVFNAVGGGTGSGLGSLLLERLSVDYGKKSKLGFTIYPSPQVSTAVVEPYNSVLSTHSLLEHTDVAVLLDNEAIYDICRRSLDIERPTYTNLNRLISQIISSLTTSLRFDGAINVDVTEFQTNLVPYPRIHFMLSSYAPVISAEKAYHEQLSVPEITSAVFEPSSMMAKCDPRHGKYMACCLMYRGDVVPKDVNAAVATIKTKRTVQFVDWPPSVVPGGDLAKVQRAVCMISNNTAVAEVFSRIDHKFDLMYAKRAFVHWYVGEGMEEGEFSEAREDLAALEKDYEEVGAEGADDEGDEGDDY

SEQ ID NO: 44248 - protein, 233 aa, Streptococcus pneumoniae TIGR4
MTKTILVTGGTSYIGSHTVKALLNAGYQVHVLDNLSTGNRAAVDSRASFKELDVYDASALKAYLEENQIDAVLHCAGEIVVSESIENPSKYFTANVAGMNQVLKVLSEVGIQKIMFSSTASLYGNNCIDKPVTEDTLLDPVNPYAETKLMGERMIYWMANRYDWKYVIFRYFNVAGAEMDASNGLRVKNPTHIIPNINKTALGQNDSLKIFGDDYDTRDGSCIRDYIYVLDLA

SEQ ID NO: 44249 - protein, 394 aa, Arabidopsis thaliana
MASQDCHMLLSFFISTFLITVVTSQTRCRNFKSIISFGDSITDTGNLLGLSSPNDLPESAFPPYGETFFHHPSGRFSDGRLIIDFIAEFLGIPHVPPFYGSKNGNFEKGVNFAVGGATALECSVLEEKGTHCSQSNISLGNQLKSFKESLPYLCGSSSPDCRDMIENAFILIGEIGGNDYNFPLFDRKNIEEVKELVPLVITTISSAISELVDMGARTFLVPGNFPLGCSVAYLTLYETPNKEEYNPLTGCLTWLNDFSVYHNEQLQAELKRLRNLYPHVNIIYGDYYNTLLRLMQEPSKFGLMDRPLPACCGLGGPYNFTFSIKCGSKGVEYCSDPSKYVNWDGIHMTEAAYKWISEGVLTGPYAIPPFNWSCLDSKIKNNESLHTQYSLMNS

SEQ ID NO: 44250 - protein, 122 aa, Arabidopsis thaliana
MEKNSFKLSNPLEMRMAESTRIRAKYPERVPVIVEKAGQSDVPDIDKKKYLVPADLTIGQFVYVVRKRIKLGAEKAIFVFVKNTLPPTAALMSAIYEEHKDEDGFLYMTYSGENTFGGSFYC

SEQ ID NO: 44251 - protein, 450 aa, Miscanthus sinensis var. condensatus
MREIISIHIGQAGIQVGNACWELYCLGHGIEPDGTMPSDTSVGAAHDAFNTFFSETGSGQHVPRAIFVDLEPTVIDEVRTGSYRQLFHPEQLISGKEDAANNFARGHYTVGKEIVDLCLDRVRKLADNCTGLQGFLVFNAVGGGAGSGLGSLLLERLSVDYGKKSKLGFTIYPSPQVSTAVVEPYNSVLSTHSLLEHTDVAVLLDNEAIYDICRRSLDIERPTYTNLNRLISQIISSLTTSLRFDGAINVDVTEFQTNLVPYPRIHFMLSSYAPVIPAEKAYHEQLSVPEITSAVFEPSSMMAKCDPRHGKYMACCLMYRGDVVPKDVNAAVATIKTKRTVQFVDWCPTGFKCGINYQPPSVVPGGDLAKVQRAVCMISNNTAVAEVFSRIDHKFDLMYAKRAFVHWYVGEGMEEGEFSEAREDLAALEKDYEEVGAEGADDEGDEGDDY

SEQ ID NO: 44252 - protein, 450 aa, Miscanthus floridulus
MREIISIHIGQAGIQVGNACWELYCLEHGIEPDGTMPSDTSVGVAHDAFSTFFSETGSGKHVPRAIFVDLEPTVIDEVRTGSYRQLFHPEQLISGKEDAANNFARGHYTVGKEIVDLCLDRVRKLADNCTGLQGFLVFNAVGGGTGSGLGSLLLERLSVDYGKKSKLGFTIYPSPQVSTAVVEPYNSVLSTHSLLEHTDVAVLLDNEAIYDICRRSLDIERPTYTNLNRLISQIISSLTTSLRFDGAINVDVTEFQTNLVPYPRIHFMLSSYAPVISAEKAYHEQLSVPEITNAVFEPSSMMAKCDPRHGKYMACCLMYRGDVVPKDVNAAVATIKTKRTVQFVDWCPTGFKCGINYQPPSVVPGGDLAKVQRAVCMISNNTAVAEVFSRIDHKFDLMYAKRAFVHWYVGEGMEEGEFSEAREDLAALEKDYEEVGAEGAADEGDEGDDY

SEQ ID NO: 44253 - protein, 604 aa, Bifidobacterium longum DJO10A
MTANNLNDDWWKQAVVYQIYPRSFKDVNGDGLGDIAGVTEKMDYLKNLGVDAIWLSPFYPSDLADGGYDVIDYRNVDPRLGTMDDFDAMAEAAHEAGIKVIVDIVPNHTADKHVFFKEALASEPGSPARDRYIFRDGRGEHGELPPNDWQSFFGGPAWARVPDGQWYLHLFDKAQPDVNWKNPDIHEEFKKTLRFWSDHGTDGFRIDVAHGLAKDLESKPLEELGREYSVVGVLNHDFSHPLFDRREVHDIYREWRKVFNEYNPPRFAVAEAWVVPEHQHLYASMDELGQSFNFDFAQANWYADEFRKAIAAGLKAAAETGGSTTTWVMNNHDVPRSPSRYGLPQVKGAPYHQLPHDWLLRNGTTYPEDRELGTRRARAAALMELGLPGAAYIYQGEELGLFEVADIPWDRLEDPTAFHTARNTMDKGRDGCRVPLPWTAADKPALADFSRPAPADDGTGENHVPLCAAGQFGTGASFGFSPAVRADGVTPAADPHLPQPLWFKDYAVDVEQADPDSMFALYHAALAIRQESLTATRDTTAEQVGMGDDVVAYTRAAVGGRVFTSITNFGNAPIALPDGSVVLASGPLTPEGQLPTDTSAWVVQ

SEQ ID NO: 44254 - protein, 320 aa, Triticum aestivum
  misc_feature (274)..(274): Xaa can be any naturally occurring amino acid
  unsure (1)..(320): unsure at all Xaa locations
MALESLGVLLLHPMNAYLEQELDRRFRLFRFWDSPPDGRAEFLRANASAIRAVVGNAGYNADAALIDALPSLEIVASFSVGIDRVDLPKCRERGIRVTNTPDVLTDDVADLAVGLAIAALRKIPQADRYVRAGLWKAKGDYTLTTRFSGKRVAILGLGRIGLAIAKRAEAFGCSISYHSRSEKPFPNYKFFTNVVDLAANCDVLIVACSLNAETHHIVNRKVMDALGPDGVLINIGRGALVDEPELVSALFVEKRLGAAGLDVFEHEPFAPRAXLFSLDNVVLVPHVGSDTEETCKAMADLVLKNLEAHALNKPLLTPVP

SEQ ID NO: 44255 - protein, 389 aa, Bacillus cereus ATCC 10987
MDRVWKNLISEENIVKWRRYFHKYPELSFHEKETSQFIYDTVCSFSSFEVTRPTKYSVLAIKRGTEQGKVIAIRADIDALPIQEETSKSYTSVNKGVMHACGHDAHAAILLGTAEVLSNIKENFVGEIRLFFQHAEEVYPGGGQEMVEAGVMDGVDYVIGLHVMSGLESGKIGIAYGPMMAAPDVFTVEIQGKGGHAARPEETIDPIAIGAQIITNLQHIVSRNTSAFMQRVVSVTQFHGGMADNIIPSAATLMGTVRSFNQALRIEAEEKIEKIVKGITEAHGGAYTYSYRYGYDPVINDEYITKVVEESALYLFGNERVVKLEPSMGGEDFSAYLRKAPGCFIKLGTGNKKIDTCYPHHHPKFDVDESALIYGVELFLETTMRLLKS

SEQ ID NO: 44256 - protein, 641 aa, Ustilago maydis 521
MGEGHTRTEEASCSIGMSQIRVAAHEANQIGAMHSAAGTADHDLHPNSETPLAIHDSTQSASRATSDSDEKSDVHAATPTCSSHDPASTPKKSHWLQSDQHVLPHNNMKIVMPGLCLAVGLAALDQTIVSTALPIISQRLNGDPGQYSWVGSAYLLAATSLIPLYGRLSDLTGRKPLLYGAIIIFLFGSALCGAAQNMAWLDAARGIQGIGGGGIIALINIIIGDIVSLQDRGKFSGWIGGVWGIASVIGPLLGGAFTDAGHSGWRWCFFINLPLGAIAFAIIFFSLNLNPRPKLTFREACGEFDFIGLIMIVVSVILILLGFNYAETKAWNVPETISLLVVGGCLLVAFMAWEFKTDKKPIVPPRLVTTRTTSLLLLSVVLHGFVFFAATYYLPVYFQAIFGASALMSGVYMLPYALIASIMSSVVGIGISKLRAYRPFLWAGWAVMVIGYGLMATLNASSSQVKQEVFIGIAGFGTGFLFQTPLVGLMAAMPHGDLSTTVAAMSLIRSLGGTMGIAVAGAVFNTQSRSRLAKIPGFTPSMVATGTGGQDLTGLGNIQPPELSRQIIAAYADGLQIVWIMLAPMAGAGLLAVLGVKGYSLRRDVKKAPQVGTPKKMVDLENPQTEDAGVPSTDDNQGDRR

SEQ ID NO: 44257 - protein, 75 aa, Trifolium repens
GFVHRQYNSSPGYYDGRYWTMWRLPLFGTTDAAQVLKEVAECKAEYPEAFIRIIGFDNVRQVQCISFIASTPKVY

SEQ ID NO: 44258 - protein, 373 aa, Bacillus licheniformis ATCC 14580
MADKQAHETETEFTFEQVRDQLTEAGKKRGVLTYEEIAERMSSFDIESDQMDEYYEFLGEQGVELISENEETEDPNIQQLAKAEEEFDLNDLSVPPGVKINDPVRMYLKEIGRVNLLSAKEEIEYAKKIEEGDEESKRRLAEANLRLVVSIAKRYVGRGMLFLDLIQEGNMGLMKAVEKFDYRKGYKFSTYATWWIRQAITRAIADQARTIRIPVHMVETINKLIRVQRQLLQDLGREPTPEEIAEDMDLTPEKVREILKIAQEPFSLETPIGEEDDSHLGDFIEDQEATSPSDHAAYELLKEQLEDVLDTLTDREENVLRLRFGLDDGRTRTLEEVGKVFGVTRERIRQIEAKALRKLRHPSRSKRLKDFLE

SEQ ID NO: 44259 - protein, 447 aa, Pisum sativum
EIVHIQGGQCGNQIGAKFWEVVCAEHGIDPTGRYGGDTDLQLERINVYYNEASCGRYVPRAVLMDLEPGTMDSVRSGPYGQIFRPDNFVFGQSGAGNNWAKGHYTEGAELIDSVLDVVRKEAENCDCLQGFQVCHSLGGGTGSGMGTLLISKIREEYPDRMMLTFSVFPSPKVSDTVVEPYNATLSVHQLVENADECMVLDNEALYDICFRTLKLTTPSFGDLNHLISATMSGVTCCLRFPGQLNSDLRKLAVNLIPFPRLHFFMLGFAPLTSRGSQQYRALSVPEITQQMWDSKNMMCAADPRHGRYLTASAIFRGKMSTKEVDEQMMNVQNKNSSYFVEWIPNNVKSTVCDIPPTGLKMASTFIGNSTSIQEMFRRVSEQFTAMFRRKAFLHWYTGEGMDEMEFTEAESNMNDLVSEYQQYQDATAEEDEYEEEEEDYHQEHDEM

SEQ ID NO: 44260 - protein, 440 aa, Pisum sativum
GQCGNQIGSKFWEVVCDEHGIDPTGRYVGNSDLQLERVNVYYNEASCGRFVPRAILMDLEPGTMDSVRTGPYGQIFRPDNFVFGQSGAGNNWAKGHYTEGAELIDSVLDVVRKEAENCDCLQGFQVCHSLGGGTGSGMGTLLISKIREEYPDRMMLTFSVFPSPKVSDTVVEPYNATLSVHQLVENADECMVLDNEALYDICFRTLKLTTPSFGDLNHLISATMSGVTCCLRFPGQLNSDLRKLAVNLIPFPRLHFFMVGFAPLTSRGSQQYRALTVPELTQQMWDSKNMMCAADPRHGRYLTASAMFRGKMSTKEVDEQMINVQNKNSSYFVEWIPNNVKSSVCDIAPRGLSMASTFIGNSTSIQEMFRRVSEQFTAMFRRKAFLHWYTGEGMDEMEFTEAESNMNDLVSEYQQYQDATADEEGEYEDEEEEEPEHGYE

SEQ ID NO: 44261 - protein, 294 aa, Arabidopsis thaliana
NHLKATTQVLKFSHIFYLLYKLLIKSRLTMAEEYKNNVPEHETPTVATEESPATTTEVTDRGLFDFLGKKEEEVKPQETTTLESEFDHKAQISEPELAAEHEEVKENKITLLEELQEKTEEDEENKPSVIEKLHRSNSSSSSSSDEEGEEKKEKKKKIVEGEEDKKGLVEKIKEKLPGHHDKTAEDDVPVSTTIPVPVSESVVEHDHPEEEKKGLVEKIKEKLPGHHDEKAEDSPAVTSTPLVVTEHPVEPTTELPVEHPEEKKGILEKIKEKLPGYHAKTTEEEVKKEKESDD

SEQ ID NO: 44262 - protein, 396 aa, Escherichia coli O157:H7 EDL933
MFENITAAPADPILGLADLFRADERPGKINLGIGVYKDETGKTPVLTSVKKAEQYLLENETTKNYLGIDGIPEFGRCTQELLFGKGSALINDKRARTAQTPGGTGALRIAADFLAKNTSVKRVWVSNPSWPNHKSVFNSADLEVREYAYYDAENHTLDFDALINSLNEAQAGDVVLFHGCCHNPTGIDPTLEQWQTLAQLSVEKGWLPLFDFAYQGFARGLEEDAEGLRAFAAMHKELIVASSYSKNFGLYNERVGACTLVAADSETVDRAFSQMKAAIRANYSNPPAHGASVVATILSNDALRAIWEQELTDMRQRIQRMRQLFVNTLQEKGANRDFSFIIKQNGMFSFSGLTKEQVLRLREEFGVYAVASGRVNVAGMTPDNMAPLCEAIVAVL

SEQ ID NO: 44263 - protein, 198 aa, Gossypium arboreum
MAPKKDGVSKRVFNKGSWTAEEDRRLAKYIEIHGAKRWKTIAIKSGLNRCGKSCRLRWLNYLRPNIKRGNISDEEEDLIIRLHKLLGNRWSLIAGRLPGRTDNEIKNYWNSHLSKKIINHDVRTEQTSSSEQIVPHKAWETVQMEEEEVVKGSDEIENSEFSIDVDEFFDFTTEGCFSLDWVNKFLELDDQQDPLAMV

SEQ ID NO: 44264 - protein, 499 aa, Oceanobacillus iheyensis HTE831
MSYVLGVDLGTSGVKVLLVNKKGKVEYEKTKSLTLIQEKTGYAEQDPDEWVSQTYEAIKELVTDNAVDPAKITGLSFAGQMHGLVLLNNKNQVIRNAILWNDTRTSEECQEIYSILGEDRLLEITKNIALEGFTLPKLLWVKKHEPINFAKTTTFLLPKDYVRYQLTGKLHMDYSDAAGTLLLDVEKNRWSKEICELFEIPTKICPELINSIQEVGTLTEEASTNSRLNMATKVFAGGADNACAAIGSGVLSKEKTLASIGTSGVVLSYEESGDKKFEGKVHYFNHGAPDAFYTMGVTLAAGHSLSWFKETFAHDICFDELIQEASTVNPGANGLLFTPYINGERTPHVDANIRGSFIGIDASHKRQHFTRAVLEGITFSLQESVTILRESGKKIESIISLGGGAKSDLWLQMQADIFQANVIRLTSEQGPGMGAAMIASVGVGWFNSLADCGDVFIQEEKVYKPIEENVKVYHDLFLLYKEVYSSTTKINKQLREFRN

SEQ ID NO: 44265 - protein, 1068 aa, Xanthomonas campestris pv. vesicatoria str. 85-10
MTALPVRSTHLMHTISTTRDRWVWVIAGALMAGTLGMELVTPLGYAVWLTYFVAVGVTVFQNRPQVPLIVGVLSCVLLAIGFQLAPPSTNSSLSSVNRSIGGVSFLAMALVVMQAIRARRQAEFALWLQQAENTVEASLRGDQAPQELADAAVRALCQTLDAQVGALYRIEGDRLRLTGGAALPPDLPQTLPTAAGQLGEVLQRGTVRRIRGMDAGHLQIASGLGQSSCQELLLAPITADDRVIGVIELGRVTDPRTAGSREEELLARCGENIGLALRTALLRAQLVALLEETQRQSEELQTQQEELRVANEELEEQSRSLQQSQSDLEVQQAELEQTNVQLEERTQALEAQKQALLIAQNQLVRNSNELSTASRYKSEFLANMSHELRTPLNSALILAKLLADNKDGTLSAEQVKYAQAILSSNNDLLALINDILDLSKIEAGHVELADETVVTDSVLQRLRETFEPLARQKGLALEIAAAAGAPAQLVVDNQRLQQILKNLLANAIKFTEHGKVSLTVQAHAPGRVHFAVTDTGIGIAREQSEVIFEAFRQADGSTRRRYGGTGLGLSISRDLAQRMGGSISVDSEPGRGSCFTLELPTDGAPAEVTGPADTATNAAAVAGPASAAHVQQRNGSAMGAQSGASGGAVAHTVPVPIASPNAAPIQRADDDRDQRSRPGRLILAVEDDTRFAQALVELAHELDFDCVVAPNAEEALRLAAEMRPSGILLDIGLPDASGLSVLERLKRDPATRHVPVHVVSALERSQIALELGAVGYLIKPATRELLAGAIRQLEETNARAVRRLLIVEDDSALRANLQLLLARDQLDIVAVGSIAEAMDQLAGSTFDCMVTDLALPDGSGYDLLERMAGNDAVAFPPVIVYTGRALTRDEEQGLRRYSKSIIIKGVRSPERLLDEVTLFLHSVEASLPSDQQRLLREARRRDAVLDGATVLLAEDDVRNIFALSSVLEPLGVTLQIARNGREALEHLAKHEVDLVLMDIMMPEMDGITAMRQIRTNRQWQDLPIIALTAKAMADDRERCLEAGANDYIAKPIDVDKLVSLCRVWCSRQ

SEQ ID NO: 44266 - protein, 100 aa, Triticum aestivum
  misc_feature (75)..(75): Xaa can be any naturally occurring amino acid
  unsure (1)..(100): unsure at all Xaa locations
MDSALASAEAIVDQLQKNEQYRHILVYVILSSPPDMPQAMRFLNHMVSDEVPIVELWQLLYTFVLELGKLEPDSXREVAHYALTQIQSVVGFLVEHVVVD

SEQ ID NO: 44267 - protein, 167 aa, Triticum aestivum
  misc_feature (60)..(60): Xaa can be any naturally occurring amino acid
  misc_feature (89)..(89): Xaa can be any naturally occurring amino acid
  misc_feature (99)..(99): Xaa can be any naturally occurring amino acid
  misc_feature (134)..(134): Xaa can be any naturally occurring amino acid
  unsure (1)..(167): unsure at all Xaa locations
MGASESVPETSVHEFTVKDCNGKEVCLDTYKGKVLLIVNVASKCGFTETNYTQLTELYQXKYREKDFEILAFPCNQFLRQEPGSDQQIXKDFACTRFKXAEYPVFQKSACKWPNAAPLYKFLKASKPGWFGSRXKWDLQIPVDKNGKVINRYQLLHSISFEKDIRRT

SEQ ID NO: 44268 - protein, 459 aa, Zea mays
MPMPSAGRDNATAAEGAAQAFLLPEHAGDNDAPCVGGSASVLGAVCNVSTSVVGAGIMSIPAAMRVLGVAPAVALIAGVAVLARAAVNFMLRYTRGAPSYAALMGDAFGSAGAALLNVFVALNGFGTLTVYLIIIGDVVSGTASGGVAHPGVLQEWFGRQWWTSREVVLVAAAAILLPLVLRKRVDSLRFTSAISILLAVVFMLISSGIALYALFKGTATMPRMFPDFSRLSSPFELFTAVPVIVVAFTFHFNVHPIRAELSKTSDMKVAVRVSLVLCAAIYAAVGFFGFLLFGDATMADVLANFDRSSGAGVPQALNDAARLSYALHLVLVFPLLLFSLRVNVDELLFPGRRPLAADTRRFVSLTAVLMAVLYVLAIAIPSIWTLFEYSGSTFAVTISLIFPGAIVLRDVHGIAKRKDKALAATMIVLAVVTSSIAIASNIMSSISDEDRGGHVAGRR

SEQ ID NO: 44269 - protein, 684 aa, Ralstonia metallidurans CH34
MASTSADRVLRPESGRYDELANALRALAMDAVQQANSGHPGAPMGMAEMAVALWSGHLRHNPGNPGWPDRDRFVLSNGHASMLLYALLHLSGYDLPIEELQRFRQLHSKTPGHPEVGLTPGVETTTGPLGQGLANAVGMALAGKLLGDEFNRPGHVVVDHHTYVFLGDGCLMEGISHEVCSLAGVWRLNKLIALYDDNGISIDGAVDAWFRDDTAARFRAYGWNVIGPIDGHDVVAIGRSIADARRSADRPTLIVCRTTIGRGSPGRAGTAKAHGEPLGADEIAATRAAIGWHEAPFEIPDTVRARWSARDLGARREAQWRLGFEAYRSEYPALAAEFERRIAGDLPSSFHEAASAAMIELGQATTPVASRKASQQALAMLAPKIPEMLGGSADLTGSNLTDFPGCGAVRAGQPGGRHVNYGVREFGMAAIMNGLALHGGFIPYGGTFLTFSDYSRNGIRMAALMKLRVVHVFTHDSIGLGEDGPTHQAVEHAASLRLIPNLDVWRPCDAAETAVAWAFALEQRTRPSALLLSRQNLPPQARTAEQVAQIRRGGYVLSDRPEPQVVLIGTGSEVSIAMEAQRLLDAVGIAARVVSLPCSTLFDRQEAAWHEQVLGRGIPRIGVEAGVTSWWGQYHCVAALGVNSFGESAPGPQVYEHFGLDAKALADLAREVLAREVRFVRSRS

SEQ ID NO: 44270 - protein, 450 aa, Miscanthus floridulus
MREFISIHIGQAGIQVGNACWELYCLEHGIEPDGTMPSDTSVGVAHDAFSTFFSETGSGKHVPRAIFVDLEPTVIDEVRTGSYRQLFHPEQLISGKADAANNFARGHYTVGKEIVDLCLDRVRKLADNCTGLQGFLVFNAVGGGTGSGLGSLLLERLSVDYGKKSKLGYTIYPSPQVSTAVVEPYNSVLSTHSLLEHTDVAVLLDNEAIYDICRRSLDIERPTYTNLSRLISQIISSLTTSLRFDGAINVDVTEFQTNLVPYPRIHFMLSSYAPVICAEKAYHEQLSVPEITNAVFEPSSMMAKCDPRHGKYMACCLMYRGDVVPKDDNAAVATIKTKRTVQFVDWCPTGFKCGINYQPPSVVPGGDLAKVQRAVCMISNNTAVAEVFSRIDHKFDLMYAKRAFVHWYVGEGMEEGEFSEAREDLAALEKDYEEVGAEGADDEGDEGDDY

SEQ ID NO: 44271 - protein, 454 aa, Xylella fastidiosa Ann-1
WHAIGAEAQVQTNPLPSEQITTELLMSEATPSDAVAIPKTTPTPVVDKGDVAWMLTSTLLVLLMALPGLALFYGGMLRSKNVLSMMVQIGVVFSLIAILWVVYGYSLAFADGDMFIGTFNKAFLYGVDTATLTDTFSKGFKLPEYLYVAFQLTFAGITGVLIVGAFAERVKFAAVLLFIFLWFSFGYLPLAHMVWSTPGFLLSKGALDFAGGTVVHINAGIAGLVGAYFVGKRIGFGQVAVKPHNVPMTFTGAALLWVGWFGFNAGSALEANSIAALAFINTMLATAAAILVWSLLEKMTKGKFSALGVASGMIAGLVGVTPAAGTVGPFGAIAIGAVAAVCCIWGITGLKRLLKVDDTLDVFGVHGIGGIVGAILTGVFTDKALGGQGYAEGMTMSNQVMIQAMGVGISVLWIGIVSLVGFLIVKLLFGLRVSEEAEREGLDITSHGESAYES

SEQ ID NO: 44272 - protein, 450 aa, Miscanthus floridulus
MREFISIHIGQAGIQVGNACWELYCLEHGIEPDGTMPSDTSVGAAHDAFNTFFSETGSGQHVPRAIFVDLEPTVIDEVRTGSYRQLFHPEQLISGKEDAANNFARGHYTVGKEIVDLCLDRVRKLADNCTGLQGFLVFNAVGGGTGSGLGSLLLERLSVDYGKKSKLGFTIYPSPQVSTAVVEPYNSVLSTHSLLEHTDVAVLLDNEAIYDICRRSLDIERPTYTNLNRLISQIISSLTTSLRFDGAINVDVTEFQTNLVPYPRIHFMLSSYAPVISAEKAYHEQLSVPEITSAVFEPSSMMAKCDPRHGKYMACCLMYRGDVVPKDVNAAVATIKTKRTVQFVDWCPTGFKCGINYQPPSVVPGGDLAKVQRAVCMISNNTAVAEVFSRIDHKFDLMYAKRAFVHWYVGEGMEEGEFSEAREDLAAHEKDYEEVGAEGADDEGDDGDDY

SEQ ID NO: 44273 - protein, 236 aa, Oryza sativa; identical to SEQ ID NO: 838

SEQ ID NO: 44274 - protein, 336 aa, Nocardia farcinica IFM 10152
MSQRDSFRAAAVQAAPVWLDGAATVDKCVALIEEAADNGAALIAFPETFVPGYPWWLWLDSPAWGMQFVARYFDNSLALDGPLFARLREAARRSAITVVTGHSERDGGSLYMGQAIIGADGEVLAARRKLKPTHVERTVFGESDGSNLTVVDTELGRLGALCCWEHLQPLTKYAMYSQHEQIHVAAWPSFSVYRGAAYALGPEVNTGAARQYAVEGQCFVLSPCAVIDEAGVELFCDTPAKRELLLPGGGFAQIYGPDGRELGTALPETEEGLVYADLEASAVAVAKSAADPVGHYSRPDVLQLLWDPRPRSVVRQVALSVASPAESADDAEPAVR

SEQ ID NO: 44275 - protein, 139 aa, Pisum sativum
NTDITSITSNGGRVKCMQVWPPIGKKKFETLSYLPPLTRDQLLKEVEYLLRKPWVPCLEFELEKGFVYREHNKSPGYYDGRYWTMWKLPMFGTTDASQVLKELDEVVAAYPQAFVRIIGFDNVRQVQCISFIAHTPESY

SEQ ID NO: 44276 - protein, 221 aa, Hydrogenovibrio marinus
MCEKCDCNSAIDQLFENNEEWIKEMNAERPGFFSSLVAQQSPEYLWIGCSDSRVPANELVKMDPGTIFVHRNIANLVNSSDMNVLTVIQYAVEVLKVKHIIVNGHYGCGGVMAALQQSNPDLIDHWIRPIRKYYHHNRKELETIGEEQGEKAKVNRLCEINVVEQVRNIAHVPAVRHAWEKGQELAIHGFIYDIKDGRLHNMNVTIDNIEKAEKAVLRELC

SEQ ID NO: 44277 - protein, 544 aa, Methylobacillus flagellatus KT
MAAKQVIFGDDARAKIVNGVNILANAVKVTLGPKGRNVVLERSFGSPTVTKDGVSVAKEIELSDKLENMGAQLVKEVASKTNDNAGDGTTTATVLAQAIVREGFKYVAAGFNPTDLKRGIDKAVAEIVNEIKAIAKPTTTSKEIAQVGSISANSDADIGQIIADAMDKVGKEGVITVEDGSGLQNELDVVEGMQFDRGYLSPYFINNPERQIALLENPFVLLYDKKISNIRDLLPTLEQVAKAGRPLLIIAEDVEGEALATLVVNNIRGILKAVAVKAPGFGDRRKAMLEDIAILTGGTVIAEEVGLSLEKVTLENLGQAKRVEIGKENTTIIDGAGSENNIKVRIDQIKKQIEDATSDYDREKLQERVAKLAGGVAVIKVGAATETEMKEKKARVEDALHATRAAVEEGIVPGGGVALLRARSSIKELKGDNPDQDAGIKIVLRAIEEPLRQIVANAGDEPSVVVNKVLEGTGNYGYNASNGTYGDLVELGVLDPAKVTRSALQNAASVASLILTTDALVAELPKEEAAPAMPDAGGMGGMGF

SEQ ID NO: 44278 - protein, 464 aa, Lycopersicon esculentum
MAFFLIFLSSFFGLCIFCTALLRWNQVKYNQKNLPPGTMGWPLFGETTEFLKLGPSFMKNQRARYGSFFKSHILGCPTIVSMDSELNRYILVNEAKGLVPGYPQSMIDILGKCNIAAVNGSAHKYMRGALLSLISPTMIRDQLLPKIDEFMRSHLTNWDNKVIDIQEKTNKMAFLSSLKQIAGIESTSLAQEFMSEFFNLVLGTLSLPINLPNTNYHRGFQARKIIVNLLRTLIEERRASKEIQHDMLGYLMNEEATRFKLTDDEMIDLIITILYSGYETVSTTSMMAVKYLHDHPKVLEELRKEHMAIREKKKPEDPIDYNDYRSMRFTRAVILETSRLATIVNGVLRKTTQDMEINGYIIPKGWRIYVYTRELNYDPRLYPDPYSFNPWRWMDKSLEHQNSFLVFGGGTRQCPGKELGVAEISTFLHYFVTKYRWEEIGGDKLMKFPRVEAPNGLRIRVSAH

SEQ ID NO: 44279 - protein, 96 aa, Methylobacillus flagellatus KT
MAIRPLQDRVIVKRLEEERKTASGIVIPDTAAEKPDQGEVIAVGPGKKDDNGKSIPLDVKVGDKVLFGKYAGQAVKVNGEEVLVLREDDILGIVEA

SEQ ID NO: 44280 - protein, 420 aa, Bartonella henselae str. Houston-1
MRRVVITGLGLVSPLAGDVEYSWKRLLEGKSGVRRITEFDVSDLSCQIAARIPVGDGTNGTYNADLHMESKEQRKVDAFIVYAIAAADQALADAEWFPKSDEDQICTGVLIGSGIGGIEGIVEAGYTLRDKGPRRISPFFIPGRLINLASGYVSIKYGLRGPNHSVVTACSTGAHAIGDAARLIALGDADVMLAGGTESPINRISLAGFSACRALSTCRNDDPERASRPYDVDRDGFVMGEGAAIVVLEELEHAKKRGARIYAEIIGYGLSGDAYHITAPSESGEGAQRSMMAALKRAQVNVSELDYINAHGTSTMADVIELAAVERVLGYYAPQVSMSSTKSSIGHLLGAAGAAEAIFCVLAIRDNIAPATLNLENPSIETKIDLVPHKPRERKIDTVLSNSFGFGGTNASLVMRRFSE

SEQ ID NO: 44281 - protein, 338 aa, Picrophilus torridus DSM 9790
MLITQEIGSFRKPEYLSRVFHKIYGTDEFYRLAEKATLETLDVFYNAGLENIGVGGEMFRWEMYEHQAINIDGIEFYGPVRSFDNRYYRKGSIVKRMERKSSYHLKELEFLMDNARGSIKVPVTGAYTMMDWSFNEFYRDRYDVAMEFARLLNDEIKDLKSAWDRKFPGKKLEIQIDEPATTTHPDEMDIVKDSINKTVYGIDNCEFSIHVCYSSDYRLLYDIMDEINIDGYNLEFANRDTLEPGTSDENRPGYLDLKYFAEHSSGKKFMGLGVTDVHIDYVEPVKLIEDRIRFALKYIDPEKLRLNPDCGLRTRSREIGFQKLSNMVAAKKNILKEL

SEQ ID NO: 44282 - protein, 489 aa, Saccharomyces cerevisiae
MARGDGPLWTETYDSSTVAFMILGAALVFFMVPGLGFLYSGLARRKSALALIWVVIMATLVGILQWYFWGYSLAFSKTATNNKFIGNLDSFGFRNVYGKISDDSTYPELIYAIFQMMFMCVALSIIAGATAERGKLFPHMVFLFVFATLVYCPITYWIWAPGGWAYQWGVLDWAGGGNIEILSAVAGFVYSYFLGRRKENLLINFRPHNVSMVTLGTSILWFGWLLFNAASSLSPNMRSVYAFMNTCLSATTGGMTWCLLDYRSEKKWSTVGLCSGIICGLVAATPSSGCITLYGSLIQGIIAGVVCNFATKIKYYLKVDDSLDLLAEHGIAGVVGLIFNALFAADWVIGMDGTTKHKGGWLTHNWKQMYIQIAYIGASAGYCAVVTAIICFVLGKIPGVHLRVTEEAEALGLDEDQIGEFAYDYVEVRRDYYQWGVDTDALHTTCNGANSASETNPTEDSQNSSLSSATVSGQNEKSNNPKLHHAKEA

SEQ ID NO: 44283 - protein, 249 aa, Glycine max
  misc_feature (15)..(15): Xaa can be any naturally occurring amino acid
  unsure (1)..(249): unsure at all Xaa locations
VPPPPSLLLTYTALXVNAINNQKETALDLADKLRYGDSALEIKEALTECGAKHARHIGKVDETMELKRAVSDIRHEVQSQLIQNEKTRKRVSGIAKELKKIHREAVQNTINSVTVVAVLFGSIAFMALFSLPGQYRKKQPEAGKANIADDAAFSAFCLLNATALFLSLAVVVAQITLVAWDTRSQRQVVSVINKLMWAACACTCGAFLAISFVVVGDETWLAISVTVLGAPILLGTLAYLCYFVFRRRF

SEQ ID NO: 44284 - protein, 454 aa, Bacillus cereus ATCC 10987
MKETSTFSQKLKQFVLLFFPIFITQMSLFAMSFFDTTMSGHASPIDLAGVAIGTSIWIPVSTGLTGILMATTPIVAQLVGSKKKEDVPQVVIQAVYLAICASFVVMLIGFFAVTPILNGMRLEEPVERIAAQFLSIIAIGIIPLFTYTVLRGFIDALGKTRTTMIITLLSLPINVILNYVLIFGHFGFPKLGGVGAAIASTATYWCILIITVMIIRTKEPFASFHIFKQLYRPSLSSWKEFLKLGVPIGFAIFFETSIFAAVTLMMSNFSTTTIAAHQAAMNFASLLYMTPLSLAMAMTIAVGFEVGAKRYNNAKQYGFIGIGLALAFALLYSILLYFFDDEIASIYTTDIQVHHLAKEFLIFAILFQISDAIATPVQGALRGYKDVNVSLIMTLIAYWVIGLPLGYILATYTDWAAKGYWIGLIIGLAFGATFLLIRLFQVQRKYTIENRRSR

SEQ ID NO: 44285 - protein, 250 aa, Triticum aestivum
EQESRIALVEKWDHHHEVEFCSEQVEIVFSAFYSTVKHIGEMASAVQKRDVTKHLNETWLHYLRSAATEAEWQRNQYVPTVEEYMIEAVNSFAEGPIMLTSLYFVQQKLEEYIIKDPEYHELLRIKGNCGRLLNDTRGFERESSEGKLNIISLLVLQSGGSMSIEAAQEAVQESIASCRRDLLRMVVREDRVVPRVCKEVFWRFCRTVHLFYCQTDGFSSPKEMLRTMNAIFREPLKLQHTSPLDAQSEQ

SEQ ID NO: 44286 - protein, 251 aa, Triticum aestivum
AYLGDTIEQVCTKKQAGTGPEFPGYRRPTRPRIRKYGLVYAGIGWCIWRSKEDLPDELIFHINYLGADQPTFTLNFSKGSSQVIAQYYQLIRLGFEGYRNIMDNCQENAMVLKEGLERTGRFNIVSKDQGVPLVAFSLKDSSRHDEFEISEFLRRFGWIVPAYTMPPDAQHVTVLRVVIREDFSRTFAERLVIDIEKVLHELDALPSRSSGPALQHPNGDTVSEKDLARQREVVSVWKRAVAARKKTQGVC

SEQ ID NO: 44287 - protein, 388 aa, Nostoc sp. PCC 7120
MIEVVITGIGLVSALGKSLEESWQGLIAGKSGIKWHQPFPELPPLPLGLIGEKPTSLHSLTQVVVDAAIKDAGLVPPLTDCALVIGSSRGYQGSWEKLARQIYTGDDSADEAEKLENWLDVLPHMNTIAAARQIGATGAVIAPMAACATGIWAIAQAAILIQTGQYQRVIAGATEAAITPLTLSGFQQMGALAKTGAYPFDLQREGLVLGEGAAVFVLESRQLAKKRKAKIYGQILGFGLINDAYHSTQLEPEGKGAIASIQQCLARSQLTLTDIDYIHAHGTATQLNDRVESQVIKHLFPSKVAVSSTKGSTGHTLGASGALGVAFSLLALEQKIIPPCVGFQEPEFDLNIVKTAQHSQIQQVLCLSFGFGGQNAAIALGRGNDNWG

SEQ ID NO: 44288 - protein, 335 aa, Ralstonia metallidurans CH34
MTIRIGINGFGRIGRMVFRAAVQDFKNDIEVVAINDLLEPDYLAYMLRYDSVHGRFKGEVVVDGGTLVVNGRKIRLTAVKDPAALAWGDVGVDVVVESTGLFLTHDTCQKHLDAGARKVIQSAPSKDDTPMFVYGVNHTQYAGEKIVSNASCTTNCLAPVAKVLNDSFGIKRGMMTTVHAATATQKTVDGPSNKDWRGGRGILENIIPSSTGAAKAMGRVIPALNNKLTGMALRVPTSDVSVVDLTVELAQETSYEKICAAMKAASQGAMKGVLGYTQDKVVSTDFRGEACTAVFDAEAGIMLDSTFVKVVAWYDNEWGYSSKVLEMVRVMGASR

SEQ ID NO: 44289 - protein, 390 aa, Ralstonia metallidurans CH34
MRRNRNAKIVATLGPSSSDKDTIRRLFAAGVDVFRLNFSHGDEAAHRASFAILRELEREAGRPIGILADLQGPKLRVGTFAAGSVMLDESQPFRLELDTAPGDARRVGLPHPEIFAALAPGAELLLDDGKLRLIVERCGADFADTRVVAGGKLSDRKGVNVPGVLLPISALTAKDRRDLALALDLGADWIALSFVQRPEDVVEARKLIGERAAIVAKLEKPSAVEQLEAIAECADAVMVARGDLGVELPAERVPGIQKRILRTCRRLGRPVIVATQMLESMVTSPVPTRAEASDVATAIYDGADAVMLSAESAAGRYPVEAVDMMSRLITEVEGDPQYLQLMNASRPSAPAGAGAADAVCCARAPCRRADACERHRLLHELGPHQPACRP

SEQ ID NO: 44290 - protein, 151 aa, Oryza sativa
MGVLDSLSDMCSLTETKEALKLRKKRPLQTVNIKVKMDCEGCERRVKNAVKSMRGVTSVAVNPKQSRCTVTGYVEASKVLERVKSTGKAAEMWPYVPYTMTTYPYVGGAYDKKAPAGFVRGNPAAMADPSAPEVRYMTMFSDENVDSCSIM

SEQ ID NO: 44291 - protein, 332 aa, Shewanella sp. MR-4
MSELPHDYTHIYLEQPGEPEVMQLTRSPLPVLSAGQVLIRNCAVGVNGPDIKQRMGMYPPPPGASPIIGLEVAGEICALGDGVTQWQLGDKVCALVPGGGYGEYTLTYAVHCLPIPQGFSEVQAAALPETFFTVWGNLFMRAGLKAGETVLIHGGSGGIGSTAISLAKHLGATVITTTGQDEKRDYCSGLGAHLVVNYNTQNFVEEVMAFTQGKGVNVVFDIAGGDFINLNLQALALDGRMVSVSTQRSAKAEVNILQLMAKRIVWTGSTLRPQTVEAKAEIAKQLAEHVWPLLDSQQIVPHICATFPLAEAAKAHALMQSGEHRGKVVLTL

SEQ ID NO: 44292 - protein, 540 aa, Streptococcus agalactiae NEM316
MAKDIKFSADARSAMVRGVDILADTVKVTLGPKGRNVVLEKAFGSPLITNDGVTIAKEIELEDHFENMGAKLVSEVASKTNDIAGDGTTTATVLTQAIVREGLKNVTAGANPIGIRRGIETAVSAAVEELKEIAQPVSGKEAIAQVAAVSSRSEKVGEYISEAMGRVGNDGVITIEESRGMETELEVVEGMQFDRGYLSQYMVTDNEKMVSELENPYILITDKKISNIQEILPLLEEVLKTNRPLLIIADDVDGEALPTLVLNKIRGTFNVVAVKAPGFGDRRKAMLEDIAILTGGTVVTEDLGLDLKDATMQVLGQSAKVTVDKDSTVIVEGAGDSSAIANRVAIIKSQMEATTSDFDREKLQERLAKLAGGVAVIKVGAATETELKEMKLRIEDALNATRAAVEEGIVSGGGTALVNVIEKVAALKLNGDEETGRNIVLRALEEPVRQIAYNAGYEGSVIIERLKQSEIGTGFNAANGEWVDMVTTGIIDPVKVTRSALQNAASVASLILTTEAVVANKPEPEAPTAPAMDPSMMGGF

SEQ ID NO: 44293 - protein, 425 aa, Streptomyces roseofulvus
MNRQVAVTGIGVVAPGGIGRKPYWEQLTSGRTATRAISFFDASPFRSRIAAEVDFDPAAAGLSPREVRRMDRAAQFAVVSARESLADSGLDVADLDPHRIGVSIGSAVGGTTSLEREYLALSDSGRQWELDLSYLSPHLYDAFTPSSLAREVAGVIGAEGPAAVVSTGCTSGIDSLGHARDLIAEGSADVVLAGGTDTPISPIAVACFDAIKATSPSNDDPAHASRPFDRERNGFVLAEGAAVLVLEELGHARARDAHVYALVSGYATRCNAYHMTGLTPHGREMAEAIRHALAESGTDPAAVDYVNAHGSGTKQNDRHETAAFKATLGERARSVPVSSIKSMIGHSLGAIGSLEIAAWALAMEYGVVPPTANLDTPDPECDLDYVPHEARETRVDRVLSVGSGFGGFQSAMVLTRDTGARLPTA

SEQ ID NO: 44294 - protein, 94 aa, Streptococcus agalactiae NEM316
MLKPLGDRVIISFVETEEKSVGGFVLAGASHDATKTAKVLAVGDGIRTLTGELVAPSVAEGDTVLVENGAGLEVKDGNEKVTVVRESDIVAVVK

SEQ ID NO: 44295 - protein, 426 aa, Streptomyces roseofulvus
MTTAPSRTAQGAPPGAALPPVFTGIGVAAPNGLGTEEWWAATLRGEHGLRPVTEYDASGHPGGLVGRVPDFDAARHLPGRLLPQTDRVTRLALVAADEALKDAAVDPARLPEYGASAVTSNATGGFEFTHREIRKLWTEGPARVSVYESFAWFYAVNTGQISIRHGMRGPGAVVVADQAGGLDALGQARRVLRKGGVLAVSGGVESALDPWGLAAHASSGTLSRSGDPATAYLPFDRRALGTVVGEGGALLTLETPRHAEERDAPRIYGELAGYAATFDPPAGSGRPPGLERAARLALADAGLAPGDVDVVFADAAGLPAADAAEAAALRALFGPGGVPVSVPKTQTGRLASGGPALDVAAALLALRDGLVPPAVHLDEVDPAYGLDLVRDTPRALPLRTALVLARGHGGFNAAVVVRGRRRPRTA

SEQ ID NO: 44296 - protein, 306 aa, Oryza sativa
LLEASAVCPPLQMDLSGAQGELPLPMHAAASPYLGLHHDHHHHHGGGGGGGGMNGRHMSPPTPPAAAEESKAVVVVSSSATAAARYRECRENHAAAIGGSATDGCGEFMPGGEEGSLDALRCSACGCHRNFHRKELDAAAAPPLHHHHHQLLGVGAHPRGHGHHHHHLLVAALPPPTRMVMPLSAMHTSESDDAAARPGGGAAARKRFRTKFTAEQKARMLGFAEEVGWRLQKLEDAVVQRFCQEVGVKRRVLKYGSGAPEELKKLDFFWERRGGGGGNPLRNKMKIHLASASTSIRLQLSPTETL

SEQ ID NO: 44297 - protein, 483 aa, Vibrio vulnificus YJ016
MAFADRKHPNVPRTLSIFIFFLNNGVNVHRYKKEASSLIKLATPVLIASVAQTGMGFVDTVMAGGVSATDMAAVSVAASIWLPSILFGIGLLMALVPVVAQLNGAGKREQVPFEIQQGAVMALLISIPIIGVLFQTQWILGYMNVDAVMATKTIGYIHAVMFAVPAFLLFQTLRSLTDGLSLTKPAMVIGFIGLLLNIPLNWMFVYGKLGAPALGGVGCGVATAIVYWIMFLLLLLYVTTSQRLRQVQLFTTFHPPQLNAQVKLFKLGFPVAAALFFEVTLFAVVALLVAPLGSTVVAAHQVAINFSSLVFMLPMSIGAATSIRVGHMLGEKSTEGARIASHVGILVGLSTAVFTALLTVILREQIALLYTDNRVVITLAMQLLIFAAIYQCTDAIQVIAAGALRGYKDMRAIFNRTFIAYWLLGLPTGYVLGLTDWIVEPMGAQGFWIGFIVGLSSAAAMLGVRLHWLHRQNDEIQLNYEAR

SEQ ID NO: 44298 - protein, 536 aa, Panax ginseng
MNSSSSSTTDTLHSFMEALLIDQYFLGWIFAFLFGFLLLLNFKRKREKNNSTEFGTDDSNGYYTPENIAGSTDVIIVGAGVAGSALAYTLAKDGRRVHVIERDLTEQDRIVGELLQPGGYLKLIELGLEDCVNEIDAQRVFGYALYMDGKNTRLSYPLEKFHSDVAGRSFHNGRFVQRMREKAASLPNVRMEQGTVTSLVEKKASVKGVQYKTKDGQELSAFAPLTIVCDGCFSNLRRSLCNPKVEVPSCFVGLILENIDLPHVNHGHVILADPSPILFYKISSTEIRCLVDVPGQKVPCISNGELANYLKTVVAPQVPKQLYNSFIAAVDKGNIRTMPNRSMPADPHPTPGALLLGDAFNMRHPLTGGGMTVALSDIVLIRDLLRPLRDLHDSSTLCKYLESFYTLRKPVASTINTLAGALYKVFCASPDKARQEMRNACFDYLSLGGICSQGPIALLSGLNPRPISLFLHFFAVAIYGVGRLLIPFPSPKRMWLGARLILGASGIIFPIIKSEGLRQMFFPATVPAYYRAPPIH

SEQ ID NO: 44299 - protein, 500 aa, Panax ginseng
MFPLAYPLLFVLLGALSWWILPIISPLKRHHKLPPGPRGLPIIGSLHTLGALPHRTLQTLAKKYGPIMSMRLGSVPTIVVSSPQAAELFLKTHDNIFASRPKLQAAEYMSYGTKGMSFTAYGPHWRNIRKFVVLELLTPAKINSFVGMRREELGMVVKSIKEASAANEVVDLSAKVANIIENMTYRLLLGRTKDDRYDLKGIMNEALTLAGRFNIADFVPFLGPLDIQGLTRQFKDTGKRLDKILEFIIDEHEQNSSNGNASGDFIDDMLSLKNKPSNTHDELSKVIDRSVIKAIMIDIISAAIDTSDTSIEWILTELIKHPRAMKKCQEEIDAVVGVDRMVEETDLPNLEYVYMVVKEGLRLHPVAPLLGPHESMEDITINGYFIPKQSRVIVNSWALGRDPNVWSEDADEFLPERFEGSNIDVRGRDFQLLPFGSGRRGCPGMQLGLITVQLVVARLVHCFDWNLPNGITPDNLDMTEKFGLTTPRVKHLLAVPKYRL

SEQ ID NO: 44300 - protein, 77 aa, Elaeis guineensis
MEHSRRMLPAILLLLFLLMPSEMGTKVAEARTCESQSHKFQGTCLRESNCANVCQTEGFQGGVCRGVRRRCFCTRLC

SEQ ID NO: 44301 - protein, 102 aa, Streptomyces albus G
MTTASSKVAIKPLEDRIVVQPLDAEQTTASGLVIPDTAKEKPQEGVVLAVGPGRFENGERLPLDVKTGDVVLYSKYGGTEVKYNGEEYLVLSARDVLAIIEK

SEQ ID NO: 44302 - protein, 384 aa, Pseudomonas fluorescens Pf-5
MLKALRFFGWPLLAGVLIALLIIQRYPQWVGLPSLDVNLQQAPQTTSTQQGPVSYADAVVIAAPAVVNLYTTKVINKPAHPLFEDPQFRRFFGDNLPKQQRMESSLGSGVIMSPEGYLLTNNHVTSGAEQIVVALKDGRETLARVIGSDPETDLAVLKIDLKNLPSITVGRSENVRVGDVALAIGNPFGVGQTVTMGIISATGRNQLGLNNYEDFIQTDAAINPGNSGGALVDANGNLTGINTAIFSKSGGSQGIGFAIPIKLAMEVMKSIIEHGQVIRGWLGIEVQPLTQELAESFGLAGRPGIVVAGIFRDGPAQKAGMQLGDVILSIDGEPAGDGRRSMNQVARIKPTDKVSILVMRNGKELKLTAEIGLRPPPAPVKEEE

SEQ ID NO: 44303 - protein, 425 aa, Clostridium perfringens
MDRNKEIFEESKKYMPGGVNSPVRSFGSVGINPPVIKSGKGAMIKDENGNEYIDFVLAWGPMILGHCDEDVVEAIKKTSEESIAFGASTKLELDLAKLLCETLDNVDMIRMVNSGTEATMSAVKLARGYTKKDKIIKFAGCYHGHFDGFLIEAGSGVLTEGIPGCLGVPEESIKNTLIGIYNDEKQVEELFEKYGNDIAGIIIEPVAGNMGVVKCDPKFMRKLRELCDKYGALLIFDEVMCGFRVAYKGAQTLFDVKPDLVTYAKIMGGGLPCGAYGGRREIMENLSPLGGVYQAGTMSGNPIVMSAGLATVKKLYENPSYYNHIEKIGSKLEKGVLEIAKKKGLGLVVNRQGGMITLFFTDLKEVKCYDDVKTCDGERFKRYFLHMLNKGFNIPPSQFEAMFLSVKHTEEHIDKFLEAFETFEG

SEQ ID NO: 44304 - protein, 632 aa, Pseudomonas fluorescens Pf-5
MSHQSDLISEDILAYLGQHERKELLRFLTCGNVDDGKSTLIGRLLHDSKMIYEDHLEAITRDSKKVGTTGDDIDLALLVDGLQAEREQGITIDVAYRYFSTAKRKFIIADTPGHEQYTRNMATGASTCDLAIILVDARYGVQTQTRRHSFIASLLGIKHIVVAINKMDLKDFDEGVFESIKADYLKFAKGLKLQPTSLHFVPMSALKGDNVVNKSERSPWYTGQSLMEILETVEVAGDRNFTDLRFPVQYVNRPNLNFRGFAGTLASGIVHKGDEIVVLPSGKSSRVKSIVTFEGELEQAGPGQAVTLTMEDEIDISRGDLLVHADNVPPVTDSFEAMLVWMAEEPMLPGKKYDIKRATSYVPGSIASIHHKVDVNTLEEGAASALQLNEIGKVKISLDAPIALDGYESNRTTGAFIVIDRLTNGTVGAGMIIAQPVAHGSVTQHGKLAHVATEERAQRFGQQPATVLFSGLSGAGKSTLAYAVERKLFDMGRAVYVLDGQNLRHDLNKGLPQDRAGRTENWRRAAHVARQFNEAGLLTLAAFVAPSAEGREQAKDLIGKERLLTVYVQASPAVCAERDPQGLYAAGGDNIPGESFPYDVPLNADLVIDTQSLSLEESVKQVLDLLRSRGAI

SEQ ID NO: 44305 - protein, 300 aa, Vibrio vulnificus YJ016
MKFRVAVVSLNSQKNCAKKRKNKERMMERIAIIQMTSTSDCTDNVAYIEHWAEQAALQGASLVVTPENALLFGGREDYHQHAEPLGNGPLQQAMAQLAKRLAVTLVIGSMPIRQGHDVTTTSLVFGPNGERLGHYSKLHMFDVEVSDGHGHYRESDSFLAGDRSSVVATPIGRLGLSICYDVRFPALYQTLRQKGADILLVPAAFTAVTGEAHWEVLLRARAIENQCWVIAAAQGGMHSASRETWGHSMVIDPWGKVVAQLPQQGDLLLAEIDLALSDTIRRKMPVVKHSRFTHLLDNKD

SEQ ID NO: 44306 - protein, 535 aa, Streptococcus pneumoniae R6
MQEKWWHNAVVYQVYPKSFMDSNEDGVGDLPGITSKLDYLAKLGITAIWLSPVYDSPMDDNGYDIADYQAIAAIFGTMEDMDQLIAEAKKRDIRIIMDLVVNHTSDEHAWFVEACENPNSPERDYYIWRDEPNDLDSIFSGSAWEYDEKSGQYYLHFFSKKQPDLNWENEKLRQKIYEMMDFWIDKGIGGFRMDVIDMIGKIPDEKVVNNGPMLHPYLKEMNQATFGDKDLLTVGETWGATPEIAKLYSDPKGQELSMVFQFEHIGLQYQEGQPKWHYQKELNIAKLKEIFNKWQTELGVEDGWNSLFWNNHDLPRIVSIWGNDQEYREKSAKAFAILLHLMRGTPYIYQGEEIGMTNYPFETLDQVEDIESLNYAREALEKGVPIEEIMDSIRVIGRDNARTPMQWDESKNAGFSTGQPWLAVNPNYEMINVQEALANPDSIFYTYQKLVQIRKENSWLIRADFELLDTADKVFAYIRKDGDRRFLVVANLSNEEQDLTVEGNVKSVLIENTLAQEVFEKQILVPWDAFCVELL

SEQ ID NO: 44307 - protein, 269 aa, Zea mays
MRKRERENPCGICGHYHKYEEGEVCGVCGHRWKPSDGEGAPSRHESAFPTEVLKDFLFLGSYDNASRSEVLRTLSISHILNTVPDCHNLYKNSFTCHSLQRDRPLDFDEANQYLEKCERDKSRVLVHCMTGKNRSAAIVAAFLMKSRGWRLAQSFQWAKDRRPQVQLTDASQKELLEYELKLFGPSTQTLVPTESFASLGFGYTKPAGDMQTPVFNQTTMPSIFERFNPNDRPANFTFGVERKAEANPRDNNSDGRVNPTSMENLMDSS

SEQ ID NO: 44308 - protein, 340 aa, Lactococcus lactis
MDELSVKFGIVDDALEDLFKQIQDAGISIVDKDGNPSPLALVTDEIEKEEVSDTAMDEIVTNVRIDDPVRMYLKEIGRYPLISLDEETKLAEAIIAGGEGAEFAKQMLAEANLRLVVSIAKRYSGRGNQFLDLIQEGNMGLMKAVDKFDHTKGFKFSTYATWWIRQAITRAIADQARTIRIPVHMVETINKLIRVQRNLLQELGRDPSPEEIGKELHMAPDKVREVLKIAQEPVSLETPIGEEDDSHLGDFIEDDVIESPVDYTNRILLREQLDEVMDTLTDREENVLRMRFGLDDGRMHTLEDVGKQFKVTRERIRQIEAKAIKKLRHPRRSKPLRDFM

SEQ ID NO: 44309 - protein, 437 aa, Methylobacillus flagellatus KT
MTTSNASLLQRSLAAVWHPCTQMKQHEALPLVPVKRGEGVWLEDFDGKRYLDGVSSWWVNLFGHNHPHIKQAIKAQLDQLEHVILAGFTHEPVVRLSEQLSLLTGLGHSFYASDGASATEIALKMSFHYWRNHGETAKTRFLSLQNGYHGETLGSLSVTDIALFKDTYAPLLREESIALPSPDWRRAEPGESAEQYALRCAGQAEAYIAQHHAGIAAVIVEPLVQCATGMAMYHPVYLQRLRALCDRYQVHLIADEIAVGFGRTGTMFAIEQAGIKPDFICLSKGITGGYLPLSVVQTTQDIYAAFYDDSVTRGFLHSHSYTGNALACSAALATLDIFAQHDVLNSNRRKAGYLNRRLAAWRDLPIRHLRNTGMIWAFDVTPSRPGFQQRFYQAALQRGLLLRPVGNTVYFMPPYIISEEEMDWMLEQARGALEESL

SEQ ID NO: 44310 - protein, 262 aa, Triticum aestivum
  misc_feature (186)..(186): Xaa can be any naturally occurring amino acid
  unsure (1)..(262): unsure at all Xaa locations
TSLYKKAGWYRSGIPGISSTHASVNFQGYEVILVTSGAVGVGRQRLKYRKLINSSFADLQNPQLDLDGKACAAVGQSGLMAIYDTLFSQLDVTSSQLLVTDRDFRDPSFGHQLRETVVSLLDLKVIPVFNENDAISTRRAPYEDSSGIFWDNDSLATLLAKELDADLLIMLSDVEGLYSGPPSDPXSKIIHTYINEKHGKLINFGEKSRVGRGGMQAKVAAAVTAASKGVPAVIASGFVTDSIIKIMRGEKIGTTFHNEANV

SEQ ID NO: 44311 - protein, 342 aa, Staphylococcus aureus subsp. aureus MRSA252
MMNNKVLVTGGTGFVGMRIISRLLEQGYEVQTTIRDLSKADKVIKTMQDNGISTERLMFVEADLSQDEHWDEAMKDCKYVLSVASPVFFGKTDDAEVMAKPAIEGIQRILRAAQHAGVKRVVMTANFGAVGFSNKDKNSITNESHWTNEDEPGLSVYEKSKLLAEKAAWDFVENENTTVEFATINPVAIFGPSLDAHVSGSFHLLENLLNGSMKRVPQIPLNVVDVRDVAELHILAMTNEQASGKRFIATADGQIDLLEIAKLIKEKRPEIAQKVATKKLPDFILSLGAKFNHQAKEGKLLLDMNRNVSNERAKTLLGWEPIATQEEAILAAIDSMAKFHLI

SEQ ID NO: 44312 - protein, 246 aa, Oryza sativa (indica cultivar-group)
MGRGKVQLKRIENTINRQVTFSKRRSGLLKKANEISVLCDAEVALIIFSTKGKLYKYATDSCMDKILERYERYSYAEKVLISAESDTQGNWCHEYRKLKAKVETIQKCQKHLMGEDLESLNLKELQQLEQQLENSLKHIRSRKSQLMLESINELQRKEKSLQEENKVLQKELVEKQKVQKQQVQWDQTQPQTSSSSSSFMMREALPTTNISNYPAAAGERIEDVAAGQPQHVRIGLPPWMLSHING

SEQ ID NO: 44313 - protein, 140 aa, Bartonella henselae str. Houston-1
MAVERTFSMIKPDATRRNLTGAITKMLEDAGLRVIASKRVWMSQREAEKFYAVHKERAFFSELVELMSSGPTIVQVLEGENAIAKNREVMGATNPEDAQEGTIRKVHALSIGENSVHGSDSAETAKTEIAFWFSEVEIVG

SEQ ID NO: 44314 - protein, 492 aa, GIBBERELLA ZEAE PH-1
MASNILPGNGHGHGHGHNSSGHRDESTPLLPQISSHIAHEGESGRSGFHPRHFLAVLWRSSCTASMWVNVLWPIVPVAIILQFFPGMHLWKFATAYVAVIPTANLLGFAGQEFARKMPKVAGILIETTFGSIIEIILFIVLLAKHENQGPNDNGDEGNLIPIIQAAILGSILTNLLLCLGLCFFVGGLKQASQKFHAIVSEVGTGLLLVAAFGLLIPSAFYSALKAEVVPDFPGFRVLHERFTEDKLQEDVVRISQSTSVALIVAFFMYIWYQASSQHSIFDEVIEMDEHRDADREADMEKPKFTMTETIVALLLALVFVTALLIFLVEKIEHVVEAGIPDQFLGLILLPFVEKAAEHLTAIDEAYDGVINVALYHCLGPSIQTALFNGPLVVLVGWAIGKPMDLNFEIFMIVLLVLSILVVGNFLRDGESNWLEGALLVVIYAIIAIACWYYPNPDVATSNGLEGSEMVNVTMSVDTLRQLQQLLNAHLPL

SEQ ID NO: 44315 - protein, 355 aa, Methanosarcina mazei Go1
MNKNICFIDGLEGILKYRDVDINELIDLPYDAVSYLLIKGELSEEKELAEYSARLHAERGINREVMDVIRMCNLNIDSMEALLTVVSFISQFDPDLYDNSLEGNMRKAIRLIAVVPTIVAAYYRTANGKEPVPPDPSLAHGANFLYMIKGSKPDPLEAEVMEKDFILSAEHELNASTFSSRVTASTMSDLYSAVVSGLCTLKGPLHGGARSEVMTMIETIGSPENAEKFVLEKIEKREKIMGFGHRVYKTYDPRGTIFKQLSRRLAEAKGDMHWYETAEAIENAVIRELVEKRGKPIYPNIDFYSGVIYKYMEIPPQLATSIFAIGRISGWIAHCFDQYEKKKIIRPRIFMLDEC

SEQ ID NO: 44316 - protein, 446 aa, Trichoderma viride
MREIVSVHLQTGQCGNQVGSAFWQTISGEHGLDSSGVYGGTSDQQLDRLNVYFNEASNNKYVPRAVLVDLEPGTMDAVRSGPFGQLFRPDNFVFGQSGAGNNWAKGHYTEGAELVDQVLDVVRREAENCECLQGFQITHSLGGGTGSGMGTLLISKIREEFPDRMMATFSVVPSPKVSDTVVEPYNATLSMHQLVENSDKTFCIDNEALYDICMRTLKLSNPSYGDLNHLVSAVMSGVSTSLRFPGQLNSDLRKLAVNMVPFPRLHFFMVGFAPLTSPGAHSFRAVTVPELTQQMMDPKNMMAASDFRNGRYLTCSTIFRGKVAMKEVEDQMRTVQNKNSAYFVEWIPNNIQTACALSPPRGLKISSTFVGNSTAIQEIFRRVGEQFSAMFRRQAFLHWYTSEGMDEMEFTEAESNMNDLVSEYQQYQDASADDGEEYEEDAPMEE

SEQ ID NO: 44317 - protein, 498 aa, Ralstonia eutropha JMP134
MTFRSPALARAVVMAAILILGPAVAEVGHAQAAASNYNLPDFTDLVEKASPAVVNIRTTERIRSRGGSGGDDDEMAEFFRRFFGVPMPGAPTPGAPNAPRRGQPPQGEEQSRGVGSGFIISQDGYVMTNAHVVADAETIYVTLPDKREFKAKLIGSDKRTDVALIKIEATGLPKLVLGDSDKVRAGEWVLAIGSPFGLDNSVTAGIVSAKGRDTGDYLPFIQTDVAVNPGNSGGPLINLRGEVIGINSQIYSRSGGYMGISFAIPIDEAMRVTEQLKTSGRVTRGRIAVAIGDVTKEVADSLGLGRARGALVGSVEPGGPAEKAGIEPGDIILKFNGREIEKASDLPRMVGDTKPGTRVPIQLWRKGATRDVSITVTELEPEARAKARNAPSSKDDASAQAPKPNALGLIVNDIPDARLKELKVRSGVEVEVADGPAMRAGIRPGDIILRLGDTDVTGARQFNDLVKGLDKSRIAAVFVRRGDATQVLTLRPGATAAR

SEQ ID NO: 44318 - protein, 250 aa, Zea mays
MAKNYPTVSAEYSEAVEKARRKLRALIAEKSCAPLMLRLAWHSAGTFDVSSRTGGPFGTMKCPAELAHGANAGLDIAVRLLEPIKEEFPTLSYADFYQLAGVVAVEVTGGPEIPFHPGREDKPQPPPEGRLPDATKGSDHLRQVFGKQMGLSDQDIVALSGGHTLGRCHKERSGFEGAWTTNPLVFDNSYFKELLSGDKEGLLQLPSDKALLSDPVFRPLVEKYAADEKAFFDDYKEAHLKLSELGYADA

SEQ ID NO: 44319 - protein, 420 aa, Yarrowia lipolytica CLIB122
MTRVVVTGLGLVSPLGVGVKQAWNRLIAGKSGIVALDERFDALSCRVGGVVPQDEWSEASSANLAAGEIKRVPLFAQYAMVAAQEAVNDSKLLADAGESAKHTDIGCSIGTGIANMAELADTVTAFNNKGPRGISPLFVPRIIANMGAGHVSMRFGLQGPNHSVSTACATGAHSIGDAANFIRLGYAKAMIAGSTEACMHPIALGGFARAKSVATKWNDSPSEASRPFDKDRGGFVMGEGSAVLVLEEYEHAVARGAPIYAEVCGYGLSGDAHHITAPPDDGNGAYRAMKQALKQANVSAVKIDYVNAHATSTPLGDAAENAALTQLFEGRNLSDIAVSSTKGAIGHLLGGAGSVEALFTIKALETGDLPPTLNLNELSDPDVFKFNFVPKETQHRDVRYALNNSFGFGGTNSSLLFGKV

SEQ ID NO: 44320 - protein, 165 aa, Leptospira interrogans serovar lai str. 56601
MRFNMNETLYDLTATLNNGKEQKLENYKGKVLLIVNTASECAFTPQYAGLQNLYSKYKTEGLEILGFPCDQFKHQEPGSDETIKNFCQKNYGVEFPIFKKIEVNGDNAHPVFRFLRNKASGFFGNSIKWNFTKFLVDKQGNVIKRYSPITTPENIEKEIQNLLKR

SEQ ID NO: 44321 - protein, 446 aa, Trichoderma viride
MREIVYIQTGQCGNQIGAAFWQTISGEHGLDSNGIYNGSSELQLERMNVYFNEASNNKYVPRAVLVDLEPGTMDAVRAGPFGQLFRPDNFIFGQSSAGNNWAKGHYTEGAELVDQVLDVVRREAEGCDCLQGFQITHSLGGGTGSGMGTLLLSKIREEFPDRMMATFSVVPSPKVSDTVVEPYNATLSVHQLVENSDETFCIDNEALYDICMRTLKLNNPAYGDLNYLVSAVMSGITTCLRFPGQLNSDLRKLAVNMVPFPRLHFFMVGFAPLTSPGAHSFRAVTVPELTQQMFDPKNMMAASDFRNGRYLTCCSIFRGKVAMKEVEDQMRNVQNKNSTYFVEWIPNNIQTALCAIPPRGLKMSSTFIGNSTSIQELFKRVGEQFSAMFRRKAFLHWYTGEGMDEMEFTEAESNMNDLVSEYQQYQEAGIDEEEEYEDEAPMEAEE

SEQ ID NO: 44322 - protein, 168 aa, Oryza sativa
MAAVMVARQGRELQRYSDNTGGRMVVGCIPYRVRGDGGGVEVLVISSQKKGAAAGDVVMFPKGGWELDESVDEAARREALEEAGVLGEIGASLGRWCYRSRRYDATYEGFVFPLRVTDELDRWPEMAARRRSWVSPQQAMDRCPHWWMREALQRFADLFPQSTALSLL

SEQ ID NO: 44323 - protein, 319 aa, Synechocystis sp. PCC 6803
MGLLVNGIWQDQWYDTESTGGRFVRHDSQFRHWITPDGSPGPTGHGGFKAEAGRYHLYVSLACPWAHRTLIFRKLKGLEGMIDVSVVHWLMRENGWTFAPGPGVMPDPLFNAEYLYQIYTRADAQYSGRVTVPILWDKQKQTIVNNESSEIIRIFNSAFDGLGAKSGDYYPKALRTQIDALNDRIYHTINNGVYKCGFATTQTAYEEAIAPLFESLDWLEGILQGHQYLTGDEITEADWRLFTTLIRFDVVYVGHFKCNLRRIQDYPNLWRYLRDLYHQPGIAETVNFQHIKGHYYESHLNINPTGIVPMGPALDLSLA

SEQ ID NO: 44324 - protein, 410 aa, Ralstonia eutropha JMP134
MSRRRVVVTGLGLVSPVGNTVAEGWANLVAGKSGIATVTKFDHSALSVHFAGEVKGFNAEDYIPAKEARNMDTFIHYGIAAGAQALKDSGYEVTDANAERIGVLVGSGIGGLPMIEDTHATLTERGPRRISPFFVPGSIINMISGHLSIMHGLKGPNLAAVTACTTGLHSIGLAARLIQAGDADAMLAGGAESTVSPLGIGGFAAARALSTRNDDPAAASRPWDKDRDGFVLGEGAGVMMLEEYESAKARGARIYAELVGFGMSGDAFHMTAPNMDGPRRCMVNALRDAGINADEVQYLNAHGTSTPLGDKNETDAIKAAFGDHAYKMVVNSTKSMTGHLLGGAGGLESVFTVLALHNQVSPPTINIDNQDPECDLDYVANTAREMKIDVAVKNNFGFGGTNGTLVFRRA

SEQ ID NO: 44325 - protein, 327 aa, Glycine max
MNISGGGGTVMGFSSNGRSPFTVSQWQELEHQALIFKYMVAGLPVPPDLVLPIQKSFDSTLSHAFFHHPTLSYCSFYGKKVDPEPGRCRRTDGKKWRCSKEAYPDSKYCERHMHRGRNRSRKPVESQTMTHSSSTVTSLTVTGGGDSNGTVNFQNLPTNAFGNLQGTDSGTDRTNYHLDSIPYAIPSKEYRCLQGLKSEGGEHCFFSEASGSNKVLQMESQLENTWPSMSTRVASFSTSKSSTDSLLHSDYPQHSFLSGEYASGEHVKEEGQPLRPFSNEWPKSRESWSGLEDDISNQTAFSTTQLSISIPMSSDFSATSSQSPHDN

SEQ ID NO: 44326 - protein, 214 aa, Zea mays
MAPMKLYGAVMSWNVTRCATALEEAGSDYEIVPINFATAEHKSPEHLVRNPFGQVPALQDGDLYLFESRAICKYAARKNKPELLREGNLEEAAMVDVWIEVEANQYTAALNPILFQVLISPMLGGSTDQKVVDENLEKLKKVLEVYEARLTKCKYLAGDFLSLADLNHVSVTLCLFATPYASVLDAYPHVKAWWSGLMERPSVQKVAALMKPSA

SEQ ID NO: 44327 - protein, 383 aa, Synechocystis sp. PCC 6803
MSTVDHAPQTSEAMAIPKQGLPVTIITGFLGSGKTTLLNYILSNQQGLKTAVLVNEFGEIGIDNELVIASDKNMVELSNGCVCCTINEDLVEAVYKVLEREQKIDYLVVETTGLADPLPVALTFLGTELRDMTRLDSIITMVDCENFSLDLFNSQAAQSQITYGDIIVLNKTDLVEEADVDSLEVRLRDLKTGARILRTQKAEVPLPLILSVGLFESDKYAPEQHEHHHHSHDHGHDHDCAPDCQDPNHNHSHHGHDHHHHDHDHDHGKKYHSDHLEMDGFTSLSFRSEQPFSIRKFQYFLDNQLTPNIFRAKGILWFNESPKRHIFHLSGKRFSLEDDQWKGEKSNQLVLIGQDLDHDKIREQLNHCLSLPTESKGKGFGRG

SEQ ID NO: 44328 - protein, 500 aa, Mycobacterium tuberculosis H37Rv
MAPSGGQEAQICDSETFGDSDFVVVANRLPVDLERLPDGSTTWKRSPGGLVTALEPVLRRRRGAWVGWPGVNDDGAEPDLHVLDGPIIQDELELHPVRLSTTDIAQYYEGFSNATLWPLYHDVIVKPLYHREWWDRYVDVNQRFAEAASRAAAHGATVWVQDYQLQLVPKMLRMLRPDLTIGFFLHIPFPPVELFMQMPWRTEIIQGLLGADLVGFHLPGGAQNFLILSRRLVGTDTSRGTVGVRSRFGAAVLGSRTIRVGAFPISVDSGALDHAARDRNIRRRAREIRTELGNPRKILLGVDRLDYTKGIDVRLKAFSELLAEGRVKRDDTVVVQLATPSRERVESYQTLRNDIERQVGHINGEYGEVGHPVVHYLHRPAPRDELIAFFVASDVMLVTPLRDGMNLVAKEYVACRSDLGGALVLSEFTGAAAELRHAYLVNPHDLEGVKDGIEEALNQTEEAGRRRMRSLRRQVLAHDVDRWAQSFLDALAGAHPRGQG

SEQ ID NO: 44329 - protein, 335 aa, Pseudomonas fluorescens
MALSKEVPEFDIDDEVLLMESSIDMDSMSNNEGATPPSVRTKSKSSASLKQHKYIDYTRALDATQLYLNEIGFSPLLSPEEEVHFARLSQSGDPAGRKRMIESNLRLVVKIARRYVNRGLSLLDLIEEGNLGLIRAVEKFDPERGFRFSTYATWWIRQTIERAIMNQTRTIRLPIHVVKELNVYLGAARELTQKLDHEPSPEEIANMLEKPVTEVKRMLGLNERVSSVDVSLDPDSDKTVLDTLTDDRPTDRCEVLQEDDLSQGIDQWLSELTEKQREVVVRRFGLRGHESSTLEDVGLEIGLTRERVRQIQIEGLKRLREILEKNGLSSESLFQ

SEQ ID NO: 44330 - protein, 540 aa, Streptomyces albus G
MAKILKFDEDARRALERGVNQLADTVKVTIGPKGRNVVIDKKFGAPTITNDGVTIAREVECDDPYENLGAQLVKEVATKTNDIAGDGTTTATVLAQALVREGLRNVAAGASPAALKKGIDAAVAAVSAELLDTARPIDDKSDIAAVAALSAQDKQVGELIAEAMDKVGKDGVITVEESNTFGVDLDFTEGMAFDKGYLSPYMVTDQERMEAVLDDPYILIHQGKIGSIQDLLPLLEKVIQAGGSKPLLIIAEDVEGEALSTLVVNKIRGTFNAVAVKAPGFGDRRKAMLGDMATLTGATVIAEEVGLKLDQAGLDVLGTARRVTVTKDDTTIVDGGGNAEDVQGRVAQIKAEIESTDSDWDREKLQERLAKLAGGVCVIRVGAATEVELKERKHRLEDAISATRAAVEEGIVSGGGSALVHAVKVLDDNLGRTGDEATGVAVVRRAAVEPLRWIAENAGLEGYVITTKVAELDKGQGFNAATGEYGDLVKAGVIDPVKVTRSALENAASIASLLLTTETLVVEKPAEEEPEAGHGHGHSH

SEQ ID NO: 44331 - protein, 540 aa, Streptomyces albus G
MAKIIAFDEEARRGLERGMNQLADAVKVTLGPKGRNVVLEKKWGAPTITNDGVSIAKEIELEDPYEKIGAELVKEVAKKTDDVAGDGTTTATVLAQALVREGLRNVAAGANPMALKRGIEKAVEAVSSALLEQAKDVETKEQIASTASISAADTQIGELIAEAMDKVGKEGVITVEESQTFGLELELTEGMRFDKGYISAYFATDMERMEASLDDPYILIVNSKIGNVKDLLPLLEKVMQSGKPLLIIAEDVEGEALSTLVVNKIRGTFKSVAVKAPGFGDRRKAMLGDIAILTGGTVISEEVGLKLENAGLDLLGRARKVVITKDETTIVDGAGDTDQVNGRVAQIRAEIENSDSDYDREKLQERLANVAGGVAVIKAGAATEVELKERKHRIEDAVRNAKAAVEEGIVAGGGVALLQASSVFEKLELEGDEATGAAAVKLALEAPLKQIAVNGGLEGGVVVEKVRNLSVGHGLNAATGQYVDMIAEGILDPAKVTRSALQNAASIAALFLTTEAVIADKPEKAAAAAPGGMPGGDMDF

SEQ ID NO: 44332 - protein, 271 aa, Glycine max
MDKSEQTQQQQQQQQHVMGVAAGASQMAYSSHYPTASMVASGTPAVTAPSPTQAPAAFSSSAHQLAYQQAQHFHHQQQQHQQQQLQMFWSNQMQEIEQTIDFKNHSLPLARIKKIMKADEDVRMISAEAPVIFAKACEMFILELTLRSWIHTEENKRRTLQKNDIAAAISRNDVFDFLVDIIPRDELKEEGLGITKATIPLVGSPADMPYYYVPPQHPVVGPPGMIMGKPVGAEQATLYSTQQPRPPMAFMPWPHTQPQQQQPPQHQQTDS

SEQ ID NO: 44333 - protein, 274 aa, Zea mays
  misc_feature (44)..(44): Xaa can be any naturally occurring amino acid
  unsure (1)..(274): unsure at all Xaa locations
RGGDAVAERQGGRGGGGGGPGRHDERLQRPRGRGGGGGAAAAGXDGQGRAKRKRSRRRRDRDGQQPKEPTTQEEYLALCLVMLATGRRDADADAAAPPQDHACSVCGKAFPSYQALGGHKASHRAKPSPSPSPAAALAPEPGAGDGDRHDEKKPAQPSSSSAGSRPAAAAHECNVCGKAFPTGQALGGHKRRHYDGTIGSAAAPARASSSSVPASAATSSLGAATSVPASAPPPPQAVAFDLNLPALPERCAGVDEDEVLSPLAFKKPRFMIPA

SEQ ID NO: 44334 - protein, 160 aa, Pseudomonas fluorescens Pf-5
MSAFHDLKLKALDGQELPLAPFKGHVVLVVNVASKCGLTPQYAALENLYQQYKAQGFSVLGLPCNQFAGQEPGTEQEIQEFCSLNYGVTFPLSSKLDVNGPERHQLYRLLAGEGAEFPGDITWNFEKFLLGKDGRVLARFSPRTAPDDPTVVQAIEKALS

SEQ ID NO: 44335 - protein, 543 aa, Aspergillus oryzae
MSLSTSSGDFVRLAFVQYTVFLVSINAPAWDYNLVALDYLPKCDLHWVGNCNELNAGYAADGYARINGMSALVTTFGVGELSALNAIAGAYSEFVPIVHIVGQPHTKSQKDGMLLHHTLGNGDFNVFTRMSADISCTLGCLNSTHEVATLIDNAIRECWIRSRPVYISLPTDMVTKKIEGERLDTPLDLSLPPNDPEKEDYVVDVVLKYLHAAKKPVILVDACAIRHRVLDEVHEFVEKSGLPTFVAPMGKGAVDETHKNYGGVYAGTGSNPGVREQVESSDLILSIGAIKSDFNTTGFSYRIGQLNTIDFHSTYVRVRYSEYPDINMKGVLQKIVQRMGNLNVGPVSPPSNLLPDNEKASTEQAITHAWLWPTVGQWLKEKDVVITETGTANFGIWDTRFPAGVTAISQVLWGSIGYSVGACQGAALAAKEQGRRTVLFVGDGSFQLTLQEVSTMIRNNLNPIIFVICNEGYTIERYIHGWEAVYNDIQPWDFLNIPVAFGAKDKYKGYKVTTRDELRELFANEEFASAPCLQFEIDSRIGR

SEQ ID NO: 44336 - protein, 222 aa, Pelargonium x hortorum
AEENRHGDLLNKYLYLSGRIDMRQIEKTIQYLIGSGMDPKTENNPYLGFIYTSFQERATFVSHGNTARHAKDHGDLKLAQICGTIAADEKRHETAYTKIVEKLFELDPDGTVMALSDMMRKKISMPAHLMFDGKDDNLFEHFSRSQRLGVYTARDYADILEFLVARWNVDKLTGLSGEGRRAQDYVCGLAQRIRRLEERAQKRAKEATMVPFSWIFGREVLL

SEQ ID NO: 44337 - protein, 147 aa, Zea mays
MGIASRATKRALPVRPVRETHDCYNGCAAFLLDRVRRGSASVMLATHNVESGQLAAARAQELGIPKGDRNLQFAQLMGMADGLSLSLRNAGFQVSKYLPYGPVEQIIPYLIRRAEENRGLLSASSFDRQLLRKELVRRVKAMVAGRE

SEQ ID NO: 44338 - protein, 559 aa, Methylobacillus flagellatus KT
MLRETISVMRDFGRVRAIARILMHYGWGDIAERLGKRSWLRRAGNALNSEASREIMQLPSEVRARLALQELGPTFVKMGQVLATRPDIFPPNWIAEFSKLQDQVPPVPFEDMLPGLQEALGKSPFEVFRDFDTTPVAGASIAQVYQAKLQDGTPVILKVRRPGIRENIDADLRLLHHLARLIEAEVEEARRFNPTEIVDQFSKSLKRELDLALEGRNTERFARNFLNDPNTRFAKIYWEYTSESVLVMEKIDGIPGNSLEEARQAGMNLPLLAARGADAVMKMVLIDGFFHADPHPGNIFFLPENKIAVIDCGMVGRISLDRRNEIADLLAALVSRDIETLRDILIAWAGNVVVDEDKLGADVDEFICTYDNAPLKHISFGTLLNDLTTIMRENHLSVPPDLTMLFKALVTLEGLGRQLDPDFQIVSHLTPFVKKVIIERYMPGTLWRKGARGVGKALGAVGDLPGDVSQVLKEAGRGRLKLNLDLKRLDHFGHQLDHSTNRLAMALITASLIVGSSIVMTVRGGPELFGLPAFGFLGFFLAFVIGIMLMISIWRSGRD

SEQ ID NO: 44339 - protein, 592 aa, Neurospora crassa
MNQQSQQYQPARRPSAYASHGDELHMSAHQAHLSSPREYASSGAPHIKLEQMPSSPPNMQSYQSAGAVPNVLQPGGMSSRPPVMQSNTAPTLPTMQQSADYKSHGYERSSPATLASNSYDGGNSPYSAYNPTPPGGSSSSQYMSPASTNKYAAASSSRNVSNTPLGLSDIRPRADSTLSDGMLPGSQAYELANPQSRTSNYMAPWATYSFDWCKWRPSANSAGKLAIGSYLEDGHNYIQILEANLTQTPPDVYVPGTSKYSMDFTRTAEATHSYPVTRLLWEPPSSQKQSTDLLATSGDHLRLWSLPADPVVPTSGSSITSRSGRDAPITKLTPLALLSNSKTPDHTAPLTSLDWNTVQPSLIITSSIDTTCTIWDIPSLTAKTQLIAHDKEVYDVRFCANSVDVFVSCGQDGSVRMFDLRSLEHSTIIYEPTGKEERDANGGRISPTLAQQTMSHPPPLLRLATSPHDQHLLATFAMDSNVIRILDVRQPGQALLELRGHGGSLNCIEWSPTRRGTLASGGDDCQVLIWDLLNQPSGLTPAGQPDNVRSPVASWQCDYEVGNLGWVPPMGNGEYGDWLGVSAGRGVWGVRF

SEQ ID NO: 44340 - protein, 178 aa, Streptomyces coelicolor A3(2)
MTTGATVWLTGLPSAGKTTIARELADRLREEGRPVELLDGDEIREFLSAGLGFDRADRHTNVQRIGFVAELLARNGVTALVPVIAPYADSRDAVRERHGANGTAYVEVHVATPVEVCSVRDVKGLYAKQAAGELTGLTGVDDPYEEPVAPDLRIESQDQTVQESAAAVHALLTERGLA

SEQ ID NO: 44341 - protein, 490 aa, GIBBERELLA ZEAE PH-1
MASPKLSDPSLIKNACYVNGQWVAAKSGKDFSVENPASLEKLGSCPEFDANDTEAAIAAADAAYKTYRKTPARQRARYLRRWYDLMMENADDIARLITLENGKVWSDAKTEAVYAANFFEWFSEEAPRIYGETIEASNPSCRLSTIKQPVGVCGLIAPWNFPAAMITRKAGPALAAGCTVVIKAPAEAPLTALALAELAHRAGIPAGVVNIITALDNTAEVGKVLTTHPKIKKVSFTGSTGVGRLLMNQSSSTVKKLSFELGGNAPFIVFEDADLEKAVKGIITSKFRNSGQTCVCANRIFVHRSIYDKFVQMVLDVVKTFVIGDGFGEKTTHGPLIHGRAVAKTAEHVEDAISKGAKLIHGGERLADLGPNFFGLTMLTDMTPDMKIFSEETFGPVAAFFAFDTEEEVIELANDSEVGLGGYFFSENVNRCYRVAEALEVGMIGVNCGVLSDPAAPFGGIKQSGFGREGSKYGIDEFTVTKMVMTNIDP

SEQ ID NO: 44342 - protein, 337 aa, Ustilago maydis
MSQVNIGINGFGRIGRIVFRNSVVHNTANVVAINDPFIDLEYMVYMLKYDSTHGVFNGDISTKDGKLIVNGKSIAVFAEKDPSNIPWGQAGAHYVVESTGVFTTIDKASAHIKGGAKKVVISAPSADAPMYVCGVNLDAYDPKAQVVSNASCTTNCLAPLAKVIHDKFGIVEGLMTTVHATTATQKTVDGPSAKDWRGGRAAAANIIPSSTGAAKRVGKVIPSLNGKLTGMAFRVPTTNVSVVDLTARLEKGASYDEIKAEVKRASENELKGILGYTEDAVVSQDFIGNSHSSIFDAAAGISLNNNFVKLVSWYDNEWGYSNRCLDLLVFMAQKDSA

SEQ ID NO: 44343 - protein, 170 aa, Picrophilus torridus DSM 9790
MYGDVMTANVKEIEIPKKPLPLIGEIQTMYHVGKFIFKKPVTIQYPEEKGDIPERFRYRIFLSPESCIGCTLCQQICPNHSIKMEVWDLSSQNTGAHAIKTARGVRENAQNKRHLYPDVNFGTCTVCRNCEEICPTNAIYLTHEFETARTRNSFTYSPQELTMQEKDVIK

SEQ ID NO: 44344 - protein, 230 aa, Arabidopsis thaliana
MGRGKIEIKRIENSTNRQVTFCKRRNGLLKKAYELSVLCDAEVALIVFSTRGRLYEYANNNIRSTIERYKKACSDSTNTSTVQEINAAYYQQESAKLRQQIQTIQNSNRNLMGDSLSSLSVKELKQVENRLEKAISRIRSKKHELLLVEIENAQKREIELDNENIYLRTKVAEVERYQQHHHQMVSGSEINAIEALASRNYFAHSIMTAGSGSGNGGSYSDPDKKILHLG

SEQ ID NO: 44345 - protein, 364 aa, Moraxella catarrhalis
  misc_feature (166)..(166): Xaa can be any naturally occurring amino acid
  unsure (1)..(364): unsure at all Xaa locations
MTNTGTTDMKNIDTSPSNSEHYLPKKILVTGGAGYIGSHTLIELIQAGFVPVVYDNLSNSSFVAVQRVEQIVGKHIEFIQGDVLDKTHLDAVFKAHQFFAVVHFAGLKAVGESTKNPLKYYQNNVVGTLNLLELMAKYGVKNCVFSSSATVYGSSNRLPITEDMPXFCTSPYGQSKLMVEHILEDLVNADDTWNVVCLRYFNPIGAHESGRIGEDPTDIPNNLMPYISQVAVGNLKQLSVFGNDYETPDGTGVRDYIHVVDLAKGHVAALHYLVGQSVGIGFCPINLGTGQGTSVLQLIKAFESNTGQSVPYVITSRRTGDIAAYYASADKAKAILNWTAELDIERMCVDTWRWQSNNPHGYLS

SEQ ID NO: 44346 - protein, 291 aa, Oryza sativa
MATDGAAAAAAAGSKKKKEVLIFDAEEDLAVSLAKYTAELSAKLAAERGAFTVVLSGGSLIKNIRKLAEPPYLDSVDWSKWHVFWVDERVVPKDHEDSNYKLALDGFLSKCTRSVTKTLVLLIQFTEPLLLSVPIPTGQVYAINDALSAEGAADDYETCLKQLVKNGVIAMSQSTGFPRFDVMLLGMGPDGHIASLFPGHPLVNENKKWVTYIKDSPKPPPERITFTFPVINSSAYVAMVVTGAGKAGAVQKALSDKQTSSDLLPVEMAVLQDGEFTWFTDKPAVSMLQNK

SEQ ID NO: 44347 - protein, 154 aa, Glycine max
MSLIPGFFGGRRSNVFDPFSLDMWDPFKDFHVPTSSVSAENSAFVSTRVDWKETPEAHVFKADIPGLKKEEVKVQIEDDRVLQISGERNVEKEDKNDTWHRVERSSGKFTRRFRLPENAKVNEVKASMENGVLTVTVPKEEVKKPNVKAIEISG

SEQ ID NO: 44348 - protein, 678 aa, Nocardia farcinica IFM 10152
MTHPTVAALIARSHRLGADPKNTNYAGGNTSAKGADTDPVTGEPVELMWVKGSGGDLGTLTESGLAVLRLDRLRALVGVYPGVEREDEMVAALDYCLHGRGGAAPSIDTAMHGLVEAAHVDHLHPDSGIALATAVDGPELTEKIFGDRVVWVPWRRPGFQLGLDIAEIRRRNPRAIGTILGGHGITAWGETSDEAEAHSREIIETIERFLDTHGKPEPFGPVLPGYAALPAEQRRAKAAALAPFLRGLASTDRRQVGHFTDTEPVLDFLARAEHPRLAALGTSCPDHFLRTKVAPLVLDLPADAPIEQCKQRLTELHETYRADYRAYYERHATADSPAMRGADPAIVLIPGVGMFSYGADKQTARVAGEFYLNAINVMRGAESVSRYQPIDEAEKFRIEYWALEEAKLARRPRPKPLATRIALVTGAASGIGKAIAARLAAEGACVVVADRDGAKAAEVAAELGSADVAIGVAADVTDEGQVRAAVDAAVLAFGGLDLVVNNAGLSLSKSLLDTTEADWDLQHDVMAKGSFLVAKAAARALIDQRMGGDILYISSKNSVFAGPNNIAYSAAKADQAHQVRLLAAELGEHGIKVNGINPDGVVRGSGIFAGGWGAQRAAVYGVEESELGAFYAQRTLLKREVLPEHVANAAFALCSADFSHTTGLHVPVDAGVAAAFLR

SEQ ID NO: 44349 - protein, 613 aa, Arabidopsis thaliana
MILWKSLSCFSFVFGLLLYSASFVCAGDIVHHDDSLPQRPGCNNNFVLVKVPTRVNGSEYTEYVGVGARFGPTLESKEKHATLIKLAIADPPDCCSTPKNKVKFPFWLVSLVLIFPSCVIPVSLSFGSLQERSFLFIVVNAVLPPKLRLLKQLGENVLDITIPVVMLPVDAGRSLENIVKSNAIVTLQLYSPKRPAVDVAEVFLWLMAVGTILCASYWSAWTVREEAIEQDKLLKVIAGSKFRTILYSGHPPCSNLLTAKEKCPHSFVIYLKLQDGSDELLQLSTTSSRGVVEVTVISAILFVVVASCFLIMLYKLMSFWFIEVLVVLFCIGGVEQYLIEPSCTDVESFVGAIRGCKLVWSLYSHGMYSSSLINIFLWFRRFGESYVKVPFLGAVSYLTLAICPFCIAFAVFWAVKRQYSYAWIGQDILGISLIITVLQIVRVPNLKVGFVLLSCAFMYDIFWVFVSKWWFRESVMIVVARGDRSGEDGIPMLLKIPRMFDPWGGYSIIGFGDIILPGLLVTFALRYDWLANKRLKSGYFLGTMSAYGLGLLITYIALNLMDGHGQPALLYIVPFILGTLFVLGHKRGDLKTLWTTGEPDRPCPHVRLQPQSS

SEQ ID NO: 44350 - protein, 542 aa, Lactobacillus acidophilus NCFM
MAKDIKFAENARRSLLKGVDKLADTVKTTIGPKGRNVVLEQSYGNPDITNDGVTIAKSIELKDHYENMGAKLVAEAAQKTNDIAGDGTTTATVLTQAIAREGMKNVTAGANPVGIRRGIEKATKAAVDELHKISHKVESKEQIANVAAVSSASKEVGELIADAMEKVGHDGVITIEDSRGINTELSVVEGMQFDRGYLSQYMVTDNDKMEADLDNPYILITDKKISNIQDILPLLQEIVQQGKSLLIIADDVTGEALPTLVLNKIRGTFNVVAVKAPGFGDRRKAQLEDIAALTGGTVITDDLGFELKDTKIDQLGQARRVTVTKDSTTIVDGAGSKDAIKEREDSIRKQIEESTSDFDKKKLQERLAKLTGGVAVIHVGAATETELKERRYRIEDALNSTRAAVDEGYVAGGGTALVDVEKAIKDLKGETSDEQTGINIVLRALSAPVRQIAENAGKDGAVVLNKLESQENEIGYNAATDKWENMVEAGIIDPTKVTRTALQNAASIAALLLTTEAVVADIPEDKPEAPQAGAAGAPGMGM

SEQ ID NO: 44351 - protein, 604 aa, Corynebacterium glutamicum ATCC 13032
MTDTSPLNSQPSADHHPDHAARPVLDAHGLIVEHESEEFPVPAPAPGEQPWEKKNREWYKDAVFYEVLVRAFYDPEGNGVGSLKGLTEKLDYIQWLGVDCIWIPPFYDSPLRDGGYDIRNFREILPEFGTVDDFVELVDHAHRRGLRVITDLVMNHTSDQHAWFQESRRDPTGPYGDFYVWSDDPTLYNEARIIFVDTEESNWTYDPVRGQYFWHRFFSHQPDLNYDNPAVQEAMLDVLRFWLDLGLDGFRLDAVPYLFEREGTNGENLKETHDFLKLCRSVIEKEYPGRILLAEANQWPQDVVEYFGEKDKGDECHMAFHFPLMPRIFMGVRQGSRTPISEILANTPEIPKTAQWGIFLRNHDELTLEMVSDEERSYMYSQFASEPRMRANVGIRRRLSPLLEGDRNQLELLHGLLLSLPGSPVLYYGDEIGMGDNIWLHDRDGVRTPMQWSNDRNGGFSKADPERLYLPAIQNDQYGYAQVNVESQLNRENSLLRWLRNQILIRKQYRAFGAGTYREVSSTNESVLTFLREHKGQTILCVNNMSKYPQAVSLDLREFAGHTPREMSGGQLFPTIAEREWIVTLAPHGFFWFDLTADEKDDME

SEQ ID NO: 44352 - protein, 440 aa, Silicibacter pomeroyi DSS-3
MSHVFPRHCHAQLPIAVGGEGCYLIDSTGKRYFDASGGAAVSCLGHSNDRVKQAIKDQVDRLAFAHTGFFTSDPAEELADLLIANAPEGIERVYFVSGGSEAVEAAIKLARQYYLEVGQPERRHLIARRQSYHGNTLGALAAGGNAWRRAQFDPLLIGVSHIAPCYEYAERAAGESLVDYGRRAADELEAEILRLGPDTVMGFIAEPVVGATLGAVAAVEGYFSRIREICDTYGVLLILDEVMCGMGRTGHLFACTGEGVRPDIVTIAKGLGAGYQPVGAMLCSGAIYDAVASGSGFFQHGHTYIGHPVATAAGLAVVQEMLEHDLPARVQALGGAMEAALRSRLDQHPHVGDIRGRGLFWGVELVADRAGKTPFDPGLGLAGKLKRAAFARGLICYPMPGTRDGRNGDHVLLAPPFIMEEADATLIAERLTAAMGDVLP

SEQ ID NO: 44353 - protein, 534 aa, Oryza sativa
  misc_feature (390)..(390): Xaa can be any naturally occurring amino acid
  unsure (1)..(534): unsure at all Xaa locations
SRSRIVAAATMGLLALTRLMATQPPRRRRRRRNDAQAQARNGVITSMAKRKGTLLQGGSSSQGGKRLRYSGPDLPEDIWRHIHFLMPLRDAARAACISQAFLRSWRHHPNLILRKKTMGLEHKAYRRVGMARDFTSTVHSILKNHSGIGVKRLKLDIIYDHRNLNICYLNNWLQIAITPGIEEITLLLPSKYTFPCSLLSGGIGRSLQYLKLVRCAFRPTASLGFLSSLTKLHLCEVRIKDDELTCLISKSLALKQLELLNCRQIICLKIPCLLEQLSCLNVSLCENLQMIESKAPNLSTFSYISNLVVELSLKQSSQVKTLDIDCYDESNFLCHVITKFPNIVPNLETLTLHSIDERINTPMVASKFLHVKHLEIYFESLDPDKAFPPXYDYLSLVSILDASPVLDSFIFCVQQGEMKHDSVFGDASNLRTMPGHKHESLKDVEIIGFCSATSMVELTCYLLKNAISLEYITLALRREMILEAHRGVMAIERYIRGKVPSKVELTVLELCIWCHDLERLDALDKGKLITFPTS

SEQ ID NO: 44354 - protein, 152 aa, Pseudomonas fluorescens Pf-5
MINAHLLQRMINASNDGIVVAEQEGEDNIVIYVNPAFERLTGYSADEVLYQDCRFLQSGDRDQPGLEVIRQALRQGRPCREVLRNYRKDGSHFWNELSITPVFNDSDQLTYFIGVQKDVSVQVKAQQRLLQLEQQLAEVQAELAALKATSGH

SEQ ID NO: 44355 - protein, 542 aa, Bartonella henselae str. Houston-1
MARYVFITGGVVSSLGKGIAAAALAALLQARGYSVRLRKLDPYLNVDPGTMSPYQHGEVFVTDDGAETDLDLGHYERFTGRSANSQDNITTGRIYRNIIERERRGDYLGATVQVIPHVTDEIKRFITTGNEEFDFVLCEIGGTVGDIEAMPFLEAIRQLHNELPRQNVIYVHLTLMPYISSAGELKTKPTQHSVKELQSVGIAPDILLVRADRPIPETERSKLSLFCNVRPTAVIQALDMPTIYDVPIAYHKEGLDSEVLSAFGMHPAHKPNMDRWEDITHRIHHPEGEVTIAVVGKYTGLKDAYKSLTEAIAHGGLANKVKVNIEWIDAELFEREDPTSTLRKVHGILVPGAFGVRGAEGKMRAIQFARERRVPFFGICFGMQLACIEAARNIAQIENASSSEFCETKNPIVGLMTEWLKGDVLEKRTKCGNFGGTMRLGAFAAELKENSHIAQIYGMTRIYERHRHRYEVNIDYKDKLEQCGLVFSGMSPDGVLPETIEYADHPWFIGVQYHPELKSRPFDPHPLFSSFIEATVEQSRLV

SEQ ID NO: 44356 - protein, 333 aa, Methylobacillus flagellatus KT
MRIVFFSTQVYDRESFLALPRLQNAEFIFQQPKLTLDTAVLATGAEVVCAFINDDLSAPVLERLAANGTKLIALRSAGYNHIDLEAAQRLNLAVVRVPAYSPHAIAEHTVALILALNRHLTRAYNRTREGDFSLRGLTGFDLVHKTVGIIGTGQIGAAFARIMAGFGCRILAYDPYPNPEVIALGASYLELDTLLAQSHIVSLHCPLSPATHHLINAGSLSRMQPGSMLINTSRGALVDTPAVIEALKSGHLGYLGLDVYEEEADLFFEDLSDFPLQDDVLARLLTFPNVIITAHQAFLTREALNAIASTTLDNISAWAAGHPQNLVRLETGS

SEQ ID NO: 44357 - protein, 433 aa, Saccharomyces cerevisiae
MQSMNVQPRVLAVGGEQFFSQRQASEQHQQQNMGPQVYSPKVNRARMFPQGMPVNTINGSVNQEMNNAYLLKQKNEPLLTQQQQQQQQQQQPFNIGTPVSVASLPPGLNVLQQQQQQQQQQQQQQQGVGLNRPLASQLPKHLTNQSMPPIFLPPPNYLFVRDVWKSNLYSEFAVIRQLVSQYNHVSISTEFVGTLARPIGTFRSKVDYHYQTMRANVDFLNPIQLGLSLSDANGNKPDNGPSTWQFNFEFDPKKEIMSTESLELLRKSGINFEKHENLGIDVFEFSQLLMDSGLMMDDSVTWITYHAAYDLGFLINILMNDSMPNNKEDFEWWVHQYMPNFYDLNLVYKIIQEFKNPQLQQSSQQQQQQQYSLTTLADELGLPRFSIFTTTGGQSLLMLLSFCQLSKLSMHKFPNGTDFAKYQGVIYGIDGDQ

SEQ ID NO: 44358 - protein, 346 aa, Bartonella henselae str. Houston-1
MAERLKKNSASVVHNALSNTTKKAKIANFTKEEEIDAYREMLLIRRFEEKAGQLYGMGLIGGFCHLYIGQEAVVIGTLKAAKEGDQVITSYRDHGHMLAVGMSPRGVMAELTGRQGGFSKGKGGSMHMFSKEKNFYGGHGIVGAQVPIGSGLAFSNQYLGKDNVTLVYFGDGAANQGQVYESFNMASLWKLPVVYIIENNQYAMGTSVARASAETDFSRRGLSFEIPGIVVDGMDVRAVKGAADEAITWTRSGKGPIILDMQTYRYRGHSMSDPAKYRSKEEVQKIKEEQDPIDQVRNRILQQGFASEDDLKSIDKEVRAIVADAVDFAQSDQEPDASELYTDILV

SEQ ID NO: 44359 - protein, 744 aa, ASPERGILLUS NIDULANS FGSC A4
MATSITAGLQKAQQAVQDTATKNKKIVDISHDTVNVHTDQEQRTDFGVAITDPDHWLRVTNETHSGPSLLEDHIARERIHRFDHERIPERVVHARGTGAYGNFTLKESIEDLTYAGVLTDTSRNTPVFVRFSTVQGSRGSADTVRDVRGFAVKFYTDEGNWDIVGNNIPVFFIQDAIKFPDFVHAVKPEPHNEVPQAQTAHNNFWDFVYLHPEATHMFMWAMSDRAIPRSYRMMQGFGVNTFSLVNKEGKRHFVKFHWIPHLGVHSLVWDEALKLAGQDPDFHRKDLMEAIDNKAYPKWDFAIQAIPEEDQDKFEFDIFDATKVWPEEQVPLRVVGELELNRNIDEFFPETEQVAFCTSHIVPGIDFSDDPLLQGRNFSYQDTQISRLGVNWEEIPINRPVCPFLNHNRDGAKRHRITKGTVNYWPNRFEANPPASDKGFKSHPAPITGRKRRDLTPKFKEYHNQAQLFYNSLSEVEKVHVKKAFSFELDHCDDPIVYERLAGQRLAEIDLPLAQAVAEMVGAPIPTKALRDNHGKTSVRLSQFDFTPKAPGIISRRIAIIIGDGYDKIAFNGMKAAILAAQALPFVIGTKRSAIYAQGEDKNSSKGVIPDHMYDGMRSTMFDATFIPGGSHIETLQKNGQIRYWIAETFGHLKALGAMGEAAQLVKEVLGNVMGVQIAGADSAEPVEWYGVVTARGPESAESLSEGFKVLKDAGDFTSKFFYQISQHRNWQRELDGLASTVAF

SEQ ID NO: 44360 - protein, 742 aa, Staphylococcus aureus subsp. aureus MRSA252
MTTIKTSNLGFPRLGRKREWKKAIESYWAKKISKEELDQTLTDLHKENLLLQKYYHLDSIPVGDFSLYDHILDTSLLFNIIPERFQGRTIDDDLLFDIARGNKDHVASALIKWFNTNYHYIVPEWDNVEPKVSRNVLLDRFKYAQSLNVNAHPVIVGPITFVKLSKGGHQTFEEKVKTLLPLYKEVFESLIDAGAEYIQVDEPILVTDDSESYENITREAYDYFEKAGVAKKLVIQTYFERAHLKFLSSLPVGGLGLDFVHDNGYNLKQIEAGDFDKSKTLYAGIIDGRNVWASDIEAKKVLIDKLLAHTNELVIQPSSSLLHVPVSLDDETLDTSVGEGLSFATEKLDELDALRRLFNQNDSVKYDKLKARYERFQNQSFKNLDYDFESVRTSRQSPFAQRIEQQQKRLNLPDLPTTTIGSFPQSREVRKYRADWKNKRITDEAYETFLKNEIARWIKIQEDIGLDVLVHGEFERNDMVEFFGEKLQGFLVTKFGWVQSYGSRAVKPPIIYGDVKWTAPLTVDETVYAQSLTDKPVKGMLTGPVTILNWSFERVDLPRKVVQDQIALAINEEVLALEAAGIKVIQVDEPALREGLPLRSEYHEQYLKDAVLSFKLATSSVRDETQIHTHMCYSQFGQIIHAIHDLDADVISIETSRSHGDLIKDFEDINYDLGIGLGVYDIHSPRIPTKEEITTAINRSLQQIDRSLFWVNPDCGLKTRKEEEVKDALTVLVNAVKAKRQE

SEQ ID NO: 44361 - protein, 131 aa, Bacteroides fragilis NCTC 9343
MNVILFDGICNLCNGAVTFVVKRDRKGLFRFVSLQSETGKSLLKRYTVESTNKTLYYFRNNRCYSKSTAILYILKDLGGFWQCLYPLILIPAKLRDAIYLLVSKYRYRIFGKADSCIKPFGFSSEESKRSD

SEQ ID NO: 44362 - protein, 724 aa, GIBBERELLA ZEAE PH-1
MPATSSLEEQAIDREYPQQQRQHHRRHQELEPEPRQFSFRSPNRNEAVPQSQLDNQQDTGSLSYSQQHYRPQNSSLSHTQSNSRLVVPSVSGVRSTSPAPSVSPLPTPSISPSASVVSIDASYSSRDPSSPIQTPSSTSAEAHDSHPQRDSSEHNSSERGSTDSYSYLRRERNSSNMATWSGQPAIRGNSEAVRMILLCFVTIGITFTWGIEMTYCTPYLLNLGLTKSNTSLVWIAGPLSGLVVQPVVGVIADESKSKWGRRRPLMVVGSIIVAISLLILGFTREIIGYFITDEEAAKRPTIVLAVLAIYVVDFAINAGMIRFLMSCSKSLIVDTLPIEKQQSGAAWSSRMSSIGHMIAYGAGAVDLISIFGKTLGDTQFKQLTVISTVALLSSTALTCWAVTERVLLTSKPAKHEGRFKVFRQIWSTLLNLPPRIQAICWAQFWAWIGWFPFLFYSTTWVGETYFRYDVPADARKSEDTLGAIGRIGSTALVMYSVITFAGAWVLPMLVQSPEDNTFTHRPPQAIAGLLTSFNKLKPDLLTAWVFGHLMFAASMALAPFATSFRFATVLVCLCGIPWTLAMWAPSAFLGVEVNKMSGETGADGTYRRISDEPDIELSEVSHNDAPLHLDHGSEVDLPSTASTGELSGIYFGILNIYTTLPQFVGTFISTIVFAILEPGKSPELADDAKKQPDPDGPNAIAVCLFIGAMSSVVAAYVTRKLKVM

SEQ ID NO: 44363 - protein, 393 aa, Colwellia psychrerythraea 34H
MSTEIYDDGPVVHQPTFIDGTSVEIPELRILDQDGVTYPNADLPDIDQALATKIYHSLAFHRVLDERMVASQRQGRLSFYMTALGEEATSVGGAAGLKPQDMIMMQYREQGALIYRGFDLKDLMNQLFSNAGDLGKGRQMPIHYGSKALNCMTVSSPLATQIPQATGYAYGQKLQGVDAVTICYFGEGAASEGDFHAGLNMAAVQEAPVIFFCRNNGYAISTPSDEQFKGNGIASRGVGYGIKTIRIDGNDILAVLKATQIARAYAIKENKPVLIEAMSYRLGAHSTSDDPSGYRTKEEEAKWQSHDPILRMKNWLINQKWWDEARETALFEKYREEVLAAVKVAEKIDKPHIDTMITDVYDVPSAQLQAQLDEVKAHVNKYPEAYPFTAGKF

SEQ ID NO: 44364 - protein, 474 aa, ASPERGILLUS NIDULANS FGSC A4
MADKKRQLLIISNRLPLSLQKVDGKYESTLSSGGLVTALSGVSKSTNVRWFGWPGSNIEDPEERKTANEALAENNAVGIFLDEALAHSHYNVFSNGIAWPILHYQSGVDFNEDAWKSYKKVNEIFADSVAESASDGDLIWIHDYHLLLLPAYLRDRLEKQGKKCPIGFTLHTPFPAEDFWRALPVQKELLAGVLACDLIGFHTDEYKRNFIECCSRGLDVSVKDDSIVYQGHTARTGTFVVGVDPAKFTDGLQTTEVKNRIKELEDEYKHKTVILGVDRLDYTKGLVQKLQGYDYFLRQHPELKNKVRLIQVAIPSREDVKEYQELERELSMLVGKINGEHSTPDGTPIIYLHHSVPFTDLTALYRIADICLITSRRDGMNLVAAEYVACQKDRFGVLVLSELAGAASFMSKGSITFNPSSAQQLADAVYKAATMSPEEKKQGYLQLEEFITNNTRYAPHLPTSSAQQLWYTDQ

SEQ ID NO: 44365 - protein, 163 aa, Triticum aestivum
  misc_feature (39)..(39): Xaa can be any naturally occurring amino acid
  misc_feature (112)..(112): Xaa can be any naturally occurring amino acid
  misc_feature (128)..(128): Xaa can be any naturally occurring amino acid
  misc_feature (137)..(137): Xaa can be any naturally occurring amino acid
  unsure (1)..(163): unsure at all Xaa locations
SFLAYRSWNSRGYRPTHAVLGSFLPNGKKPGSNITTDQXLKEYVWKTLKSGKVVPGYGHGVLRNTDPRYSCQREFALKYLPEDPLFQLVSKLYEVEPPILTELGKEKNPWPXMSDAPSGVLLYHFGIXLKARYYTVXFGVSRENRNWNLMSSGKRDHWTTALE

SEQ ID NO: 44366 - protein, 664 aa, Listeria innocua Clip11262
MFDNTDSLAVNTIRTLSIDAIQKANSGHPGLPMGAAPMAYALWSRVLNTNPKNSHWFNRDRFVLSAGHGSMLLYSLLHLSGFKLEIEDLKNFRQWESKTPGHPEYRYTDGVDATTGPLGQGIAMAVGMAMAERHLEAKYNKDGFPVVDHYTYALCGDGDLMEGVASEAASYAGHQQLGRLVVLYDSNDISLDGDLDKSFSENVKQRFEAYGWEHLLVKDGNDTAEILAAIEKAKQNTSQPTMIEVKTVIGFGAPNAGTSKVHGAPLGDEGILEAKKAYGWNYEEKFFVPEEVTTRFKETIGERGEKAEAAWNELFASYKAKYPELAKQLEDSLNNKLPADWDADLPVYDDSKALASRASSGEVINALAAKIPTIFGGSADLAGSNNTTIKTDGEFTKKTPAERNIWFGVREFAMGAALNGMALHGGLQVYGGTFFVFSDYVRAAIRLSAIQHLPVTYVMTHDSIAVGEDGPTHEPIEQLASLRAMPGLSVIRPADGNEVVEAWKLAITSTDTPHVLVLTRQGLPTLPNSAKLSAEGVKKGAYVISPAKGEVPEAIILASGSEVNLAVEAQKELQAQGTDVSVVSVPSFDLFAKQSAEYKESVLPNAVRKRVAVEMGASFGWERYVGLDGKVIGIDKFGASAPGETVIKNYGFTVENVVNTVKSL

SEQ ID NO: 44367 - protein, 331 aa, Ralstonia eutropha JMP134
MKPSILVTRAIFPDVIDHLAQYFEVDDNQQDVVLDAAALKARLAGKAGVLTNAGDRIDGGVVAALPDLRAVCNMAVGYNNLDIPALTAAGIVATNTPDVLTETTADFGWALLMATARRVTESEHYLRDGRWQRWSYDMLVGMDVYGSTLGILGMGRIGQALARRAAGFGMTVLYHNRSQLPEATERALNARYVSKAELLQQSDHLVLVLPYGPESHHAIGATELTQMKPTATLVNLARGGIVDDEALAHALKTRRIFAAGLDVFEGEPDVHPDLLTVSNVVLTPHIASASEKTRRAMAMLAADNLIAALDAGPNAGHPPSVIDPAVMGHRR

SEQ ID NO: 44368 - protein, 1016 aa, Schizosaccharomyces pombe
MDMIDEAITEVVRKIERERSVIHGALSMKRLTQNQTVHQQLHSNIEESKKSIIYLEERLEKLKLRKNGVRKSNSEKPSVGIEKNPSFSTTKSAKSFSSTSSNIDSNLDLLNYDTPLTISKISFLLQQLEFKLSVEEQYRKGIEKMAKLYERVHDRRSIAEAEKKYVESAQKITLLKQALKRYHDLHIEIDEEDVPSTESRGNLNARRPQSGLLKITVGSLRNVTHSAGISKQTEMIVAIRAEDLERARTRPSRTDRFNETFEIDLEKTNEVEIVVYEKKNEKLLLPVGLLWIRLSDLVEKQRRKKVEQEVSDKGWVSADKMINQRLSIFLPSALNNISKPESTDRPNTASGNQSVSAWFSLEPMGQINLTMNFTKHNTRKRPMDAGLGRQGAIRQRKESVHEVYGHKFLQHQFYQIMRCALCGEFLKNAAGMQCIDCHYTCHKKCYPKVVTKCISKSSDSASSEYEKINHRIPHHFESHTNIGANWCCHCGYILPLGRKTARKCTECGITAHAQCVHLVPDFCGMSMEMANRVISEIRTTKIYKAQQHKQKSSHHKHHHHKKSKSSSSKHKENDKASVSITTTTTPSITPADPVPTSPKPLAIEPVKRKPVHAGNLEVTSVSDNKLGATVQVVEQKVDDKADALTKPPSLDAVKEPIPVPSVETSVVAQDLTHKAKRIGLEDFTFLSVLGKGNFGKVMLAELKSEKQLYAIKVLKKEFILENDEVESTKSEKRVFLVANRERHPFLVNLHSCFQTETRIYFVMDFVSGGDLMLHIQQEQFSRRRAQFYAAEVCLALKYFHDNGIIYRDLKLDNILLSPDGHVKVADYGLCKEDMWHDNTTATFCGTPEFMAPEILLEQQYTRSVDWWAFGVLIYQMLLGQSPFRGEDEEEIFDAILSDEPLYPIHMPRDSVSILQQLLTRDPKKRLGSGPNDAEDVMTHPFFSNINWDDIYHKRTQPPYIPSLNSPTDTKYFDEEFTRELPVLTPVNSILTKEMQQHFEGFSYSCEDDKPSTTDNA

SEQ ID NO: 44369 - protein, 353 aa, Euglena gracilis
MAPVKIGINGFGRIGRMVFQALCDQGLLGTTFDVVGVVDMATDADYFAYQMKYDSVHGKFKHTVSTKKSDANLAEADIIVVNGHEIKCIMATRNPEDLPWGKLGVEYVVESTGLFTEADKARGHLKAGAKKVIISAPGKGDLKTIVMGVNHTEYQASMDVVSNASCTTNCLAPLVHVLLKEGVGVEKGLMTTIHAYTATQKTVDGPSKKDWRGGRAAAINIIPSTTGAAKAVGEVLPAVKGKLTGMAFRVPTPDVSVVDLTFLAEKDTSIKEIDSLLKKASQTYLKGILGFTDEELVSTDFVHDNRSSIYDSLATLQNNLPGEKRLFKVVSWYDNEWGYSNRVVDLLKHMSGN

SEQ ID NO: 44370 - protein, 463 aa, Zea mays
  misc_feature (322)..(322): Xaa can be any naturally occurring amino acid
  unsure (1)..(463): unsure at all Xaa locations
MDRLPESTRSMRKYASEAGGLRAARQGPHGRSLTARTAHSMSTTALRTKSKSAASLLRRVPFAPLRPVLANLQEVFLGTKLAVLFPAVPLAIAAQCAHFGQVWVFTLSLLGLIPLAERVSFLTEQIAIYTGPTVGGLLNATCGNATELIIALFALMGGQIEVVKCSLLGSVLSNLLLVLGTSLFCGGVVNLGSDQPYDRTQADVSTGLLILGVLCQSLPLMLRYAVGAGEHSVAAATTVLDLSRACSVVMLLAYVAYLFFQLKTHAQLFEPQEVDDGCEAEEDEQAVIGFASGFFWLAFNTVLIAILSEYVVGTIEPTSKSXWGLSVSFISIILLPIVGNAAEHAGAIIFALKNKLDITLGVALGSATQISMFVVPLSVIVAWIAGIQMDLDFKLIETGSLFVSVIVTAFTLQDGSSHYLKGILLLLCYIVIGACFFVTRQPASNNNGAGLSLPTGTLSAQAA

SEQ ID NO: 44371 - protein, 164 aa, Legionella pneumophila str. Paris
MGSLRKHQPGKTTDLLMSPFLRLQQEVNHAMSDFYNLFDPQRSANLEQFEHISLTPSLDIVEDKDNFKIEVEMPGMGEEDIKVSFCENRLTIEGEKTTSKKDENKNYISREISYGRYERTISLPLSADVDKATASFKKGMLWITIPKKTEARENVKTIKIEKAK

SEQ ID NO: 44372 - protein, 330 aa, Triticum aestivum
YNKFVQKSRLVPVRNSRDIVDPRVRLTEGYYVMDPKKAVEMVDENTICVAAILGSTLTGEYEDVKLLNDLLVAKNKETGWDVPIHVDAASGGFIAPFLQPELEWDFRLPLVKSINVSGHKYGLVYPGVGWVIWRSKADLPDELIFHINYLGTDQPTFTLNFSKGASQIIAQYYQLIRLGFEGYKHIMENCKLNAAVLKEGIDATGRFDVLSKADGVPLVAIRLKDSTNFSVFDISENLRRFGWIVPAYTMPADAEHVAVLRIVIREDFNRSLAQRLLTDINKIVGELDAHAVHAIKLSTAAAAEGASKSTVDAVTEAFKGLAGNKKAGVC

SEQ ID NO: 44373 - protein, 394 aa, Neurospora crassa
MSSILCQDEDKPCEYSGTYLANDSSTYEYISNHFDIKYVDGSGARGDYASDTFTIGNTKLNRLQFGIGYSSTNAQGLLGIGYTLSEVQTRAGLPAYNNLPAQMVADGLINSNAYSIWLNDLDALTGTILFGGVDAAKYEGDLLTLPVQTPEKGTYKNLMVTMTGLSLSQSQSSSSDKGNGDDTTQISKDNLALAVLLDTGSTLSYLPSELVKPLYDAIGIEYITDPDGKVDGYAPCHLMSSSQSVMFSFSSPLQIAVPMNELIVNRTFHGKLPRMPDGVTDACIFGIQERNGTGANTLGDTFLRSAYVVFDLDNNEISMAQTRFNATATDLKEIKKGKGGVPGAKAVENPVEATSGLSGNEGGIYVNGAACELNVGMGMAWGLLVGATMVVLGL

SEQ ID NO: 44374 - protein, 423 aa, Bdellovibrio bacteriovorus HD100
MNSRFERPSKPQRRVVVTGVGAVTPLGNTIEDSWAAAIRGQSGIAKITKFDTTGFDVTFAGEVKGFNTDQYVEKKEQKKMDEFIHYSIAASKMAVEMAKLELTEEVKNQAGVIIGVGIGGLANIEETAIKMKERGPGRISPFFIPSVITNLAAGQVTISLGLKGPNYSVTSACASGVHSIGDAVRYIRDGVTDVMLAGGAESTICGLAVGGFASMRALSTRNDAPEKASRPWDKDRDGFVLAEGAAVLCIESLEHAVKRGANILCEITGYGVSSDAYHMTSPAPEGAGGYAAMSMALKDSGLKAEDINYINAHGTSTPVGDGLETAAIKRLLGDHAKKVWVSSTKSMMGHALGAAGAIESAFCVMAIRDQVAPPTINLENPSEDCDLDYVPNEARKGKITNVINNSFGFGGTNASMIFSKYEG

SEQ ID NO: 44375 - protein, 698 aa, Rhodopseudomonas palustris CGA009
MASKAKTVQVQDKDKDDKVDAPEKDSVDAPSPLLDLSDAAVKKMIKQAKKRGFVTFDQLNEVLPSDTTSPEQIEDIMSMLSDMGINVSEAEDTEAEEEEAKEEADEELDNDLVEVTAKAVTETKKSEPGERTDDPVRMYLREMGTVELLSREGEIAIAKRIEAGREAMIAGLCESPLTFQAIIIWRDELNEGKIFLRDIIDLEATYAGPEGKNNIGEPGEEAAAEGEGGAPAHVAPPAAPPSATPFRPAQQRGAAPAEAEGEGAPEGDGDDDEFENQMSLAAIEAELKPKVVETFDKIADNYKKLRKLQEQDIANQLQNEQLSPSQERKYKKLKDEIIVEVKSLRLNQARIDSLVEQLYDINKKLVSFESRLMRLADSHGVARDDFLRNYQGSELDPRWLNRVSKLSAKGWKNFVHHEKDRIKDLRQEVQSMAALTGLEIGEFRKIVHSVQKGEREARQAKKEMVEANLRLVISIAKKYTNRGLQFLDLIQEGNIGLMKAVDKFEYRRGYKFSTYATWWIRQAITRSIADQARTIRIPVHMIETINKIVRTSRQMLNEIGREPTPEELAEKLGMPLEKVRKVLKIAKEPLSLETPVGDEEDSHLGDFIEDKNAVLPIDAAIQSNLRETTTRVLASLTPREERVLRMRFGIGMNTDHTLEEVGQQFSVTRERIRQIEAKALRKLKHPSRSRKLRSFLDN

SEQ ID NO: 44376 - protein, 495 aa, Escherichia coli
DRGIPRSYRTMEGFGIHTFRLINAEGKATFVRFHWKPLAGKASLVWDEAQKLTGRDPDFHRRELWEAIEAGDFPEYELGFQLIPEEDEFKFDFDLLDPTKLIPEELVPVQRVGKMVLNRNPDNFFAENEQAAFHPGHIVPGLDFTNDPLLQGRLFSYTDTQISRLGGPNFHEIPINRPTCPYHNFQRDGMHRMGIDTNPANYEPNSINDNWPRETPPGPKRGGFESYQERVEGNKVRERSPSFGEYYSHPRLFWLSQTPFEQRHIVDGFSFELSKVVRPYIRERVVDQLAHIDLTLAQAVAKNLGIELTDDQLNITPPPDVNGLKKDPSLSLYAIPDGDVKGRVVAILLNDEVRSADLLAILKALKAKGVHAKLLYSRMGEVTADDGTVLPIAATFAGAPSLTVDAVIVPCGNIADIADNGDANYYLMEAYKHLKPIALAGDARKFKATIKIADQGEEGIVEADSADGSFMDELLTLMAAHRVWSRIPKIDKIPA

SEQ ID NO: 44377 - protein, 262 aa, Thermoanaerobacter tengcongensis MB4
MNRIDRRFDDLKKEGKKALITFITAGDPDIDTTYDIVLALEEAGADIIELGIPYSDPLADGPTIQASSQRALAKGIKIKDIMDLVMRIREKSDIPIVYLVYYNSVFKYGIEKFLEDSKNAGVDGLIIPDLPLEERKEVLDVADKYEIYLIPLVAPTSKERIKGITENGKGFVYCVTLTGVTGAREEITTDLEEYMRLVSSYTSMPKALGFGISGPEMARKLKSLSDGIVVGSAIVERIAKGYNRCEMLKEVKEFVLSLREVL

SEQ ID NO: 44378 - protein, 222 aa, Burkholderia pseudomallei K96243
MNERQWSAVDDFFCSQLAPSDPVLDAALASSRAAGLPAINVTANQGKFLNLLATIRGARRILELGTLGGYSAIWLARALPPGGVLITLEANADHAALARENLGRAGLGGVASVVVGRAKDSLERLIAERAEPFDLIFLDADKDSYPAYLPPMVALSRPGTVIVADNVVRQGRVADRRNQDPDALGVREYFRLIAAHPRLTTTALQTVGSKGWDGFALTIVTA

SEQ ID NO: 44379 - protein, 373 aa, Vibrio vulnificus YJ016
MSIQSFIPPRRILMGPGPSDISPQVLQALSRPTVGHLDPLFIQMMDELKQLLKYAFQTKNDFTIAVSAPGSAGMEACFVNLIEPGDKVIVCRNGVFGERMRENVIRAGGEAILVDDEWGTPVSIEKVEQALTQHPDTKILAFVHAETSTGARSDAETLGKLAKQYGVLTIVDTVTSLGGIPLKVDEWQLDAVYSGSQKCLSCVPGLAPVTFSSAAIEKIQSRKTPVQSWFLDQSLVLGYWSGEGKRSYHHTAPVNSLYSLHEALLMLKNEGLENAWARHEKMHNKLKVGLEKLGFQFVVDEEYRLPQLNAIYVPEGIDEAKVRSHLLETYNLEIGAGLGALAGKAWRIGLMGYGAREENVALCLRALEESLTQ

SEQ ID NO: 44380 - protein, 486 aa, Bartonella henselae str. Houston-1
MANLYDVIVIGSGPGGYVTAIRAAQCGFKTAIVEREHLGGICLNWGCIPTKALLRSAEIKHFSEHLKDYGLKLNGSIEADIKDVVARSRAVSARLNAGVGFLMKKNKIDIIWGEAKFTKKAKGSQLVEITVSSSSKPIMQPQNPVPKGTLGEGIYQAKHIIIATGARPRILPGIEPDGKLIWTYFEAMIPHVMPKSLLVMGSGAIGIEFASFYHDMGASVTVVEMMPHIMPAEDIEISTFARKRLEKKGIRILSQAKVTKVEKAVDSITAHIDVKGKRETITADRLISAVGVQGNIENLGLEALGIKTDRGCIVTDEWSWTGVEGIYAIGDVAGPPMLAHKAEEEGVICIERLARLENIHPLDKRKIPGCTYCTPQVASVGLSEAAAKEAGYDIRVGRYSFSANGKAIALGEDQGLVKTIFDKKTGQLLGAHMVGAEVTELIQGFVIAMNLETTEEELMHTVFPHPTLSEMMKESVLDAYGQVLNA

SEQ ID NO: 44381 - protein, 344 aa, Campylobacter upsaliensis RM3195
MNIESLKLSVNSSIEKALEIIGKERVRLGVVVGKKGEFLGIISDSNIRKALINGKTLKSNIKEIYTKNPITIAENTSKQKLLELSAKTDIYDFPVLNKKGEVVSIRSISSLLSTKKLPFYVILMAGGLGSRLKELTKETPKPMLKVGKKPILENIIQRLHAQGFEKFIFCVNYKRQIIENYFKKGEEFDIKISYIKERKKLGTAGALSLIRQKMEQSFVVMNADILTELDFNELLKAHQKSGALMSVCVREFHHQVPYGVIKQKNGFITHIEEKPTQSFLVSAGIYVCEPQILELLEKNAYLDMPELIQKVMQKGRANTFLIEDYWIDIGRLEEFKRANDEIKE

SEQ ID NO: 44382 - protein, 82 aa, Triticum aestivum
MALSRRMAASALLLLVLLVATEMGTTTTKVAEARDCLSQSFKFKGACLSSSNCAAVCRTEKFPDGECHRQHLERKCFCKRPC

SEQ ID NO: 44383 - protein, 548 aa, GIBBERELLA ZEAE PH-1
MGLPWEIITATSAISTLTLAWTHDDWSKSQLLGRFPVFWIAGLAVWIVWAVWVYPLLVSPLRHLPGPSGNHWLMGQSKKIMAEPSGVPMRQWASEIPNDGLLCYRGFFNQERVMVSSPKALAEVLVTNSYAFPKPSHFRWSIGRILGVGVLLAEGDEHKMQRRSLTPAFAFRHIKNLYPVFWRKAREVTRTMMAEFGQQEETQVEISGWASRATLDIIGLAGMGRDFGAIQNPNNTLAQTYSKIFKPSRQAQILAFVGMIIPMEFITKLPFRRNEDIAKAASDIRAICRDLIQEKKAKMANKEQADVDILSVALESGGFTDENLVDQLMTFLAAGHETTASAMTWAIYMMARHSDIQTRLREEIREHLPSVDSDVDITSLDIDRMPYLNAVCSEVLRYYAPVPLTMRDAAYDTTILGQTIRKGTRIVIVPWATHFDHDLWGPDADQFNPDRWLSAGGENKIGADRKAASGGANSNYAFLTFLHGPRSCIGSSFAKAEFACLLAAWIGRFEFSLANPEEMDEKNVEIRGGVTARPAKGMHVKVKVIGGY

SEQ ID NO: 44384 - protein, 492 aa, Yarrowia lipolytica CLIB122
MSGKRVPTYTTTNGNPVKDPLASQRIGKHGPLLLQDFALIDLLAHFDRERIPERVVHAKGSGAYGEFEVTDDITDLNCADFLSKIGKKTKTFTRFSTVGGEKGSADAARDPRGFATKFYTDEGNIDWVYNNTPVFFIRDPSKFPVFIHTQKRNPETNLKDATMMWDYIANNQECCHQIMVLFSDRGTPANYRQMNGYSGHTYKWIKKDGSFNYVQIHMKTDQGIKNLTNDEAVALSGTNPDHAQEDLFNSIKSGSFPSWTCYVQVCTPEQAEKLKWSVFDLTKVWPHDQFPLRRFGKLTLNKNVQNYFAETEQAAFSPSNTVPGWETSADPVLQSRLFSYPDTQRHRLGTNFAQIPVNCPYHAHTPYHRDGQMAVNGNSGSLPNYPSSFEPLQYRQDINLHEKHEKWVGEAVAYQWVVGTDGVDFQQPAELWKVLGKTPDQQEHLVYNIAVSLSGARPEVQDKTFGMFDKVDAHFGKLVRDATLQRSPRSKL

SEQ ID NO: 44385 - protein, 184 aa, Saccharomyces cerevisiae
MSSLISKTIKYDPAKDKLITLACGCFWGTEHMYRKYLNDRIVDCKVGYANGEESKKDSPSSVSYKRVCGGDTDFAEVLQVSYNPKVITLRELTDFFFRIHDPTTSNSQGPDKGTQYRSGLFAHSDADLKELAKIKEEWQPKWGNKIATVIEPIKNFYDAEEYHQLYLDKNPQGYACPTHYLREM

SEQ ID NO: 44386 - protein, 109 aa, Methanosarcina acetivorans C2A
MARDIGLNIPAPSEECDDAYCPFHGTLPVRGQILVGTVVSSKMDNTVVIERQYMKMVSKYQRYEKRRSKIHAHNPACISAKVGDIVTIAECRPISKTKSYVVVKAEVPK

SEQ ID NO: 44387 - protein, 663 aa, GIBBERELLA ZEAE PH-1
MTSSATTLKGQPLDKAVLESILRRRMFYTPSFEIYGGVGGLFDYGPPGCALQAAVIDQWRKHFILEEDMLEVDCSVLTPHEVLKTSGHVDKFADWMCKDPKNGEILRADHFVEAILEARLNGDKEARGQKVEEKEEDPKKKKKKAKTEAVKLDDAVVQEYEEVLARIDNYGGPELGELIKKYDLRNPATGAQPAEPVSFNLMFQTTIGPSSNYPGYLRPETAQGQFLNFAKLLEFNQSQMPFASASIGKSYRNEISPRAGLLRVREFLMAEIEHFVDPEGGKKHARFHEVEDVELVLLDRDTQLSGKTQTKAVKIGQAVKDGLVDNETLGYFLARIHQFLQKIGVDMNKLRFRQHMANEMAHYACDCWDAELFTSSGWIECVGCADRSAYDLSVHAKKTGAPLVVREQRETPLVIEEWQIDIERKKFGPQFKKDAKTVEAALLATPQEQREKLAKELSDNGSITLEVAGVGDGKVQVSKDSIAIEFRKRVENTREFVPNVIEPSFGIGRILYSLMEHSFWTRGTEGGDEARGVLSFPPIVAPTKVLLVPLSSNPQFKPLLKQLSQRLRSAGISSRVDDSSASIGKRYSRNDELGTPLGITIDFQTAQDGSVTLRDRDSTNQVRAEQEKIIDAIKSLVDGSKTWAQIESELPKFEGQEVEVAAR

SEQ ID NO: 44388 - protein, 366 aa, Rosa chinensis var. spontanea
MASPLEIEIFGCPSIHVDAKRKEEESSFHHAVQLMLSSVLPMSMQLAIDLGLFDVIAKAGTDAKLSALDIAAKIGTKNPHAPVTLDRILRLLTAHSVLSCSVVTGQRLYSLTAVSKHFVTSEDGASLSPVMASIQANVVMNSWSQVKDAIVEGGIPFNRVHGKHFFEYADSDPRFNQVFNSGMVNLTTLVMRRILDSYQGFEHLTQVVDVGGGLGVALGLITSRYPHIKGVNYDLPHVIKHAPHYPGVQHVGGDMFSNVPSGDAIFMKNILHDWMDEQCIKLLKNWYTAIPDNGKVIVVEALVSVEPDTSPAEKITSDFDVLMMTLSPGGKERTQHEFMDLANAAGFSAIKYECLSSYLRVMEFIK

SEQ ID NO: 44389 - protein, 1683 aa, Colwellia psychrerythraea 34H
MIKLNKSSFIVFFFLQSFFLQNGMAENLPTDLVTWAHANPVVHIGVDGTFPPFDYIDEQGVTAGAGKLIRQQLSAILPVDLQETSVSDFRLEYDDMLRGNIDAISVCGNIEQRRDEVLFTKPFLQMTPIVVVNKNSDIKSEMDITSELKIASIAGYADANFAKQLSVNSKGLSSNLQGYQSIESGKYDVFITYLYLYKYMLKKHDFKNIKPIAISQFESLPIGFCVNKNKPQLVGLLNWGIDQLGDDFILAMQSKWAESSLDEGQNSRAHIDKSISLTSVFIYAVIFVLLALFFARKFASTIAIKLDTLAFRTTYFTVLILIISLSTGGIYLFLNDFKDQLLIDQKETFNVTRDVTKKTLAGWYRERELLAHNIAKSKSFKRLVNQLVIASEIDDTIKLAQAKKALRVYFSKRPYTTQGGRAYTITDVQGRYLLNLVQSAEGKKSPIISQRPELFNEVLMGRTEFIPPVWANVNIDGNRNAEDKDAEVFIATPVRNEQQEIIAVLGFRFDPDREFSQLFIDGRLGKSFESFAVDSRGYMISSSRFTSELQQKGIVPAGESTVLNVRLQNPETNPIVQAAKFKLNGQNLHGYTNYRGKTVVGQWISLKNSNITVVSEIELSEMLAEYYDVRNLLLIGLIISSAFILSISIFMITISNRANDISRRSQQELAEQVTIRTKELAASEQKSKLINSSVADGILGVDKLGHFIFANESATKITGYSEEQILSSDLISLFAGDNKENLTFEDTEVYKAIQSKEVIRISNEYVLMSGARELPLEYSISPVEDDESELACVIALQDITLRVQETERLEKMLEHLPVCMVIMNQNDEVEQINQTGIELLGFERDEIVGNPVDLFIPQEQVESHKALLKKFFQEETVIDTRSLERDFKVKHKSGKLIEIQAVYTPVHFHNGLYAAVMVRDITLDRQAEFALLEAKRISDDASKAKSDFLANMSHEIRTPMNAIMGMSHLALGCELDRKPKNYVTKVYKAAESLLGIINDILDFSKIEAGKLDIEVIEFSLHDTFADLANIIGLKAGEKNLELLFDISPDVPVNLKGDPLRLNQILINLAGNAVKFTEQGQVVISVNVVTNVSTSHCDDINLEFSVKDSGIGMDDEQQKKLFQSFSQADSSTTRKYGGTGLGLTISKKLVELMNGQIWLESKAGEGSCFSFTTTLQVSDVIDNRLVEQQKSFLADKRILIVDDNLLALDVLSSILKSFHCHVVAANSGEEAIELVKQATLTFDFIMLDWNMPDLDGIETYHIIKSQNNYQDNQFILVTSNANDNEAVDQLKKRINSVLVKPVTSSSIFDEMMRLNGDEAYSNTREMKRDDELIQNQQHLSGAKILLVEDNELNQELALELLKQSNIDVELAENGAIAVEKFSSRHFDGILMDLQMPVMDGFTATKIIRESDSSIPIIAMTANAMVSDKEKVLASGMNDHITKPINVNTMFATIAKWVSPSIKLDHDIDKAKLSVYTLPEKVISIPDFNTINTSAGLAVANGNKSLYVKLLGRFVSGQDDFVERFKVAMLKQDKEEVTRFAHTLKGSAGNIGANALQGYADQLELVCANDANTDELVNLLDQVTEELTLVLNELTEYLAKENSVESTAPINDFNFNEEFTVQLAQLLELIENFETESIELAEDILNQLKGTKQEALFEKIYQQIESYEFTEAETALNEFIDVLNN

SEQ ID NO: 44390 - protein, 365 aa, Rosa chinensis var. spontanea
MGSTGETQMTPTQVSDEEANLFAMQLASASVLPMVLKAAIELDLLEIMAKAGPGAFLSPNDLASQLPTKNPEAPVMLDRMLRLLASYSILTYSLRTLPDGKVERLYGLGPVCKFLTKNEDGVSIAALCLMNQDKVLVESWYHLKDAVLDGGIPFNKAYGMTAFDYHGTDPRFNKVFNKGMADHSTITMKKILETYKGFEGLTSIVDVGGGTGAVVNMIVSKYPSIKGINFDLPHVIEDAPQYPGVQHVGGDMFVSVPKGDAIFMKWICHDWSDEHCLKFLKNCYAALPDNGKVILGECILPVAPDTSLATKGVVHIDVIMLAHNPGGKERTGQEFEALAKGSGFQGIRVACNAFNTYVIEFLKKI

SEQ ID NO: 44391 - protein, 412 aa, GIBBERELLA ZEAE PH-1
MRGNGTKSLTIVIKLGTSSIVDEKTHEPLLPILTLIVDTAVKLRKDGHRVVIVSSGAIGVGLRRMDVEKRPKHLAQLQALAAIGQCRLMSLWDSLFTHLRQPIAQILLTRNDIADRTRYFNAQNTFHALLEQGVIPIVNENDTLAVAEIKFGDNDTLSAITAAMIHADMLFLMTDVDCLYDKNPRTHPDAKPIEVVEDIAALQADVSSAGSSLGTGGMSTKIIAARLGTSAGVTTVITRSSNPGNVLHIVQYLQSIQRGNTPPSPDERAEGLTRSASALSLSASNGNGAPWPPLHTRFVPANNPIRDRHFWLLHTPYPHGTLYIDSGAYKALVGKAGLLPVGVVDVEGNFAQQEVVRLVTVKRRSTPGPDVSMSLTDSMLASLGKVADQAKRRDRKMDKTGASEYISTYAAL

SEQ ID NO: 44392 - protein, 331 aa, Kluyveromyces marxianus
MVRIAINGFGRIGRLVLRIALSRKNIEVVAINDPFITVDYAAYMFKYDSTHGRFDGEVSHDGKSLIIDGKKVLVFQERDPATLPWGAEKIDIAIDSTGIFKELDSAQKHIDAGAKKVVITAPSSTAPMFVVGVNEDKYAGQTIVSNASCTTNCLAPLAKIINNAFGIEEGLMTTVHSITATQKTVDGPSHKDWRGGRTASGNIIPSSTGAAKAVGKVLPELQGKLTGMAFRVPTVDVSVVDLTVKLAKPATYEEIKAVVKKASENELKGVMGYTEDAVVSSDFLGDTHSSIFDAAAGIQLSPQFVKLVSWYDNEFGYSTRVVDLVELVAKN

SEQ ID NO: 44393 - protein, 581 aa, Nocardia farcinica IFM 10152
MRRILRLMLLAAGDYRDEFRRTLWCALLGSIVQALAYATLIPILYELSRPEVDITAAWTWFGVLVACWVVQAGLHYGQLRFEFGRWADVLAATRLRLGDKLRTMPQADLERRAAGDLTTVMGSNVANATMSSSGMALLFIQMVTVPAVIGVLILAVDWRLGLVLAASLPFAVLFVRRIQQITGAGARRTDAADAAAASRVVEYVQGLPVLRATGQIGSASRRLVETLEEQNAAMSAMQKRLTWPGLLAAGVVQLCLVAMVALGAALVLELRMSAALLIAVVAAAVRFAEPMSTMANLSAIFEITDSALERVGAVLDAPALPVGDPRARITGHDLAVEDVHFTYPDGAPVLRGVSFTAPARSLTALVGPSGSGKTTVTRMLTRYADPDAGSIRIGGVDLRELDPVEIYRNIAVVFQDVYLFDDTIRANIAMAAPGATQEQIEAAARAANVHTFVTRLPHGYDTRVGEIGGALSGGERQRISIARAILKDAPIVLLDEPTAALDTESEVAVQEAIDALVAEKTVVVIAHRLSTVVAADQILVLEDGVVAERGTHEELLARQGRYHAMWAAQTRARHWRVTASV

SEQ ID NO: 44394 - protein, 577 aa, Novosphingobium aromaticivorans DSM 12444
MIASGGELRHERRRHHQHPQQQRGGNGPGDGHLQARGNADEAHLALGAHEEFAIREPAAHAGNGFPQPQRGKFHYWQGKRPPAVLVIRSRRRGNYPPVLAEANPIGSGRGESCESPDESREPWCVYASRAGKCASESPRRMTDAARSGRAPAMSTQPATIADSATDLVEGLARAARSAQRQLARMDSPVKERALTLAAAALRAAEAEILAANAQDMANGAANGLSSAMLDRLKLTPERLAGIADAVAQVAGLADPVGEVISEAARPNGMVLQRVRIPVGVIGIIYESRPNVTADAAALCVRSGNAAILRGGSEAVHSNRAIHKALVAGLAEGGVPAEAVQLVPTQDRAAVGAMLGAAGLIDMIVPRGGKSLVARVQADARVPVLAHLDGINHTFVHASADPAMAQAIVLNAKMRRTGVCGAMETLLIDATYPDPHGLVEPLLDAGCELRGDARARAIDPRIAPAADNDWDTEYLEAILSVAVVDGLDEALAHIARHASGHTDAIVAADQDVADRFLAEVDSAIVMHNASSQFADGGEFGLGAEIGIATGRLHARGPVALEGLTTYKWLVRGSGQTRP

SEQ ID NO: 44395 - protein, 617 aa, Nocardia farcinica IFM 10152
MTMGGTAAELRTDEATPPPSASAESTAVSPGSALFRVTEPVRGRLTASLAIAALGGAAGVTGFVGTALALGELFDADTRTGTVVAFLVLAAAGFLARFALRAWSFLLSHLASFDLEQRLRSDLAAHLGRMPLGEAQRLGSGAVKKIVQDDVRGLHMAVADAVPLAGFTLAQPVAALVALGLVDWRLLLAVALFLPVVFVGMQLSLRDYVETRRRYDEANEAINAATVEFVQGMPVVRTFDDGTVSFRRFVDRVRQFNFATTNWQNNNRSAMIFANLTVAPLPTIVIVTAVGIWLTSTGSMSPAQLIAAILIGTLPVESVVPLMNLSNLLNDSKAGAARIVELLDIEPLPEPADPQTPADGSIEFRSVRFSYPGADRPALDGVDLTIPSGSVCALVGSSGSGKSTVARLIPRFWDVDSGQVLVGGVDVRQIASQDLLATLAMVFQEPFLLSDTVAENIRLARPSATDAEVEAAARAARAHDFIVSELPRGYDTQVGERGARLSGGQRQRITIARALLADAPIVVLDEATSFADPENEAAIQDAIAELTRGRTVLVVAHRLSTIVDADRIVVLESGRVAESGTHTELLAAGGRYARLWEHHERARGWGLGSSTKEAMRR

SEQ ID NO: 44396 - protein, 367 aa, Triticum aestivum
DPRVPPSACFQTLEGAWQDLCADIRDGVLSERITVPSIRGAVSKILKPNPELADSIHNKCAGLSNWYGVIPALWPKAKYVYGIMTGSMEPYLKKLRHYAGHLPLISADYGASEGWVGSNIDPTVPPEQVTYAVLPQTGYFEFIPLEKPTGEETENSAAIHYIESEPVGLTEVEVGKIYEVVLTTFAGLYRYRLGDVVKIARFHNSTPELQFICRRSLVLSINIDKNTEKDLQLAVEEAAKLLEGEKLELVDFTSYVEKSSDPGRYVIFWELSSEATDDVLSGCANALDLAFLDAGYMGSRKIKTIGPLELRVLRKGTFREILLHFLTLGGAVSQFKTPRFVSPANGKVLQILNRNVAKSYFSTAYGL

SEQ ID NO: 44397 - protein, 543 aa, Thermus thermophilus HB27
MAKILVFDEAARRALERGVNAVANAVKVTLGPRGRNVVLEKKFGSPTITKDGVTVAKEVELEDHLENIGAQLLKEVASKTNDVAGDGTTTATVLAQAIVREGLKNVAAGANPLALKRGIEKAVEAAVEKIKAPAIPVEDRKAIEEVATISANDPEVGKLIADAMEKVGKEGIITVEESKSLETELKFVEGYQFDKGYISPYFVTNPETMEAVLEDAFILIVKKKVSNVRELLPILEQVAQTGKPLLIIAEDVEGEALATLVVNKLRGTLSVAAVKAPGFGDRRKEMLKDIAAVTGGTVISEELGFKLENATLSMLGRAERVRITKDETTIVGGKGKKEDIEARINGIKKELETTDSEYAREKLQERLAKLAGGVAVIRVGAATETELKEKKHRFEDALNATRAAVEEGIVPGGGVTLLRAISAVEELIKKLEGDEATGAKIVRRALEEPARQIAENAGYEGSVIVQQILAETKNPRYGFNAATGEFVDMVEAGIVDPAKVTRSALQNAASIGALILTTEAVVAEKPEKKESTPASAGAGDMDF

SEQ ID NO: 44398 - protein, 240 aa, Arabidopsis thaliana
MEYPWLQSQVHSFSPTLHFPSFLHPLDDSKSHNINLHHMSLSHSNNTNSNNNNYQEEDRGAVVLEKKLNHNASERDRRRKLNALYSSLRALLPLSDQKRKLSIPMTVARVVKYIPEQKQELQRLSRRKEELLKRISRKTHQEQLRNKAMMDSIDSSSSQRIAANWLTDTEIAVQIATSKWTSVSDMLLRLEENGLNVISVSSSVSSTARIFYTLHLQMRGDCKVRLEELINGMLLGLRQS

SEQ ID NO: 44399 - protein, 637 aa, Shewanella oneidensis MR-1
MNDWSIEAARAGYNVTHWSQGFYGISDEGEVTVSPDPKNPDHKIGLNELAKDMVKAGVALPVLVRFPQILHHRVNSLCQAFDQAIQKYEYQADYLLVYPIKVNQQKTVVEEILASQASKEVPQLGLEAGSKPELMAVLAMAQKASSVIVCNGYKDNEYIRLALIGEKLGHKVYIVLEKLSELKMVLAESKRLGVKPRLGLRARLAFQGKGKWQASGGEKSKFGLSAAQILTVVDQLKQSDMLDSLQLLHFHLGSQIANIRDIRQGVSEAARFYCELRELGASINCFDVGGGLAVDYDGTRSQSNNSMNYGLSEYANNIVNVLTDICNEYEQPMPRIISESGRHLTAHHAVLITDVIGTEAYQVEDIQPPEEESPQLLHNMWQSWTELSGRADQRALIEIYHDSQSDLQEAQSLFALGQLSLAERAWAEQANLRVCHEVQGLLSTKNRYHRPIIDELNEKLADKFFVNFSLFQSLPDAWGIDQVFPVLPLSGLDKAPERRAVMLDITCDSDGIVDQYVDGQGIETTLPVPAWSAESPYLIGFFMVGAYQEILGDMHNLFGDTNSAVVSIEENGMTNIESVLAGDTVADVLRYVNLDAVDFMRTYEELVNQHIAEDERAQILEELQVGLKGYTYLEDFS

SEQ ID NO: 44400 - protein, 339 aa, Pseudomonas fluorescens Pf-5
MFALMHSTRLESLHLSVDPCTGLKAVIAIHDSRLGPALGGCRYLAYPDDSSAVTDAARLAQGMSYKAALAGLPQGGGTAVIIRPAHVESRAALFEAFGRCVEQLDGRYITAIDSGTSVADMDCIAQQTRYVTSTSAAGDPAPHAAMGVFAGIRSTAMARLGSDNLEGLRVAIQGLGNVGYALAEQLHAAGAELLVSDIDAGKVQLAMEQLGAHPIANDSLLSTPCDILAPCGLGAVLNSLSVAQLRCSAVAGSANNQLTNLQVADQLERRGILYAPDYVINSGGLIYVSLKHRNTELPVITAHLSKISQRLTEIFAHAQAEKRSPARVADELAERVLYR

SEQ ID NO: 44401 - protein, 266 aa, Oryza sativa (japonica cultivar-group)
MGRSPCCEKAHTNKGAWTKEEDQRLIAHINQHGEGCWRSLPKAAGLLRCGKSCRLRWINYLRPDLKRGNFTDEEDELIIKLHELLGNKWSLIAGRLPGRTDNEIKNYWNTHIKRKLLARGLDPLTHRPLNAAAAVAGHHHLAAGGSSCSPDATSGHSSCSDGDEYRGGIDLNLSISPPSSSSQPSSPPPPPHEAEARRAGATASYTYHHHYSETREKICLCLNHLGLHGGDECSCGGSSASSSSSPPPATASSRAFTFANASSSTV

SEQ ID NO: 44402 - protein, 368 aa, Desulfitobacterium hafniense DCB-2
MKIKVSRIFLSVTMLIFLSIVGTGCSEAAVPAESAKRFPYNPNMGVSYEGKELQEIWIAGGCFWDVDAYLSRIYGVADVTVGYANGNTENPTYEDVCYRDSGHAETAYVRYDPERVDLETILEYFFKIIDPTSLNRQGNDVGTQYRTGIYYQNELDREIILKVITEEQNKYKKPIVTEVLPLAHFYEAEEYHQDYLVKNPHGYSHIDFSPLEEQKLVNIDPGLYNKPSDDVLRKTLTDLQYAVTQKDATERSFANDYWDHHEQGLYVDVVTGEPLFASKDKFDSGTGWPSFTRPIAPEVIIEKEDSTLGMKRIEVRSRAGDSHLGHLFNDGPPEDGGLRYCINSAALRFIPLSELKEEGYGQYLSRIE

SEQ ID NO: 44403 - protein, 280 aa, Saccharomyces cerevisiae
MTVEYTASDLATYQNEVNEQIAKNKAHLESLTHPGSKVTFPIDQDISATPQNPNLKVFFFDIDNCLYKSSTRIHDLMQQSILRFFQTHLKLSPEDAHVLNNSYYKEYGLAIRGLVMFHKVNALEYNRLVDDSLPLQDILKPDIPLRNMLLRLRQSGKIDKLWLFTNAYKNHAIRCLRLLGIADLFDGLTYCDYSRTDTLVCKPHVKAFEKAMKESGLARYENAYFIDDSGKNIETGIKLGMKTCIHLVENEVNEILGQTPEGAIVISDILELPHVVSDLF

SEQ ID NO: 44404 - protein, 449 aa, Glycine max
MGSHQQEPWLLENGKPRVLTKETRHGRSAHRMSSTSLRKKSSRTLVSKVPCATLRNFLLNLQEVILGTKLSILIPAIPAAIVAECFGFGRPWIFILSLLGLTPLAERVSFITEQVAFYTGPTVGGLLNATCGNVTELIIAIFALSSNKIAVVKYSLLGSILSNLLLVLGTSLLCGGIANLKVEQKYDRRQADVNSLMLLLGLLCYLLPMLFKYSGASAALTVDPSLHLSRASSIVMLIAYVVYIVFQLWTHRQLFEAEDEGEDGEDGEEEQAVIGLWSGIAWLVGMTVFIAVLSEYVVDTIEDASDSWGLSVSFLSIILLPIVGNAAEHAGAIIFAFKNKLDISLGVALGSATQIAMFVVPLCVIVAWIMGIDMDLNFNLLETGSLALAIIVTGFTLQDGTSHYMKGLVLLLCYIVIGACFFVQRTPFNNQADVTNITLKPTTNAVLSA

SEQ ID NO: 44405 - protein, 381 aa, Picrophilus torridus DSM 9790
MSRRLLMHVGPVTIDNDVLSAGLVNNAGFASPEFVEAMKYALNGFLYTVKSGKYMPFILPGSGTLAMESMTSFLKPNDSVLIISNGVFGDRWKNIFSRYNLNIDYLKAPPGKAVSLNEIENIKKHYRLAVMTHVETSTGVRFDVKSAAGILRNISDIIVADGVASISGENMEADKWDVDVVFTASQKALGAPPGAALLAISPEAVSELNDVSLSGFYNNLYAWKDVMTSILDNKSAYYTTPPVHIVFSLARAFELIKKEGIDERIKRHYIVAESIRSGIDGLGLGIVAGDDYKSNTVTAVMIDNPSEFISGLYSKNIEIASGVVPELKDRYVRIGHMGWLNINDAAATVSAMERVLHEMKYNISPGQGLKRMQEFLFNNNY

SEQ ID NO: 44406 - protein, 151 aa, Methanosarcina acetivorans C2A
MSDLSNQRKLASKVLGCGLDRVWLNPEASEEIASAITREDIRGLIEEGTIKAKPVKGVSRGRARALAAKRKYGHCKGHGSRKGKKGARTPKKEQWIKKIRALRRRLKELRADGALDKSVYCRLYRKAKGGEYRSVSHLNSHLESEKLLKKE

SEQ ID NO: 44407 - protein, 457 aa, Iris hollandica
MVGILVYVALFILSLLLFLTAAAKLHNSKSKIKNQAPSPPSLPVVGHLHLLKKPLHRSISLLSARHGPILLLRFGSRPALAVSSLPLAEECLSGKNDLAFANRAHFPHEAAPLQLLTLGSANYGPHWRMLRRISAVELLSSHRINSFSQLRSEEVHSMISTLFRESSDKELNRVELKSKLFELAMNNMMRMIFGKDLASSEGAGRFREMVKESHSLLGASTRLGDFFPFLGWMDWRARRMVLRLVRRRDEFLQSLIDAHARKMEEVEEKTMIRVLVELQKSNRESNNDEGFMLKPLIIGLLQAGTDTSSDTIEWAMSLLLNNRDKLKKARDEIDARVGKERLLRESDLPNLPYLQCVITETLRLYPAAPLLVPHESAEECTVGGYAVPQGTMLLVNAYAIRVVGIVLGTLIQCFEWERVGEEEVDMTEGSGLTLPRANPLEAICRPRQSMISVLAGL

SEQ ID NO: 44408 - protein, 310 aa, Picrophilus torridus DSM 9790
MYRVLVTEKIPFTDYYKDIDFIYKPKNMDSHQWLMESINDADGILITLSDRIDSEIIDAAKKLKVISTYSVGYDHIDVKYALSRNIKIGYTPDVLTESTADFIFGLIICIARRICSGYETIISNKWEYRWKPDFMLGHDVYGKTLGILGLGRIGHAVMRRASGFDMNVIYYNRTERDVNGHVGLNELFSRSDFIVITLPLNDETRNIVNKDLISKMKKTAYIINASRGHIVNEDDLYNALLNRDIAGAALDVFDNEPVRADNRFVKLDNVLLTPHMASASYETRRDMANLALKNLELGLHGLNPEKYVNI

SEQ ID NO: 44409 - protein, 491 aa, Methanosarcina acetivorans C2A
MTLRDTLEPFFNKLPAVASPEKHVHFKDKLWWTLGVLVLYFALANVPLFGMSQDSIDLFESYRAFFAGASGSLVLLGIGPIVTASIVLQLLVGADIIKMDLSDPKDQAFFQGAQKFLVFVMIILEALPQLLGGYIQPDPGLAATLNVGLGVITLLLLVQIFIGGTLILFMDEVVSKWGIGSGVGLFIVAGISQQIVTGIFNWEFEEGLPVGLIPKWIYIAQNTGADYLFSGEGLMFLLVRGGILALLSTVAIFLLVVYVESTRIEIPLAHSAVRGARGRFPVKLIYASVLPMILVRALQANIQMVGIILASRGITFLGEFSGSKPLNGIMYYLAPIHSPYDWIPSLVRESFASYGATAPAIWQIGLHVLADAIMLIGGGIIFALFWIETTGMGAKPTAQKIFNSGMQIPGFRRNIGSIEKVMQRYIPKVTVIGGAFIGILTLVASLLGTLGSAGGTGLLLTVSIVYRLYEDIASEQMMEMHPMIRSFFGEQ

SEQ ID NO: 44410 - protein, 266 aa, Oryza sativa
  misc_feature (104)..(104): Xaa can be any naturally occurring amino acid
  unsure (1)..(266): unsure at all Xaa locations
CSVSPDIELWCEFIGIRSMYYCGPLTSFDWNDAYPCRIGTFSIDTTCTIWDVEREAVDTQFIAHDKEVYDIAWGGAGVFASVSADGSVRVFDLRDKEHSTIIYXGSPGCRGGSSNSAGADGGAASPTPLVRLGWNKQDPRYMATIIMDSPKVVVLDIRYPTLPVVELHRHHSPVNAIAWAPHSSCHICTAGDDSQALIWDLSSMGTGSNNGGNGNGNAAAAAAAEGGLDPILAYTAGAEIEQLQWSATQPDWVAIAFSTKLQILRV

SEQ ID NO: 44411 - protein, 95 aa, Brassica napus
GAMYSFPQIRLPPGALQAAKQAGKVPDVFYCLKLLEATGISTVPGSGFGQKEGVFHLRTTILPAEEEMPEIMDSFKKFNDEFMAQYDNGFGYSRM

SEQ ID NO: 44412 - protein, 388 aa, Arabidopsis thaliana
MTIMSDLPRDLLAEILSRVPLTSLRAVRLTCKKWNDLSKDRSFLKKQIVETKKKQLESKEIEVIMMRNFRVYLTSIDIHNNVDPSFTPKGTLISLSDDANHHQVDNVSRVFHCDGLLLCITKDLHYRLVVWNPYFGQTRWIQPRNSYHRKDNYALGYDEKKNHKILRLKDNYYAPRERICEFELYSFESNSWKVVLDVSPDWYIPSYNRGLSLKGNTYWYATEKHVNVDFLICFDFTTEKFGPRLPLPFNATESPTYEDVVTLSSVGEEQLAVLFQSEYTLMMEIWVTSKVESTEVLWNKLFLEVDLIAISSHFQFLAEAGSFFIDQKKNVVVVFDKDMDEATDRDMAYVVGKNGYFKKVDIGEEAYTSCFPLVCSYVPSSEQIRQLT

SEQ ID NO: 44413 - protein, 403 aa, Arabidopsis thaliana
MAWNSERSIRECINRRQVHGPSMLPTLNLTGDVILAEHLSHRFGKIGLGDVVLVRSPRDPKRMVTKRILGLEGDRLTFSADPLVGDASVSVLVKQHGIANLGLRVKRCMIDELGWSRRFRKVMFGFREITCMLQLIHVILGLYLTVSLKEKLFYGNHLFACLGLATRILWVIEMTIIYTYTFSNRRKAMVLILFLKPELQYQMLRFILLVSKKLLYEPTRSKEFIAKQSFKTEQTQRVAITRGSETMSLIPSIFGGRRTNVFDPFSLDVFDPFEGFLTPSGLANAPAMDVAAFTNAKVDWRETPEAHVFKADLPGLRKEEVKVEVEDGNILQISGERSNENEEKNDKWHRVERSSGKFTRRFRLPENAKMEEIKASMENGVLSVTVPKVPEKKPEVKSIDISG

SEQ ID NO: 44414 - protein, 169 aa, Brassica napus
VDPRVRTNGHIDNMCCFAKPGVVLLSWTDDETDPQYERSVEALSVFSNSIDARGRKIEVIKLHVPGPLYMTEEEASGIVQEGEAKPRIAGTRLAASYVNFYIANGGVIVPRFGDAKRDEEAIRVLSETYPHHSVVGIENAREIGLAGGNIHCITQQQPAEPISIADDGH

SEQ ID NO: 44415 - protein, 198 aa, Gossypium hirsutum
MPATFEESTTLEFIRQHLLGDFATVDAFINTLDFGLSHLQPQSHQLPEIFTHGVEPAPITKEPFCEEKRHYRGVRRRPWGKFAAEIRDPNRKGIRVWLGTYDSDVDAAKAYDCAAFKMRGQKAILNFPLEAGEGSQPPAVTTGRKRRREKRVWLPESDITSPGSSEMAWEVKEEEGELDDDDRNGLSLLTRKRVIVTC

SEQ ID NO: 44416 - protein, 336 aa, Emericella nidulans
MAPKVGINGFGRIGRIVFRNAIEAGTVDVVAVNDPFIETHYAAYMLKYDSQHGQFKGTIETYDEGLIVNGKKIRFHTERDPANIPWGQDGAEYIVESTGVFTTQEKASAHLKGGAKKVVISAPSADAPMFVMGVNNETYKKDIQVLSNASCTTNCLAPLAKVINDNFGIIEGLMTTVHSYTATQKVVDGPSAKDWRGGRTAATNIIPSSTGAAKAVGKVIPSLNGKLTGMAMRVPTSNVSVVDLTVRTEKAVTYDQIKDAVKKASENELKGILGYTEDDIVSTDLNGDTRSSIFDAKAGIALNSNFIKLVSWYDNEWGYSRRVVDLITYISKVDAQ

SEQ ID NO: 44417 - protein, 188 aa, Brassica napus
MTELYVSLCISNIGSHFPPTYNNNIPSKKVISLVSRTGRDLQRYNTTGYRQVVGCVPYRYKKHGGGGEIEVLLISAQKKGKGMLLPKGGWEIDESIEEAALRETIEEAGVTGQLEESLGMWQYKSKRDNMMVHDGYMFPMLVSEQFEIWPECGFRQRKWVCLSEAIELCRNGWMREALEVFINRKCQG

SEQ ID NO: 44418 - protein, 596 aa, Oryza sativa
HTPLTILAPPPPRRSSRPAMAAATVEVTWDVEYVLWAPDCQQRVMIGINGRFPGPNITARAGDVISVTMNNKMHTEGVVIHWHGIRQFGTPWADGTASISQCAVNPGETFVYKFVADKPGTYFYHGHFGMQRAAGLYGSLIVLDSPEQPEPFRHQYDDGGELPMMLLSDWWHQNVYAQAAGLDGKDRHFEWIGEPQTILINGRGQFECTLGPARKSFEKLLNENCAPVVFNVEQGKTYRLRIASTTSLSLLNVKIQGHKMTVVEADGNHVEPFVVDDIDIYSGESYSVLLKADQKPASYWISVGVRGRHPKTVPALAILSYGNGNAAPPPLQLPAGEPPVTPAWNDTQRSKAFTYSIRARKDTNRPPPAAADRQIVLLNTQNLMDGRYRWSINNVSLTLPATPYLGAFHHGLQDSAFDASGEPPAAFPEDYDVMRPPANNATTASDRVFRLRHGGVVDVVLQNANMLREEVSETHPWHLHGHDFWVLGYGDGRYDPAAHAAGLNAADPPLRNTAVVFPHGWTALRFVANNTGAWAFHCHIEPHLHMGMGVVFVEGEDRMHELDVPKDAMACGLVARTAATPLTPATPLPPSPAPAP

SEQ ID NO: 44419 - protein, 543 aa, Zea mays
MARRALELAAVLLALAALAAVAAGGDIVHQDDEAPKIPGCSNDFVLVKVQTWINKKDKDEFVGVGARFGPKIESKEKHANWTNLLLADPSDCCTPPREKVAGDILLVERGNCKFTTKAKVAESAGASAIIIINDKHELYKMVCETNETNLDIGIHAVLLPKDAGSSLQRSLSSGEVLVELYSPDRPLVDTAEVFLWLMAVGTILCASYWSAWSAREADIEQEKLLKDGREVAPNFEPGGSSGMVDINMASAIMFVVVASCFLITLYKLMSYWFVELLVVIFCIGGVEGLQTCLVALLSRWFKPAAESFVKVPFLGAVSHLTLAVCPFCVAFAVVWAVFRQLPFAWIGQDILGIALIVTVIQIVRVPNLKVGSVLLGCAFLYDIFWVFISKRWFHESVMIVVARGDKTDEDGVPMLLKIPRMFDPWGGYSIIGFGDILLPGLLVAFSLRYDWAAKKTLQSGYFLWSMVAYGSGLLITYVALNLMDGHGQPALLYIVPFTIGTFLALGMKRGELRNLWTKGQPERVCTHMHPSPKDSPVAVSSLS

SEQ ID NO: 44420 - protein, 390 aa, Picrophilus torridus DSM 9790
MKGVNDYLLDYKDDILKLSKSIYDFAELGSSEYKSSGLISKRLEDAGFYVEMPFMNMDTAFRAEFGDGRPYIGLLAEYDALPNGHSCGHNLISAWAYGTAVILSKMINSGKIIVFGTPSEEGIGPYAGSKAIMASKGAFDDLDFVIGMHPDDRWAVGSKALADAEMEFTFIGRASHMAASPCHGINALDALVASYNAINSLRDWARNDRHIVIGMIIREGGKASNVVPDKAVLEVDIRSTSYDFLIRFVSKVKRLVKSISEGFGTKLIIRDLMPVYSEYKYNYTIDNIIEDELKKINIRPYNIDKSDEIASGSTDEANVSLRVPTGHIDVKIGNNLPGHSEEFRLAADPYNASENLIKAIRATCNAVLRIINDPEILKKVRSDFNESNKA

SEQ ID NO: 44421 - protein, 420 aa, Picrophilus torridus DSM 9790
MKGDDLFSEALKLFPSGVNSPVRFYRPVPVMFERGRGSRIYDVNGKEYIDYSLGFGPMILGHADPDVASAIKRQADNGILFGSITENEVRLGNIIKNHVKSIEKMRFTNSGTEATMHAIRLARGYTKRKYILKMEGGFHGAHDYALIKSGSGTMTFGVPSSNGVPEEITKTVLVGKYNDENSIESLFNEYGNDIAAVITEPILGNIGVINPEPGFLEFLREITNKYNSLLIFDEVITGFRFAFSGYQDIINIKPDITTMGKIIGGGAPIGLFGSSSEIMDLISPSGNVYESGTFSGNPLSMAAGIAAMEKLQGMDYSRINNYTADLVKSLYDIFNDKNIDVNINHYGSMFQIFFNKNEVKTYDDAIKSDKDRFFKFFKKMLDHNVYLPPSQFETNFVSFAHGRDDLNKTIEAAKEAVSCI

SEQ ID NO: 44422 - protein, 265 aa, Ralstonia eutropha JMP134
MSRIQKTFAALAAQNKKGLIPFITAGDPEPGLTVDLMHALVAGGADVIELGVPFSDPMADGPVIQRASERALANGVSLTQVLQWVREFRQTNADTPVVLMGYANPIERMGEAAFAKAAGAAGVDGVLVVDYPPEECESFAVLMRDNGIDPIFLLAPTSTDARIEAVGKVASGYVYYVSLKGVTGSATLDLDSVAARLPLIKKHVNLPVGVGFGIRDAQTARAIGSVADAVVIGSRLVQLLEDAPRGQAVESLRAFIAGIREALDA

SEQ ID NO: 44423 - protein, 341 aa, GIBBERELLA ZEAE PH-1
MSAATRDVISKVQRMIPPMLEKFHKGQLGRVAVIGGSENYTGAPYFSAMASARLGADLSHVICTPAAATVIKSYSPNLMVHPLMRQSENAKKEHEPAAWNASKEHESSAEHIASQIKDLLPRLHVLVIGPGLGRDPLMHETVSLVIRAARDHGLPLVLDADALAIIHKQPELISGYIGAVLTPNVVEFGKLCDALKVKVDDDAPETARVEALAKTLKGVTVVQKGAKDYISNGETTLTVDLEGGKKRSGGQGDTLTGSIATFLGWRNAYMERLWDVGKDPIDEHELVGLAAFGGSAITRECSRLAFSKKGRSLQASDLTDEVHISFLNIFGEDKEVDESKL

SEQ ID NO: 44424 - protein, 307 aa, Pseudomonas aeruginosa UCBPP-PA14
MTSKLEQLKQYTTVVADTGDFDAIARLKPVDATTNPSLLLKAAALPRYAEHLRQATAGSGGDAGLACDRFAVAVGKDILGVIPGRISTEVDARLSFDSEATLARAHRLIELYDEQGIDRERVLIKIASTWEGIRAAEILEREGIQTNLTLLFSFAQAVACADAGVFLISPFVGRIYDWYKKSENRDYAGAEDPGVQSVSRIYRYYKANGYKTVVMGASFRNLGQIEQLAGCDRLTISPDLLQQLADAQGELPRLLLPGEGEPRQVLDESAFRWQMNEDAMATEKLAEGIRLFARDQEKLEYQLATRH

SEQ ID NO: 44425 - protein, 142 aa, Oryza sativa
MTEAWVRHKPGMASVKDMPVLQDGPPPGGFAPVRYARRIPTKGPSAIAIFLTTFGAFAWGMYQVGQGNKVRRALKEEKIAARTALVPVLQAEEDERFVKEWTKSLMWEEIIMKDVPGWKVGQSVYNSGKWMPPATGELRRED

SEQ ID NO: 44426 - protein, 204 aa, Halobacterium sp. NRC-1
MTPDAYLDLVARIDADVPVVCMTYYNLLFQYGDRAGPAAFVSAAAEAGVSGFVVPDLPVDESGPLREACRAHGLDLVFVVAPTTTADRRERMLDLTTGFVYVQGRVGTTGAREEVSAATPDALAALQHTDIPKAVGFGVSSGEQAREITASGADGVIVGSAYVDTVADGVADDDPPSVVADRLRDLAAELKAGAARGVPEPEHK

SEQ ID NO: 44427 - protein, 657 aa, Saccharomyces cerevisiae
MSDNGSPAVLPKTEFNKYKIGKVKSTPAIQRDAKTNLTYIKLRKRSSEKVYGCTVFQNHYREDEKLGQGTFGEVYKGIHLETQRQVAMKKIIVSVEKDLFPITAQREITILKRLNHKNIIKLIEMVYDHSPDITNAASSNLHKSFYMILPYMVADLSGVLHNPRINLEMCDIKNMMLQILEGLNYIHCAKFMHRDIKTANILIDHNGVLKLADFGLARLYYGCPPNLKYPGGAGSGAKYTSVVVTRWYRAPELVLGDKQYTTAVDIWGVGCVFAEFFEKKPILQGKTDIDQGHVIFKLLGTPTEEDWAVARYLPGAELTTTNYKPTLRERFGKYLSETGLDFLGQLLALDPYKRLTAMSAKHHPWFKEDPLPSEKITLPTEESHEADIKRYKEEMHQSLSQRVPTAPRGHIVEKGESPVVKNLGAIPRGPKKDDASFLPPSKNVLAKPPPSKIRELHQNPRPYHVNSGYAKTAIPPPAAPAGVNRYGPNNSSRNNRFSGNSTAPNNSRNPVNRFHPETNVSSKYNKVPLPLGPQSRYQGNSNESRYKNSPNDSRYHNPRYVNKPETNFNRQPQKYSRQESNAPINKNYNPSNGSRNMAGDHHQGSRPSHPQFPISPSQGQHQLTSKPIEKKNGSFKDERAKPDESKEFQNSDIADLY

SEQ ID NO: 44428 - protein, 592 aa, Arabidopsis thaliana
MFRRKSRSISPRRHRSRSVTPKRRSPTPKRYKRQKSRSSTPSPAKRSPAATLESAKNRNGEKLKREEEERKRRQREAELKLIEEETVKRVEEAIRKKVEESLQSEKIKMEILTLLEEGRKRLNEEVAAQLEEEKEASLIEAKEKEEREQQEKEERERIAEENLKRVEEAQRKEAMERQRKEEERYRELEELQRQKEEAMRRKKAEEEEERLKQMKLLGKNKSRPKLSFALSSKMTTMSDLDEIMVAEILCRTPMTCLKTVRSVCKKWNALSKKWFFFGKAKQFLGFMMMDSRVCSLRFDLRKDLVVEPPSIKQVSILDQIEVSKIFHSDGLLLCIIKNDTTRLLVWNPYLEQTRWIQPRHNFHILDCYAIGHDKNRKHKILRFVDDFLPVENVVFGGNTYFFAKERYIFEGKGPEEIDITETEDFLLCFDFTAERFGPRLPLPFHSYYAETVTLSCVKEDQLSVLCQRQPSEPSEILEIWVSTNIQPNAVSWSIFLKVDMRPLTGFQFNDMAGSFFIDQENKVAVVFDLDPSQICRYQTAYIIGQEYGGYFNSVNIGEVPNLWIPGSVGYADTTSCIPPVCSSYVPSLVQIG

SEQ ID NO: 44429 - protein, 150 aa, Glycine max
MASPIQQQQRSTTTSSGSEGGDPHIIDERKRKRMLSNRESARRSRMRKQKQLEDLTDEVSRLQSANKKLAENIEAKEEACVETEAANSILRAQTMELADRLRFLNSILEIAEEVEGLSVEIPEIPDPLLKPWQIPHPIQPIMATANMFLR

SEQ ID NO: 44430 - protein, 567 aa, Magnaporthe grisea 70-15
MPGTSRIPQSLRDGLISVKRNRPTSVVQLLSIDLLRNIVFTLFVLRWTRRAFWKLRGRGLLGWLAELYAAMRVTAYGWLLRAPGVRNKVRSEVDTALSKLSKKTLPPPEAPRYLQIPKQGWTNEAVRAELESLANMDHTRWEDGYVSGAVYHGEDELISLQTDAYGKFTVANPIHPDVFPGVRKMEAEVVAMVLSLFNAPVGAAGVSTSGGTESILMAVLSARQKAYNERGVTEPEIILPETSHTAFRKAAEYYKIKVNFVACPAPDYQVDVSRVRRLINANTIMLVGSAPNFPHGIIDDISGLSKLAVRYKIPLHVDCCLGSFLVPFLERAGFETRPFDFRLKGVTSISVDTHKYGFAPKGNSTVLYRTAELRKYQYFVCPDWSGGVYASPGIAGSRPGALIAGCWASMMAVGEAGYLAACVEIVGAAKKLVDHINASPSLAAELEIIGKPLSSVVAFRARNLNIYDIADAMGEKGWHLNSLQNPPAMHVAFTLPTAKVWERLATDLEACVEGEREKERARIAEGKGAKGAAVGDSAALYGVAGSLPNKSVVVELANGFLDLLYKT

SEQ ID NO: 44431 - protein, 205 aa, Arabidopsis thaliana
  misc_feature (27)..(27): Xaa can be any naturally occurring amino acid
  misc_feature (41)..(41): Xaa can be any naturally occurring amino acid
  misc_feature (57)..(57): Xaa can be any naturally occurring amino acid
  misc_feature (118)..(118): Xaa can be any naturally occurring amino acid
  misc_feature (134)..(134): Xaa can be any naturally occurring amino acid
  unsure (1)..(205): unsure at all Xaa locations
PRVRTHGTAVDFVANPLSTAISRASSXALASTAAFTFFIHXSNPMTRRMNLTKRLFXECKFDAEAEAAAKVATQAATDPKVHKIDRGKDCDEELNNAKSKVKSAQVAAKNSDHSSDIXTIMEELIRTRNDTCIXLVMLDELDENRDLSRKQRIEKNTDYSSYYSMDKIHEEERVEPGHVPGHVLCYGDYYCDEQYVDGRPDGRTV

SEQ ID NO: 44432 - protein, 765 aa, Catharanthus roseus
MASHIVGYPRMGPKRELKFALESFWDKKSSAEDLQKVAADLRSSIWKQMADAGIKYIPSNTFSYYDQVLDTATMLGAVPPRYNFAGGEIGFDTYFSMARGNASVPAMEMTKWFDTNYHYIVPELGPEVNFSYASHKAVNEYKEAKELGVDTVPVLVGPVTFLLLSKPAKGVEKTFPLLSLLDKILPVYKEVIGELKAAGASWIQFDEPTLVLDLESHQLEAFTKAYSELESTLSGLNVIVETYFADIPAETYKILTALKGVTGFGFDLVRGAKTLDLIKGGFPSGKYLFAGVVDGRNIWANDLAASLSTLQSLEGIVGKDKLVVSTSCSLLHTAVDLVNEPKLDKEIKSWLAFAAQKVVEVNALAKALAGEKDEAFFSENAAAQASRKSSPRVTNQAVQKAAAALRGSDHRRATTVSARLDAQQKKLNLPVLPTTTIGSFPQTLELRRVRREYKAKKISEDDYVKAIKEEISKVVKLQEELDIDVLVHGEPERNDMVEYFGEQLSGFAFTANGWVQSYGSRCVKPPIIYGDVSRPNPMTVFWSQTAQSMTKRPMKGMLTGPVTILNWSFVRNDQPRFETCYQIALAIKDEVEDLEKAGINVIQIDEAALREGLPLRKAEHAFYLDWAVHSFRITNLPLQDTTQIHTHMCYSNFNDIIHSIIDMDADVMTIENSRSSEKLLSVFREGVKYGAGIGPGVYDIHSPRIPSTEEIADRINKMLAVLDTNILWVNPDCGLKTRKYAEVKPALENMVSAAKLIRTQLASAK

SEQ ID NO: 44433 - protein, 381 aa, Arabidopsis thaliana
MENHLQHSLTIIPKPDLIKEEQRYHEDTVSLQAERILHAMTFPMVLKTALELGVIDMITSVDDGVWLSPSEIALGLPTKPTNPEAPVLLDRMLVLLASHSILKYRTVETGDNIGSRKTERVYAAEPVCTFFLNRGDGLGSLATLFMVLQGEVCMKPWEHLKDMILEGKDAFTSAHGMRFFELIGSNEQFAEMFNRAMSEASTLIMKKVLEVYKGFEDVNTLVDVGGGIGTIIGQVTSKYPHIKGINFDLASVLAHAPFNKGVEHVSGDMFKEIPKGDAIFMKWILHDWTDEDCVKILKNYWKSLPEKGKVIIVEVVTPEEPKINDISSNIVFGMDMLMLAVSSGGKERSLSQFETLASDSGFLRCEIICHAFSYSVIELHK

SEQ ID NO: 44434 - protein, 472 aa, Burkholderia pseudomallei K96243
MAGTRRAEPQIITPAVAALMPAEAAAKTGIPDFSGLVETYGPAVVNISAKHVVQRAAQRRAAPQLPIDPDDPFYQFFRHFYGQIPGMGGGRQPQPDDQPSTSLGSGFIISADGYILTNAHVIDGANVVTVKLTDKREYKAKVVGADKQSDVAVLKIDASGLPIVKIGDPAQSKVGQWVVAIGSPYGFDNTVTSGIISAKSRALPDENYTPFIQTDVPVNPGNSGGPLFNLNGEVIGINSMIYSQTGGFQGLSFAIPINEAMKVKDELVKTGHVSRGRLGVAVQGLNQTLASSFGLQKPDGALVSSVDPKGPAAKAGLQPGDVILAVDGVPVQDSSTLPAQIAGMKPGTKADLQIWRDKSRKTVSVTLASLADDQAKAGVDEPVEQGRLGVAVRPLSPRERNGSSLTHGLVVQQSAGPAASAGIQPGDVILAVNGRPVTSAEQLRDAVKRAGNSLALLIQRDDAQIFVPVDLG

SEQ ID NO: 44435 - protein, 249 aa, Oryza sativa
MQYTVEGSGGGGVQTVEAAVRKGPWTMEEDLSLVNYIAANGEGAWNTLARAAGLNRTGKSCRLRWLNYLRPDVRRGNITPEEHTLIVELQARWGNRWSKIARYLPGRTDNEVKNFWRTKIQKKHRKSTDGIYATTTSESIMPAATVHQNTVAEDQGSSSVSGRTTTATVAVTQEYATEAPPPSGMSSGSYLDQLQPGYASSIHGGQDGGAAAAAAGDVVVSDEFLAASSDNFWALEDLWPTVQSLHGNC

SEQ ID NO: 44436 - protein, 406 aa, Escherichia coli
MKRTVITGLGIVSSIGNNQQEVLASLREGRSGITFSQELKDSGMRSHVWGNVKLDTTGLIDRKVVRFMSDASIYAFLSMEQAIADAGLSPEAYQNNPRVGLIAGSGGGSPRFQVFGADAMRGPRGLKAVGPYVVTKAMASGVSACLATPFKIHGVNYSISSACATSAHCIGNAVEQIQLGKQDIVFAGGGEELCWEMACEFDAMGALSTKYNDTPEKASRTYDAHRDGFVIAGGGGMVVVEELEHALARGAHIYAEIVGYGATSDGADMVAPSGEGAVRCMKMAMHGVDTPIDYLNSHSTSTPVGDVKELAAIREVFGDKSPAISATKAMTGHSLGAAGVQEAIYSLLMLEHGFIAPSINIEELDEQAAGLNIVTETTDRELTTVMSNSFGFGGTNATLVMRKLKD

SEQ ID NO: 44437 - protein, 406 aa, Escherichia coli
MKRAVITGLGIVSSIGNNQQEVLASLREGRSGITFSQELKDSGMRSHVWGNVKLDTTGLIDRKVVRFMSDASIYAFLSMEQAIADAGLSPEAYQNNPRVGLIAGSGGGSPRFQVFGADAMRGPRGLKAVGPYVVTKAMAFGVSACLATPFKIHGVNYSISSACATSAHCIGNAVEQIQLGKQDIVFAGGGEELCWEMACEFDAMGALSTKYNDTPEKASRTYDAHRDGFVIAGGGGMVVVEELEHALARGAHIYAEIVGYGATSDGADMVAPSGEGAVRCMKMAMHGVDTPIDYLNSHGTSTPVGDVKELAAIREVFGDKSPAISATKAMTGHSLGAAGVQEAIYSLLMLEHGFIAPSINIEELDEQAAGLNIVTETTDRELTTVMSNSFGFGGTNATLVMRKLKD

SEQ ID NO: 44438 - protein, 136 aa, Brassica napus
  misc_feature (123)..(123): Xaa can be any naturally occurring amino acid
  unsure (1)..(136): unsure at all Xaa locations
LLKKGYGMECDWWSLGAIMYEMLVGYPPFYADDPMSTCRKIVNWKTHLKFPDEARLSREAKDLVGKLLCNVNQRLGASQIKAHPWFEGVEWEKIYQMEAAYIPEVNDDLDTQNFEKFDEEDHXTLTPSSRTRPWRK

SEQ ID NO: 44439 - protein, 406 aa, Escherichia coli
MKRAVITGLGIVSSIGNNQQEVLASLREGRSGITFSQELKDSGMRSHVWGNVKLDTTGLIDRKVVRFMSDASIYAFLSMEQAIADAGLSPEAYQNNPRVGLIAGSGGGSPRFQVFGADAMRGPRGLKAVGPYVVTKAMASGVSACLATPFKIHGVNYSISSACATSAHCIGNAVEQIQLGKQDIVFAGGGEELCWEMACEFDAMGALSTKYNDTPEKASRTYDAHRDGFVIAGGGGMVVVEELEHALARGAHIYAEIVGYGATSDGADMVAPSGEGAVRCMKMAMHGVDTPIDYLNSHGTSTPVGDVKELAAIREVFGDKSPAISATKVMTGHSLGAAGVQEAIYSLLMLEHGFIAPSINIEELDEQAAGLNIVTETTDRELTTVMSNSFGFGGTNATLVMRKLKD

SEQ ID NO: 44440 - protein, 481 aa, Burkholderia pseudomallei K96243
MLLLRFVNAHNVEPPSKQNHGVRQMQSNTVHPCDEVLPSGKLLTLGLQHVLVMYAGAVAVPLIVGGALKLPKDQIAFLISADLFACGIATLIQTLGVWLFGIRLPVIMGCTFAAVGPMIAIGTNPGLGILDIFGSTIAAGAIGIVLAPMIGKLLRFFPPVVVGTVISVIGLSLMEVGINWAAGGVGNPNYGDPVYLGLSFIVLALILAINKFGRGFVANISVLLGMIAGFAIAFAAGRVNTDGVAAAPWVGFVAPFHFGLPHFDPLSIATMVIVMFVTFIESTGMFLAVGDMVERPVDQETLVRGLRVDGLGTLIGGIFNSFPHTSFSQNVGLIGVTGVKSRFVCATGGMILVLLGLFPKMAQLVASVPPFVLGGAGIVMFGMVAANGVKVLSKVDFVRNHHNLFIVAVSVGLGLVPVVSPNFFSKLPAAFAPILHSGILLASVSAVVLNIVFNGMKGEKDARCDIRRAGRDFDGQPADLH

SEQ ID NO: 44441 - protein, 238 aa, Oryza sativa (japonica cultivar-group)
MVCSNFHQQRKKYTEGRRHQPTGGEEGGGGSLLSVLANEDEQWRSWSHTREEEEPSAPGHTTLLDAGDDGWVLGPNLSVFTSLPDMWAIGQMFPIIPIQCLGERPAIDGVLSDLTSDSDGKVDHFISGRHSLPLHELPVHGTRGYYLGGTYQEALGGLHNLFGGPSVHEHEVFKQRTDGATAAALAKAFGAMPYLSFYPEAAAMARGESSGMSSDSEVSAAGVAEDDDEWEFMRGLIV

SEQ ID NO: 44442 - protein, 862 aa, Taxus x media
MAQLSFNAALKMNALGNKAIHDPTNCRAKSEGQMMWVCSKSGRTRVKMSRGSGGPGPVVMMSSSTGTSKVVSETSSTIVDDIPRLSANYHGDLWHHNVIQTLETPFRESSTFQERADELVVKIKDMFNALGDGDISPSAYDTAWVARVATVSSDGSEKPRFPQALNWVLNNQLQDGSWGIESHFSLCDRLLNTVNSVIALSVWKTGHSQVEQGTEFIAENLRLLNEEDELSPDFEIIFPALLQKAKALGINLPYDLPFIKSLSTTREARLTDVSAVADNIPANMLNALEGLEEVIDWNKIMRFQSKDGSFLSSPASTACVLMNTGDEKCFTLLNNLLDKFGGCVPCMYSIDLLERLSLVDNIEHLGIGRHFKQEIKVALDYVYRHWSERGIGWGRDSLVPDLNTTALGLRTLRTHGYDVSSDVLNNFKDENGRFFSSAGQTHVELRSVVNLFRASDLAFPDEGAMDDARKFAEPYLRDALATKISTNTKLYKEIEYVVEYPWHMSIPRLEARSYIDSYDDDYVWQRKTLYRMPSLSNSKCLELAKLDFNIVQSLHQEELKLLTRWWKESGMADINFTRHRVAEVYFSSATFEPEYSATRIAFTKIGCLQVLFDDMADIFATLDELKSFTEGVKRWDTSLLHEIPECMQTCFKVWFKLMEEVNNDVVKVQGRDMLAHIRKPWELYFNCYVQEREWLEAGYIPTFEEYLKTYAISVGLGPCTLQPILLMGELVKDDVVEKVHYPSNMFELVSLSWRLTNDTKTYQAEKARGQQASGIACYMKDNPGATEEDAIKHICRVVDRALKEASFEYFKPSNDIPMGCKSFIFNLRLCVQIFYKFIDGYGIANEEIKDYIRKVYIDPIQV

SEQ ID NO: 44443 - protein, 240 aa, Symbiobacterium thermophilum IAM 14863
MGVTNFFGEAWRTGKSIVTGLGITFREMMFRPAITVFYPEQRDDVPPWFRGIPVLKTDLRTGEYKCTSCMQCAQACPVNVITIEWHQDPETKKKVCDRFAIDMSRCMLCNFCVEACPFDSLVMGYDYELCKVNPENLVFEFEDLLRLGLKYSKAEEPGPKATRSSTPPWVFHGLTNATEDDIQDIHGYLGRPPLPKGYEPELKPQFRKPAEEAAEAQQAEAAGQPAAEPGKTNGEEAGQP

SEQ ID NO: 44444 - protein, 481 aa, Neurospora crassa
MSSGPVETYEGVAGVANNGGNPLLEDLNRYYSAGDFGWIMTCTALVLLMVPGVGFFYSGLARRKSALALIWLSLMSIAIVGFQWFFWGYSLAFSHTGSAYIGNLSNFGLMKTLAQPSVGSGKIPDLLFCLYQGMFAAITPALAIGACADRGRMLPALVFMFIWTTIVYDPIAYWTWNGNGWSFKMGGLDFAGGTPVHISSGAAALAYSLMLGKRNGYNKVNGLPYRPHNVTHVVLGTVFLWVGWFGFNGGSALAANLRAVMACIVTHIAACVGGLTWVLLDYRLERKWSTVGFCSGAIAGLVAITPAAGYVPPWSAFIFGVVGGISCNFATKLKFLLGIDEALDVFAEHGVGGIVGNLLTGIFAADYIAALDGVSIGDSAIAGGWVNHHYIQLAYQLADSVAGFSYSFVMTCVILFLLNLVPGLSLRVDHHQEDIGLDDDQLGEFAYDYVEVTRSLDVIPGLTAPNSTAGSISGRDPEKQV

SEQ ID NO: 44445 - protein, 672 aa, Rhodobacter capsulatus
MDLAALRAKTPDHWKLATAIRVLAIDAVQAANSGHPGMPMGMADVATVLFRNHLKFDAKAPNWADRDRFVLSAGHGSMLLYALLHLTGYEQATLDEVKNFRQWGARMAGHPEYGHLEGVETTTGPLGQGISTAVGMAIAEKSMAARFGKKLVDHKIWVIAGDGCLMEGISQEAIGLAGKQELDNLIVLWDNNNITIDGRVTVSDVTDQKARFAASGWDVLSCDGHDAEDIDRALTAAKKAKRPVLVDCKTLIGFGSPNKADSYAVHGAPLGDAEIKLTREAYGWEHGPFVIPAEIKAEWEAIGAKGAAERAEWEARLAALPAGKRAEFERQMARGVAPKLAGAIRAFKKAQSEAAPKVATRKASEMVLAAVNPVVPETIGGSADLTGSNLTKTSDIEDFMPGNHKGRYMRYGIREHAMAAAMNGMWLHGGVRPYGGTFFCFTDYARGAMRLSSLMGVPTVYVMTHDSIGLGEDGPTHQPVEHLAICRATPNTWTFRPADVIETAEAWELALSSERTPSVLALSRQNLPTLRTKHEAKNLTAKGAYVIAEAEGKRQAILMATGSEVEIALKARALLQAEAIGTRVVSMPCMELFAAQDEAYRKRILPAGGVRVAVEAAIRQPWDRWLLGERGMERKAGFVGMEGFGASAPAERLYAEFGITPEAIAAKVKSLL

SEQ ID NO: 44446 - protein, 126 aa, Methanosarcina acetivorans C2A
MADMKWAVAHIKSSFNNTIITVTDITGAETIAKSSGGMVVKAARDESSPYTAMQMAGQLADQLKDKGINGIHIRVRAPGGNKQRSPGPGAQAAIRAFARAGIRIGRIEDVTPVPHDGTRPKGGRRV

SEQ ID NO: 44447 - protein, 547 aa, Novosphingobium aromaticivorans DSM 12444
MAAKDVKFGRDARERILRGVDILADAVKVTLGPKGRNVVIDKSFGAPRITKDGVSVAKEIELKDKFENMGAQMLREVASKANDAAGDGTTTATVLAQAIVREGMTAVAAGMNPMDLKRGIDIAVGKVVENLKARSTPVAGSSEIAQVGIISANGDTEVGQKIAEAMEKVGKEGVITVEEAKGLEFELDVVEGMQFDRGYLSPYFITNPEKMTVELENPYILIHEKKLSSLQAMLPILEAVVQSGRPLLIIAEDIEGEALATLVVNKLRGGLKIAAVKAPGFGDRRKAMLGDIATLTAGEMISEDLGIKLESVTLAMLGQAKKVTIDKDNTTIVDGAGSAEEIKARVEQIRAQIEVTTSDYDREKLQERLAKLAGGVAVIKVGGATEVEVKERKDRVDDALHATRAAVEEGIVPGGGTALLYATKALEGLKGANDDQTKGIDIVRRAIQAPIRQIAANAGHDGAVVSGNLLRENDENQGFNAATDTYENLKAAGVIDPTKVVRTALQDAASVSGLLITTEAAISEKPDDKPAMPPMGGGMGGMGGMDF

SEQ ID NO: 44448 - protein, 95 aa, Novosphingobium aromaticivorans DSM 12444
MTFRPLHDRVLVRRVEAEEKTAGGIIIPDSAKEKPAEGIVVAVGSGARAENGTITPLDVKANDRVLFGKWSGTEVKVDGEDLLIMKESDILGVIG

SEQ ID NO: 44449 - protein, 463 aa, Novosphingobium aromaticivorans DSM 12444
MAPLPMFEKPPVHWTEELRAMLRLAAPMVGANLLQMAVFAVDVVFVARLGPVALAASSLSVSLFGLLVWSLSGLVGAASPLIAAELGRRRHAVREVRRTVRMAAWAGTLAGLFAMGVCLLGGPLMRVTGQQPEVIALAVPFLNVLMWAAIPSTISALLRTFVATLGRPTIGTVITGMAVAINAFGNWVFVFGNLGAPEMGLTGSALSSIVTTCAMVLAYIVVIRSDRRLRRYRLAGRWWKPEWKRFADVLRVGLPITGTILAEAGMFNGAAFLMGRIGEVELAAHTIALQFAAIAFQVPFGVAQAATIRVGLAFGAGERAAIARAGRVAVVLGMGFMVVTASIMLFAPRAILHLYVDPDAPENRAMAVLAVQYMAVAAAFQLFDGAQAVGAALLRGLQDTRIPMAFALFGYWLPGLGTAVGLGLFSPLGGLGVWIGLMVGLVVVASLMLWRWRNRARLGLLPA

SEQ ID NO: 44450 - protein, 507 aa, Zea mays
MGKSVVVGAAVVACAAVGVAAVLVHRRRRRDAALLGSAEAERRRRAAAVIEEVERSLATPTALLRGIADAMVAEMERGLRGDIHAQLKMLISYVDNLPTGDEHGLFYALDLGGTNFRVLRVQLGGREKRVVKQQYEEVSIPPHLMVGTSIELFDFIAAALAKFVDTEGEDFHLPEGRQRELGFTFSFPVNQTSISSGTLIKWTKGFSINGTVGEDVVSELSRAMERQGLDMKVTALVNDTVGTLAGGRYMDNDVVAAVILGTGTNAAYVEHANAIPKWTGLLPKSGNMVINTEWGSFKSGKLPLSEYDKAMDFESLNPGEQIYEKMISGMYLGEIVRRILLKLAHDASLFGDVVPTKLEQPFILRTPDMSAMHHDSSHDLKTLGSKLKDIVGVADTSLEVRYITRHICDLVAERGARLAAAGIYSILKKIGRDKVPSSGSKMPRTVIALDGGLYEHYKKFSSCVEATLTDLLGEEASSSVVAKLANDGSGIGAALLAASHSQYGESD

SEQ ID NO: 44451 - protein, 355 aa, Euphorbia esula
MEDSTQISLIFDGLYCEEQGIVEDFDDGNEDYVKKELSLSSVLLEQDLFWTDDELLNLISKEKESHFSFGNFSSDGSLMVARKEAIDWILRVKGFYGFNALSCVLAVNYFDRFISSLVFTRDKPWMGQLAAVACLSLAAKMEETQVPLLLDLQVEESKYVFEAKTIKRMELLVLSTLQWRMNPVTPICYFDHIIRRLGLKNHLHWEFLRRCELLLLSVISDSRFMSYAPSILATLIMIHVIKEVDPFSQMEYQNQLLDVIKINKEEVNQCYKLILELSGKQDQGFKRKYPSRPGSPNGVIDAYFSGDSSNDSWGVSSSISSSPSIPRFKRIKSQDQQMRLPSINRMFVDVLSSPH

SEQ ID NO: 44452 - protein, 323 aa, Crocosphaera watsonii WH 8501
MYNPKILCIGEILFDCLADQLGKELNEVTSWIAYPGGAPANVACGLIKLGISAAFIGCVGKDKPGDELVKILDKIGVNSTGIQRHTNAPTRQVYVTRSLTGERQFAGFGQIKTEDFADTRLNSQQLTSSLFTQAKYLVMGTLELAYTQSQQAIFKAIQLAKKYQLHILIDVNWRPVFWQNIETAKPLIIQVLQAADFIKCSEEEAHWLFKTEDPQEIAQQFPKIKGILVTLGEKGCHYYLGKNQGIVAGFSVKVMDTTGAGDSFVAGFLSQCCYYEEEILNNAARAKQTIIYSNAVGALTTTKPGAIAAQPSKEEVEIWLKNH

SEQ ID NO: 44453 - protein, 457 aa, Lactobacillus acidophilus NCFM
MNDKQSQNNSGYKRTLSNAHIQLIALGGTIGTGLFLGVGDSIHRAGPSVILIYIIVGVFLFLLMRALGEMIMSDLNKHTYIDFIEQYLGKNIGFITGYLYWISWITLGMAETTALGIYFKYWFPTLKPWIPGIITIVLLLLINLISARVFGNLEFSFAIIKIVTIVAFVILIFYLLITGGKTTFGPVSFENLDDHGGFFARGTKGFLQGFQMVIFSFIGVELIGLTAAEAQNPKVTLKRAINQLPVRIILFYVMAILGILLVIPWSKVSTNSSPFVQALGATGIRNASSIINFVVISAAVSSTNSFLYSAGRLLFSVTYNGKGKWNQTFGHLSKRQLPQNSLILSALLMACAPLITMVIGDQAFNFISSTSTSMFLIIWCLMVLTHISFRKKTPESVYSDFKMPGFPYVDYLILLFFGLMIILLLILPSYRIPMIAAIVTFIILYIISKIWSNEKTV

SEQ ID NO: 44454 - protein, 324 aa, Pseudomonas fluorescens Pf-5
MKKTVLAFSRITPEMTERLQQDFEVIVPNPKHGDIAAQFNEALPQAHGLIGVGRKLGRAQLENAARLEVVSSISVGYDNYDLAYFNERGLMLTNTPDVLTESTADLAFALLMSSARRVAELDAWTKAGQWQASVGPALFGCDVHGKTLGIVGMGNIGAAIARRGRLGFGMPILYSGNSRKAALEQELGAQFRSLEQLLAEADFVCLVVPLSEKTKHLISHRELALMKPSAILVNISRGPVVDEPALIEALQKGQIRGAGLDVYEKEPLAESPLFQLKNAVTLPHIGSATHETRDAMAARAMSNLRSALLGERPQDLVNPQVWKG

SEQ ID NO: 44455 - protein, 189 aa, Escherichia coli
ITASDSSGTVVDESGFTKEKLARLIEIKASRDGRVADYAKEFGLVYLEGQQPWSLPVDIALPCATQNELDVDAAHQLIANGVKAVAEGANMPTTIEATELFQQAGVLFAPGKAANAGGVATSGLEMAQNAARLGWKAEKVDARLHHIMLDIHHACVEHGGEGEQTNYVQGANIAGFVKVADAMLAQGVI

SEQ ID NO: 44456 - protein, 243 aa, Triticum aestivum
  misc_feature (216)..(216): Xaa can be any naturally occurring amino acid
  unsure (1)..(243): unsure at all Xaa locations
MRVAATRPASSAPVALLAALALLFLVGSASLAIGAMASHVLGGKSENPDAANSLETDGLARFAVDEHNKRENALLEFVRVVEAKEQTVAGTLHHLTLEALEAGRKKVYEAEVWVKPWLDFKELQEFRHTGDATSFTISDLGAKRGGHEPGWRDVPVHDPVVKDAASHAVKSIQQRSNSLLPYELVEIVRAKAEVVEDFAKFDILMKLKRGTKEEKXKAEGHKNLEGAFGLDQMQPEHDESSSQ

SEQ ID NO: 44457 - protein, 258 aa, Burkholderia pseudomallei K96243
MRLQEKVAILTGAASGIGEAVARRYLEEGARCVLVDLKPADGALARLIDAHAGRAIAVSADVTRRDDIARIVATAVERFGGVDILFNNAALFDMRPLLDESWDVFDRLFAVNVKGLFFLMQAVAQRMVEQGRGGKIVNMSSQAGRRGEALVSHYCATKAAVLSYTQSAALALARHGINVNGIAPGVVDTPMWEQVDALFARYENRPLGEKKRLVGEAVPLGRMGVPDDLTGAALFLASADADYITAQTLNVDGGNWMS

SEQ ID NO: 44458 - protein, 318 aa, Burkholderia pseudomallei K96243
MAAIVAAGELLAEFVAAKRGQGFDAPGEFAGPFPSGAPAIFADQAARMGASVAYAGCVGRDAFGDAIVARLASHGVDVAHIRRAARPTGIACVAYRADGGRQFVFSIDGSASALLEPADVVPSMFAGCRYFHVMGSSLTSENAIAAVKRGVIEAARVGAKISFDPNVRAEMLAFAPMRAALREMLDACHLFLPSEADLPFFCGPQPAERAIAGLLATHPLLERVVLKRGAAGSAAFDRTGSVAAPAYETAEVDPTGAGDCFGGTFVACAIAGLPVASALARANAAGALAVSRIGPMEGNSMPADIDRFLAERGARCAA

SEQ ID NO: 44459 - protein, 354 aa, Arabidopsis thaliana
  misc_feature (135)..(135): Xaa can be any naturally occurring amino acid
  unsure (1)..(354): unsure at all Xaa locations
MDKYDVVKDLGAGNFGVARLLRHKDTKELVAMKYIERGRKIDENVAREIINHRSFKHPNIIRFKEVILTPTHLAIVMEYASGGELFDRICTAGRFSEAEARYFFQQLICGVDYCHSLQICHRDLKLENTLLDGSXPAPLLKICDFGYSKSSILHSRPKSTVGTPAYIAPEVLSRREYDGKHADVWSCGVTLYVMLVGAYPFEDPNDPKNFRKTIQRIMAVQYKIPDYVHISQECKHLLSRIFVTNSAKRITLKEIKNHPWYLKNLPKELLESAQAAYYKRDTSFSLQSVEDIMKIVGEARNPAPSTSAVKSSGSGADEEEEEDVEAEVEEEEDDEDEYEKHVKEAQSCQESDKA

SEQ ID NO: 44460 - protein, 305 aa, Arabidopsis thaliana
  misc_feature (3)..(3): Xaa can be any naturally occurring amino acid
  misc_feature (7)..(8): Xaa can be any naturally occurring amino acid
  misc_feature (22)..(22): Xaa can be any naturally occurring amino acid
  misc_feature (28)..(28): Xaa can be any naturally occurring amino acid
  unsure (1)..(305): unsure at all Xaa locations
MQXFVKXXTGKTITLEVESSDXIDNVKXKIQDKEGIPPDQQRLIFAGKQLEDGRTLADYNIQKESTLHLVLRLRGGMQIFVKTLTGKTITLEVESSDTIDNVKAKIQDKEGIPPDQQRLIFAGKQLEDGRTLADYNIQKESTLHLVLRLRGGMQIFVKTLTGKTITLEVESSDTIDNVKAKIQDKEGIPPDQQRLIFAGKQLEDGRTLADYNIQKESTLHLVLRLRGGMQIFVKTLTGKTITLEVESSDTIDNVKAKIQDKEGIPPDQQRLIFAGKQLEDGRTLADYNIQKESTLHLVLRLRGGF

SEQ ID NO: 44461 - protein, 888 aa, Vibrio vulnificus YJ016
MDVIFLRGRMTMNEKYAALKSNVSMLGHLLGNTIQEAHGDEILEKVETIRKLSKSARAGNQADRNNLIEEIKSLPDEQLTPVARAFNQFLNLTNIAEQYHTISRHCDAHVCEPDAINTLFAKLGQNGINKLDTAQAIRELNIELVLTAHPTEITRRTMINKLVKINECLSKLELSDLSYKERHKTEKRLEQLIAQSWHSDVIRKQRPTPLDEAKWGFAVVENSLWEAVPDFLRELDEKLKDYLDQGLPIDARPVHFSSWMGGDRDGNPFVTHTVTREVLLLSRWKAADLYLKDINELISELSMTKCNDTVRQLAGEDEHEPYRAILKQLRTLLSDTKEILDAKINGQKLAVKAPLQSVEQLWDPLFACYQSLRECGMSMIAEGSLLDTLRRVKAFGVHLVRLDIRQESTRHADVLSELTRYLGIGDYNHWSEQDKIAFLTNELASKRPLLPRDWQPSEPVKEVLDTCKIIAAQSREAFGAYVISMAKTASDVLAVHLLLQESGCPYRMDVCPLFETLDDLNNAEAVIKQLMSIDLYRGFIQNHQMVMIGYSDSAKDAGVMAAGWAQYHAMEALVNVAEQEGIELTLFHGRGGTIGRGGAPAHAALLSQPPKSLKGGLRVTEQGEMIRFKLGLPDVAVNSFNMYASAILEANLLPPPEPKQEWRDLMEVLSQVSCEAYRSVVRGEPDFVPYFRQATPELELGKLPLGSRPAKRNPNGGVESLRAIPWIFSWSQNRLLLPAWLGAGEAIQYSIDKGHQALLEEMCREWPFFSTRLGMLEMVYLKCNSEISRYYDERLADKSLLPLGDRLRDQLQSDIKAVLNVENNENLMQSDPWGQESIRLRNIYIEPLNMLQAELLYRTRQAGVVSEELEEALMVTIAGIAAGMRNTG

SEQ ID NO: 44462 - protein, 485 aa, Arabidopsis thaliana
MILLPEPSPTTGSLFKPRPVHISASSSSYTGRGFHRNTFTEQKSSEFEFRPPASNMVYAELGKIRSEPPVHFQGQGHGSSHSPSSISDAAGSSSELSRPTPPCQMTPTSSDIPAGSDQEESIQTSQNDSRGSTPSILADDGYNWRKYGQKHVKGSEFPRSYYKCTHPNCEVKKLFERSHDGQITDIIYKGTHDHPKPQPGRRNSGGMAAQEERLDKYPSSTGRDEKGSGVYNLSNPNEQTGNPEVPPISASDDGGEAAASNRNKDEPDDDDPFSKRRRMEGAMEITPLVKPIREPRVVVQTLSEVDILDDGYRWRKYGQKVVRGNPNPRSYYKCTAHGCPVRKHVERASHDPKAVITTYEGKHDHDVPTSKSSSNHEIQPRFRPDETDTISLNLGVGISSDGPNHASNEHQHQNQQLVNQTHPNGVNFRFVHASPMSSYYASLNSGMNQYGQRETKNETQNGDISSLNNSSYPYPPNMGRVQSGP

SEQ ID NO: 44463 - protein, 432 aa, Picrophilus torridus DSM 9790
MSFDVSWLNTGNNAWMLTAATLVGLQSIPGLALYYAGMTKRKYMVNAMMMALYAFSAVLVVWVIAGYSFGFGTVPLLKIDGYYIFSMPVPVGSASFIAGQAIVGPERIALSIPNSTVIFFQFVFAAITPVLLMGGILERMNFKAWMVFVPVWSFLVYSPVAYWLFAGGWLNQLGAVDFSGGYVIHLDAGVGALAAALAIGPRIKEDMNLKANNLGLVMLGLGLIWLGWDGFNGGDPYGSGIDAAIAIINTNVATAVSMITWMLMDMKFFKKASLIGASVGAIAGLVGITPAAGYVNIYGAMVIGIATGIIPWIALYKIEPHFKIDDALGVFSSHAVAGIVGGILTGVLADPFITQYIDPGLRGAIYGDFYQLGIQALAAAVVFAYTFAMTIAILKIIGLFIPLREKEENLKLGDLAIHGEIGFEDSYQAVRK

SEQ ID NO: 44464 - protein, 399 aa, Pseudomonas syringae pv. syringae B728a
MLAHVESYAGDPILSLMETFGKDPRADKVNLSIGLYYDAQGRIPQLACVATAQQQLAEGEQAASVYLPMEGLAAYRQAVQTLLFGADHPLVQAGRVATIQTVGGSGALKIGADFLKYAFPDSQVWVSDPTWENHNALFGGAGFKVNAYPYFDAQTGGVRFETMLDTVQGLPAQSILLLHPCCHNPTGADLTVAQWDRLIEVIKDRQLIAFLDIAYQGFGKGIDEDVYAIRAMANAGITTLVSNSFSKIFSLYGERVGGLSVVCEDTTSAANVFGQLKATVRRNYSSPPAHGAFLVSKVLNTPHLREQWLGEVEAMRLRIIDMRTRLVEVLAQKVSGHDFSFILRQNGMFSYTGLTPQQVDELKDVHGIYMLRSGRVCMAGLNEGNIDKVCNAIASLFAR

SEQ ID NO: 44465 - protein, 458 aa, Vibrio parahaemolyticus RIMD 2210633
MTFLSQLSTHADKAFLRRLFAIALPITLQSIMFSSRSLVDVLMLGQLGEAEIAAVGVAARATFVTTIMLVGVTTGGALLTAQYWGAGDKIGVRQSTSLTWMIAMVFAALAVCLFVFFPQPIMGLTTDSQEVIELGSSYLVISSASMFAVACVASMAVGLRAMHQPGLSTFFSGIGILSNVFLNWVLIFGHLGFPALGITGAAIATVISGAIEVGCLFGYLWLKKHIIAFGWGDIRASLVLDKITRFLSLSLPTTFNFLAWAGGLFAYHAIMGQAGVQGLAALSVMTPVESIALAMMIGLSNAAAVLVGNQLGAKNFEPVYYQAWATVILNVLIAFGVAVLLFFTNQLILDAFSALSAETRHLAEQFMVILALGVILRSVPMMVIVGVLRAGGDVKFCLYQDVFAQWIIGIPLAAFAAIYLGWEPQWVYLLFLTEEVVKWCICLPRMKSKKWMKNLIEK

SEQ ID NO: 44466 - protein, 202 aa, Saccharomyces pastorianus
MATNITWHPNLTYDERKELRKQDGCTVWLTGLSASGKSTIACALEQLLLQKNLSAYRLDGDNIRFGLNKDLGFSEKDRNENIRRISEVSKLFADSCAVSITSFISPYRVDRDRARDLHKEAGLKFIEIFVDVPLEVAEQRDPKGLYKKAREGVIKEFTGISAPYEAPKAPELHLRTDQKTVEECAAIIYEYLVNEKIIRKHL

SEQ ID NO: 44467 - protein, 152 aa, Candida glabrata CBS138
MSNNERTFIAIKPDGVQRGLIGKILGRFETRGYKLVGIKLIQADQKLLEQHYAEHIGKPFFGPMTAFMSSGPILATVWEGKDAVKQGRAMLGATNPTQSAPGTIRGDFGIDLGRNVCHGSDSVESANREIGIWFKKEELVEWKPSNLAWIYE

SEQ ID NO: 44468 - protein, 824 aa, Saccharomyces cerevisiae
MMNFFTSKSSNQDTGFSSQHQHPNGQNNGNNNSSTAGNDNGYPCKLVSSGPCASSNNGALFTNFTLQTATPTTAISQDLYAMGTTGITSENALFQMKSMNNGISSVNNNNSNTPTIITTSQEETNAGNVHGDTGGNSLQNSEDDNFSSSSTTKCLLSSTSSLSINQREAAAAAYGPDTDIPRGKLEVTIIEARDLVTRSKDSQPYVVCTFESSEFISNGPESLGAINNNNNNNNNNQHNQNQHINNNNENTNPDAASQHHNNNSGWNGSQLPSIKEHLKKKPLYTHRSSSQLDQLNSCSSVTDPSKRSSNSSSGSSNGPKNDSSHPIWHHKTTFDVLGSHSELDISVYDAAHDHMFLGQVRLYPMIHNLAHASQHQWHSLKPRVIDEVVSGDILIKWTYKQTKKRHYGPQDFEVLRLLGKGTFGQVYQVKKKDTQRIYAMKVLSKKVIVKKNEIAHTIGERNILVTTASKSSPFIVGLKFSFQTPTDLYLVTDYMSGGELFWHLQKEGRFSEDRAKFYIAELVLALEHLHDNDIVYRDLKPENILLDANGNIALCDFGLSKADLKDRTNTFCGTTEYLAPELLLDETGYTKMVDFWSLGVLIFEMCCGWSPFFAENNQKMYQKIAFGKVKFPRDVLSQEGRSFVKGLLNRNPKHRLGAIDDGRELRAHPFFADIDWEALKQKKIPPPFKPHLVSETDTSNFDPEFTTASTSYMNKHQPMMTATPLSPAMQAKFAGFTFVDESAIDEHVNNNRKFLQNSYFMEPGSFIPGNPNLPPDEDVIDDDGDEDINDGFNQEKNMNNSHSQMDFDGDQHMDDEFVSGRFEI

SEQ ID NO: 44469 - protein, 361 aa, Bacteroides fragilis NCTC 9343
MKKKFTIFVVLLAGIIYTGHAQGVQWIYQQKQEKKNMKNLSEIYFAGGCFWGTDHFLKQIRGVKSTQVGYANGNIANPTYQQVCTGKTNFAETVKVEYNPQEVPLKLLIDLFFKTIDPTSLNRQGNDKGSQYRTGIYYTDKVDLPTIRTAIDELAKEYSKPIVIEVKPLSNFYKAEEYHQDYLDKNPGGYCHINPALFELAKKANAQAEQPQTNYKKPDDATLRSKLTPEQYAVTQKNATEPAFHNEYWDEKRDGIYVDITTGEPLFISTDKFDSGCGWPSFTKPIEKEVIKEKMDTSHGMIRTEVRSKTGDAHLGHVFTDGPKEKGGLRYCINSASLRFIPKEKMKEEGYGEYLKLLPQK

SEQ ID NO: 44470 - protein, 433 aa, Symbiobacterium thermophilum IAM 14863
MTARYERSAALYERAVARIVGGVNSPARSFKSVGGGAPVFMARGQGPYLYDVDGNRYIDYIGAFGAGMFGHGHPELVAAVARAAEGGTIYGTPNPWEVELAERIHQALPSMERIRFVTTGTEAVMSAVRVARAFTGRPKIIKMEGCYHGHSDFALIAAGSGPSQLGTPDSAGVTEGVAQDVITVPYNDLDSLGEALDVWGPQVAAVLVEPIVGNFGVAMPKPGYLEGVKRLAHAHGALLIFDEVITGFRVAYGGAQTLLGIEPDLTTLGKIIGGGLPLAAYGGRAEIMDWVAPLGPAYQAGTLAGNPLCMQVALTGLEILSRPGVYERLDADAAYLADGLVRSARSHGHTVQLGRAGSMFTLFFCDEPVVDYRTAQRSDPAKFAAMFRGLLDRGIALAPSRFEAWMLTVQHTRADLEETLQIADEVFAQMAGQ

SEQ ID NO: 44471 - protein, 260 aa, Clostridium acetobutylicum ATCC 824
MKIALGQIDVFFEDKERTKEKCLNFMKKAADKKADLIIFPEMTLTGFSMKVDKIGENKFETLEWFKEKSKEFNIYSGFGFVEGTKKGKNNFSICSPLGEEILRYTKLHPFSYGNEDKYFYKGNEIVYCKIGDFNISTFICYDLRFPEIFQKASKESECILIIANWPKVRREQWIALIKARAIETQSYIAAVNRVGEGDGLYYSGDSMVVNPYGEITAFKSEKEELLICDININEVKKCREEFRFKEDRREEFYCKLFMKK

SEQ ID NO: 44472 - protein, 311 aa, Glycine max
MAAADSSAAPSHQLSQRETDIQMMLAADVHLGTKNCDFQMERYVFKRRTDGIYIINLGKTWEKLQLAARIIVAIENPQDIIVQSARPYGQRAVLKFAQYTGAHAIAGRHTPGTFTNQMQQSYNEPRLLILTDPRTDHQPIKEGALGNIPTIAFCDTDSPMRYVDVGIPANNKGKHSIGCLFWLLARMVLQMRGTIRPGHKWDVMVDLFFYREPEEAKQQEEDEAPPAQDYAISDFNAAGIGSFPASDGQWPAAVEQPWTEEAPQPISAAPTNLTPEAAVAGDWGEAVPAPVPAPQAGVPPAQAFPPATGWD

SEQ ID NO: 44473 - protein, 142 aa, Brassica napus
KFWDISFPVAAMSLLNYLKNMTSVACMGRLGSLELAGGALAVGFTNITGYSVLSGLATGMEPLCGQAIGSKNPSLASLTLKRTIFLLLLASLPISLLWLSLQPLMLILRQQEDITRVASLYCSFSLPDLLANSFLHPLRIYL

SEQ ID NO: 44474 - protein, 773 aa, Arabidopsis thaliana
MVKEIASWLLILSMVVFVSPVLAINGGGYPRCNCEDEGNSFWSTENILETQRVSDFLIAVAYFSIPIELLYFVSCSNVPFKWVLFEFIAFIVLCGMTHLLHGWTYSAHPFRLMMAFTVFKMLTALVSCATAITLITLIPLLLKVKVREFMLKKKAHELGREVGLILIKKETGFHVRMLTQEIRKSLDRHTILYTTLVELSKTLGLQNCAVWMPNDGGTEMDLTHELRGRGGYGGCSVSMEDLDVVRIRESDEVNVLSVDSSIARASGGGGDVSEIGAVAAIRMPMLRVSDFNGELSYAILVCVLPGGTPRDWTYQEIEIVKVVADQVTVALDHAAVLEESQLMREKLAEQNRALQMAKRDALRASQARNAFQKTMSEGMRRPMHSILGLLSMIQDEKLSDEQKMIVDTMVKTGNVMSNLVGDSMDVPDGRFGTEMKPFSLHRTIHEAACMARCLCLCNGIRFLVDAEKSLPDNVVGDERRVFQVILHIVGSLVKPRKRQEGSSLMFKVLKERGSLDRSDHRWAAWRSPASSADGDVYMRFEMNVENDDSSSQSFASVSSRDQEVGDVRFSGGYGLGQDLSFGVCKKVVQLIHGNISVVPGSDGSPETMSLLLRFRRRPSISVHGSSESPAPDHHAHPHSNSLLRGLQVLLVDTNDSNRAVTRKLLEKLGCDVTAVSSGFDCLTAIAPGSSSPSTSFQVVVLDLQMAEMDGYEVAMRIRSRSWPLIVATTVSLDEEMWDKCAQIGINGVVRKPVVLRAMESELRRVLLQADQLL

SEQ ID NO: 44475 - protein, 308 aa, Triticum aestivum
TATHASAHNGERIGTYHGHQGALWTVDVNPSSELLATGGADNTMRLWHVQTGKLLHTWEFNTSIKRCEFSPDGRQLLGVTEKRSGHLSTICVYPINPDPEAQQSDEQLLRIVCDESKATVAGFSYLAKYIISGHEDGSITQWDGKTGELLSSNYDVHEPDMQITDIQWAPDRTYFITASKDKTAKLVDVEELNVLKSYVADTPLNSAAITPVKDYVILGGGQAAMDVTTTSARQGKFEARFYHKIFMEEIGRVRGHFGPLNYVAVHPQGTSYCSGGEDGYVRVHHFDKAYFDFMYEVEREVAQSQSNL

SEQ ID NO: 44476 - protein, 567 aa, Zymomonas mobilis subsp. mobilis ZM4
MMVETFMSYQSQPAIPVKESRVTLLRNPLLNKGSAFSAEERKAFQLEGLVPAQIESINIQAERCYQQYKEQKTDLDRYIFLRALQDENETLFFHLVADHIADMMPILYTPTVGSACQNYSHLFRKSRGLFIAYPDRDKIGDILKQTEQENIKIIVVTDGERILGLGDLGVGGMGIPIGKLALYTACGGIDPATVLPIVLDVGTNNENLLNDPLYMGWHHKRITGDEYYSFVDRFVQAVMQQWPDVFLHFEDFAQKNALPLLKKYRDQYCCFNDDIQGTSAVALATLYSACKTRKTSIRDQRIIFLGAGSAGCGIAEQIVSAMVAEGLDEATARGQVYMVDRNGLITDDMQDIPDFQKKLAQPLSKLKNWKSQDQGFFLLDVVKQSKATVLIGVSGQKGLFTEEVIKTLASQCEAPFVMPLSNPTSHMEAIPEDILKWTEGKALVATGSPFSPVVINGKSFPIAQCNNAYIFPGIGLGVLAAKATRVTDNMMVAAAYALADTAPAAQNKGNAILPSFDDIEEVSYVIALAVAKAAVKDGVAEQKDETALLALIKGYYWHPEYRAYQLA

SEQ ID NO: 44477 - protein, 512 aa, Zymomonas mobilis
MTLAVVHFWRLFRWSRILSKHGVLKTVEKSTIVPLSLRLIIRLLRIGYRVPNPPDYTGAFVALGPAAIKFGQTLATRPDLIGEETAAQLACLQDSVPPLPFKDIRIVIENALGCPIEKSFRFFNEIPIGSASIAQVYQAETLDGVTVAVKVLRPGIKLAFRKATETYEWAATKIESLNDEFIRLRPKLVVKTFRQWTIRELDLRREAASASELAENMEAVPGFKVPVIDWNRTSQSMMVMQWIDGIKLSDHQKLQEAGYDLKSLATRLVRSFLRQAIADGFFHADLHHGNLFALKDGSLAVVDFGIMGRIDKKARRWLAEILYGLITGNYSRIAEIHFEAGYVPSHHDIAEFTTALRTIGEPIRGLSVRDISISHMLDGLFSITREFEMQTQPHLLLLQKTMVVVEGVATSLYPDINLWDTAEPFVREWLRSELGPEAKIAEEFYKTLQSIKRLPELIDRIDQYYPPLTIEEQLYPVANKNSIKSAATKHYLPVFILSAFIIGIVLGHYHFF

SEQ ID NO: 44478 - protein, 74 aa, Eustoma grandiflorum
GIANAAKHPAAFFPFGGGPRICIGQNLALLEAKMALSTILQRFSFELSPSYTHAPYTVLTLHPQHGAPIMLKKI

SEQ ID NO: 44479 - protein, 77 aa, Betula platyphylla
MSSCGGNCNCGSDCKCGSGCKCGKHADLSYSEKTTTETIIAGVAPVKINYEGSEMSSGAENGCKCGSNCSCDPCSCK

SEQ ID NO: 44480 - protein, 439 aa, Corynebacterium glutamicum ATCC 13032
MNLTRNDRLDRLPVTSKHKKILGGSGIGWALDAMDVGLISFVMAALATHWGLSPTETSLLGSIGFVGMAIGASLGGLLADKLGRRQVFALSLLVYGVATGASALSVSLAMLMALRFVVGLGLGAELPVASTLISEFSPRKVRGRMVVILEAFWALGWIMAAIVGTFVVAGSDNGWRWALALGCVPAIYAVYVRLGLPESVRFLEKKGRHDEAEAIVVSFEEAAAAEGKAADATTAVVHDNAAEGSVSIWSAALRKRTVALWIVWFCINLSYYGAFIWIPSLLVADGFTLVKSFQFTLIITLAQLPGYAVAAWLIEKWGRRSTLATFLVGSAISAALYGLANVEWQILVAGCLLSFFNLGAWGALYAIGPELYPTNVRGTGTGAAAGFGRIASIIAPLIVPPVIAFGGPIALFALFATAFAIAAIAAFTLPEQKGKSLAD

SEQ ID NO: 44481 - protein, 456 aa, Thermoanaerobacter tengcongensis MB4
MLRKSYYRLFFINLIGILTLALFFWGKVSIENLLIGVGIALFISFVLSYRFLRRIIDPLQEITEVTKDIANGIYHHGIKDNSIDEIRELYFAVSSMSHKLRETIEELNDRNATLEAILKSIANGVIAFDNAERILMMNDSAKKILGIEEKDLTGRRVFEVIRSSKLYEVFETLRKNKVLSSKSLELNFFNKHLKVYISPILHPVSHVNLGFVLVIDDITEMRKLEKIRSEFVANVSHELRTPLTSIRGFIETLRSGAIENPEAREKFLDIIDFEAERLTRLINDILTLSEIENVKEGYPVEKIEMDKEIEDILYIMEKAAKDKSITLKRDLNCGNLTIIANRDRFHQMMINLIDNGIKYTQEGGFVKVSTRLEGEKIIIEVEDNGIGIPKDKIPRLFERFYRVDKSRSRKLGGTGLGLAIVKHIVESMKGEISVESEVGKGTKFTIRFNRKDLTKT

SEQ ID NO: 44482 - protein, 213 aa, Arabidopsis thaliana
MAKMGLKPDPATTNQTHNNAKEIRYRGVRKRPWGRYAAEIRDPGKKTRVWLGTFDTAEEAARAYDTAARDFRGAKAKTNFPTFLELSDQKVPTGFARSPSQSSTLDCASPPTLVVPSATAGNVPPQLELSLGGGGGGSCYQIPMSRPVYFLDLMGIGNVGRGQPPPVTSAFRSPVVHVATKMACGAQSDSDSSSVVDFEGGMEKRSQTVRSRS

SEQ ID NO: 44483 - protein, 90 aa, Triticum aestivum
  misc_feature (56)..(56): Xaa can be any naturally occurring amino acid
  misc_feature (73)..(73): Xaa can be any naturally occurring amino acid
  unsure (1)..(90): unsure at all Xaa locations
SSLMASRWVRPEVYPLFAAMGVAVGICGFQLFRNITGNPEVRVNKAGRAAGVLEKXREGRRYAMHGLRSFVHXKTPEIMPAINKFFTDPK

SEQ ID NO: 44484 - protein, 786 aa, Frankia sp. EAN1pec
MSPIHTLQAEDPPIDLSGGAVGLVAGVAIVAALALLVAAYLVREVLAANAGTPKMIEVGRAVQEGAAAYLRRQFRTLAGFVIVIPFVLLLLPADDTGARVGRSVFFVVGAVFSALVGFVGMSLATRANTRTAAAAIESGERAAMRIAFRTGGVVGMFTVGLGLLGAAVVVLAFRDTAPQVLEGFGFGAALLAMFMRVGGGIFTKAADVGADLVGKVEQGIPEDDPRNAATIADNVGDNVGDCAGMAADLFESYAVTLVAALILGVKAFGENGLVYPLLIPAVGVLTAIIGIFAVSPRDGDRTGMTAINRGFFISAVVSAIGVVIVSMVYLPGSFAEFPGLEGSTQSGDPRVIAISAVLIGIVLAAAIQLLTGYFTETNRRPVLGVAEASTTGPATNILAGIGVGLESAVYSALLIGAAVFGAYLLGSGSVTIALFAVALAGTGLLTTVGVIVSMDTFGPVSDNAQGIAEMSAGPEGIDERAGAILTSLDAVGNTTKAITKGIAIATAVLAATALFGSFTDTVTTALADAGASTEAARGTVGGLNIAYPDALVGLIIGAAVVFLFSGLAINAVGRAAGRVVMEVRNQFRTKPGIMEGTEKPDYGAVVDICTRDSLRELVTPGTLAVMAPIAVGFGLGYPPLGAFLGGAIAAGVLMAVFLANSGGAWDNAKKLVEDGNYGGKGSDVHAATVIGDTVGDPFKDTAGPSINPLLKVMNLVSLLIAPLVVKFSVGEDENTAARIGIALAAVVVIVAVVATSRRRGSSVGDGPPTPSAPPTRTPPSGSEVKV

SEQ ID NO: 44485 - protein, 306 aa, Saccharomyces cerevisiae
MNQIWSTGPPNFYFNSEWKENKRNDRTIEDSLRELDGLIHSLERTHIEVQTNPKLKNDVTALNDINKKENKEEITHENYTHQINSIPLTSSNLNRHFSFSRDYNQSDNSNNNYYREYLSKPRYLQQSTKEQTFNEINKRKSAAIIPPWLNIPENSRFFVIKSSSLKHVKRSFYNGIWSSTHFGNKRLSEAYKKLNSGAKVFLFFSINTSGRFCGVAEMVSDLKMDLDTSIWEDEQKYGKAFKVRWVIVRDINNRSLKRFLIPSNEMKPITHSRDTQEIPYSIGISIINLFKTQDSDIFSFLDETYE

SEQ ID NO: 44486 - protein, 463 aa, Pseudomonas syringae pv. syringae B728a
MSSTANSSELEQGLKPRHITMLSIAGVIGAGLFVGSGHAIAEAGPAVLLAYAAAGTLVVLVMRMLAEMAVASPDTGSFSTYADRAIGHWAGFTIGWLYWWFWVLVIPLEANAAATILHAWFPNIAIWVFTLVITLVLTATNLFSVKNYGEFEFWFALIKVVAIIAFVVLGVAAIFGLLPTSNVSGVSHLFDTGGFLPNGMGAVLAAMLTTMFSFMGTEIVTIAAAESKNPGKQITKATNSVIWRIFLFYLVSIFIVVSLVPWNDPRLAEVGSYQTVLDAMGIPNAKLIVDLVVLVAVTSCLNSALYTASRMLFSLGKRGDAPAVSKRTSKGGTPHWAVIMSTAAAFLTVFANYIAPAAVFDFLLASSGAIALLVYLVIAVSQLRMRQKRIAAGEAIDFKMWLFPWLTWAVIAFIVAVLTIMLLQEEHRLEIIATGVLSLLVIGAGMIVSRRRKDGRVGAAALG

SEQ ID NO: 44487 - protein, 265 aa, Emericella nidulans
MEQAQQTSGQQQGRQQPVYDTRQGGHYGASAALAAQGFAPVAELYTGTWANVNQGLQGTARDILTTYWQHVINHLESDNHDYKIHQLPLARIKKVMKADPEVKMISAEAPILFAKGCDVFITELTMRAWIHAEDNKRRTLQRSDIAAALSKSDMFDFLIDIVPREEATSHAKRSSQSAGAPAGPGGPTAAGQLPQTQHGVQHHPHHMAPPDYGALGQHPLQDQEYRQQTMYGGAVQSDPTAAYAQPQTQMFEGMYTAYPHLPPQQ

SEQ ID NO: 44488 - protein, 433 aa, Oryza sativa
MAKRKGTLLQGGGSSQGGKRLRYSGPDLPEDIWRHIHFLMPLRDAARAACISQAFLRSWRHHPNLILRKKTMGLEHKAYRRVGMARDFTSTVHSILKNHSGIGVKRLKLDIIYDHRNLNICYLNNWLQIAITPGIEEITLLLPSKYTFPCSLLSGGIGRSLQYLKLVRCAFRPTASLGFLSSLTKLHLCEVRIKDDELTCLISKSLALKQLELLNCRQIICLKIPCLLEQLSCLNVSLCENLQMIESKAPNLSTFSYISNLVVELSLKQSSQVKTLDIDCYDESNFLCHVITKFPNIVPNLETLTLHSIDEVQQGEMKHDSVFGDASNLRTMPGHKHESLKDVEIIGFCSATSMVELTCYLLKNAISLEYITLALRREMILEAHRGVMAIERYIRGKVPSKVELTVLELCIWCHDLERLDALDKGKLITFPTS

SEQ ID NO: 44489 - protein, 931 aa, Streptococcus agalactiae NEM316
MSHPKLESSSNKEIITEEVGLLKQLLDEATQKLIGSESFDKIEKIVSLSLTDDYTGLKETISALSNEEMVIVSRYFSILPLLINISEDVDLAYEINYKNNLNQDYLGKLSTTIDVVAGHENAKDILEHVNVVPVLTAHPTQVQRKTVLELTSKIHDLLRKYRDVKAGIVNQEKWYADLRRYIGIIMQTDTIREKKLKVKNEITNVMEYYNRSLIKAVTKLTAEYKALAAKKGIHLENPKPLTMGMWIGGDRDGNPFVTAETLRLSAMVQSEVIINHYIEQLNELYRNMSLSINLTEVSPELVTLANQSQDNSVYRENEPYRKAFNFIQDKLVQTLLNLKVGSSPKEKFVSRQESSDIVGRYIKSHIAQVASDIQTEELPAYATAEEFKQDLLLVKQSLVQYGQDSLVDGELACLIQAVDIFGFYLATIDMRQDSSINEACVAELLKSANIVDDYSSLSEEEKCQLLLKELTEDPRTLSSTHAPKSELLQKELAIFQTARELKDQLGEDIINQHIISHTESVSDMFELAIMLKEVGLIDANQARIQIVPLFETIEDLDNSRDIMTQYLHYELVKKWIATNNNYQEIMLGYSDSNKDGGYLSSGWTLYKAQNELTKIGEENGIKITFFHGRGGTVGRGGGPSYEAITSQPFGSIKDRIRLTEQGEIIENKYGNQDAAYYNLEMLISASIDRMVTRMITNPNEIDNFRETMDGIVSESNAVYRNLVFDNPYFYDYFFEASPIKEVSSLNIGSRPAARKTITEISGLRAIPWVFSWSQNRIMFPGWYGVGSAFKHFIEQDEANLAKLQTMYQKWPFFNSLLSNVDMVLSKSNMNIALQYAQLAGSKEVRDVFNIILNEWQLTKDMILAIEQHDNLLEENPMLHASLDYRLPYFNVLNYVQIELIKRLRSNQLDEDYEKLIHITINGIATGLRNSG

SEQ ID NO: 44490 - protein, 220 aa, Pseudomonas aeruginosa UCBPP-PA14
MSLTLYGAPLSPFVRKVRLLLAEKGLDYQLEAIAPFGQPAWYREISPLGRIPALRDGDLALADSSVICQYLEERYPEPPNLQGDAPAGRAAVRWLEKYADYEIAPLATLTIFRNRILKPAMGQACEENDVRRALEEKLPAHFDYLENHLDGRAFFVGERLTLADLAIASQLVNLRHAGENLDEQRWPALAAHFARMLERPAMQALLPGERRTLDKLAAKA

SEQ ID NO: 44491 - protein, 504 aa, Mycobacterium tuberculosis
WGAPTITNDGVSIAKEIELEDPYEKIGAELVKEVAKKTDDVAGDGTTTATVLAQALVREGLRNVAAGANPLGLKRGIEKAVEKVTETLLKGAKEVETKEQIAATAAISAGDQSIGDLIAEAMDKVGNEGVITVEESNTFGLQLELTEGMRFDKGYISGYFVTDPERQEAVLEDPYILLVSSKVSTVKDLLPLLEKVIGAGKPLLIIAEDVEGEALSTLVVNKIRGTFKSVAVKAPGFGDRRKAMLQDMAILTGGQVISEEVGLTLENADLSLLGKARKVVVTKDETTIVEGAGDTDAIAGRVAQIRQEIENSDSDYDREKLQERLAKLAGGVAVIKAGAATEVELKERKHRIEDAVRNAKAAVEEGIVAGGGVTLLQAAPTLDELKLEGDEATGANIVKVALEAPLKQIAFNSGLEPGVVAEKVRNLPAGHGLNAQTGVYEDLLAAGVADPVKVTRSALQNAASIAGLFLTTEAVVADKPEKEKASVPGGGDMGGMDFHHHHHH

SEQ ID NO: 44492 - protein, 230 aa, Streptococcus agalactiae NEM316
MVKLVFARHGESEWNKANLFTGWADVDLSEKGTQQAIDAGKLIQAAGIEFDLAFTSVLKRAIKTTNLALEAADQLWVPVEKSWRLNERHYGGLTGKNKAEAAEQFGDEQVHIWRRSYDVLPPDMAKDDEHSAHTDRRYASLDDSVIPDAENLKVTLERALPFWEDKIAPALKDGKNVFVGAHGNSIRALVKHIKQLSDDEIMDVEIPNFPPLVFEFDEKLNLVSEYYLGK

SEQ ID NO: 44493 - protein, 967 aa, Pisum sativum
MANKMEKMASIDAQLRQLAPAKVSEDDKLIEYDALLLDRFLDILQDLHGEDLKDSVQEVYELSAEYERKHDPKKLEELGKLITGLDAGDSIVVAKSFSHMLNLANLAEEVQIAHRRRNKLKKGDFRDESNATTESDIEETLKKLVFNMKKSPQEVFDALKNQTVDLVLTAHPTQSVRRSLLQKHARVRNCLSQLYAKDITPDDKQELDESLQREIQAAFRTDEIKRTPPTPQDEMRAGMSYFHETIWKGVPKFLRRVDTALKNIGINERVPYNAPLIQFSSWMGGDRDGNPRVTPEVTRDVCLLARMMAANLYYSQIEDLMFELSMWRCNDELRDRAEELHRNSKKDEVAKHYIEFWKKVPLNEPYRVILGHVRDKLYRTRERSRYLLAHGYSDIPEEDTFTNFDEFLEPLELCYRSLCFCGDRAIADGSLLDFLRQVSTFGLSLVRLDIRQESDRHTDVMDAITKHLEIGSYQEWSEEKRQEWLLSELVGKRPLFGPDLPTTDEIRDVLDTFHVIAELPSDNFGAYIISMATAPSDVLAVELLQRECKIKNPLRVVPLFEKLADLEAAPAALARLFSIDWYRNRIDGKQEVMIGYSDSGKDAGRFSAAWQLYKAQEELINVAQKFSVKLTMFHGRGGTVGRGGGPTHLAILSQPPDTIHGSLRVTVQGEVIEQSFGEEHLCFRTLQRFTAATLEHGMRPPSSPKPEWRALMDQMAIIATEEYRSIVFKEPRFVEYFRLATPEMEYGRMNIGSRPAKRRPSGGIETLRAIPWIFPWTQTRFHLPVWLGFGSAFKQVIEKDVKNLHMLQDMYNQWPFFRVTIDLVEMVFAKGDPGIAALNDRLLVSQNLWPFGEQLRNKYEETKKLLLQVATHKEVLEGDPYLKQRLRLRDSYITTLNVFQAYTLKRIRDPKSSVNASRLPLSRESPEATKPADELVTLNPTSEYAPGLEDTLILTMKGIAAGMQNTG

SEQ ID NO: 44494 - protein, 403 aa, Arabidopsis thaliana
MDAKKLDTGPRDAINWLPDEILGKILSLLATKQAVSTSVLSKKWRTLFKLVDTLEFDDSVSGMGEQEASYVFPESFKDLVDRTVALQCDYPIRKLSLKCHVGRDDEQRKACVGRWISNVVGRGVSEVVLRINDRGLHFLSPQLLTCKTLVKLTLGTRLFLGKLPSYVSLPSLKFLFIHSVFFDDFGELSNVLLAGCPVVEALYLNQNGESMPYTISSPTLKRLSVHYEYHFESVISFDLPNLEYLDYSDYALYGYPQVNLESLVEAYLNLDKAEHVESPDVTKLIMGIRNVEILSLSPDSVGVIYSCCKYGLLLPVFNNLVSLSFGTKKTRAWKLLADILKQSPKLETLIIEDLNGYPLDVSMPLNQVKELQILEYGESDDEVKRLKSFLGEESMIEVVFPEV

SEQ ID NO: 44495 - protein, 207 aa, Bradyrhizobium sp. BTAi1
MSERLLVLVRHGQSEWNLKNLFTGWKDPDLTEQGVSEAKEAGRKLKAHGLTFDVAFTSELTRAQHTLKLILDELGQPGLPTSRNLALNERDYGDLSGLNKDDARAKWGEEQVHVWRRSYDVPPPGGESLKDTLARALPYYVQEILPGVLRGQRTLVAAHGNSLRALIMVLEKLTPEGILKRELATGVPIIYRLKADSTVESKLDLAG

SEQ ID NO: 44496 - protein, 475 aa, Listeria innocua Clip11262
MATEYDVVILGGGTGGYVAAIQAAKNGQKVAVVEKGKVGGTCLHRGCIPTKALLRSAEVLQTVKKASEFGISVEGTAGINFLQAQERKQQIVDQLEKGIHQLFKQGKIDLFAGTGTILGPSIFSPTAGTVSVEFEDGSENEMLIPKNLIIATGSKPRTLNGLTIDEENVLSSDGALNLETLPKSIIIVGGGVIGMEWASMMHDFGVEVTVLEYADRILPTEDKEVAKELARLYKKKKLTMHTSAEVQAASYKKTDSGVEIKAVIKGEEQTFTADKMLVSVGRSANTENIGLQNTDIATENGFIQVNDFYQTKESHIYAIGDCIPTIQLAHVAMEEGTIAANHIAGKETEKLGYDLVPRCIYTSTEIASVGITEEQAKERGHDVKKGKFFFRGIGKALVYGESDGFIKIIADKKTDDILGVSMIGPHVTDMISEAALAQVLNATPWEVGNTIHPHPTLSESFREAALAVDGNAIHG

SEQ ID NO: 44497 - protein, 397 aa, Enterococcus faecalis V583
MSTTTIQTIQEAIATEKEWIIHLRRHFHQYPEASLKEYETIKRIKEELLALAIPFVEVGETGVLATIEGGLGAGKTILLRADIDALELPDATGAAYASKNPGLNHACGHDGHAAALLGAAKVLKKHQDTFSGTIKLAFQPAEEIGAGARQFVEGNYLEAIDQVFGIHLDSSVPVGKLVATKGATNASCDIFKIEVSGQSSHVAQPQNGRDAVLAAASIVVELQKIVAREIDPLDSVVVGIGVLQAGTRYNIVANQATIEGTVRTFSQETRQFVLQRVEEIAHEIAQSNRTEIADFSVYAAANPLINEEQATNRAQQVASEIVGFENVVTDHPKSLGADDFADYLAVIPGIYGRVGSRNPENPATHFGHHHEQFDIDERALLLAAEYHVRYALNYLSE

SEQ ID NO: 44498 - protein, 331 aa, Listeria innocua Clip11262
MTLKEAGLTEDKLIKMYETMLMARRLDERMWLLNRSGKIPFTISGQGQETAQIGAAFAFDLEKDYALPYYRDLAVVLAFGMTAKDIMLSAFAKAEDPNSGGRQMPAHFGQKSNRIVTQSSPVTTQFPHAAGIGLAAKMAGDDIAIYASTGEGSSNQGDFHEGINFASVHKLPVVFVIHNNQYAISVPASKQYAAEKLSDRALGYGIPGERVDGSNMGEVYAAFKRAADRARNGEGPTLIETVSYRFTPHSSDDDDSSYRSREEVDEAKGKDPLKIFQTELLEEGYLTEEKIAEIEKSIAKEVNEATDYAESAAYAEPESSLLYVYDEEANS

SEQ ID NO: 44499 - protein, 227 aa, Lycopersicon esculentum
LSFDLLESWLTLNPDASAFKRNGHSIFRELSLFQDYHGLPAFKDALVQFMSEIRGNKVSFDSNKLVLTAGATSANETLMFCLADPGHAFLLPTSYYPGFDRDLKWRTGAEIVPIQCTSSNGFRITESALEEAYTEAERRNLRVKGVLVTNPSNPLGTTLTKKELQLLLTFVSTKQIHLISDEIYSGTVFNSPKFVSVMEVLIENNYMYTDVWDRVHIVYSLSKDLGL

SEQ ID NO: 44500 - protein, 581 aa, Arabidopsis thaliana
MEKVTNSDLKSSVNGGVVDVYGEDSATIEHNITPWSLSVSSGYSLLRDPRYNKGLAFTEKERDTHYLRGLLPPVVLDQKLQEKRLLNNIRQYQFPLQKYMALTELQERNERLFYKLLIDNVEELLPIVYTPTVGEACQKFGSIFRRPQGLFISLKDKGKILDVLKNWPERNIQVIVVTDGERILGLGDLGCQGMGIPVGKLALYSALGGVRPSACLPVTIDVGTNNEKLLNDEFYIGLRQKRATGQEYSELLNEFMSAVKQNYGENVLIQFEDFANHNAFELLAKYRDTHLVFNDDIQGTASVVLAGLVSAQKLTNSPLAEHTFLFLGAGEAGTGIAELIALYMSKQMNASVEESRKKIWLVDSKGLIVNSRKDSLQDFKKPWAHEHEPVKDLLGAIKAIKPTVLIGSSGVGRSFTKEVIEAMSSINERPLIMALSNPTTQSECTAEEAYTWSKGRAIFASGSPFDPVEYEGKVFVSTQANNAYIFPGFGLGLVISGAIRVHDDMLLAAAEALAGQVSKENYEKGMIYPSFSSIRKISAQIAANVATKAYELGLAGRLPRPKDIVKCAESSMYSPTYRLYR

SEQ ID NO: 44501 - protein, 333 aa, Kluyveromyces delphensis
MGITVIGSLNYDMVTYTDVVPASGETVRANSFETHPGGKGCNQCIAIGRLRDPNADYRVKMVGNVGKDAFGEQLLGALTQEGVDVSDVGRLGGVSTGTATILVEEFNGGQNRILIIKGANGESKYSSEALDALFGKSTDSREFVVFQQEIPDSDWAMKWIHENVTESLIVFNPSPFQSINKEHWTAVDLLIVNEIEALQVILDLEGPKVSKDYENTIESDFLDTYRKITEHLQKKVVNQGSIAAVIVTLGSKGAMFASKENPDVDYMPAVDNVKVVDSTGAGDTFLGAAITQLYEGKSLAQSVRFATLCSSLAIQKHGATESIPHYSDVIKLL

SEQ ID NO: 44502 - protein, 312 aa, Triticum aestivum
  misc_feature (33)..(33): Xaa can be any naturally occurring amino acid
  misc_feature (236)..(236): Xaa can be any naturally occurring amino acid
  misc_feature (240)..(240): Xaa can be any naturally occurring amino acid
  misc_feature (243)..(243): Xaa can be any naturally occurring amino acid
  misc_feature (253)..(253): Xaa can be any naturally occurring amino acid
  misc_feature (264)..(264): Xaa can be any naturally occurring amino acid
  unsure (1)..(312): unsure at all Xaa locations
MARMAVSVLAILLASCAVAAASFDKEFDVTWGXDKISGSGFQSKHEYLYGKIDMQLKLVPGNSAGTVTAYYLSSQGPTHDEIDFEFLGNVTGEPYTLHTNVFTQGQGQREQQFHLWFDPTNDFHTYSILWNPKHIIFMVDDMPIRDFKNLEGKGIAFPKNQPMRLYSSLWNADDWATQGGRVKTDWSHAPFSASYRGFKADACVVTAGGQPRCGASVGTDAAPGTGSSATSGEWYXQELXLTXQQRMRWVQSXYMIYNYCTDPXRVAMGVPASAPCSAHVTEAYIPHLLALNSVSLDPPEEHAGNLKNGGLF

SEQ ID NO: 44503 - protein, 429 aa, Zymomonas mobilis subsp. mobilis ZM4
MSSPNEAIIGLNNEEYRFPVRQSTAGTLGIDIRQLHSQSGALTYDPGFLSTASCQSKITYVDGEKGILLYRGYPIEQLAEKSSFPEVAYLLLHGELPKADDFSTFSDVITHHTMVNEQLSAFYRGFRRDAHPMAVLCGVVGALSAFYPEAIHIHDPAQRMASCHRLLAKLPTIAAMAYKYSVGQPFVYPDNSLSYVGNFLRMTFSVPAEPYHVDPLIESALNKIFILHADHEQNASTSTVRLAGSSGANPYACIAAGIACLWGPSHGGANEATLAMLKEIGTPENIPHFIDRAKDRNDPFRLMGFGHRLYKNYDPRARVLAKTAAAILDKTGANNPIFDTARALEEIARKDSYFIERKLYPNVDFYSGLILSAIGFPTSMFTALFALARTAGWMAQWNEMITDPEQKIGRPRQIYTGVSTRDYVNIENR

SEQ ID NO: 44504 - protein, 207 aa, Glycine max
MATLSNSTNIFWQDCQIGRPERQKLLNQKGCVVWITGLSGSGKSTLACSLSRELHSRGKLSYVLDGDNLRHGLNKDLGFKAEDRTENIRRTGEVAKLFADAGLICVASLISPYRRDRDTFRAMLPDANFNEVFMNMPLELCEARDPKGLYKLARAGKIKGFTGIDDPYEPPINCEIEIKQENGNCPTPTMMAGQVVTYLENKGFLES

SEQ ID NO: 44505 - protein, 444 aa, Bacteroides thetaiotaomicron VPI-5482
MNAAKVLDDLKRRFPNEPEYHQAVEEVLSTIEEEYNKHPEFDKANLIERLCIPDRVFQFRVTWMDDKGNIQTNMGYRVQHNNAIGPYKGGIRFHASVNLSILKFLAFEQTFKNSLTTLPMGGGKGGSDFSPRGKSNAEVMRFVQAFMLELWRHIGPETDVPAGDIGVGGREVGFMFGMYKKLAHEFTGTFTGKGREFGGSLIRPEATGYGNIYFLMEMLKTKGTDLKGKVCLVSGSGNVAQYTIEKVIELGGKVVTCSDSDGYIYDPDGIDREKLDYIMELKNLYRGRIREYAEKYGCKYVEGAKPWGEKCDIALPSATQNELNGDHARQLVANGCIAVSEGANMPSTPEAVRVFQDAKILYAPGKAANAGGVSVSGLEMTQNSIKLSWSAEEVDEKLKSIMKNIHEACVQYGTEADGYVNYVKGANVAGFMKVAKAMMAQGIV

SEQ ID NO: 44506 - protein, 345 aa, Zymomonas mobilis
MGQNPDVISAMEEALNNVGAGSGGTRNISGTTHYHSELEAELAEWHGKEAALTFTSGFVSNEATLSTIAKVLPGCVIFSDELNHASMIAGIRNSRCEKRIYRHNDLAHLEELLAAENPDLPKLIAFESVYSMEGDIAPIAAICDLADKYNAITYLDEVHAVGMYGPRGAGIADREGLADRLTIIEGTLAKAIGVMGGYIAADQLIVDVIRSYAPGFIFSTSLAPVLAAGLASIRHLKISSKERDAQQKHAALLKQMFKDAGLPVMATTTHIVPLFVGDAVKTKRISDILLNEYGAYVQPINFPTVPRGTERLRFTPGPTHNEAMLRELTDSLVAIWHRLDMRFAA

SEQ ID NO: 44507 - protein, 488 aa, Bacteroides thetaiotaomicron VPI-5482
MEEKKLTAANGRPIADNQNSQTAGQRGPVMLQDPWLIEKLAHFDREVIPERRMHAKGSGAFGTFTVTHDITKYTRAAIFSEVGKQTECFVRFSTVAGERGAADAERDIRGFAMKFYTEEGNWDLVGNNTPVFFLRDPLKFPDLNHAIKRDPKTNMRSPNSNWDFWTLLPEALHQVTITMSPRGIPYSYRHMHGFGSHTYSFINADNQRIWVKFHLRTLQGIKNLTDQEAEAIIAKDRESHQRDLFESIEKGDYPKWLFQIQLMTEEEADHYRINPFDLTKVWPHKDFPLQDVGILELNRNPENYFAEVEQAAFNPINTVDGIGFSPDKMLQGRLFSYGDAQRYRLGVNSEQIPVNKPRCPFHAYHRDGAMRVDGNYGATKGYEPNSYGEWKDSPHMKEPPLKASGNGEIYNYNEREYDDDYYSQPGDLFRLMPADEQQLLFENTARAMGDSELFIKQRHTRNCYKADPAYGAGVAKALGIDLQEALKE

SEQ ID NO: 44508 - protein, 240 aa, Thermoanaerobacter tengcongensis MB4
MPYTVLVIEDEIHILELLRYNLEAAGYKVMASENGKEGLEKALEEKPDLLILDLMLPDMDGLEICKVLKKNEDTKNIPIIMLTARSEEFDKVLGLELGADDYITKPFSVRELLARIKAVLRRTQQVEEEKEEIIKFGDIVIDTGKHVVYKKGKALDLTLKEFELLKLLSQNKGKVLTRDYLLDKVWGYEYAGETRTVDVHIRHLRKKIEDDDKAPVYIETVRGIGYKLRDLSEDKGEEDA

SEQ ID NO: 44509 - protein, 445 aa, Bacteroides thetaiotaomicron VPI-5482
MNIQKIMSSLEAKHPGELEYLQAVKEVLLSIEDIYNQHPEFEKVKIIERLVEPDRIFTFRVTWVDDKGEVQTNLGYRVQFNNAIGPYKGGIRFHASVNLSILKFLGFEQTFKNALTTLPMGGGKGGSDFSPRGKSDAEIMRFCQAFMLELWRHLGPDMDVPAGDIGVGGREVGYMFGMYKKLTREFTGTFTGKGLEFGGSLIRPEATGFGGLYFVYQMLQAKNIDIKGKTVAISGFGNVAWGAATKATELGAKVITISGPDGYIYDPDGISGEKIDYMLELRASGNDIVAPYAEKYPGATFVEGKRPWEVKADIALPCATQNELNGEDAQNLIKNNVLCIGEISNMGCTPEAIDLFIEKKIMYAPGKAVNAGGVATSGLEMSQNAMHLSWSAAEVDEKLHAIMHGIHAQCVKYGTEPDGYINYVKGANIAGFMKVAHAMMGQGVI

SEQ ID NO: 44510 - protein, 435 aa, Escherichia coli
MFAIVAFGLLVCWSNAVGGLILAQLKALGWTDNSTTATFSAITTAGMFLGALVGGIIGDKTGRRNAFILYEAIHIASMVVGAFSPNMDFLIACRFVMGVGLGALLVTLFAGFTEYMPGRNRGTWSSRVSFIGNWSYPLCSLIAMGLTPLISAEWNWRVQLLIPAILSLIATALAWRYFPESPRWLESRGRYQEAEKVMRSIEEGVIRQTGKPLPPVVIADDGKAPQAVPYSALLTGVLLKRVILGSCVLIAMNVVQYTLINWLPTIFMTQGINLKDSIVLNTMSMFGAPFGIFIAMLVMDKIPRKTMGVGLLILIAVLGYIYSLQTSMLLITLIGFFLITFVYMYVCYASAVYVPEIWPTEAKLRGSGLANAVGRISGIAAPYAVAVLLSSYGVTGVFILLGAVSIIVAIAIATIGIETKGVSVESLSIDAVANK

SEQ ID NO: 44511 - protein, 264 aa, Thermoanaerobacter tengcongensis MB4
MEAGLAMNNNNKVEISGVNTSKLPVLKPSKQRELLIRMKNGDKKAREEFINSNLRLVLSVIQRFNNRGESVDDLFQVGCIGLIKAIDNFDLDQNVKFSTYAVPMIIGEIRRYLRDNTPIRVSRSLRDIAYKALQVRDKLVSENSKEPTVGEIAKELDLPSEEVVMALDAIQEPVSLFEPIYHDGGDAIYVMDQVSDDKNVDEVWLEKIALKEALEKLNEREKMILTMRFFEGKTQMEVAKEIGISQAQVSRLEKAALNHMRKYI

SEQ ID NO: 44512 - protein, 121 aa, Escherichia coli
MQFYVTQNHGTEPPFTGRLLHNKRDGVYHCLICDAPLFHSQTKYDSGCGWPSFYEPVSEESIRYIKDLSHGMQRIEIRCGNCDAHLGHVFPDGPQPTGERYCVNSASLRFTDGENGEEING

SEQ ID NO: 44513 - protein, 530 aa, Glycine max
SLTPANSKREMEAASATILLLILILALICSWKVLNWLWLRPKRLEKLLREQGFRGNPYTLFFGDSKEFLKMRKEAVSKPMTLSDDIVPRVSAYVQHSVNKHGKNSFIWFGPMPRVTILDPEQIKDVFNKNYDFPKPNLNPLVKLLATGLAGYEGEKWSKHRRIINPAFNLEKLKIMLPLFLQSCNDLVSKWEGMLSSEGSCEMDAWPFLQNLTSDVIARSAFGSSYEEGRRIFQLQREQTEHLMKVILKIQIPGWRFLPTKTHRRMKEIDREIKASLKNMINKREKALKSGEATKNDLLGILLESNHKEIQEHGNRNSKNVGMSLEDVIEECKLFYFAGQETTSVLLVWTMVLLSRYPDWQARAREEAFQVFGYQKPDFDGLSRLKIVTMILYEVLRLYPPLIGMNRLVEKDVKLGNLTLPAGVQVFLPTVLIHHDSELWGEDAKQFNPERFSEGVLKATNGRVSFFPFGWGPRICIGQNFSLLEAKMALSMILQNFLFELSPAYAHAPTMSITTQPQYGAHIILRKVPI

SEQ ID NO: 44514 - protein, 419 aa, Streptomyces rochei
MRRVVITGIGVVAPGGVGTADFWALLTEGRTATRRITLFDASSFRSRIAAEADFDPAGHGFAPDEARRLDRVAQFALVAAREAVADSGLVLAAEGERTGVSLGTAVGCSSGLDETYAHVSESGSRWLLDPHGRGRLGDYLVPSSVAAEVARDSALGSVAVVSTGCTSGLDALGHATELIREGSADIMVAGGAEAPITPITLASFDAIRATSARNDEPETASRPYDRTRDGFVLGEGSAVLVLEEHDRAVRRGARIYPEVSGFATRSNAYHMTGLRPDGGEMAEAIRVALDEARLNPADVHYVNAHGSGTKQNDRHETAAFKASLGQHAHRVPVSSVKSMIGHSLGAIGALEIAASALAIAHDTVPPTANLHEADPACDLDYTPLTAREQRTDTVLSVGSGFGGFQSAMVLTSRHTGAAA

SEQ ID NO: 44515 - protein, 496 aa, Photobacterium profundum SS9
MMIAQLPIKLYRAEQVRHGEKAVAKILHINMYELMERAGQAVFITLKKCFPAACSITVCCGGGNNGGDGYIVARLALHAGLNVQLLQLDVAKALTGDAAKARDAWLVAGGKIESFSDTTIFTSTDVIIDALLGTGLSGAVRTNIAHYIEMMNQASKPIIAVDVPSGLCADTGTMLGIAINATLTVTFIGIKQGLCTGQAGHHCGELLYADLEVESTFSTVVKPTVFRVEHNYVKQCLPVRHRSAHKGSYGRVLCVGGDLGMAGAIRLAAEACARTGAGLSAVITQPDNILSIVTARPEIMVQGWSDKAHKSISRVEWADVVVLGPGLGTSNWSKALFNIVRSTEKKTVFDADGLNLLAQSPDYKKNRIITPHPGEAARLLNMTIYDIERDRFSAVRKLQQKYGGVAVLKGAGTLIFDGQQLWVCTAGNPGMATGGMGDVLSGIIGALLGQGLSLADAACVGVWIHSKSADLCAQKGERGMLASDLFPYIRQLINPR

SEQ ID NO: 44516 - protein, 425 aa, Fusobacterium nucleatum subsp. vincentii ATCC 49256
MSKETLNPLASGQQQVKKACDALGLDPAVYELLKEPQRIIEITIPVRMDDGSIKTFKGYRSAHNDAVGPFKGGIRFHQNVNADEVKALSLWMSIKCQVTGIPYGGGKGGITVDPSELSQRELEQLSRGWVRGLWKYLGEKVDVPAPDVNTNGQIMAWMQDEYNKLSGEQTIGVFTGKPLSYGGSQGRNEATGFGVAVTMREIFKALGKELKGATVAVQGFGNVGKYSVKNIMKLGGKVVAVAEFEKSKGAFAVYKEAGFTFEELEAAKAAGSLTKVAGSKEISMDDFWALNVEAIAPCALENAIKEHEANLIKAGIICEGANGPITPEADEILYKKGTVVTPDVLTNAGGVTVSYFEWVQNIYGYYWTEKEVEEKEERAMVDAFNPIWALKKEFDGKGQPISFRQATYMKSIKRIAEAMKIRGWY

SEQ ID NO: 44517 - protein, 86 aa, Glycine tomentella
INISGTNGEVMPGQWEYQVGPSVGIEAGDHIWASRYILKRITEQAGVVLSLDPKPIEGDWNGAGCHTNYSTKSMREDGGFEVIKKA

SEQ ID NO: 44518 - protein, 313 aa, Streptomyces tendae
MTISLDREYAVVSDNGRKWHVDEAHGSPYLYDYFAPSSMAAELAWLAEAQGPVGVISTGCTSGIDVLGHAADLIIDGAADVMISGASDAAISPITVACFDAIRATTPRNDDPATASRPFDRTRNGFALGEGSAILVLEEYGHARRRGARVYAEVAGHATRANAFSMTGLRPDGRELAEAITVALDRAEANPSDIGYINAHGSSTKQNDLHETMAYKRSLGEHAYRAPISSIKSMIGHSLGAICALEVAASVLAIEHSVIPPTANLHEPDPACDLDYVPLVAREQPSDVVLSVASGFGGFQSAMVLTAPDWTAP

SEQ ID NO: 44519 - protein, 478 aa, Burkholderia pseudomallei K96243
MPAAPAVPSRAARASAAARLERLPFSGYHKLIFVIIAIAFFFDSVDLGTMTFVLGSIKREFGLSTATAGLVASASFFGMVLGAAVAGLLADRFGRRPVFQWSMVLWGAASYLCSTAQSVDALIVYRVLLGIGMGMEFPVAQTLLSEFVPAAKRGRLIALMDGFWPLGFITAGIVSYFVLPLFGWRTVFALLALPAVFVLVVRRLVPESPRWLEHRGRLAEAGRVLAHVEAKVMKSARVASLPAPSRLAESACAQGRGAFGEIWSAAYRRRTTMVWLLWFFALLGFYGLTSWLGALLQQAGFAVTQSVFYTVLISLGGIPGFLCAAWLVERWGRKPTCIASLVGGGAMAYVYGQSALFGGSVTLLVGTGLAMQFFLFGMWAVLYTYTPELYGTGARATGSGFASAIGRVGSLIGPYAVGIVLPVFGQGGVFTLGALSFVVAALAVGVLGIETQGLALEALASTHAADDDARDPAGAAAN

SEQ ID NO: 44520 - protein, 547 aa, Acinetobacter junii
MTQNSYKIPIQGMTCTGCEEHVTEALEQAGAKDVSADFRRGEAIFELSDDQIEKAKQNISAAGYQPGEEESQPSENSVDFNRDGDYDLLIIGSGGAAFSAAIKANENGAKVAMVERGTVGGTCVNIGCVPSKTMLRAGEINGLAQNNPFTGLQTSTGAADLAQLTEQKDGLVSQMRQEKYIDLIEEYGFDLIRGEASFIDDKTIQVNGQNITSKSFLIATGASPAVPEIPGMNEVDYLTSTSALELKEVPQRLAVIGSGYIAAELGQMFHNLGTEVTLMQRSERLFKTYDPEISEAIDESLTEQGLNLITGVTYQKVEQNGKSTSIYIEVNGQEQVIEADQVLVATGRKPNTETLNLESAGVKTGKKGDVLTNEYLQTSNNRIYAAGDVTLGPQFVYVAAYEGGIVANNALGLAKRKIDLRFVPGVTFTNPSIATVGLTEQQAKEKGYDVKTSVLPLDAVPRALVNHETTGVYKLVVNAQTQKLIGAHIVSENAGDVIYAATLAVQFGLTIEDLTDSFVPYLTMAEGLKLAALTFDKDVSKLSCCAG

SEQ ID NO: 44521 - protein, 310 aa, Burkholderia pseudomallei K96243
MKPRLLVLIPLRDHAHAHIADVFDILYALTPDQRRRAIAERGAAVQAVLTNGTTGLFAEEIACLPALEFVAALGAGYENIALDDARSRGITVVNGAGTNDDCVADHAFALLLAAVRAVPKLDAACRAGVWRDALPMRPNMSGKKLGIVGLGNIGQKIARRAAGFDLEIGYHNRRPREGAAYRYFAGLDALAHWADFLVVATPGGAATHHLIDARILDALGERGFLVNVSRGSVVDTAALADALREGRVAGAGLDVYEGEPQPPRALAALDSVVLTPHVGGWSPEALERSVRQFLENAARHFAGRPVLTPI

SEQ ID NO: 44522 - protein, 132 aa, Pseudomonas aeruginosa UCBPP-PA14
MSKIDKPLDSWREELTEEQFHICRLGGTERAFSGEYHATKTPGIYHCTCCGTALFDSDAKYDSGSGWPSYFQPVDAEAVRELDDFSHGMHRIEVRCGRCDAHLGHVFPDGPRPTGLRYCINSASLKLVPRES

SEQ ID NO: 44523 - protein, 403 aa, Pseudomonas aeruginosa UCBPP-PA14
MQVSKSNKLANVCYDIRGPVLKHAKRLEEEGHRILKLNIGNPAPFGFEAPEEILQDVIRNLPTAQGYSDSKGLFSARKAVMQYYQQKQVEGVGIEDIYLGNGVSELIVMSMQALLNNGDEVLIPAPDYPLWTAAVSLAGGKPVHYLCDEQANWWPDLEDIKAKITPNTRAMVIINPNNPTGAVYSREVLEGMVELARQHNLVLFSDEIYDKILYDGAVHVSTASLAPDVLCLTFNGLSKSYRVAGFRSGWVAISGPKQRAQSYIEGLDILANMRLCANVPAQHAIQTALGGYQSINDLVLPPGRLLEQRNRAWELLNDIPGVSCVKPMGALYAFPRIDPKVCPIHNDEKFVLDLLLSEKLLIVQGTAFNWPWPDHFRVVTLPRVDDLEQAILRIGSFLKGYQQ

SEQ ID NO: 44524 - protein, 322 aa, Candida tenuis
MSASIPDIKLSSGHLMPSIGFGCWKLANATAGEQVYQAIKAGYRLFDGAEDYGNEKEVGDGVKRAIDEGLVKREEIFLTSKLWNNYHDPKNVETALNKTLADLKVDYVDLFLIHFPIAFKFVPIEEKYPPGFYCGDGNNFVYEDVPILETWKALEKLVAAGKIKSIGVSNFPGALLLDLLRGATIKPAVLQVEHHPYLQQPKLIEFAQKAGVTITAYSSFGPQSFVEMNQGRALNTPTLFAHDTIKAIAAKYNKTPAEVLLRWAAQRGIAVIPRSDLPERLVQNRSFNTFDLTKEDFEEIAKLDIGLRFNDPWDWDNIPIFV

SEQ ID NO: 44525 - protein, 438 aa, Symbiobacterium thermophilum IAM 14863
MRGVTNGGKEMGGAQNPFLIAQQQVRNAVAALGESEELFELLKAPAHFIEVQIPVRMDDGSLRVFTGYRSQHLTTLGPAKGGIRFHPAVTADEVKALSMWMTFKTSVVGLPYGGGKGGVVVDPRKLSLGELERLSRGYVRAIWPYLGPDKDIPAPDVNTNAQIMGWMTDEYETIVGASCPAVFTGKPLSMGGSLGREEATGRGTVITIREALAYLGLPVAGARVAVQGFGNAGQHAARLLEELGAVLVAASDSRGGIVCPGGMRVADLIAYKQATGSVVGFPGSRATDQFGVLTADCDILVPAALENQIDAEVARSIRARVVAEAANGPTTPDGDHVLAQRKIFLIPDILANAGGVTVSYFEWVQNRNQYYWTAEEVNARLEQRMVASFRDVVAMAERHGAYTRTAAYMYAIHRIAESLRMRGLLRAPARQALRAAAG

SEQ ID NO: 44526 - protein, 157 aa, Casuarina glauca
ELLYSAVENEEHLCVLKDRNKPIIFTMARLDRVKNITGLVEWYGKNDRLRQLVNLVVVAGDRRKESKDLEEKAEMKKMHSLIETYKLNGQFRWISSQMNRVRNGELYRYIADTRGAFVQPAVYEAFGLTVVESMTCGLPTFATCNGGPAEIIVHGKS

SEQ ID NO: 44527 - protein, 551 aa, Bacillus anthracis str. A2012
MMRYILTAVTVSVIFLIAACSVTTNTTNDHKNRNDKKTKQTETATKPLEIVKGPEVTLIAKEEKQKLSNGVIVPVWTFNGSSPGPEIRVKKGEKVKVTLKNELSAPVSIHWHGYPVPNDMDGIPGVTQDAVEPGKSFTYEFEANVLGTYWYHSHQDSVNQLDRGLYGTFVVEDTNEKYDKDYTLMLDEWITDKEEMNKQLKEMTKGKTEKADGNKSSKGNENTKKNDDKNSMDHSGMDMDSDKKDSGNMAGMDHGNMKMEGHDMSMYDLFTINGKSGDLVAPLKVNKGDKVRLRLVNAGYLSHNIHVHGHDIKVIATDGQPINDPKVIKDKVISIAPGERYDVEFTANNPGKWYVEDHSENKGAKGMKAIIEYDGSKEMKDIADEKEKLSKLDMTKYGAKKLGGFTLNQQYTATYNMDLNTQMNGNEMVYTINGKVFPDIDPVQVKKDDLVKVKLVNRSKMDDHPMHLHGHFFQVLSKGGKPVEGSPIVKDTLNLKPGEEYEVAFVADNPGEWMFHCHDLHHASAGMVTEVKYKDYKSDYVPNPNIPNKPE

SEQ ID NO: 44528 - protein, 622 aa, Candida glabrata CBS138
MIMDNDVVLEDAMGGYSSDYGSFLKNSKMRSDSDSEQEKALQCKYVIRKDDDPLGDGHFSVVKECMNMHTKDLYAMKLIDKSIVQDKLKLIQREFELLKYISETIRTLELSSTSSLMNAQNGSNCSHFDGHHHILQLFDFFETSKNIVLITQLCQKDDLYDTIIKNQKLDLETQVKPYTACLISALEFLHSNGIVHRDIKAENVLFRLKHQINPNETAENATYDLAAHDLILADFGLATRVNVESTTTLREYVGTVSYISPEIVACKGVSSIDNTKEIEKIPKYGTPVDIWALGVLTYFMALGYTPFDCETDEETIDCISKVDYYIDEDDEKNPKYSTFWDFLQQCFEKDQNSRPTAKDLKTHPFIKDYFKTTTPSASYSFLDRRKALKRNHSTNSFHNLRTPLRKNSSAASSISSSSAVIPSPHMSLLSGSMATSKSSRTDLRTLKRSGHSSHSNLQQLSGSSREKSLKNIKDTLQRTLSMTSLKPNSSTNLLAATTSPSKQKSIIKKNSTFVLDPRPPLGSLMNGCFSTTPESKSNFSTPQVLSRQNSASSLNNQTKRVTRVTSAGSSSTHTNESGIIMNVKPSILHSTSTPDVRPEEKKLMNVDDDDDDDNDDDMGIVI

SEQ ID NO: 44529 - protein, 396 aa, Escherichia coli
  misc_feature (246)..(246): Xaa can be any naturally occurring amino acid
  unsure (1)..(396): unsure at all Xaa locations
MFENITATTADPILGLADLFRADERPGKIDLGIGVYKDETGKTPVLTSVKKAEQYLLENETTKNYLGIDGIPEFGRCTQELLFGKGSALINDKRARTAQTPGGSGALRVAADFLAKNTSVKRVWVSNPSWPNHKSVFNSAGLEVREYAYYDAENHTLDFDALINSLNEAQAGDVVLFHGCCHNPTGIDPTLEQWQTLAQLSVEKGWLPLFDFAYQGFARGLEEDAEGLRAFAAMHKELIVASSYSXNFALYNERVGACTLVAADSETVDRAFGQMKAAIRDNYSSPPAHGASVVATILSNDALRAIWEQELTDMRQRIQRMRQLFVNTLQEKGANRDFSFIIKQNGMFSFSGLTKEQVLRLREEFGVYAVASGRVNVAGMTPDNMAPLCEAIVAVL

SEQ ID NO: 44530 - protein, 396 aa, Escherichia coli
  misc_feature (246)..(246): Xaa can be any naturally occurring amino acid
  unsure (1)..(396): unsure at all Xaa locations
MFENITAAPADPILGLADLFRADERPGKINLGIGLYYDETGKIPVLTSVKKAEQYLLENETTKLYLGIDGIPEFGRCTQELLFGKGSALINDKRARTAQTPGGSGALRVAADFLAKNTSVKRVWVSNPSWPNHKSVFNSAGLEVREYAYYDAENHTLDFDALINSLNEAQAGDVVLFHGCCHNPTGIDPTLEQWQTLAQLSVEKGWLPLFDFAYQGFARGLEEDAEGLRAFAAMHKELIVASSYSXNFGLYNERVGACTLVAADSETVDRAFSQMKAAIRDNYSSPPAHGASVVATILSNDALRAIWEQELTDMRQRIQRMRQLFVNTLQEKGANRDFSFIIKQNGMFSFSGLTKEQVLRLREEFGVYAVASGRVNVAGMTPDNMAPLCEAIVAVL

SEQ ID NO: 44531 - protein, 464 aa, Novosphingobium aromaticivorans DSM 12444
MASIAPDSRTDLHTERANPHWVRLGGDHKLDHVPGEDGWPVLGTTLMQLADPLGFQRRMVETHGPVFRTRSFGRRGVNLIGADANELVLFDRDRLFSNEQGWGPVLNLLFPRGLMLMDFEAHRVDRRALSIAFKPEPMRAYCSVLNTGIAQAVQGWGGQMRFYDAIKALTLDTAASSFLGLPLGPEADRLNKAFVDMVQASGGVVRRPLPFTRMGKGVAGRRLMVEYFGRLVRERRADPGQDMFSQFALATREDGSLLPEDVVVDHMIFLMMAAHDTITSSATVLFWQLARNPDWQDRLRAEARAVTGGDGLPLAYEDLGRMELTEMAFKEALRFMPPVPNMPRRALRDFEFGGYRIPAGTPVGISPAAVHADPAHWPEPDRFDPLRFTPENVSGRHKYAWVPFGGGAHMCLGLHFAYMQVKLLVSHILTRYEVAMQPGPAPSWQAWPIPKPRDGLRVEMRRIC

SEQ ID NO: 44532 - protein, 251 aa, Ustilago maydis 521
MLIEDAHQNQERRQADGSFSIGKKWEKIIFAARILATVVTLKNPAEIPVVSSRQYDYCAVLTFAGQTGAINIADRFTPGSSTNYVTRWFKETRVIIVIDPHVSHQAMHKALFVDIAIPGNVRGRHSVVILWCLLCRTVLRLKGGDLSMMPGMFFYHDPEKAELQADVPLAVAVKLATEAGNVDWYAEGAQFCTNGAAEQATSSWERKSFANTSRPDQRHNMWSLCCLIGNTHTSRCSDIAWTPATPAFCDG

SEQ ID NO: 44533 - protein, 584 aa, Caulobacter crescentus CB15
MESRFAKLYGADARGPAVLERLKTNLLKAAHARPEPLRALDAARAADPAWLHAPGQTAYTFYVDRFAGDLNGVRGKLDYLTELGVRWLHPLPLLEPRPGDSDGGFAVADYRKVDPRLGTIDDLEALAGDLRQRDMGLILDVVCNHTAREHAWAAKARAGDPAYRDYYIVLPDAQSAAARDRELIDVFPDTAPGSFTYDAAMGGYVWTTFYPFQWDLNYANPAVFAEMLEVLIFLAAKGAQGFRLDSAPFLWKQAGTTCRNLPQTYEIVEAWRAALSIVAPGVVLLAEAIESVEDVLPFFGGEESGCNLAYNNVVMTALWAALADGDAVIARRCLAVAARKPAQGAWLNYVRCHDDLIWNALAAYAPASDLRRWSNAYGNGEGFSRGRAFQTAEGGVPSTNGMAAALAGLTADADGDCLGARRLRLLYGIIHALDGWPLIYMGDEIGLDNDEAYQDDPLRAGDGRWLHRPQMDWSLAERRGEAGALQADLFATFARLGQRARRLATLGVAGPARPVEVSSPAVLAFLRDEGARPFLCVANVSDAPQDFELPPAFAQGAEDVLDGAPSPAGAVSLPPYGITWLVAR

SEQ ID NO: 44534 - protein, 396 aa, Escherichia coli
  misc_feature (246)..(246): Xaa can be any naturally occurring amino acid
  unsure (1)..(396): unsure at all Xaa locations
MFENITATTADPILGLADLFRADERPGKIDLGIGVYKDETGKTPVLTSVKKAEQYLLENETTKNYLGIDGIPEFGRCTQELLFGKGSALINDKRARTAQTPGGSGALRVAADFLAKNTSVKRVWVSNPSWPNHKSVFNSAGLEVREYAYYDAENHTLDFDALINSLNEAQAGDVVLFHGCCHNPTGIDPTLEQWQTLAQLSVEKGWLPLFDFAYQGFARGLEEDAEGLRAFAAMHKELIVASSYSXNFALYNERVGACTLVAADSETVDRAFGQMKAAIRANYSSPPAHGASVVATILSNDALRAIWEQELTDMRQRIQRMRQLFVNTLQEKGANRDFSFIIKQNGMFSFSGLTKEQVLRLREEFGVYAVASGRVNVAGMTPDNMAPLCEAIVAVL

SEQ ID NO: 44535 - protein, 510 aa, Novosphingobium aromaticivorans DSM 12444
MRYAYGVTSALLLAGSALTLVTGFPAGAQVAQNDQSEMRTVVPRAGAPASFADLTQQLQPAVVNISTRQRVKVQANNPFAGTPFGDLFGGGQGNGPQTREAQSLGSGFIISADGYVVTNNHVITADGQGEVESITVTTPDGTEYPAKLIGKDAASDLAVLKISRPTAFPFVKFGDSRKARVGDWVIAIGNPFGLGGTVTQGIISAVYRNTGSGSAYDRYLQTDASINRGNSGGPMFDMQGNVIGINNAIFSPTGGSVGIGFAIPAEIAAPIVDKLRAGQAIDRGYLGVRIQPLSEDLAASLGLPKNRGEFIQGVEPGQAAAKAGIQAGDVVVKVDGKDVTPDQTLSFIVANTAPGKRIPIELIRNGQRLTVQTVVAKRPTEEELAQQSFDPDAQQDDDQFGARPQQQGPSVLQNALGVAAIPLTPQIARQLGAGEDAKGVVITAVDGSSDAAAKGLQRGDIVLSANYVTVTTLADLERIVRNAKTEGREAVLLRIQRRGQPPIYMPVRVR

SEQ ID NO: 44536 - protein, 388 aa, Arabidopsis thaliana
MTTISDLPYDLVKEIFSWVPFTSLRAVRSTCKTWNALSKNQIFGKKSVARNQFLELMILDSRVCSLRFDLQKIRNEDEEDLVDPSMKQISIPNNDDQVEISRVYHCDGLLLCIPKDNSSLMLWNPYLGQTKRIRPKNTFHRDDSFALGYNNRNHKILRLNEENESHIDVYDFSSDSWRTVPDDNPYRDELIYQSGVSLKGNAYFFDREVTTEAEVGTEDLLITGIEDYLRCFDFTTERFGPRLPLPFILPSPSFEYLALSWARDDKLAVLYSHYDTFDIIEIWISTKIEPNAVSWSTFLKVDMSLINGLTDDFLIRFEPKSFFIDEEKKVAVLFDTKVTETCRYQMAYIVGDDGYFKSVNIGVISNSHWIGGELVRSSYVPSLLQLQV

SEQ ID NO: 44537 - protein, 400 aa, Burkholderia sp. 383
MFEHIDAYPGDPILTLNENFQKDPRDQKVNLSIGIYFDAEGRIPVMGAVREAETALQRDSGAKPYLPMVGLPAYRDAVQALVFGADHPARAAGRIATLQTLGGSGALKVGADFLKRYFPDSQVWLSDPSWENHRFIFERAGFTVNTYPYYDEATGGLKFDAMLAAIDALPARSIVLLHACCHNPTGVDLDEGQWEKLIDVIEARGLLPFVDMAYQGFGAGLDADAFAVRELARRGVPALVANSFSKNFSLYGERVGGLSVVCEDAAAADRVLGQLAGAVRSNYSNPQTYGAKVVAAVLGTPALRKQWEEELAAMCRRIARMRQSIHDGLRDHVSGEALTRYVKQRGMFTYTGLTESQVDALREVHGVYVLRSGRMCVAGLNDSNVAIVADAIGKVLKSGV

SEQ ID NO: 44538 - protein, 461 aa, Burkholderia sp. 383
MVSGNESDGLKRGLKNRHIQLIALGGALGTGLFLGIAQTIKMAGPSVLLGYGVAGIIAFFIMRQLGEMVVDEPVAGSFSYFADKYVGHFTGFLSGWNYWVLYILVSMAELSAVGIYVQYWWPGVPTWVSALVFFVAINLLNLASVKSYGETEFWFSIIKVAAIVGMIGFGGWLLASGHAGPEASVRNLWQHGGFFPNGVSGLVMSMAAIMFSFGGLELIGITAAEADDPKRSIPRATNQVIYRILIFYIGALAVLLSLYPWEKVVTGGSPFVLIFHALSSNLVANVLNVVVLTAALSVYNSGVYSNSRMLFGLAKQGNAPKVLCSVNKRGIPLAALGASALATGVCVLVNYFMPGKAFEVLMGLVVSALIINWAMITLIHLKFRQAKRAAGEETSFRSLGYPFTNYLCLAFMAGILVVMYLTPDLRLSVYLIPVWLAVLAVGYRFRQKNAGYAVHDSASAR

SEQ ID NO: 44539 - protein, 613 aa, Pisum sativum
MATVTASSNIVSRTSHVNLPTVSCEFKTAPMRLGSIRKANTHNGLRVLNSLDELLNRTPIKMKGVQSRKKGVQRKNVRPKGIIVCGMNLIFVGTEVAPWSKTGGLGDVLGGLPPALSANGHRVMTVTPRYDQYKDAWDTNVTIEVKVGDRTEKVRFFHCFKRGVDRVFVDHPIFLEKVWGKTGTKLYGPAAGDDYQDNQLRFSIFCQAALEAARVLNLKSNKYFSGPYGEDVIFVANDWHTALISCYMKSMYQSIGIFRNAKVVFCIHNIAYQGRFAFTDYSLLNLPDQFKSSFDFLDGHVKPIVGRKINWMKAGIIESHRVLTVSPYYAQELVSGPDKGVELDNILRRVGVTGIVNGMDVQEWNPSTDKYISIKYDASTVLEGKALLKEELQAEVGLPVDKNVPLIAFIGRLEEQKGSDILVEAIPQFIKENVQIVALGTGKKEMEKQLQQLEISYPDKARGVAKFNVPLAHMMIAGADFILIPSRFEPCGLIQLQAMRYGTVPIVASTGGLVDTVKEGFTGFHMGSFNVKCDAVDPVDVDAIPKTVTKALGVYGTSAFAEMIKNCMAQELSWKGPAKKWEEVLLNLGVPDSEPGIDGQEIAPQAKENVATP

SEQ ID NO: 44540 - protein, 428 aa, Shewanella oneidensis MR-1
MADLKAKLELPGNDSIELPVKQGSAGFDVIDISKLGSKGYFTFDPGFLATASCESAITYIDGDQGILLHRGYPIEQLAVDSDYLDLCYLLLYGELPTKEQYAEFVHTVKTHTMVHEQIAFFFRGFRRDAHPMAMLCGVTGALSAFYQDSLDVNDPRHREIAAYRLVSKMPTIAAMCYKYSSGQPFVYPRNDLSYAGNFLSMMFAVPCEEYKVNPIVERAMDRIFILHADHEQNASTSTVRLAGSSGANPFACIAAGIASLWGPAHGGANEACLQMLEEIGSVDRIPEFIARAKDKNDPFRLMGFGHRVYKNFDPRAKVMRETCHEVLKELKVQDPLLDVAMELERIALEDEYFISKKLYPNVDFYSGIIMKAIGIPTSMFTVLFALSRTVGWIAHWKEMLDQPGHKISRPRQLYTGETARDFVDLDKR

SEQ ID NO: 44541 - protein, 588 aa, Shewanella oneidensis MR-1
MSIPVREFDAVVIGAGGAGMRAALQISKEGKSCALLSKVFPTRSHTVSAQGGITVALGNAHEDHWEQHMYDTVKGSDFIGDQDAIEFMCQTGPEAIIELEHMGLPFSRFDNGKIYQRPFGGQSKNFGGEQAARTAAAADRTGHALLHCLYQQNVKHKTQVFSEWYALDLVKNQDGAIVGCTAIEIETGEIVYFKAKATVLATGGAGRIYASTTNAHINTGDGVGMAMRAGVQMQDMEMWQFHPTGIAGAGVLVTEGCRGEGGYLLNKDGERFMERYAPNAKDLASRDVVARSMMTEIREGRGLDGPLGPHCLLKLDHLGKETLEARLPGVCELSRTFAHIDPADGPIPVLPTCHYMMGGLPTKVSGQVIRKNTDGTEQDVVGLFAVGEIACVSVHGANRLGGNSLLDLVVFGRAAGQHLGKALDETADPKDATDADIQASLARLQRWESNKDGEDPVQIRKDLQLCMQLNFSVFRRGDAMAEGLEQLKAIRKRLENAKLSDNSREFNTQRIECLELDNLMATAIATAYAANFRTESRGAHSREDYLERDDENWLCHSLFDPVTETMDRRAVNMAPKLREAFPPKKRTY

SEQ ID NO: 44542 - protein, 575 aa, Cucurbita cv. Kurokawa Amakuri
MHRFATGLASKARLARNGANQIASRSNWRRNYAAKDVKFGVEARGLMLKGVEDLADAVKVTMGPKGRTVVIEQSFGAPKVTKDGVTVAKSIEFKDKVKNVGASLVKQVANATNDVAGDGTTCATILTKAIFTEGCKSVASGMNAMDLRRGISMAVDSVVTNLKSRARMISTSEEIAQVGTISANGEREIGELIAKAMEKVGKEGVITISDGKTMDNELEVVEGMKLDRGYISPYFITNQKNQKCELDDPLIIIYEKKISSINAVVKVLELALKKQRPLLIVSEDVESEALATLILNKLRAGIKVCAIKAPGFGENRKAGLQDLAVLTGGQVITEELGMNLEKVDLDMLGSCKKITISKDDTVILDGAGDKKAIEERCDQIRSGIEASTSDYDKEKLQERLAKLSGGVAVLKIGGASEAEVGEKKDRVTDALNATKAAVEEGIVPGGGVALLYASKELDKLPTANFDQKIGVQIIQNALKTPVHTIASNAGVEGAVVVGKLLEQDDPDLGYDAAKGEYVDMVKAGIIDPLKVIRTALVDAASVSSLMTTTEVVVVELPKDENEVPAMGGGMGGMDY

SEQ ID NO: 44543 - protein, 532 aa, Agaricus bisporus
MYPVDGIRSQIEWNTTLNVSDAPVPTETTKYHRKTAIIATIGPKINTVEKLTDVRLAGVNIVRMNFSHGTHEYHQSVIDNTRQMIKNDPHGRPVAIALDTKGPEIRTGQTRDGNDYPIKAGDEFIVTTDPKYSDICDNKVLFVDYANLASVTAPGKLIYIDDGIISLLILSIDGMNLHVRALNNGTLSSRKGVNLPKTDVDLPPLSEKDKDDLRFGIRNGVDMIFASFIRRGEDVRQIREVLGPDGASIKIIVKIENEQGVANFDEILKEADGVMVARGDLGIEIPASQVFLAQKMMIAKCNIVGKPVIVATQMLESMTYNPRPTRAEVSDVANAVLDGSDCVMLSGETAKGSYPVQSVLMMAETCLLAETAICYPPLYDDLRAVQARPTETAETVAIAAVAAAAEQDAKALLVLSTSGETARLVSKYRPKIPIITVTRNEQTARQIHLHRGCYPFWYPEPRGVQNHQWQTDVDNRIRFGLRNALALNVIQPGASIIAVQGWKGGLGHTNTLRILTVPTDPADLELQPLGSL

SEQ ID NO: 44544 - protein, 275 aa, Zea mays
MASSAVIVPASPRKLEGKVAVITGGASGIGERTARLFVEHGAHVVVADIQDEAGARVCADLGAGAASYVHCDVTSEDDVAAAVDHAVATFGALDIMFNNAGVSGPACYSVRESGKADFERVLAVNLVGPFLGTKHAARVMVPSRRGGCIIGTSSVAAAVTGVSSYAYACAKRAMVTLTENAAAELGQHGIRVNCVSPAGVATPLTMRYMGLEAEALEQAMEGMANLKGVGALRVHDVAAAVLFLASDDARYISGHNLFVDGGISVANPSTGTSKD

SEQ ID NO: 44545 - protein, 378 aa, Yersinia pestis KIM
MMKEVRIGLIGTGYIGKAHAIAYAQAPTVFELRGKLVREMVAEVSPALAAQRAQAFGFNRFTCDWRELVADPAIDVVDICSPNYLHKEMALAAIHHGKHVYAEKPLALNARDASEMAAAATRAGVKTLVGFNYIKNPSAKLAKEIIERGEIGEVIHFYGTHNEDYMADPNTPIHWHCLHATAGLGALGDLAAHIVSMAQYLVGEITQVCGDLKTVVVTRPASVGSSARVAVENEDQAHAMVRFVNGAQGVIEASRVACGRKMGLSYMITGTQGAISFTQERMAELKLYLHNDPVNRQGFRTLLVGPAHPEYAAFCMAAGHGIGFNDQKTVEVRDLIDGIAMDTPLWPDFAEGWKVSRILDAIALSHQDSRWVNVTDIV

SEQ ID NO: 44546 - protein, 180 aa, Bacteroides fragilis YCH46
MKAFFSFVAALVLSLSMAAQNKSFYDFTVKTIDGKEYPLSGLKGKKVLVVNVASKCGLTPQYAELQELYDQYKDQNFVIIGFPANNFMGQEPGTNEEIAKFCSVNYDVTFPIMAKISVKGKDMAPLYHWLTEKKLNGKQDAPVQWNFQKFMIDENGNWVGFVAPKESPFSETIISWIEKK

SEQ ID NO: 44547 - protein, 575 aa, Cucurbita cv. Kurokawa Amakuri
MHRFASGLASKARLARKGANQIASRSSWSRNYAAKDVKFGVEARGLMLKGVEDLADAVKVTMGPKGRNVVIEQSYGAPKVTKDGVTVAKSIEFKDKVKNVGASLVKQVANATNDVAGDGTTCATILTRAIFTEGCKSVAAGMNAMDLRRGISMAVDSVVTNLKSRARMISTSEEIAQVGTISANGEREIGELIAKAMEKVGKEGVITISDGKTLFNELEVVEGMKLDRGYISPYFITNQKNQKCELDDPLILIHEKKISSINSVVKVLELALKRQRPLLIVSEDVESDALATLILNKLRAGIKVCAIKAPGFGENRKAGLHDLAVLTGGQLITEELGMNLEKVDLDMLGSCKKITISKDDTVILDGAGDKKSIEERCEQIRSAIELSTSDYDKEKLQERLAKLSGGVAVLKIGGASEAEVGEKKDRVTDALNATKAAVEEGIVPGGGVALLYASKELDKLSTANFDQKIGVQIIQNALKTPVHTIASNAGVEGAVVVGKLLEQDNPDLGYDAAKGEYVDMIKAGIIDPLKVIRTALVDAASVSSLMTTTEAIVVELPKDEKEVPAMGGGMGGMDY

SEQ ID NO: 44548 - protein, 656 aa, Yersinia pestis KIM
MSVEKQFSVSAEKTCNTENKCNTEKKFDVICMGRIAVDLYGQQIGARLEDVASFAKYLGGSSGNVAYGSARQGLRSSMLARVGDEHMGRFLREELHQVGCDTSHLTTDKKRLTALVLLSIKDRDTFPLIFYRDNCADMAITAQDFSEQYIASARSLAITGTHLSHPNTREAVLTALRYARRNGVRTVLDIDYRPVLWGLTSLGDGETRFIESHQVTAELLAVFNLFDVIVGTEEEFHIAGGSTNTLDALRGVREVSDAALVCKRGALGCSVYTEAIPQTLDEGLTVSGVRVKVLNVLGAGDAFMSGLLRGYLNDEGWPQACRYANACGALVVSRHGCAPAMPSKIELDNYLARADAVVRPDLDVHLNHLHRVTTRRRQWPELCVMAFDHRSQLEEMALQCGADLCHISTLKTLILQASREAVHTAGLQGKAGLLCDGTFGQDALNAITGAGWWIGRPIELPGSRPLAMEHGNIGSQLIGWPQEHIVKCLVFFHPEDAYSLRLEQEQKIIEVYRACCQSGHELLLEVILPAGMPRSDELYLRAISRFYNLGVYPDWWKLPPLASEGWAALNKLIERRDPHCRGVVILGLDASLEALRTGFNAAAGYPIVKGFAVGRTLFGDASLAWLKRDIDDTQLIARIRDNYLQLITLWRERGQK

SEQ ID NO: 44549 - protein, 603 aa, Photobacterium profundum SS9
MKTITTDIAVIGAGGAGLRAAIAAAEANPDLEIALISKVYPMRSHTVAAEGGSAAVIKDEDSLDNHFNDTVGGGDWLCEQDVVEYFVENATREMTQLEQWGCPWSRKENGDVNVRRFGGMKVERTWFAADKTGFHMLHTLFQTSIKYKQINRFDEYFVVDLLVEDGQAQGLVAIHMSEGELICIKAKSVVLATGGAGRVYNCNTNGGIVTGDGMAMAFRHGVPLRDMEFVQYHPTGLPGTGILMTEGCRGEGGIMLNKNGYRYLQDYGMGPETPIGEPKNKYMELGPRDKVSQAFWHELQKGNTIKHPLGDVVHLDLRHLGKEYLHERLPFICELSKAYVNVDPAEEPIPIRPTVHYTMGGIETDKNNETRIAGLFAVGECSSVGLHGANRLGSNSLAELVVFGRLAGEGAAKRAVEFKGWNEASITKQIQAVQDRIDALMSQEGDENWSDIRTEMGHSMEAGCGIYREESLMQATIDKLAELRERYKKISIKDKGKVFNTDLLYAIEIGYGLEVAETMAHSAILRRESRGAHQRLDDNCTERDDVNYLKHSLAFYNGDKAPRIEYSDVKITKSQPKARLYGAAAEEAAAKEAAEAKQAEEKA

SEQ ID NO: 44550 - protein, 257 aa, Hordeum marinum
CELDNIMRLTGITGIVNGMDVSEWDPTKDKFLTANYDITTALEAKALNKEALQAEVGLPVDRKVPLVAFIGRLEEQKGPDVMIAAIPEIVKEEDVQIILLGTGKKKFERLLKSVEEKFPGKVRAVVRFNAPLAHQMMAGADLLAVTSRFEPCGLIQLQGMRYGTPCACASTGGLVDTIVEGKTGFHMGRLSVDCNVVEPADVKKVATTLKRAVKVVGTPAYQEMVKNCMIQDLSWKGPAKNWEDVLLELGVEGSEPG

SEQ ID NO: 44551 - protein, 475 aa, Lycopersicon peruvianum
MNVMRRLKSIASGRSSVSDPGGDSSIKRVKVEKEVDQRVVGETQMEEGCTTTTVPKEDMASTSKETTAGSTSTMDTRLENSELDELPKEMHEMKIKGEKDDKADSLDDNLKDMEPAVVSGNGTETGQIIVTTVSGRNGQEKQTLSYMAERVVGTGSFGVVFQAKCLETGESVAIKKVLQDRRYKNRELQIMRTLDHPNVVKLRHCFYSTTEKNDVYLNLVLEYVSDTVYRVSRHYSRLTQHMPIIYVQLYTYQICRALNYMHGVLGVCHRDIKPQNLLVNPHSHQLKLCDFGSAKMLVPGEPNISYICSRYYRAPELIFGATEYTTAIDMWSAGCVMAELLLGQPLFPGESGVDQLVEIIKILGTPTREEIRCMNPNYTEFKFPQIKAHPWHKIFHKRMPPEAVDLVSRLLQYSPTLRCTALEACAHPFFDSLREPNACLPNGRPLPPLFNFSPQELSGVPAELRKRLIPEHLRK

SEQ ID NO: 44552 - protein, 600 aa, Arabidopsis thaliana
MKYVLVTGGVVSGLGKGVTASSIGVLLKACGLRVTSIKIDPYLNTDAGTMSPFEHGEVFVLDDGGEVDLDLGNYERFLDIKLTRDNNITTGKIYQHVIAKERKGDYLGKTVQVVPHVTDAIQDWIERVAVIPVDGEEDPADVCVIELGGTIGDIESAPFIEALGQFSYRVGPGNFCLVHVSLVPVLNVVGEQKTKPTQHSVKGLRGLGLTPDILACRSTKPLEDNVKEKLAQFCHVPLEYIFTLYDVPNIWRIPLLLKDQKAHLAISKVLNLASILNEPSLGEWTSRAELCDNLHVPVRIAVVGKYTGLSDAYLSVLKALLHASVACRKKLVVDWVPACDLEKETEKENPDAYKAAWKLLKGVDGILVPGGFGDRGVEGKILAAKYARENKIPFLGICLGMQIAVIEFARSVLSLQDANSTEFNPETKHPCIIFMPEGSKTHMGGTMRLGSRKSIFNVKDSKSAKLYENKSFVDERHRHRYEVNPDMVERLEKAGLSFAAKDETGKRMEIIELPNHPFFIGAQFHPEFKSRPGKASPLFLGLIAASCGELDTVLNPASAHQHSISNGPTNIFINGTSKKSPNGLADVRYNNGYCNGLYTR

SEQ ID NO: 44553 - protein, 257 aa, Hordeum murinum
CELDNIMRLTGITGIVNGMDVSEWDPTKDKFLAVNYDITTALEAKALNKEALQAEVGLPVNRKVPLVAFIGRLEEQKGPDVMIAAIPEIMKEEDVQIILLGTGKKKFERLLKSVEEKFPGKVRAVVRFNAPLAHQMMAGADLLAVTSRFEPCGLIQLQGMRYGTPCACASTGGLVDTIVEGKTGFHMGRLSVDCNVVEPDDVKKVATTLKRAVKVVGTPAYQEMVKNCMIQDLSWKGPAKNWEDVLLELGVEGSEPG

SEQ ID NO: 44554 - protein, 257 aa, Hordeum brevisubulatum
  misc_feature (53)..(53): Xaa can be any naturally occurring amino acid
  misc_feature (63)..(63): Xaa can be any naturally occurring amino acid
  misc_feature (185)..(185): Xaa can be any naturally occurring amino acid
  unsure (1)..(257): unsure at all Xaa locations
CELDNIMGLTGITGIVNGMDVSEWDPTKDKFLAVNYDITTALEAKALNKEALXAEVGLPVDRXVPLVAFIGRLEEQKGPDVMIAAIPETVKEEDVQIILLGTGKKKFERLLKSVEEKFPGKVRAVVRFNAPLAHQMMAGADLLAVTSRFEPCGLIQLQGMRYGTPCACASTGGLVDTIVEGKTGXHMGRLSVDCNVVEPADVKKVATALKRAVKVVGTPAYQEMVKNCMIQDLSWKGPAKNWENVLLELGVEGSEPG

SEQ ID NO: 44555 - protein, 257 aa, Hordeum bulbosum
CELDNIMRLTGITGIVNGMDVSEWDPTKDKFLAVNYDITTALEAKALNKEALQAEVGLPVDRKVPLVAFIGRLEEQKGPDLMIAAIPEIVKEEDVQIILLGTGRKKFEKLLKSMEEKFPGKVRAVVRFNAPLAHQMMAGADLLAVTSRFEPCGLIQLQGMRYGTPCVCASTGGLVDTIVEGKTGFHMGRLSVDCNVVEPADVKKVATTLKRAVKVVRTPAYQEMVKNCMIQDLSWKGPAKNWEDVLLELGVEGSEPG

SEQ ID NO: 44556 - protein, 86 aa, Glycine tomentella
INISGTNGEVMPGQWEYQVGPSVGIEAGDHIWASRYILERITEQAGVVLSLDPKPIEGDWNGAGCHTNYSTKSMREDGGFEVIKKA

SEQ ID NO: 44557 - protein, 643 aa, Candida albicans SC5314
MNNFSDDLYPLALLMDELKHDDVSNRVEAMQKLDTIAIALGPERTRKELLPFLNDVAQDDEEEVFAVLANKLGEFIPLIGGHQYSEPLISILTILASMEEPLVRDKAIDSLNKISLELSDEEINGIFLTLIQNLSQGNWFSKKIAACGLYQSVIIRVDATTRQNLLKLYFKLVTDDYPMVRRASATNLPRLIDLLTEFTEHNPNDVNKITNEDWEIISKMFQHLITDDQDSVKFLSVDVLISILEFFGKIHEYSFNADFLSSALKLIQDESWRVRYTAADRFSKIARNFTNNESDLFQLIDPFISLMKDHEGEVRKAIAKQLPVFCQLLVKFPSTKATVLNKIVPVANELSQDPQENVRASLASTITELSPILEKQATIDKLLPVFLIMLKDEFPDVRLNIISNLSVVNETIGINLLSTNLLPAITELAQDHKWRVRLAIIEYIPKLAKQLGESFFNEELLSLCMSWLWDPVYAIREAAVNNLKELTVIFGSEWAQVEIINRLLNQGDKIDNDDGNGDNNDNNDKVDYSNFIIRITCLFAITSLIPVIDYKVLIDKVLPFINGLINDSVPNIRFNVAKSYLILVESLINKKKSGQLSETNDQELKKFIDSQVLSNLQKLENDDDVDVRFYSIKSIKGINEILT

SEQ ID NO: 44558 - protein, 368 aa, Pseudomonas syringae pv. syringae B728a
MTTLNSTPRADGFHMPAEWAPQTQVWMVWPERPDNWRLGGKPAQAAHVAIAKAIARFEPVTVAVSAAQYDNARARLDMPNIRVVEMSSNDAWVRDSGPTFVINDRGEVRGVNWEFNAWGGFDGGLYAPWNLDSQLGGKVLEIERCPRYVTEGFVLEGGSIHVDGEGTLITTEECLLNRNRNPHLTREQIETILGDYLAVDKVIWLPEGLFNDETDGHVDNFCCYIRPGEVLLAWTDDPEDPNYSRCHAALSILENTLDAKGRAFIVHKMPIPGPLFATEEECAGVDQVHGSQERNPSVRLAGSYVNFLIVNGGIIAPSFDDPMDEKAREILQKLFPEHEVVMAPGRELLLGGGNIHCLTQQQPAPHKN

SEQ ID NO: 44559 - protein, 373 aa, Thermus thermophilus HB27
MRLFLKLFLSHLLVALLALLLLLLLAEAFAPAFYRGHVERMLHALSMMGGGMMGEALRRDLEEGLRSTLTAALLAALPLAALGALLTASFASLRLARTARLLAEGSRRMAEGEYGVRLPLLERDELGELALHFNRLAEALEKVEKTRAELIGTVAHELRTPLAALQGYAEGLMDGVLSKEKAAEGILREVKAMRRLVEDLSLVSRVEAKAVEIRPKPLDPKGLLEEALARFQSAFQAKGVALSLEAQDPLPQVWADEERVLQVLANLLTNALRHTPQGGEVRLRAFRQGEAVAFQVADTGPGIPEEHLPHIFERFYRVDKARSRKEGGSGVGLTVAKGLVEAMGGRIFVESRVGEGTTFTFTLPLYTGLTLKG

SEQ ID NO: 44560 - protein, 133 aa, Artocarpus
GKAFDDGAFTGIREINLSYNKETAIGDFQVVYDLNGSPYVGQNHSSFISGFTPVKISLDFPSEYITEVSGYTGNVSGYVVVRSLTFKTNKKTYGPYGVTSGTPFNLPIENGLIVGFKGSIGYWMDYFSMYLSL

SEQ ID NO: 44561 - protein, 135 aa, Novosphingobium aromaticivorans DSM 12444
MSDQPDKLNLTDAEWRERLSPEQYAILRQGGTERAFTGAYEKNKAEGDYHCAGCGAPLFASDTKYDSGSGWPSFYAPVDPEAVDEHRDVSHGMVRTEVRCARCDGHLGHVFPDGPNPTGLRYCMNSASLDFTPKD

SEQ ID NO: 44562 - protein, 342 aa, Symbiobacterium thermophilum IAM 14863
MDLVTGATGFIGSQLVPHLVEQGRQVRILVRSRQKAEAVFGPLCAALEVAEGDLGDEASLARAAAGVDRVYHLASRINFQGSLRRMRAINVEGTRRLLDACAAAGVKRVVHMSSIAAGGPAVKDENGRYRARTEEDEAAPLPDAYGITKLEQERLALSYQERGLEVVVVRPSAVFGPGDPDGMNTLIWMVKNGRLPFYLGSGQAVVNLVFVRDVVRGTVAAMERGRPGEVYHLVGPNLTQEQLFGLLAQVSGGRSPRWAMPVPVLMGAARLATIGARLTFRRRSLVHPHEIRNWTAPWIMSDDKARRELGLVPTDTAAAFRETLQWLQAYKARQAEASRTGN

SEQ ID NO: 44563 - protein, 308 aa, Nocardioides sp. JS614
MKIATVGVHVLDTHVLGIESIPARSDGQLVETIRMSPAGTAGGTAVVLSRLGAEVRSFGAVGADPIGSTLLALLEREGVDVTGLVRKPDQQTSASVLPVRPNGDRPAWHCIGANGAFTLDDLDLAALDGCTHVHLGGPEFLGGEAAGKLLEHARSLGATTSLDLLAPGDPDLLAWVADALPHTDYLLPNDEQVLGFTGASSIADGARALVAAGAGCVAVTQGSRGALVVTADEVVEVPAYAIEVVDTTGCGDAFSAGFLRGLSLGRDLRDAAELGCATAAQVAQGLGTDAGDYSLDSVLAFAGSTATR

SEQ ID NO: 44564 - protein, 272 aa, Triticum aestivum
  misc_feature (235)..(235): Xaa can be any naturally occurring amino acid
  misc_feature (247)..(247): Xaa can be any naturally occurring amino acid
  unsure (1)..(272): unsure at all Xaa locations
MASALSAPAASAVAAARCKVFGGGRNDGRAGCRVGVARKNTSHITMAVAVDASRFEGVPMAPPDPILGVSEAFKADTSDLKLNLGVGAYRTEELQPAVLNVVKKAEKLMLEKGENKEYLPIEGFAAFNKATADLLLGADNPVIKQGRVATLQSLSGTGSLRLAAAFIQRYFPDAKVLISSPTWGNHKNIFNDARVPWSEYRYYDPRTVGLDFEGMIADIQAAPGGPLVLLHGCAXNPTGIDPPPEHXEKRMKRKTYPSLELPTFQWNLELVL

SEQ ID NO: 44565 - protein, 176 aa, Triticum aestivum
AYLGDIPEQVCTKKQVATGPEFPGYRRPTRPDASGHSIPVGGLAYYVTAPSSMADILANPFHALFYVVFMLSACALFSKTWIEVSGSSAKDVAKQLKEQQMVMPGHRESNLQKELNRYIPTAAAFGGVCIGALTVLADFMGAIGSGTGILLAVTIIYQYFETFEKERATELGFFGF

SEQ ID NO: 44566 - protein, 367 aa, Bacillus anthracis str. 'Ames Ancestor'
MKKQRIVVKIGSSSLADSHEGISKEQLSDHVAALARLKEEGHEVLLITSGAVAAGFSALGYPSRPVTIKGKQAAAAVGQSLLMQAYTEEFRKYGIVTAQLLLTRSDFSRKEQYSNAYATLGELLNRSALPIINENDSISLEELTFGDNDMLSALVSGLVSADMLMIFTDVNGLYDKNPQKNEDAKKYYFLPEVTEEIASLAGDAGSKLGTGGMKSKVDAAKTALSLGVSVFIGTGRGQEKFVDVLKGKGDGTYVGNAPQKEMKINKQWIALHSVVSGQIEIDAGAATAIIQHGKSLLPAGVTNVSGFFQVGEVVEVMTQQGRVIGKGQCTYSAEELRDVKGMQSQQIQARGERHNYEVIHRDYWVSF

SEQ ID NO: 44567 - protein, 474 aa, Bacillus anthracis str. 'Ames Ancestor'
MSQVNNTNNELKRTMKSRHLFMIALGGVIGTELFNGSGFIISQAGPGGSVLAFMAGGLLMYFVMLCLGELAVAMPVSGSFQEYATKFINPATGFTIGWLYWLSWANTTGLEFTTAGITMQRWFPDIPVWVWCLIFGVTIFMINALSARSYAETEFWFSSIKVSAIIAFIILGGAAMFGLIDLKGDEPAPLLSNFVNHGGLFPNGLAAILLTMVTVNYSFQGTELVGIAAGESEDPAKTLPRSIRNIIWRTMFFFVLAIFVLVALIPWEEAGLTKSPFVAVFDNISIPYAADIMNFVILTAVLSVANSGLYAATRMLWSLSKNEMAPAFLKKLSSRGIPLNALILTISISAFSLLTSVVAAETVYLWLISISGVITIIVWMSICVSQFFFRKHYVADGGRLEDLKFKTPLYPLVPILGFGLYGIILVSLIFIPDQRLGIYCTVPFIIFCYTYYHFKVKKRISTNTSSENKISETI

SEQ ID NO: 44568 - protein, 437 aa, Brassica napus
  misc_feature (163)..(163): Xaa can be any naturally occurring amino acid
  misc_feature (173)..(173): Xaa can be any naturally occurring amino acid
  misc_feature (279)..(279): Xaa can be any naturally occurring amino acid
  misc_feature (340)..(340): Xaa can be any naturally occurring amino acid
  unsure (1)..(437): unsure at all Xaa locations
MNFSWVSFLFFFLLSPALLRYGSGSGLESLSRGMLDSAKEPEFFEWMRGIRRRIHENPETGFQEFKTSQLIRDELDLLGVKYKWPVAKTGVVAWIGSGSKPDFGLRADMDALPLQELEEWESKSKVDGKMHACGHDTHVAMLLGAAKLLQSRKHLIKGTVKLXVFQPGEEGYXGAIEMLKDDILGRVGGILSVHVFPTIPSGGIGARPGTVLAGAGLFTVTVHGQGSHAATPHLSKDPILAASSAVVALQQIVSREMDPLEAGVVAVGYIQGGHTQNVXIPQSAKFGGTFRSLSNDGLLFIQRRIKEISEAQAAVYQCKAEVDFGEKEPSLRPVMKNDEXLSEHGKEVAEAMIGKDNFHDFPVTMGAEDFSFFTKRTKAAIFVLGIKNETLGAGKPLHSPYFFVDEEALPLGAALHAAMAVSYLDKHGNGHEVKTEL

SEQ ID NO: 44569 - protein, 94 aa, Arabidopsis thaliana
MVVEHDHPEEEKKGLVEKIKEKLPGHHDEKAEDSPAVTSTPLVVTEHPVEPTTELPVEHPEEKKGILEKIKEKLPGYHAKTTEEEVKKEKESDD

SEQ ID NO: 44570 - protein, 439 aa, Taxus wallichiana var. chinensis
MEKTDLHVNLNEKVMVGPSLPLPKTTLQLSSIDNLPGVRGSIFNALLIYNASPSPTMVSADPAKLIREALAKILVYYPPFAGRLRETENGDLEVECTGEGAMFLEAMADNELSVLGDFDDSNPSFQQLLFSLPLDTNFKDLPLLVVQVTRFTCGGFVVGVSFHHGVCDGRGAAQFLKGLAEMARGEVKLSLEPIWNRELVKLDDPKYLQFFHFEFLRAPSIVEKIVQTYFIIDFETINYIKQSVMEECKEFCSSFEVASAMTWIARTRAFQIPESEYVKILFGMDMRNSFNPPLPSGYYGNSIGTACAVDNVQDLLSGSLLRAIMIIKKSKVSLNDNFKSRAVVKPSELDVNMNHENVVAFADWSRLGFDEVDFGWGNAVSVSPVQQQCELAMQNYFLFLKPSKNKPDGIKILMFLPLSKMKSFKIEMEAMMKKYVAKV

SEQ ID NO: 44571 - protein, 307 aa, Oryza sativa (japonica cultivar-group)
MSASKLQFTPCSTPIQGNEINFSKLYLHHTPAGPRPNQSGVTSTNKETGLGSLVVNNWQVYDGIGCDAKVVAHAQGLHVYAGNWHNSFTLVFEDERFKGSTLEVMGIVVEQGEWAIVGGTGQFAMANGVIFKKFHEQKKEGNIMELTIKGFCPVLKGSPSQGLVTKIGPWGGIDGGRAQDITATPKRLESITIHSGWTIDSISFIYFDQAGEKHRAGPWGGPGGDPCTIEFGSSEFLKEVSGTFGPYEGWKVIRSIKFVTNKKTYGPFGRQEGTPFSVPVQNNSTIVGFFGRSGKYLDTVGIYVHPR

SEQ ID NO: 44572 - protein, 456 aa, Salmonella enterica subsp. enterica serovar Typhi Ty2
MDSQQHGEQLKRGLKNRHIQLIALGGAIGTGLFLGSASVIQSAGPGIILGYAIAGFIAFLIMRQLGEMVVEEPVAGSFSHFAYKYWGGFAGFASGWNYWVLYVLVAMAELTAVGKYIQFWYPEIPTWASAAAFFVIINAINLTNVKVFGEMEFWFAIIKVIAVIAMILFGAWLLFSDTAGPQATVRNLWEQGGFLPHGWTGLVMMMAIIMFSFGGLELVGITAAEADNPEQSIPKATNQVIYRILIFYIGSLAVLLSLLPWTRVTADTSPFVLIFHELGDTFVANALNIVVLTAALSVYNSCVYCNSRMLFGLAQQGNAPKALLNVDKRGVPVSSILVSAVVTALCVLLNYLAPESAFGLLMALVVSALVINWAMISLAHMMFRRAKQQQGVKTRFPALFYPFGNVLCLLFMAAVLIIMLMTPGMAISVWLIPVWLLILGVGYLCKEKTAKTVKAH

SEQ ID NO: 44573 - protein, 87 aa, Glycine argyrea
INISGTSGEVMPGQWEYQVGPSVGIEAGDHIWASRYILERITEQAGVVLSLDPKPIEGDWNGAGCHTNYSTKTMREDGGFEVIKKAT

SEQ ID NO: 44574 - protein, 432 aa, Burkholderia sp. 383
MSRDLLGTLAGWQRTYGDVVHLRVRPEHAVVVTDPALVRELLVTHHDALGRWERAIRVFAQVHGHSVLVAEGDAWRDKRQALQPNFMPKPVQAFVPSIAATAGHALAQWPARDPDWPIESALTSLAMDVIMRTMFSDAIGDDARAAEEAVRTVSAAANADFYWPASTPDWVPWKRGKARAMAVLNGLIDRQLHARLDLPARAWPDDLLSRLLRLHRDDARRWPLQAVHDECMTAFLAGHETTAGALTWWAWCMATNPAAQAAARDEVSRVLGGCAPSAETRSSLRYLTHTLEETLRLYPSAPILISRRASRPIVLGPWQFPARTLFMLPLQLMQRDARWFAEPDVFRPERFADGAPAAPRGTYMPFGTGPRVCLGQHLAMTEMTVVAAMILQRYELSAQPGMMPPRPVLNVTLRPERLLHLAIAPAADGGTV

SEQ ID NO: 44575 - protein, 142 aa, Dehalococcoides sp. CBDB1
MERTLLLVKPDGVNRGLSGEILGRMEKLGLKLIGLRMLQMDAVLADKHYAPHRARPFFKDLVTYITSGPITAAVFEGENAVEKMRKAMGATDPAKSEKGTVRGDLGINIEQNTVHGSDSAENAKHEISLFFSESELVNYDRR

SEQ ID NO: 44576 - protein, 550 aa, Photobacterium profundum SS9
MAAKDVKFGNDARIKMLEGVNVLADAVKVTLGPKGRNVVLDKSFGAPTITKDGVSVAREIELEDKFQNMGAQMVKEVASQANDAAGDGTTTATVLAQSIIAEGLKAVAAGMNPMDLKRGIDKAVIAAVAALKELSVPCEDTKAIAQVGTISANADATVGNLIAEAMEKVGRDGVITVEEGQALHDELDVVEGMQFDRGYLSPYFINNQEAGSIDLESPFILLVDKKVSNIRELLPALEGVAKASRPLLIIAEDVEGEALATLVVNNMRGIVKVAAVKAPGFGDRRKSMLQDIAVLTAGTVISEEIGLELEKVQLEDLGQAKRITITKENTTIIDGAGEETMIQGRVAQIRQQIEDATSDYDKEKLQERVAKLAGGVAVIKVGAATEVEMKEKKDRVQDALHATRAAVEEGVVAGGGVALIRAASKVAASGLEGDNEEQNVGIRVALRAMESPLRQIVKNAGDEDSVVANNVRAGEGNYGYNAATGVYGDMIAMGILDPTKVTRSALQFAASVAGLMITTEAMITDMPAKDASAMPDMGGMGGMGGMGGMM

SEQ ID NO: 44577 - protein, 258 aa, Oryza sativa (japonica cultivar-group)
MSASNNKLQFTPRSSLFQGNEINFSMLYLHHTPAGPRPDQSGLTGNNRETGLGPLVVNNWPVYDGIGRDAKVVARAQGLHIYAGNWHNSFSLVFKDERSGSTLEVMGIVVERGEWAIVGGTGQFAMANGVIFKKFHEQKQEGNIMELTIQGFCPVLKGSQLTLRDYIVNIMVLDINVLCPLMKHLIFDSISFIYLDQAGQKHRAGPWGGPGGDPYMIEFGSSELLKEVSGTYGLYEGWKVIRSIKFVTNKKPYGPFGR

SEQ ID NO: 44578 - protein, 253 aa, Hordeum brevisubulatum subsp. violaceum
CELDNIMRLTGITGIVNGMDVSEWDPTKDKFLAVNYDITTALEAKALNKEALQAEVGLPVDRKVPLVAFIGRLEEQKGPDVMIAAIPEIVKEEDVQIILLGTGKKKFERLLKSVEEKFPGKVRAVVRFNAPLAHQMMAGADLLAVTSRFEPCGLIQLQGMRYGTPCACASTGGLVDTIVEGKTGFHMGRLSVDCNVVEPADVKKVATALKRAVKVVGTPAYQEMVKNCMIQDLSWKGPAKNWENVLLELGVEG

SEQ ID NO: 44579 - protein, 87 aa, Glycine latifolia
INISGTNGEVMPGQWEYQVGPSVGIEAGDHIWASRYILERITEQAGVVLSLDPKPIEGDWNGAGCHTNYSTKSMREDGGFEVIKKAI

SEQ ID NO: 44580 - protein, 117 aa, Photobacterium profundum SS9
MTSSVLLVYIPWILPNQERRPMNIRPLHDRVIVERQEVESKSAGGIVLTGSAAEKSTRGVVLAVGKGRILENGTVQELDVKVGDTVIFAEGYGTKSEKIDGKEVLIMSENDIMAIVE

SEQ ID NO: 44581 - protein, 871 aa, Oryza sativa
MEEGFVESGSFSRSSSFGGFEEWMALVRKRNGSGTPSSSSPQQPRSGGFAAQSSVSSEGLELGHPYSDAIDYSLSYQLPTTSLWDRLGRVTMMDIESSDFNWSSLSSLHHTKHTDTSTEPYEDDTSRSFEVTVNSGGVVFIALFKTSEYDDLPSKETAAVIKIAPSRMATQSERFGYELAKWLGVRTPQGRVIHNFSSEWHQMKDAVENARDAAISSCDELEEMICTEMLEALELSRCLFLMNYVHGSPLLENTMPFDSHDSAEKTAEALGRVLILDLVLRNEDRLRCRPLGWRGNYANLLVADRNAYANLDSLDDVYDSAIIRYKPEIIRSPQNRKPRRAVSISGSIGSDTSDLMLPDNPSQPEISSFHIIAIDSGVPRRPPACKRAKDQESYPKLVELTLNNWDYSSNLLFELSFGKLGIPGPEEFDVSSDLSYHSPLSESDMVAAVNSFRGGFRSALRDLQRFHIFLVTLYQKLDGLLKIFFNLMYKVLNEYDREDAGSSDSLCSTETHMDSHDSEVPKHMRRPSRTLSRDNFDLSSPSSRENFMIKNFKGSSDASRGLRLTMKLRDFNKYAKADGELCKEIEQWNDMLRTEVVKLCQDNSFNTGFFEGIDNSIAVDAYELKVRLEHILERISLISDAASTERPSQITDYLYIGGALAARSTYTLKHLGITHVLCLCANEIGQAESQQPDRFDYQNFSINDDENADISDVFQDASDFIDYVQHLHGKVLVHCFEGKSRSATVVLAYLMLRKKFTLLEAWNMLKKVHRRAHPNDGFAKVLLDLDKKLHGKISMEWHHRRPAMKVCPICGKNAGLSSSSLKLHLQKAHRKISSGSVDTAMSLEIQKAVEAIKAGRGGGDSPTHSAEKVTS

SEQ ID NO: 44582 - protein, 257 aa, Elymus elymoides
CELDNIMRLTGITGIVNGMDVSEWDPTKDKFLAVNYDITTALEAKALNKEALQAEVGLPVDRKVPLVAFIGRLEEQKGPDVMIAAIPEIVKEEDVQIVLLGTGKKKFERLLKSVEEKFPGKVRAVVRFNAPLAHQMMAGADLLAVTSRFEPCGLIQLQGMRYGTPCACASTGGLVDTIVEGKTGFHMGRLSIDCNVVEPADVKKVATTLKRAVKVVGTPAYQEMVKNCMIQDLSWKGPAKNWEDVLLELGVEGSEPG

SEQ ID NO: 44583 - protein, 257 aa, Elymus glaucus
CELDNIMRLTGITGIVNGMDVSEWDPTKDKFLAVNYDITTALEAKALNKEALQAEAGLPVDRKVPLVAFIGRLEEQKGPDVMIAAIPEIVKEEDVQIVLLGTGKKKFERLLKSVEEKFPGKVRAVVRFNAPLAHQMMAGADLLVVTSRFEPCGLIQLQGMRYGTPCACASTGGLVDTIVEGKTGFHMGRLSVDCNVVEPADVKKVATTLKRTVKVVGTPAYQEMVKNCMIQDLSWKGPAKNWEDVLLELGVEGSEPG

SEQ ID NO: 44584 - protein, 257 aa, Elymus glaucus
CELDNIMRLTGITGIVNGMDVSEWDPTKDKFLAVNYDITTALEAKALNKEALQAEVGLPVDRKVPLVAFIGRLEEQKGPDVMIAAIPEIVKEEDVQIVLLGTGKKKFERLLKSVEEKFPGKVRAVVRFNAPLAHQMMAGADVLVVTSRFEPCGLIQLQGMRYGTPCACASTGGLVDTIVEGKTGFHMGRLSVDCNVVEPADVKKVATTLKRTVKVVGTPAYQEMVKNCMIQDLSWEGPAKNWEDVLLELGVEGSEPG

SEQ ID NO: 44585 - protein, 335 aa, Candida albicans SC5314
MAIKIGINGFGRIGRLVLRVALGRKDIEVVAVNDPFIAPDYAAYMFKYDSTHGRYKGEVTASGDDLVIDGHKIKVFQERDPANIPWGKSGVDYVIESTGVFTKLEGAQKHIDAGAKKVIITAPSADAPMFVVGVNEDKYTPDLKIISNASCTTNCLAPLAKVVNDTFGIEEGLMTTVHSITATQKTVDGPSHKDWRGGRTASGNIIPSSTGAAKAVGKVIPELNGKLTGMSLRVPTTDVSVVDLTVRLKKAASYEEIAQAIKKASEGPLKGVLGYTEDAVVSTDFLGSSYSSIFDEKAGILLSPTFVKLISWYDNEYGYSTRVVDLLEHVAKASA

SEQ ID NO: 44586 - protein, 395 aa, Arabidopsis thaliana
  misc_feature (161)..(161): Xaa can be any naturally occurring amino acid
  misc_feature (163)..(163): Xaa can be any naturally occurring amino acid
  misc_feature (274)..(274): Xaa can be any naturally occurring amino acid
  misc_feature (336)..(336): Xaa can be any naturally occurring amino acid
  unsure (1)..(395): unsure at all Xaa locations
MQIFVKTLTGKTITLEVESSDTIDNVKAKIQDKEGIPPDQQRLIFAGKQLEDGRTLADYNIQKESTLHLVLRLRGGMQIFVKTLTGKTITLEVESSDTIDNVKAKIQDKEGIPPDQQRLIFAGKQLEDGRTLADYNIQKESTLHLVLRLRGGMQIFVKTLXGXTITLEVESSDTIDNVKAKIQDKEGIPPDQQRLIFAGKQLEDGRTLADYNIQKESTLHLVLRLRGGMQIFVKTLTGKTITLEVESSDTIDNVKAKIQDKEGIPPDQQRLIFXGKQLEDGRTLADYNIQKESTLHLVLRLRGGMQIFVKTLTGKTTTLEVESSDTIDNVKAKIQXKEGIPPGPASVSIFRLGKARLEGLERYFFGPELTKQFPEKEFLTFFQLWFPAFFRGWFS

SEQ ID NO: 44587 - protein, 257 aa, Elymus glaucus
CELDNIMRLTGITGIVNGMDVSEWDPTKDKFLAVNYDITTALEAKALNKEALQAEVGLPVDRKVPLVAFIGRLEEQKGPDVMIAAIPEIVKEEDVQIVLLGTGKKKFERLLKSVEEKFPGKVRAVVRFNAPLAHQMMAGADLLVVTSRFEPCGLIQLQGMRYGTPCACASTGGLVDTIVEGKTGFHMGRLSVDCNVVEPADVKKVATTLKRTVKVVGTPAYQEMVKNCMIQDLSWKGPAKNWEDVLLELGVEGSEPG

SEQ ID NO: 44588 - protein, 251 aa, Oryza sativa
KFDASRGFRISTYVYWWIRQGVSRALAENSKTFRLPTYLHERLIAIRGAKYELEDQGIAPTIENIAGSLNISEKKVLNATEAVNKVLSLDQQAFPSLNGLPGETLHSYIEDQNVANDPWHGFEEWYLKEEVNKLLNSTLNERERDIIRLYHGIGKQCHTWEDISRQFGLSRERVRQAGSTSSSSPASADAEADLVRHQVGRPERRAQQPVPRAQPDHRWRRRHLVTTLRAAAAAAAATVSAHTHTHALGCT

SEQ ID NO: 44589 - protein, 761 aa, Bacillus clausii KSM-K16
MRSSSLGYPRIGGQREWKKNLEAFWAGKRSKTDFLQEQKSLRLSYLQKQQQLGLDLIPVGDFSDYDHVLDTAVAFGIVPERFAYAGGKVEEETYFAIARGTDDAVAAEMTKWFNTNYHYIVPELTASREPALVDNRWLRLYEEAKSELGINGKPVLLGPVSFVKLAKQYGNKSFSEHVQTLVPLYGQVLAELAQAGAPLIQVDEPILAGDVTEAEWAVVEETYQSLAKLAPNAKLLLQTYFESVADYNRFIQLPVAGLGFDFVAGKEETFQNLRVNGFPNDKLLALGVIDGRNIWRTDLTAVNAELKEVLQVVERERLILQPSSSLLHVPVTVQSEEKIADELKEAIAFADEKIIEIVSLAKVVNGHEPPSLLEASKHALGRLNASEARNNQSVQQEVAQISSEDPSRGLDAPTRAKLQAAKLKLPLLPTTTIGSFPQTKEIRKKRLDWRKGKLDSAGYETFINAEIDRWIAIQEQLGLDVLVHGEFERTDMVEFFGEKLGGFQFTTYGWVQSYGSRCVKPPIIYGDVYFKQPMTVKETVYAQSKTDKPVKGMLTGPVTIYNWSFPRADITEGEAVNQIALALRKEVLALEKHGIGVIQVDEPALREGLPLKRAKWQSYLDQSVTAFQLTVNQVKPETQIHTHMCYSDFQDIIEAIDGLDADVISIEMSRSHGELISSFEEYTYNKGIGLGVYDIHSPRVPAKEEIARNIERALNVLHPKQFWVNPDCGLKTRQEPETVAALKVMVEAAKEARQTLETKTI

SEQ ID NO: 44590 - protein, 550 aa, Neurospora crassa
MFPTSTSPASRQLVCNVGHARARTIASALGPAAASISRHHVSHSILMVGRINGVGRTYATRLIHSSTNRPKPTDHLTINNASSLPATGGSQSSEMPKTPGPSPLAVLPLTNVLRSWMTTTVSSSPFLLPPSLAVMSVLAHTTNPVLNPDRNPLLRAFLKKTFYAQFCAGENPAEVRQTIDSLKQIGFSGVILGYAREVVLTDSETKDLASCAAEGGAAAEECIRTEINPWAEGTMETVRLASPGDFVALKFTGAGRQALYSLSKQLPPSEALGSAIDGICNLAAERGVRLLFDAEQNALQPGIDDWTLDYMRRYNKSNAVVYGTYQAYLKSTPATLSKHLAIAASEGFTLGVKLVRGAYLGADPRYLICDTKADTDGQYDGIAEALLRKTWSGPLQPPVPQSGSAEKETTNFPDVGVVLATHNRESVLKGKALLDSGVAKLGYEQVAFAQLQGMADEVSCELVAGPHETPKEMEMAAEKESEKGSEKGSEMVNKPQVYKYLVWGSTGECMKYLLRRAYENRDAVQRTRSGREAMGREVRRRVKGLFGVSS

SEQ ID NO: 44591 - protein, 263 aa, Zea mays
MRTCTTFSPNSSMFRNYEFNSKNLKWDFLGLVCPLQPVGRLVLNRNIDNFFAENEQLAFCPGLIVPGIYYSDDKLLQTRIFSYSDTQRHRLGPNYLLLPANAPKCAHHNNHYDGSMNFMHRHEEVDYFPSRYDAVRNAPRYPIPTAHIAGRREKTVISKENNFKQPGERYRAMDPARQERFITRWVDALSDPRLTHEIRTIWLSNWSQADRSLGQKLASRLSAKPSMLKLFLISFNLIQYMCNGRTSSDQYQFVFRLNEIERV

SEQ ID NO: 44592 - protein, 469 aa, Bacillus clausii KSM-K16
MKLFINGEWVSEELDVFDVVNPATGEVVGSVPKGGAKEAKVAADGAYESLPAWAERSAYERSAILEAWHDLIAEQKEELARLMTMEQGKPINEARGEIAYANSFIKWYAEEGKRIYGETIPASSPDKRLFVVKQPVGVVAAITPWNFPAAMITRKVAPALAAGCTVLIKPASQTPLTALKLAELAEKAGLPKGVLHVVVGSTSDISKAWQEDERVRKLTFTGSTEIGRTLMSEAGQTVKKISLELGGHAPVLVFEDADIDNAVQETIASKFRNGGQTCVCANRIYVHESIAEAFITKMKQAVEQLKVGNGLNEETDIGPLIDEEAVDKVLTHIRDAKDKGAEVLTGGNSSDGLFIEPTVIAGVTDDMACMSEETFGPLAPISTFKTEEEVVKRANDTIYGLAAYLFTTDLSRGIRVAEKLDYGVVGLNDGGPSVAQAPFGGFKQSGIGREGGHEGLEEFLESKYVSLKM

SEQ ID NO: 44593 - protein, 462 aa, Thermus thermophilus HB27
MLARRSFLQAAAGSLVLGLARAQGPSFPEPKVVRSQGGLLSLKLSATPTPLALAGQRATLLTYGGSFPGPTLRVRPRDTVRLTLENRLPEPTNLHWHGLPISPKVDDPFLEIPPGESWTYEFTVPKELAGTFWYHPHLHGRVAPQLFAGLLGALVVESSLDAIPELREAEEHLLVLKDLALQGGRPAPHTPMDWMNGKEGDLVLVNGALRPTLVAQKATLRLRLLNASNARYYRLALQDHPLYLIAADGGFLEEPLEVSELLLAPGERAEVLVRLRKEGRFLLQALPYDRGAMGMMDMGGMAHAMPQGPSRPETLLYLIAPKNPKPLPLPKALSPFPTLPAPVVTRRLVLTEDMMAARFFINGQVFDHRRVDLKGQAQTVEVWEVENQGDMDHPFHLHVHPFQVLSVGGRPFPYRAWKDVVNLKAGEVARLLVPLREKGRTVFHCHIVEHEDRGMMGVLEVG

SEQ ID NO: 44594 - protein, 578 aa, Anabaena variabilis ATCC 29413
MVNMLEHDVIIVGGGLAGCRAAVEIARTDPSLNVAVVAKTHPIRSHSVAAQGGMAASLKNVDSSDTWEAHAFDTVKGSDYLADQDAVAILTQEAPDVVIDLEHMGVLFSRLPDGRIAQRAFGGHSHDRTCYAADKTGHAILHELVNNLRRYGVHIYQEWYVMRLILEENEAKGLVMYSLLDGHIEVVRAKAVMFATGGYGRVYNTTSNDYASTGDGLAMSAIAGLPLEDMEFVQFHPTGLYPVGVLISEAVRGEGAYLINSEGDRFMATYAPSRMELAPRDITSRAIAYEIRAGRGVNLDGSPGGPFVYLDLRHMGKEKIMSRVPFCWEEAHRLVGVDAVTQPMPVRPTIHYCMGGIPVNTDGRVRSSGDGLVEGFFAAGETSCVSVHGANRLGSNSLLECVVYGKRTGAAIAQYVQNRKLPAIDEQRYVKQAQQEIQALLEQPGEYRINQVRQAFQDAMTDYCGVFRTQDLMSQGWQKITEIQQKYSQIYLDDKGSCWNTELVEALELRSLMIVGQMILASALNRQESRGAHFREDYPQRDDTKFLQHTMAYYSPAGIDIQYRPVTITMFQPQERKY

SEQ ID NO: 44595 - protein, 480 aa, Ashbya gossypii ATCC 10895
MLRCREVYNICKGAMSNEVKHYDYLVIGGGSGGVASSRRAASYGAKTVLIEGKALGGTCVNVGCVPKKVMWYASDLAHRLLHARDYGLLQEVDISKEKLHFNWKEFAGKRNAYVERLNGIYERNLAKEGVEYVHGWARFNSEGQVEVTRPDQTTEKYTADHILIATGGEPVLPEGIPGAEYGVDSDGFFRLEEQPKKVVISGSGYIATEFAGVFNGLGTETHIVIRKDHVLTKFDPSIQEIVTEHYEKEGVNIHKKESIQRVEKDPNTGKLTVHLSGKIIEDVDQLVWAIGRKSLLGIAPENVGVKLGETGHVVVDEYQNTSTKGIYALGDVVGNMELTPVAIAAGRKLANRLFGPEQMRAQKQDYDNVPSVVFSHPEAGSIGLTEPQAIERYGKENIKIYQTKFTAMYYAMLEDKSPTKYKLICAGPEEKVVGLHIVGDGSAEILQGFGVAIKMGATKADFDSCVAIHPTSAEEIVTLK

SEQ ID NO: 44596 - protein, 257 aa, Clostridium acetobutylicum ATCC 824
MVINKVEICGVNTSKLPVLKEKEMRELLISMRNGNTTAREKFIKGNLRLVLSVIQRFNNRGENADDLFQVGCIGLIKSIDNFDLSQNVKFSTYAVPMIIGEIRRYLRDNNSIRVSRSLRDIAYRALQVRDRLISKNNKEPTVSQIAKELKIPREEVIFALDAIQDPISLFEPIYHDDGDAIYVMDQISDNKNLDDSWLQNISIKEAMKKLSDREKMILNMRFFDGRTQMEVADEIGISQAQVSRLEKTALKHMKKYV

SEQ ID NO: 44597 - protein, 522 aa, Oryza sativa
MDAVAGAGQLVGLAAATLLTAAFLVAVKMGWRRRRRQREVAPEGSCRVVGGDGGDRTDIVIVGAGVAGSALAYTLGKDGRRVHVIERDMTEPDRIVGELLQPGGYLKLMELGLEDCVEEIDAQRVLGYALLQDGRNTKLSYPLEKFHSDVAGRSFHNGRFIQKMRQKAASLPNVHLEQGTVTSLLEEGGTVKGVQYKTKSGEELKAYAPLTIVCDGCFSNLRRVLCSPKVDVPSCFVGLVLENCQLPHPNHGHVILANPSPILCYPISSTEIRCLVDIPGQKVPSMATGEMAKYLKTVVAPQIPPELHDSFIAAIDKGSIRTMPNRSMPAAPLPTPGALLMGDAFNMRHPLTGGGMTVAFSDIVVLRNLLKPLGNLHDAPSLCKYLESFYTLRKPVASTINTLAGALYKVFCASTDQAKNEMREACFDYLSLGGVFSNGPIALLSGLNPRPLSLVAHFFAVAIYGVGRLMLPVPSPKRMWIGARLVSGACGIIFPIIKAEGVRQMFFPATVPAYYRAPPPME

SEQ ID NO: 44598 - protein, 768 aa, Lactobacillus plantarum WCFS1
MTIINSNLGYPRLGEHREWKHLLEHFWKGQLDNVTFHATAKKLRLANLKKQRDLGVDYIPVADNSDYDHVLDTLVAFNAIPSRFGHFDHQLDLPDYYAIARGTDTAVAAEMTKWFNINYHYIVPEFDDVSFKLLDNRWLRYYQEAKQELGIDGKPVILGPISFLKLGKRHGQYLDDAAVNELLPQLLPLYQQVFEELATAGAKWIQLDEPTLVKTTTVAELAPYQTALEHLHAAVPSLKIELQTYFDSLDQYDKIVTWPIQALGLDLVHDHGENLAHLVDHGFPTDKILAAGIIDGHNVWASDLQAKLALVQQLRQIVTDDQLWLQPANSLLHVPITTKNETKADPVLLGGLAFADQKLAELHTLTVAANQGVAAVQAVFDHNQANLTALNQSSHRNNQSVRAAEAQLSNQKFERQAPFATRIKLQHDRLHLPLLPTTTIGSFPQSAQVRAKRAAWRKGNLTDADYQAFLHAETKRWIKLQEDLGLDVLVHGEFERTDMVEYFGQKLTGFYATQNGWVQSYGSRGVRPPVIFGDVAYTEPITVAESVYAQSLTDQPVKGMLTAPLTIINWSFVRDDIPRAQVQNQIALALRQEVQNLEKAGIKIIQVDEPALREGLPLKQRHWQAYLDEAVYSFKITTTGVQNDTQIHTHMCYSNFADIINTIKALDADVISIETSRSHGEIISAFEQTGYDQEIGLGVYDIHSPRVPSVAEIEANIQRALRVIDARQFWINPDCGLKTRQESETLAALKNMIAARNAIQAQLTTSIH

SEQ ID NO: 44599 - protein, 611 aa, Bradyrhizobium sp. BTAi1
MAGGANGSANGAPATNGKAYPIEDHTYDVVVVGAGGAGLRAVVGCSEAGLRTACITKVFPTRSHTVAAQGGISASLGNMHQDDWRWHMYDTVKGSDWLGDQDAIEYMVRNAPDAVYELEHWGVPFSRTEDGKIYQRPFGGMTIDFGKSQAQRTCAAADRTGHAMLHTMYGQSLRHAAEFFIEFFAIDLIMDDQGVCRGVIALKLDDGTLHRFRAQTTILATGGYGRAYASCTSAHTCTGDGGGMALRAGLPLQDMEFVQFHPTGIYGSGCLVTEGARGEGGYLVNAEGERFMERYAPSAKDLASRDVVSRAMTIEIREGRGVGKKKDHIFLHLDHLDPKVLAERLPGISESAKIFANVDVTREPIPIVPTVHYNMGGIPTNYHAEVLTKKDGDDNAIVPGLMAVGEAACVSVHGANRLGSNSLIDLVVFGRAAALRLAEKLTPNGKQPDLPKDSADMALSRLDRYRYASGGTPTAKLRESMQHVMQTNCAVFRTGEVLQEGHNLIHKVHGGIGDIAVSDRSLVWNSDLIETLEFDNLIAQAVVTMDSAANRTESRGAHAREDFPDRDDKNWMKHTLAWIDQNGQTTIDYRPVHNYTMTNDVQYIPPKARVY

SEQ ID NO: 44600 - protein, 309 aa, Kluyveromyces lactis NRRL Y-1140
MTSPSGEFPSLKLNTGASIPQLGFGTWPSSHADAYTAVITALKTGYRHIDAAAMYGNEAAVGKGIRDSGIPREEIFVTTKLWNTQQRDPASALDESLERLGLDYVDLFLIHWPVPLKPVGGPENLLKYPTPGIKPQIDTEDWSFIKTWELMQTLPKTGKTRAVGVSNFSIKNLEDLLNSSPDVLVPAVNQFEIHPQLPQTELINYCKSKGIVVEAYCPLGSSSSAMLSDPTIAEIADKYHVKPANVLINWGISRGYCVLPKSFTPARIASNKTPVHLSREDTERITKLSETLGVKRYVHPDFEPYPLFE

SEQ ID NO: 44601 - protein, 340 aa, Lotus corniculatus var. japonicus
MSSESETVCVTGAAGFIGSWLVMRLIERGYTVRATIRDPANMKKVKHLLELPDAKTKLSLWKADLAEEGSFDEAIRGCTGVFHVATPMDFESKDPENEVIKPTINGLLDILKACEKAKTVRRLVFTSSAGTVDVTEHPKPVIDETCWSDIEFCLRVKMTGWMYFVSKTRAEQEAWKYAKEHNIDFVSVIPPLVVGPFLMPTMPPSLITALSLITGNEAHYSIIKQGQYVHLDDLCLAHIFLFENPKAQGRYMCSAYEATIHEVARMINKKYPEFNVPTKFKDIPDELDIIKFSSKKITDLGFKFKYSLEDMYTGAVETCREKGLLPKTAETPATNGTTQK

SEQ ID NO: 44602 - protein, 566 aa, Clostridium acetobutylicum ATCC 824
MKKKLVLYNLGILIITLIMITVLFIKIEDYEYRQNTEQDLKRTNNVVSNVIDMNKGKDISSALKVVIKNSDIRVTYINKNGVVLYDNDINAEKLDNHNKRVEVAEARKNGYGYSVRYSKSLKNNIIYYAKVRGDGTVVRTAVELSSVERFEARYLKFYIYVIALSIIAAVYLSFKLSYVILNPIRELQNTSSRIAMGELETRVNVESRDEIGQLGKTFNNMAGRLQSTIRESVEKQKKLEAILVSMDSGVIAVDRKHKIIMINPYAEKIFGIDKNIIGQSLMDCIRNYEFEDIFNKRAEGYAEIKTSWPKERNLRIKTADIINGYECIGTVAVVQDITDIRKLENMRTQFVANVSHELKTPLTSIKGFAETLRYVEDDNQKGEFLDIIDDEVDRLTRLISDILTLSDIEIRPFMKKEEFDVNEIIKAVCGLLEKSASRKNISLKVFGEDVPNLIGDNDKFKQMIINLVDNAIKYTEAGGEVSVYKKYTKDDVIISVKDNGVGIPKEHLQRIFERFYRVDKARSRANGGTGLGLAIVKHIVLNFNGSINIESKLGVGTEFIITIPYK

SEQ ID NO: 44603 - protein, 207 aa, Lactobacillus plantarum WCFS1
MVKSDNITWHQSQVSKAERQALNHHKSVVLWFTGLSGSGKSTIANAVEKALFDQQVGSYVLDGDNMRFGLNKNLGFSAEDREENIRRIGEVAKLFVDAGVITLTAFISPYRADRDKVRANLEVDEFIEVFVDTPLEVCEQRDVKQLYAKARRGEITGFTGIDAPYEAPIDPEITIDTSKQPLTASVQQVLNYLAEHHYVSLVTANEN

SEQ ID NO: 44604 - protein, 360 aa, Halobacterium sp. NRC-1
MRGAAPDAVLDAVQSGDPLPGTGGFAGELPDGRLARDVLGRRLCYVDGDEWSHDPRDLAAPTLLPAGHVRAPGATGSGRPVWSLPEPAPTGDEPVERVRDAVAGALGGVPAGDDLAVAFSGGVDSALAAAALDAPLYVVGYADSSDIAAARESAAAMGRADDLRVHEVTLADIEAAVPTVARAIGRTNAMAVQIALPLFLVAARAAADGYSRLVVGQGADELFGGYAKVAKAPTDPRTDADTVRGARRETVQSLPAQLERDLRALRAAGVEPVTPLLHDDVVRAALALPGEWLVSGDTRKRALREAARSWLPDAVADRDKKAVQYGSLVAREVDRLARQAGFKRRMDDHVTQYVEARIEE

SEQ ID NO: 44605 - protein, 312 aa, Propionibacterium acnes KPA171202
MDTKSRVRTTDGIDGKDAVGLYLDGIARTPLLNAAEEVALARRIEAGVFARAILEGHAETTSDTTTKELHQIAADGDEALAHFVRANLRLVVSVARKYGRSQMPLLDLVQEGNTGLIRAVEKFDYAKGFKFSTYATWWVRQAISRGIAQQGRIVRLPVHVAEQVNQVSAARRNLERQLGREPETFEIADELEITEERVIELIRFGRDHVSLDAPVEDDGDTSLGDLIARETSPGPDDIVLDAEDRSRLEGLLDDLDERSADVVRRRYGLVDGRQAKLADIGKVWGITAERVRQIERAALASMRQRNLATMAA

SEQ ID NO: 44606 - protein, 506 aa, Propionibacterium acnes KPA171202
MSTTTSSTANTAADEEAKIATARKSTRSTSAKTGTTGRAKKTTATKASQSSAHKSAGGAKTPTAKSSGAKTTTKPTSTKTAAKSTKTAASKTTKSSGTKTVGNASSGGAKKSTTKRRTTKAKKETTVAEAASGEVDVTVERDGDDVVLTIGGKKRSLDDVDERDYDPAEAAKDEQQINKETEAFSLSDNDDADEPEQTVMVAGATADPVKDYLKQIGKVALLNAVEEVDLAKRIEAGLFAGEQLADPDAKIREKDREDYEWIAEDGKVAKNHLLEANLRLVVSLAKRYTGRGMLFLDLIQEGNLGLIRAVEKFDYTKGYKFSTYATWWIKQAITRAMADQARTIRIPVHMVEVINKLARVQRQMLQDLGREPTPEELASELDMTAEKVIEVQKYGREPISLHTPLGEDGDSEFGDLIEDSEAIVPADAVNFTLLQEQLHDVLDTLSEREAGVVSMRFGLTDGQPKTLDEIGKVYGVTRERIRQIESKTMSKLRHPSRSQVLRDYLD

SEQ ID NO: 44607 - protein, 322 aa, Malus x domestica
MGIPTMGSQGGADGNCKQSQFQPLARQNSIYSLTLDEVQNQLGDLGKPLSSMNLDELLKNVWSAEANQIMGIDIEGNTLVNQAQLQRQASLSLTSALSKKTVDEVWKDIQQSKDEEEKKSQERQRTLGEMTLEDFLVKAGVVAEAEASSDKKYADPLVGVDANVAAQLPQGQWMQYPQPQYQHPQQSMMGVYMPSQPLQPPMHVGAGAMMEVPYPDNQVAVPSPLMGTLSDTQTPGRKRGNPEDIVEKTVERRQKRMIKNRESAARSRARKQAYTNELENKVSRLEEENERLRKQKEQEKVLPSAPPPEPKYQLRRTTSAPF

SEQ ID NO: 44608 - protein, 313 aa, Glycine max
MYSRLIHPHDGIVTQDDLQGAASNLSHAHKGDPCLVLTADPKPRLRWTQDLHERFVDAVTQLGGASKATPKAIMRTMNVKGLTLFHLKSHLQKYRLGKQSGKDVGEGCKDGSYLLESPGADNSSPKLPTSDTNEGYEIKEALRAQMEVQSKLHLQVEAEKHLQIRQDAERRYMAMLERACKMLADQFIGATVIDTDSQKFQGIGSKAPRGTLVDPLGFYSMPSTEVAGVNVPEEEIPLSLPPQRADCSTESCLTSHESSGGLALEGSPGEGKRRMLGMDSMAAPLIWSEAKMRTQAINVAQGNLPQGITRYGM

SEQ ID NO: 44609 - protein, 509 aa, Silicibacter pomeroyi DSS-3
MRGPHNIIRLIRTGATLERNGAMAAVLDAFDAPRPLRILARALGKPFQWLGFKGDPSLPPATRALMAMGPAYIKFGQVLSTRPDVVGQDLADQLRVLQDQLPPFPRAVAMREVEKELGRPLPEMFSEFSEPIAAASIAQVHRARLADSGEDVAVKVLRPGIERAFRKDVDAFYFAARIVDLFAPGARRLRPMEVIEHFDGVVRGELDLRLESAAASEFADNTKEDAGFRLPPVRWSLSARRVMTLGWADGVPLGDNAALDAAGHNRRDLGERVLRLFLLHALRDGFFHADMHQGNLKVAADGDIIAYDFGIMGHIDEYTRRVYAEILFGFIRRDYKRVAEVHFEAGYVPATQDVDEFARALRAVGEPIFGMDATHISMGRLLSYLFEVTERFGMETRTELILLQRTMVVVEGVARSLDPHINIWQVARPVVEDYIKQSIGPRAVLADLGKTALVVARFGPRLPDLVERALVAQSQPGLVEKPGRSAAFWPALGGALIGGGVVLLASLFI

SEQ ID NO: 44610 - protein, 333 aa, Zymomonas mobilis subsp. mobilis ZM4
MMSEAYAIIAEKAGGPEVLVKKPLDLGKMKPEAGQVLLRHQAIGLNFIDIYHRSGLYKQDFPANLGCEAAGVIEVVGDKVKGFKAGDRVAVFTSKPGAYATHRIVDASELVALPDDISAETAAAVLLKGMTSWMLAEKCLAHAAIEGEAPKVMVLAAAGGVGSLLIPWLKYLGVTVFAHTSTEEKAAKVKANGADYVTTLPYSDLPDWVRKQNHGEGVHAVLDSVGADSWKSSIASLRKKGLWVVYGNASGPVPALSPLELSKAGSIYTSRPRLIDYVDNSVDLTTASQKLFALLRKNILKVEINQRFPLTEVAKAHQLLESRKTTGSTVLIP

SEQ ID NO: 44611 - protein, 430 aa, Legionella pneumophila subsp. pneumophila str. Philadelphia 1
MKRRVAITGLGVVSPLGNDVSTTWMNLIAGHSGIDSIKQFDASAFPTTIAAEVKNFSPDTSISGKHTRFIMSFTHFALEAARQAFEDASIFPTKQTSDRWGIVTGSGMMTAEFEYLTRFQQACAAGGEIDWGKLQSNSRDFYNLVDFGKTTSNSGLSLLIQQYGITGYASSVHTACASGGQALGLAMQVIRRGEADFMLAGGFDSMINPLGLSSFCLLGALSTYNETPQTASRPFDATRNGFVLGEGAAFLILEEWSKAKARGAKIYAELAGEGNSLSSYRITDSHPNGDGAIQAIKRALEDAGVQPRDVDYINAHGTSTKMNDLSETNAIKVVFGDRIANLPVSSTKSQTGHLIAAAGALEAVLSVKSIEQAQVPKTANLKTPDPECDLDYVVDGPREKSLGVVLSNSFGFGGSNSCLLFKHPEFEETK

SEQ ID NO: 44612 - protein, 86 aa, Triticum aestivum
LAFSRTSEFLSDGLKSYVREEDGAVILRMVGGLGVGIFCLEWVALALAFVLRYYVYVDRECGGNPMRRSAKVGGEDGAGTWPGLPV

SEQ ID NO: 44613 - protein, 217 aa, Triticum aestivum
  misc_feature (156)..(156): Xaa can be any naturally occurring amino acid
  misc_feature (158)..(158): Xaa can be any naturally occurring amino acid
  misc_feature (162)..(162): Xaa can be any naturally occurring amino acid
  misc_feature (171)..(171): Xaa can be any naturally occurring amino acid
  misc_feature (186)..(186): Xaa can be any naturally occurring amino acid
  misc_feature (199)..(199): Xaa can be any naturally occurring amino acid
  misc_feature (207)..(207): Xaa can be any naturally occurring amino acid
  unsure (1)..(217): unsure at all Xaa locations
MCGILAVLGCADDTQGKRVRVLELSRRLKHRGPDWSGMHQVGDCYLSHQRLAIIDPASGDQPLYNEDKSIVVTVNGEIYNHEQLRAQLSSHTFRTGSDCEVIAHLYEEHGENFIDMLDGVFSFVLLDTRDNSFIAARDALASPPLFGGNDVVGFEXSXMTMXGALNDDCEXLWEIFPPGHLYSSKXQGGFMRWYNPPWXFSEVIPSXAYDPLCSQGG

SEQ ID NO: 44614 - protein, 313 aa, Zea mays
GRSQLIIISRRRAREMVEEGATAAASRSGPAPFLSKTHQMVEEPGTDEVISWAEQGRSFVVWKPVELARDLLPLHFKHCNFSSFVRQLNTYGFRKVVPDRWEFANENFRRGEQGLLSGIRRRKSTTPQPSKYGGGSVVNTAFPPPLPFPPPASVTTSGGGGGAGAGNERSSSSASSPPRTDDLTSENEQLKKDNRTLSTELAQARRHCEELLGFLSRFLDVRQLDLGLLMQEDVRAGAGDDAAPRRAMVSQLERGGEEGKSVKLFGVLLKDAARKRARCEEAAASERPIKMIRIGEPWIGVPSSGPGRCGGGN

SEQ ID NO: 44615 - protein, 209 aa, Medicago sativa
CGSGWAFSTTGALEGANYLATGKLVSLSEQQLVDCDHVCDPEERNSCDSGCNGGLMNNAFEYILQSGGVVSEKDYAYTGRDGSCKFDKSKIVASVSNFSVVSLDEDQIAANLVKNGPLAVAINAAWMQTYMSGVSCPHICAKARLDHGVLLVGFGSGGYAPIRLKEKPYWIIKNSWGQNWGEEGYYKICRGRNVCGVDSMVSTVAAAQS

SEQ ID NO: 44616 - protein, 473 aa, Zea mays
FAAVVLKCEYAVRGEIVIHAQRLQQQLQTQPGSLPFDEILFCNIGNPQSLGQQPVTFFREVLALCDHPCLLEKEETKSLFSADAISRAKQILATIPGRATGAYSHSQGIKGLRDAIAAGITSRDGFPANADDIFITDGASPGVHMMMQLLIRNEKDGILCPIPQYPLYSASIALHGGALVPYYLDEKTGWGLEISDLKKQLEDARSKGIDVRALVVINPGNPTGQVLAEDNQYDIVKFCKNEGLVLLADEVYQENIYVDNKKFNSFKKIARSMGYGEDDLPLVSFQSVSKGYYGECGKRGGYMEITGFSAPVREQIYKVASVNLCSNITGQILASLVMNPPKVGDESYASYKAEKDGILQSLARRAKALEDAFNTLEGFSCNKAEGAMYLFPQIHLPHKAIEAAKAAKKAPDAFYALRLLESTGIVVVPGSGFGQVPGTWHVRCTILPQEDKIPAVITRFKAFHEAFMAEYRD

SEQ ID NO: 44617 - protein, 259 aa, Triticum aestivum
MEDERSTQSYQGGEAAEQVEVTDRGLLGNLLGKKKAEEDKEKQEELVTGMEKVSVEEPEVKKEEHEDGEKKETLFSKLHRSSSSSSSSSDEEEEEVIDDNGEVIKRKKKKGLKEKLKEKLPGHKDTEGEHVTGLPAPAAPASVQTHHDTDVVVEKIDGDVKTEAAPAVPEEEKKGFLEKIKEKLPGGHKKPEDAAPVPVTHAAPAPVHAPAPAAEEVSSPDAKEKKGLLGKIMDKLPGYHKTGEEDKAAAAAGEHKPSA

SEQ ID NO: 44618 - protein, 451 aa, Burkholderia sp. 383
MTDITTAQQDETNLRTDAAWLDAHWMPFTANRQFKADPRMIVSGKGAYYTDGEGRKIFDGLSGLWCTGLGHGRTEIVEAVSRQVAQLDYAPAFQFGHPKSFELANKIKDLTPAGLDYVFFTGSGSEAADTSLKLARAYWRAKGKGTKTRLIGREKGYHGVNFGGISVGGIGPNRKLFGQGLDADFLPHTQLAENKFSRGMPEHGAELADRLLELIALHDASNIAAVIVEPFSGSAGVVVPPKGYLKRLRDICTAHDILLIFDEVITGFGRAGAMTGADAFGVVPDIMNFAKQVTNGVQPLGGVIATKEIYDTFMAAGGPEYMLEFPHGYTYSAHPVACAAGVAALDLLVKEDAVARVRDLAPHFEAAVHGLKGQRHITDIRNYGLAAGLTIAALPGEPARRPYEIAMRCWAKGFYVRYGGDTIQLAPPFISEKREIDNLVNALSDALNEVD

SEQ ID NO: 44619 - protein, 324 aa, Arabidopsis thaliana
LYELCEAVGPDCTRTDLVPAYVRLLRDNEAEVRIAAAGKVTKFCRLLNPELAIQHILPCVKELSSDSSQHVRSALASVIMGMAPILGKDSTIEHLLPIFLSLLKDEFPDVRLNIISKLDQVNQVIGIDLLSQSLLPAIVELAEDRHWRVRLAIIEYVPLLASQLGIGFFDDKLGALCMQWLQDKVYSIREAAANNLKRLAEEFGPEWAMQHLVPQVLDMVNNPHYLHRMMVLRAISLMAPVMGSEITCSKFLPVVVEASKDRVPNIKFNVAKLLQSLIPIVDQSVVDKTIRQCLVDLSEDPDVDVRYFANQALNSIDGSTAAQS

SEQ ID NO: 44620 - protein, 257 aa, Elymus lanceolatus
CELDNIMRLTGITGIVNGMDVSEWDPTKDKFLAVNYDITTALEAKALNKEALQAEVGLPVDRKVPLVAFIGRLEEQKGPDVMIAAIPEIVKEEDVQIVLLGTGKKKFERLLKSVEEKFPGKVRAVVRFNAPLAHQMMAGADLLAVTSRFEPCGLIQPQGMRYGTPCACASTGGLVDTIVEGKTGFHMGRLSVDCNVVEPADVKKVATTLKRAVKVVGTPAYQEMVKNCMIQDLSWKGPAKNWEDVLLELGVEGSEPG

SEQ ID NO: 44621 - protein, 240 aa, Zea mays
MGSKAPFCLTLLLLLAAACGPAAHAHDAVELPHHGSALKEQISSTKIPARLKSGSGLCSACENFTSEAVTYLGKEQTQDRIMEFLHDACSQSFSFEQKCVELMDSYATLLFAKITEIRPEAFCKRYGLCRDTALLSGVGSDSTCVFCHHLLDEIMSKLKDPDAEFEIIQILVKECNKIEGHVQQCKRLVLQYIPLILVNGEKFLEKNDVCALAQACPASSRKTFSSMLKGALWSDAWLEG

SEQ ID NO: 44622 - protein, 138 aa, Spinacia oleracea
MAKPIPKIGSRRNGRISSRKSARKIPKGVIHVQASFNNTIVTVTDVRGRVVSWASAGTCGFRGTKRGTPFAAQTAAGNAIRTVVEQGMQRAEVMIKGPGLGRDAALRAIRRSGILLSFVRDVTPMPHNGCRPPKKRRV

SEQ ID NO: 44623 - protein, 257 aa, Elymus lanceolatus
  misc_feature (178)..(178): Xaa can be any naturally occurring amino acid
  unsure (1)..(257): unsure at all Xaa locations
CELDNIMRLTGITGIVNGMDVSEWDPTKDKFLAANYDITTALEAKALNKEALQAEVGLPVDRKVPLVAFIGRLEEQKGPDVMIAAIPEIVKEEDVQIILLGTGKKKFERLLKSIEEKFPGKVRAVVRFNAPLAHQMMAGADLLAVTSRFEPCGLIQLQGMRYGTPCACASTGGLVDTXVEGKTGFHMGRLSVDCNVVEPADVKKVATTLKRAVKVVGTPAYQEMVKNCMIQDLSWKGPAKNWEDVLLELGVEGSEPG

SEQ ID NO: 44624 - protein, 341 aa, Prosthecochloris aestuarii DSM 271
MQDKDTLGQSGRVILVTGATGYIGSELVERLSSLCDAGLHLRVLARRGSDVSVLDGNSVEFVYGDLLDSLSLYDACSGVDTVFHCAGLIAYSRNYRQRLYATNVTGTGNLVNACLAEGVTRLVHTSSVAAAGVGDDGEPADETTPFREWQHRIAYMESKHLAEMEGRRGIAEGLDVVFVNPGVVIGTPSNPAGRLNSSSRAIRDIYRGTIPVYPSGGISLVDIGDVADAHLAAWRHGRSGQRYLVTAGNYSFRQLFAMIAAMPGSAAGKAYQAASVVESVVGVAGELFALLTGSRPYLSVESMRLARTLLYYSNRLSVEELGMQYRPVEETLRSIVSQAAV

SEQ ID NO: 44625 - protein, 54 aa, Triticum aestivum
MGSATVLEVILAIILPPVGVFLRYKLGVEFWICLLLTILGYIPGIIYAVYVLVV

SEQ ID NO: 44626 - protein, 257 aa, Elymus trachycaulus
CELDNIMRLTGITGIVNGMNVSEWDPTKDKFLAVNYDITTALEAKALNKEALQAEVGLPVDRKVPLVAFIGRLEEQKGPDVMIAAIPEIVKEEDVQIVLLGTGKKKFERLLKSVEEKFPGKVRAVVRFNAPLAHQMMAGADLLAVTSRFEPCGLIQLQGMRYGTPCACASTGGLVDTIVEGKTGFHMGRLSVDCNVVEPADVKKVATTLKRAVKVVGTPAYQEMVKNCMIQDLSWKGPAKNWEDVLLELGVEGSEPG

SEQ ID NO: 44627 - protein, 317 aa, Bordetella parapertussis 12822
MTTKHRIIQVGSLAGSPTANRRLADEYDVLELWQQADRAAALARHGKGVTALVTSANFGADAALIDALPDLKAICSWGVGYETIDVDAARKRGVLVSNTPDVLTDCVADLAWGLLISGARRMAQGDRFVRAGQWGQVHGSIPLGTRVSGKNLGIIGLGRIGEAIARRGDGFDMQVRYHNRRRRDDVSYGYESSLADLARWADFLVVATVGDPSTRHLVNQEVLEALGPKGLIINIARGPVIDEAALVAALQAGKLGGAALDVFEHEPSVPDALKASDETVLLPHIGSATFETRMAMENLMLDNLASFFKTGGVITPV

SEQ ID NO: 44628 - protein, 226 aa, Streptococcus agalactiae NEM316
MKEAKNFSQQLNILRAGVLGANDGIISVAGVVIGVASATHNLWIIFLSAASAILAGAFSMAGGEYVSVSTQKDTEQAAVAREEKLLENNPELAKKSLVDIYLAKGESHEHAQWLVDKAFSKNAIEHLVEEKYGIEFGEYTSPWHAAISSFIAFAIGSIFPTITILLLPFSVRIVGTVIIVIVSLLSTGYVSAKLGQAPTVPAMRRNVMIGCLTMLATYVIGQLFSI

SEQ ID NO: 44629 - protein, 318 aa, Streptococcus agalactiae NEM316
MGLLVDGKWVDQWYDTASTGGKFVRTVTQFRHWVTKDGSAGPSGDAGFKAESGRYHLYVSLACPWASRVLIMRKLKNLESHISISIVNPLMLENGWTFQEYKGVIPDMINQSQYLYQIYQASQSDYTGRVTVPVLWDKKCHTIVNNESSEIMRMLNTAFNHITGNTDDYYPDSLQGQIDEMNNFIYPKINNGVYKAGFATSQNVYQKEVETLFTALDQLEKHLSDNHYLVGEQFTEADIRLFTTLVRFDTVYYGHFKCNLKALHDYPHLWHYTKRIYNLPGIAETVNFDHIKKHYYGSHKTINPTGIIPAGPNLDWTI

SEQ ID NO: 44630 - protein, 251 aa, Zea mays
  misc_feature (197)..(197): Xaa can be any naturally occurring amino acid
  misc_feature (217)..(217): Xaa can be any naturally occurring amino acid
  misc_feature (228)..(228): Xaa can be any naturally occurring amino acid
  misc_feature (237)..(237): Xaa can be any naturally occurring amino acid
  misc_feature (243)..(243): Xaa can be any naturally occurring amino acid
  unsure (1)..(251): unsure at all Xaa locations
MGSSRPAGRSLPDFRWNPQSFSRLLLPHPFSLLFFLFIHLVLTSLNQTFHDTNDLILFIMSSALNQLKATGTTVVSDSGDFASIGKYKPQDATTNPSLILAASKKEEYAKLIDVAIDYAKQKGGSVDQQVDDALDRLLVEFGKEILKIIPGKVSTEVDARYSFDTEASVNKALHLIELYGEQGISKDRILIKIAATXEGIKAAEILQRDHGINTNLXTLMFSLVQAIXAAEAGAYLXSPFVGXILDWVQAL

SEQ ID NO: 44631 - protein, 265 aa, Oryza sativa
MDDSSLFLHWAVSTLQHQHPAAVAVVADDDATFFSFQELCDTEEVVVVPVQEEVITEAHGGGASRIGLAVAVDEHGGWSRSPNPGARPPSGGCGSNNLPLMSWDFSAASVAVQLEHVVAERKRREKINQRFMELSAVIPKLKKMDKATILSDAASYIRELQEKLKALEEQAAARVTEAAMATPSPARAMNHLPVPPEIEVRCSPTNNVVMVRIHCENGEGVIVRILAEVEEIHLRIINANVMPFLDQGATMIITIAAKASSSLLY

SEQ ID NO: 44632 - protein, 176 aa, Gossypium hirsutum
MAPRSKPSPISPNPDPNSKEIRYRGVRKRPWGRYAAEIRDPRKKTRVWLGTFDTAEEAARAYDAKAREFRGAKAKTNFADNNANDFTRSPSQSSTVESSSPPPLDLTLASPCSSLPVTAQRPVYFFDAFATGGSGCPASGFAQSDSDSSSSVVDFEGGVRRRVFDLDLNQLPAEMD

SEQ ID NO: 44633 - protein, 561 aa, Kluyveromyces lactis NRRL Y-1140
MVKVLQLCFLSAISLVQALNSTVDQKDEAKVDINTVFDNDSTNFCRMDKTEAIGATCDVTFHEINEVNNNIRPQLLSLVQSDFFKYFKLDLYKECPFWSDNNGYCVNRACAVDVVEDWDSLPEYWQPEILGNIENATTDITDDECSFLDELCDKPRFEAEKDIEYCDTNDFNSQHSVLVDLTANPERFTGYGGEQSSQIWSSIYKENCFSLGDENQCLAKDAFYRLISGLHASIGTHLSNEHLNTETGKWEPNLELFMTRVGNFPDRVSNIYFNFAVVAKALWKIRPYMNELGFCNAYNEDVKGMIDGVVSQLNSKVFNEDLLFHDEVSGQLKDDFRIRFKNVTKIMDCVQCDRCRLWGKVQTTGYATSLKILFEMDNDDDVARQHVVDKLTKYELIALFNTFDRLSKSVEAVNRFEEMYNYQLKSPGEKLASFFQLDNFFKVLNDKFNSANHSSQEKESVSNVEKKVNEFNDLKMPEKKKETHTEVREQASGVFKEAWDVEWKNFKQALRFIVTSYTDLPSTVSKYTVLKLNKLWNKFIGVPNYLEEGEELEYPSYNYEE

SEQ ID NO: 44634 - protein, 411 aa, Brassica napus
  misc_feature (120)..(120): Xaa can be any naturally occurring amino acid
  misc_feature (144)..(144): Xaa can be any naturally occurring amino acid
  misc_feature (170)..(170): Xaa can be any naturally occurring amino acid
  misc_feature (403)..(403): Xaa can be any naturally occurring amino acid
  unsure (1)..(411): unsure at all Xaa locations
MESRVLLRATATVTGVPQLRRPIRAINRQFSTASSSFTAFAKPIGSIGEGGNLISGRQLRPVLLLDSSPEKREILKPVRAAAAEGGDSAGETKVGFLGKYPWLVTGFFFFMWYFLNVIFXNILNKKIYNYFPYPYFVSVIHLIXGGVVYCLGGLGPWVFHRRAPINSDIXTYLVPGVACPARGTLPCNVSFAAVAVAFTHTINALGPFFNASASQFLLGQPIPITLWLSLAPVVLGVAMASLTELSFNWLGFISAMISNISFTYRSIFSKKAMTDMDSTNVYAYISIIALFVCLPPAIIVEGPQLLKHGFNDAIAKVGMTKFISDLFWVGMFYHLYNQLATNTLERVAPLTHAVGNVLKRVFVIGFSIVIFGNKISTQTGVGTGIAIAGVALYSVIKAKIEEXEKRQGKTA

SEQ ID NO: 44635 - protein, 505 aa, Glycine max
MGRVVVGVAVTVAVATCALAAVVVGRRVRSRRKWKKVANVVRELEEGCDTRVGRLRQVVDAMAVEMHAGLASEGGSKLKMLITFVHNLPNGTEKGTYYALDLGGTNFRVLRVHLHGQQSSVLEHEVERQPIPQHLMTSTSEDLFDFIASSLKEFIEKEGNASELSLDRRRELGFTFSFPVKQMSVSSGILLKWTKGFSIVDMVGIDVAACMQEALTRKGLDVRVAALVNDTVGTLAVGHYHDPDTVAAIIIGTGTNACYLERVDAIIKCQGLLTTSGYMVVNMEWGNFWSSHLPRTSYDIDLDSESPNPNDQGFEKMISGMYLGDIVRRVILRMSLESDMFGPISSKLSMPFMLRTPMMAAMHEDDSPDLREVARILNDIFEIPDIPLKARKFVVKVCDVVTRRAARLAAAGIVGILKKIGRDGSGGITGGRSRSDMKMKRTVVAIEGGLYSSYTLFREYLHEALNDILGEDIAKHVILKVTEDGSGVGAALLAASHSSYDVDTV

SEQ ID NO: 44636 - protein, 212 aa, Oryza sativa
GNSALWPGARRRRRRSPSREKLVAGVPLHPSSPAMAITLSNVNSEAGLQKLDEYLLTRSYISGYQASKDDMTVFTSLPSAPAASYVNVTRWYDHISALLRSSGVTAEGEGVKVESTACSVSPTADQKAPAADEEDDDDVDLFGEETEEEKKAAEERAAAVKASGKKKEYVKPWDDETDMAKLEEAVRNVNMEGLLWGASKLVQLDMASDMQL

SEQ ID NO: 44637 - protein, 159 aa, Brassica napus
  misc_feature (148)..(148): Xaa can be any naturally occurring amino acid
  unsure (1)..(159): unsure at all Xaa locations
MMISDLPRDMVEEVLCKLPMTSLRRARFTCKRWNNTLSKDWRFTRKYNGEAAKRKEFQVVMILEYKVYLMSVNLHNPSPSIEPIGKLHDAGVDIINVFHCQGLLLCVTKDGTRLVVWNPFTGQTRWIKPRDSYHRCDRYALGYENRNXYPLKVLRFVDD

SEQ ID NO: 44638 - protein, 509 aa, Schizosaccharomyces pombe
MSSSAVSPKQWVAGLNSELDIPAVNRRTSIICTIGPKSNNVETLCKLRDAGMNIVRMNFSHGSYEYHQSVIDNARKASATNPLFPLAIALDTKGPEIRTGLTVGGTDYPISSGHEMIFTTDDAYAEKCNDKVMYIDYKNITKVIQPGRIIYVDDGILSFTVIEKVDDKNLKVRVNNNGKISSKKGVNLPKTDVDLPALSEKDKADLRFGVKNGVDMIFASFIRRAEDVIHIREVLGEEGKNIKIICKIENQQGVNNFDSILDVTDGIMVARGDLGIEIPASQVFVAQKMMIAKCNIAGKPVACATQMLESMTYNPRPTRAEVSDVGNAVLDGADLVMLSGETTKGSYPVEAVTYMAETARVAEASIPYGSLYQEMFGLVRRPLECATETTRVAAIGASIESDAKAIVVLSTSGNTARLCSKYRPSIPIVMVTRCPQRARQSHLNRGVYPVIYEKEPLSDWQKDVDARVAYGCQQAYKMNILKKGDKIIVLQGAVGGKGHTSIFRLTVAE

SEQ ID NO: 44639 - protein, 459 aa, Fusobacterium nucleatum subsp. vincentii ATCC 49256
MEKIYDLLVIGWGKAGKTLSAKLGAKEKKVAIIEENPKMYGGTCINVGCLPTKSLVHSAKILSEAKKYGIDGDYSFKNNFFKEAMKKKEEMTTKLRNKNFGILDTNENVDIYNGRASFISDNEVKVVSSDNKEIILKADKIVINTGSVSRTLNIEGIDNKNIMVSEGILELKELPKKLLIIGAGYIGLEFASYFANFGSEVSIFQFDDSFLVREDEDEAKIIKEILEKKDIKFFFKTSVKKFEDLGNSVKAICVQNGKEFIEEFDKVLIAVGRKPNTDNLGLKNTSIQLGKFGEILVDDYLKTDAPNVWAVGDVKGGPQFTYVSLDDFRIVFPQILGENNGRKLSDRILIPTSTFVDPPYSRVGINEKEAQRLGIKYTKKFALTNTIPKAHVINEIEGFTKILINENDEIIGASICHYESHEMINLLTLAINQKIKSKVLKDFIYTHPIFTESLNDILG

SEQ ID NO: 44640 - protein, 138 aa, Clostridium perfringens
HLIPLILQVALGKRDKIMMFGDDYNTKDGTCVRNYIHVSNLASAHSLALERLMNGGESRIYNLGNGTGFTVKEVVEVARKVTGHPIPAEVAPRRAGDPAILIASSDKAIEELNWKPKFNSLETIIETAWNWHKNHPNG

SEQ ID NO: 44641 - protein, 257 aa, Elymus virginicus
CELDNIMRLAGITGIVNGMDVSEWDPTKDKFLAVNYDITTALEAKALNKEALQAEVGLSVDRKVPLVAFIGRLEEQKGPDVMIAAIPEIVKEEDVQIVLLGTGKKKFERLLKSVEEKFPGKVRAVVRFNAPLAHQMMAGADLLAVTSRFEPCGLIQLQGMRYGTPCACASTGGLVDTIVEGKTGFHMGRLSVDCNVVEPADVKKVATTLKRAVKVVGTPAYQEMVKNCMIQDLSWKGPAKNWEDVLLELGVEGSEPG

SEQ ID NO: 44642 - protein, 732 aa, Candida albicans SC5314
MNFDQLTDEQKQQLYLQHLQQQQQLQQQQQQLQQQQHQLQQQQQSYHLQQQQAAYQQQNQAQLQQDDSYMDEDTSELINQPPVQLDHGSPIRQQPQMSAFMPSPRFAQSESFDNHLNVDPNNTERFTSMDSMNFQPPASTFTQLGNGSSTNLSEISSGQNSLLSNHSVNNLPTALTSDTSPPVQQHPQFQPQQQQQQQQPQQQQIFQQQQQQQQQQQQPQQSRAVANQSVSTEAANSDMTGSNTKYVYFERKPNLLSKTTQDKAASIKLTLENYYTSSVSHAIERNQRRLELENKIANEDIGSSEERKNRQLQNLGKKESQFLRLKRTKLALEDFHTVKVIGKGAFGEVRLVQKKDTGKIYAMKTLLKSEMFNKDQLAHVKAERDVLAGSDSPWIVALYYSFQDSQYLYLIMEFLPGGDLMTMLIRWEVFTEDITRFYIAECVLAIEAIHKLGFIHRDIKPDNILIDNRGHVKLSDFGLSTGFHKTHDSNYYNKLLEKEPSNTHLQPNQLTSGRNSVMVDAIHLTMSNRQTMQTWRKSRRLMAYSTVGTPDYIAPEIFIHQGYGQECDWWSLGAIMFECLIGWPPFCSENPHDTYRKILNWQESFQIPEDVHLSPEAEDLIKRFLTSAENRIGRYGGAEEIKQHPFFRGVDWDSIRGVQAPFVPRLSSMTDTRHFPTDDLASVPDNPAMSKAMEQRELDAKNGGGRKNPKEDLPFIGYTYSRFDYLTRKNAL

SEQ ID NO: 44643 - protein, 515 aa, Anabaena variabilis ATCC 29413
MLNRNKHISQVVVTAAQMRDIEARIFAAGMPVSALMEKVAGLIAKRIQEIWEPSNHVGILTGPGHNGGDGLVVARELHFRGYDVWIYLPFDKLKELTSQHLQYAQSLGIPCYQEIEQLPDCDFLVDGLFGFGLEREITDPIASVINQLNEWNKPIISIDLPSGLHTDTGEVLGTAIRANYTLCLGLWKQGLLQDQALDYIGKAELIDFDIPWADVQAVLGDVPKVKRITPTTALSTLPLPRPPVTHKYKEGHLLLICGSRRYAGGAILTALGARGSGVGMLSIAVPESLKQLLVSHLPEALVIGCPETETGAIAQLQLPENTNLSSFSAIACGPGLTKDAISIVQEVLASDRPLVLDADGLNILAQLGTILTLQQRQAATVLTPHTGEFHRLFPDIADAKGDRVKAVQEAAAQSGAVVLLKGARTAIANPQGSVWINPESTPALARGGSGDVLTGLLGGLLAQAVNKAIPVEDIVATAAWWHGQAGILAASERTELGVDAFTLSQYLLKVIVGRS

SEQ ID NO: 44644 - protein, 257 aa, Elymus wawawaiensis
CELDNIMRLTGITGIVNGMDVSEWDPTKDKFLAVNYDITTALEAKALNKEALQAEVGLPVDRKVPLVAFIGRLEEQKGPDVMIAAIPEIVKEEDVQIVLLGTGKKKFERLLKSVEEKFPGKVRAVVRFNAPLAHQMMAGADLLAVTSRFEPCGLIQLQGMRYGTPCACASTGGLVDTIVEGKTGFHMGRLSVDCNVVEPADVKKVATTLKRAVKVVGTPAYQEMVKNCMIQDLSWKGPAKNWEDVLLELGVEGSEPG

SEQ ID NO: 44645 - protein, 400 aa, Prosthecochloris aestuarii DSM 271
MNKPKDLFKKCYDFTLADDVKAQGIYPFFHPIDETEGPVVSFDGKQLIMAGSNNYLGLTSDSRVKDASIKAIKKYGTSCSGSRYMTGTVNLHIELEEKLADYFEKERCLLFSTGYQTGQGVIPTLVQRGEYVVSDKDNHASLVAASIMAVGQSAKFVRYGHNSMEDLERVLQTIPESAGKLIVSDGVFSVSGEIVDLEQLVALAKKYHARILIDDAHAVGVIGRDGRGTPSEFDLVDDVDLIMGTFSKTFGSLGGYVVGERSVINYIKHNASSLIFSASPTPASVAAVLASLEILKNEPELMERLIRNTDYVRQGLKNAGFKLMPSRTAIVSVIIGDQMKTLVFWKKLFDAGVYVNAFIRPGVMPGHEALRTSFMATHETEHLDKVITEFCTIGKELGII

SEQ ID NO: 44646 - protein, 257 aa, Elymus wawawaiensis
CELDNIMRLTGITGIVNGMDVSEWDPTKDKFLAVNYDITTALEAKALNKEALQAEVGLPVDRKVPLVAFIGRLEEQKGPDVMIAAIPEIVKEEDVQIVLLGTGKKKFERLLKRVEEKFPGKVRAVVRFNAPLAHQMMAGADLLAVTSRFEPCGLIQLQGMRYGTPCACASTGGLVDTIVEGKTGFHMGRLSVDCNVVEPADVKKVATTLKRAVKVVGTPAYQEMVKNCMIQDLSWKGPAKNWEDVLLELGVEGSEPG

SEQ ID NO: 44647 - protein, 289 aa, Zea mays
MEDERNTQQHQGGEQAQDQENEVKDRGLLDSLLGRNKHDDQEKKNQQEEEELATGMEKVTVAEPDHKEEGHEAAEKKDSLLAKLHRTSSSSSSSSDDEEEEVIDENGEIVKRKKKGLKEKVKEKSAAHKAHDEGDHHQPGVPAPAPAPPVAVDTHAHHQEGEHKPHFPAPAPPPHVETHHPVVVHKIEDDDTKTQTPPQAPEEEKKGLLDKIKEKLPGGHKKPEDAAAAAAAPAVHAPPPPAPHAEVDVSSPDGKKGLLGKIMDKIPGYHKSSGEEDRKDAAGEHKTSS

SEQ ID NO: 44648 - protein, 447 aa, Glycine max
MMVKTKTLSLVLHLCVMTIMVTNLAKSQQEEFFFNGFGGAASSNITLNGGAVIEHRGILRLTNDTQRVIGHAFYPTPIQFKHRNKNATKVFSFSTAFAFAIIPQHPKLGGHGFAFTISRSRSLEDAYPSQYLGLLNPNDVGNFSNHLFAVEFDTVQDFEFGDINGNHVGINLNNLASNKSVEAAFFTSTNNKQKLNLKSGEVTQAWVDYDSLKNNLEVRLSTTSSKPTSPILSYKVDLSQIIQDSMYVGFSSSTGLLSSSHYILGWSFKINGDAKTLSLKNLPSLSASSKPQKRLIFALSLSLIIPTVLAATALACYYFLLRKMRNSEVIEAWEMEVVGPHRFPYKELHKATKGFKDKNLIGFGGFGRVYKGVLPKSNIEVAVKRVSNESKQGMQEFVSEISTIGRLRHRNLVQLLGDTNHTQIPCFFFLIILYGLWVLNSTTMVLM

SEQ ID NO: 44649 - protein, 322 aa, Eucommia ulmoides
MSGAGKTVCVTGASGFIASWIVKFLLQRGYTVRATVRDPNDPKKTEHLRTLEGASERLHLFKAELLEDGAFDAVVDGTDGVFHTASPFFYNTDNPQKDLIDPAVKGSVNVLGSCAKSPSVKRVVLTSSVAAVAINSRPKNPDVVVDETWHSDVEFCTQRKLWYVLSKTLAEEAAWKFAKEKGLDLVTINPAMVIGPLLQPSLNTSASAILNFLNGAKTYSNSSMGWIDVRNVANAHIQAFEIPSANGRYCLVERVAHYSEIVQILRNHYPTLPLPEKCADDNPFQPTFQVSKEKAKSLGIEFIPLEVSIKDTVESLKEKKFF

SEQ ID NO: 44650 - protein, 215 aa, Streptomyces coelicolor A3(2)
MDSFSTLIRTASHQQHVEAETSTFMSDLLGGGLGVDAYARYTEQLWFVYEALEAAAGRLAADPVAGPFVRPELLRLASLERDLAHLRGADWRTGLTALPATEAYAARVRECAEEWPAGYVAHHYTRYLGDLSGGQIIRDKAERTWGFARKGDGVRFYVFEEISNPAAFKREYRDLLDGIRADDLEKQRVVAECKRAFALNTAVFRALGEEFPLSA

SEQ ID NO: 44651 - protein, 208 aa, Arabidopsis thaliana
MVSLKLQKRLASSVLKCGKRKVWLDPNEGSDISMANSRQNIRKLVKDGFIIRKPTKIHSRSRARQLNIAKRKGRHSGYGKRKGTREARLPTKVLWMRRMRVLRRLLKKYRETKKIDRHMYHDMYMKVKGNVFKNKRVLMESIHKSKAEKAREKTLSDQFEAKRAKNKASRERKHARREERLAKGPGGDIPAAAPPAQTAEVPAKKSKK

SEQ ID NO: 44652 - protein, 349 aa, Candida glabrata CBS138
MAPLNVGVIGTGIFATDRHLPSYQEMSDDFKVVAAFNRTKSKALKFAELAGLPEEKVYDDLKGIVNDPEVQMLDMLLPAQFNLDTVKHAIGAGKPILLEKPIAATMAQAREVVKLADSVDIPIGIAENWLYLPCIDVAKPLLEKIGPIVAFTHNSTGPFVTQNKYLSTSWRQNPEHIGGFLSDGGVHQLALVTELVGEIACVSALTRQVRKESGTVDIVFSTVEMKDSDIIGTFTYGSAFGATDKSVFLKIYGRNGTVVVELSDKKKPVVKVRYGSSAEECSAEEVHDVPLDDTFGVNAEFQNFREAVTKKDKKLFRSTPRVAFHHLACVAAFLESSDKNGDHVKVETI

SEQ ID NO: 44653 - protein, 73 aa, Glycine max
  misc_feature (23)..(23): Xaa can be any naturally occurring amino acid
  misc_feature (48)..(48): Xaa can be any naturally occurring amino acid
  unsure (1)..(73): unsure at all Xaa locations
IKEKIHVEEGIGPNKLVKYVLYXGDKHYGVVKLQEVEDVQKVIEGHKXDDKFLPLNLGLTHCGPCLESLTTVG

SEQ ID NO: 44654 - protein, 266 aa, Arabidopsis thaliana
MTADSQSDYAFLESIRRHLLGESEPILSESTASSVTQSCVTGQSIKPVYGRNPSFSKLYPCFTESWGDLPLKENDSEDMLVYGILNDAFHGGWEPSSSSSDEDRSSFPSVKIETPESFAAVDSVPVKKEKTSPVSAAVTAAKGKHYRGVRQRPWGKFAAEIRDPAKNGARVWLGTFETAEDAALAYDRAAFRMRGSRALLNFPLRVNSGEPDPVRIKSKRSSFSSSNENGAPKKRRTVAAGGGMDKGLTVKCEVVEVARGDRLLVL

SEQ ID NO: 44655 - protein, 308 aa, Staphylococcus aureus subsp. aureus Mu50
MKNNKDEKIRISIINGFLGSGKTTLLTHYISELLKNDEKIKIIMNEFGTFDIDSNSISNEIEVHSLINGCVCCDLKQELVYELKAIALKGDVNHVIIEATGIAHPLELLVACQDPQIVNFFEKPIIYGVLDATRFLERHQYTENTVSLMEEQLKLSDMIIINKIDLITDDSLEKIDKQLGMICASIPTYKTTYGKVSLEELDLTVKDREISSHHHHHHGIKSMTYTFTGPIDRQLFYQFIMKLPESVLRLKGYVSFRNQPNAIYEFQYAYGLPDYGIIGMQLPLTIVIIGETLDTNHIRNQLDMLQFT

SEQ ID NO: 44656 - protein, 462 aa, Oryza sativa
MSFRSIVRDFRDSFGTLSKRSFEVKISGFSGRHRGKSIGPSSELDDTPVVAQQSKWAGLPPELLRDVMKRLEEDDSNWPSRKDVVACASVCTTWRDMCKDIVRNPEFCGKLTFPVSLKQPGPRDGVIQCFIKRDKSKLTYHLYLCLSSAVLDETGKFLLSAKRSRRTTHTDYIISMDSKNISRSSSGYIGKLRSNFLGTKFIIYDTQPPYNARTLCSQERTSRRFSSRKVSPKVPTGCYPIVQVNYELNVLGTRGPRRMQCAMHSIPASAVEPGGIVPGQPKELLPRLFEESFRSMATSFSKYSITDHSTDFSSSRFSEFGGGALQGQEQEQDGDDVNKERPLVLRNKAPRWHEQLQCWCLNFRGRVTVASVKNFQLIAAAPQPASGAASEPSQAGQAAQQQTQPSQPSSSSSSSSSNHDTVILQFGKVAKDMFTMDYRYPLSAFQAFAICLTSFDTKLACE

SEQ ID NO: 44657 - protein, 383 aa, Triticum aestivum
  misc_feature (219)..(219): Xaa can be any naturally occurring amino acid
  unsure (1)..(383): unsure at all Xaa locations
MASDMSKDVKFSEEEVTSHPRVLEGEEQPVVAPARQSSIFAPTLDELQYSVCEAGRNFGSMNMDEFMSNIWNAEEFQAATGGGLVGMEVAPVVGAGGGRGGEDAGGSNLARQESFSLPPPLCRKMVEEVWAEINRETRPVHSQPQSARPSPLIPVEPPAGNGGGVAANEQRGTLGEMTLEQFLVKVGVVWGSGTGGQEPVPVGMVHGQMNPTPANGMFXVMGDGMVFIPNGYIGMVVVPPPLPPQGGVGIVSPGSSYGRSTMTEVDMMNCMGDRAMMENSGARKRGAPEDQSCEGSIERRHHHMIKNRESAAQSRGWKQAYTKELEAELNHLKEENARLKAEEKTILLTKKQMLVEKVMEQPKENVNTKKGGALSRRCASCIW

SEQ ID NO: 44658 - protein, 540 aa, Yarrowia lipolytica CLIB122
MSEQQRFNNEVEEIKKWWSSPRWKHTKRVYSPEDIASRRGTIKVPQASSQQADKLFKLLQEHEKNHTASFTYGALDPVQVTQMAKYLDSIYVSGWQSSSTASTSNEPSPDLADYPMDTVPNKVEHLWFAQLFHDRKQNEERLSLPESERSKLPAPVDYLRPIIADADTGHGGLTAVVKLTKMFIERGAAGIHIEDQAPGTKKCGHMAGKVLVPIQEHINRLIAIRASADIFGSDLLAIARTDSEAATLITSSIDYRDHYFIAGATNKDAGHLVDVMVAAELEGKQGAALQAVEDEWNRKAGVKLFHEAFADEVNAGSYSNKAELIAEFNKKVTPLSNTPALEARALAARLLGKDIYFNWEAARVREGYYRYQGGTQCAVNRGIAYAPYADLIWMESKLPDYAQAKEFAEGVKNAVPHQWLAYNLSPSFNWTTAMSPEDQETYISRLAKLGYVWQFITLAGLHTNALISDKFAKAYSERGMKAYGGEIQQPEIDQGCEVVKHQKWSGAEYIDGILRMVTGGITSTAAMGAGVTEDQFKSKL

SEQ ID NO: 44659 - protein, 256 aa, Elymus glaucus
ELDNIMRLMGITGIVNGMDVSEWDPTKDKFLAVNYDVTTALEGKALNKEALQAEVGLPVDRKVPLVAFIGRLEEQKGPDVMIAAIPEIVKDEDVQIVLLGTGKKKFERLLKSVEEKFPGKVRAVVRFNAPLAHQMMAGADVLAVTSRFEPCGLIQLQGMRYGTPCACASTGGLVDTIVEGKTGFHMGRLSVDCNVVEPADVKKVATTLKRAIKVVGTPAYQEMVKNCMIQDLSWKGPAKNWEDVLLELGVEGSEPG

SEQ ID NO: 44660 - protein, 215 aa, Brassica napus
  misc_feature (24)..(24): Xaa can be any naturally occurring amino acid
  misc_feature (82)..(82): Xaa can be any naturally occurring amino acid
  unsure (1)..(215): unsure at all Xaa locations
MGRRPARCYRQIKGKPYPKSRYCXGVPDPKIRIYDVGMKKKGVDEFPFCVHLVSWEKENVSSEALEAARIACNKYMVKSAGXRIRVHPFHVLRINKMLSCAGADRLQTGMRGAFGKALGTCARVAIGQVLLSVRCKDNHGAHAQEALRRAKFKFPGRQKIIVSRKWGFTKFNRADYTRMRQSKRIVPDGVNAKFLSNHGPLAKRQPGSAFISATE

SEQ ID NO: 44661 - protein, 758 aa, Neisseria meningitidis Z2491
MTTLHFSGFPRVGAFRELKFAQEKYWRKEISEQELLAVAKDLREKNWKHQAAANADYVAVGDFTFYDHILDLQVATGAIPARFGFDSQNLSLEQFFQLARGNKDQFAIEMTKWFDTNYHYLVPEFHADTEFKANAKHYVQQLQEAQALGLKAKPTVVGPLTFLWVGKEKGAVEFDRLSLLPKLLPVYVEILTALVEAGAEWIQIDEPALTVDLPKEWVEAYKDVYATLSKVSAKILLSTYFGSVAEHAALLKSLPVDGLHIDLVRAPEQLDAFADYDKVLSAGVIDGRNIWRANLNKVLETVELLQAKLGDRLWISSSCSLLHTPFDLSVEEKLKANKPDLYSWLAFTLQKTQELRVLKAALNEGRDSVAEELAASQAAADSRANSSEIHRADVAKRLADLPANADQRKSPFADRIKAQQAWLNLPLLPTTNIGSFPQTTEIRQARAAFKKGELSAADYEAAMKKEIALVVEEQEKLDLDVLVHGEAERNDMVEYFGELLSGFAFTQYGWVQSYGSRCVKPPIIFGDVSRPEAMTVAWSTYAQSLTKRPMKGMLTGPVTILQWSFVRNDIPRSTVCKQIALALNDEVLDLEKAGIKVIQIDEPAIREGLPLKRADWDAYLNWAGESFRLSSTGCEDSTQIHTHMCYSEFNDILPAIAAMDADVITIETSRSDMELLTAFGEFKYPNDIGPGVYDIHSPRVPTEAEVEHLLRKAIEVVPVERLWVNPDCGLKTRGWKETLEQLQVMMNVTHKLRAELAK

SEQ ID NO: 44662 - protein, 365 aa, Pseudomonas aeruginosa PAO1
MVHNRIDPPFTRYLDSDGRPLGELPAWAGDSDALVGLYRQMLLTRLFDQKAVALQRTGRIGTYAPTLGQEAIGVAIGSQMRAEDVLVPYYRDTAVQLMRGVRMEDILLYWGGDERGSDYAEPLAAQDFPICVPIATQALHACGVASAFRIRGEHRVAVTTCGDGATSKGDFLEALNVAGAWQLPVLFVVNNNQWAISVPRRIQCGAPTLAEKAVGAGFPGEQVDGNDVLAVAERVRAALERARQGKGPTLLECISYRLCDHTTADDASRYRSAEEVNQAWREEPIKRLRAFLAGRGQWDEEREQALVGECQARVQEAVERFETFAAQAPQALFEHVYARWPAVLEEQREQLLERAARRRGGAEHE

SEQ ID NO: 44663 - protein, 256 aa, Elymus hystrix
ELDNIMRLTGITGIVNGMDVSEWDPTKDKFLAVNYDVTTALEGKALNKEALQAEVGLPVDRKVPLVAFIGRLEEQKGPDVMIAATPEIVKDEDVQIVLLGTGKKKFERLLKSVEEKFPGKVRAVVRFNAPLAHQMMAGADVLAVTSRFEPCGLIQLQGMRYGTPCACASTGGLVDTIVEGKTGFHMGRLSVDCNVVEPADVKKVATTLKRAIKVVGTPAYQEMVKNCMIQDLSWKGPAKNWEDVLLELGVEGSEPG

SEQ ID NO: 44664 - protein, 139 aa, Prosthecochloris aestuarii DSM 271
MAIKLYGRDPLKMFENVFNDTVSPFVSSMVAHSFKVDVSEDEMAIYIDADMPGMKKEDVKISMDDDVMTICAERTHEEEEKKKDYHRIERTYGSMSRSFSVGDNVDVDKIEASYDNGVLHIVVPKKEPVEKKSKDISIK

SEQ ID NO: 44665 - protein, 587 aa, Neisseria meningitidis Z2491
MGFPVRKFDAVIVGGGGAGLRAALQLSKSGLNCAVLSKVFPTRSHTVAAQGGISASLGNVQEDRWDWHMYDTVKGSDWLGDQDAIEFMCRAAPEAVIELEHMGMPFDRVESGKIYQRPFGGHTAEHGKRAVERACAVADRTGHAMLHTLYQQNVRANTQFFVEWTAQDLIRDENGDVVGVTAMEMETGEVYIFHAKAVMFATGGGGRIYASSTNAYMNTGDGLGICARAGIPLEDMEFWQFHPTGVAGAGVLITEGVRGEGGILLNADGERFMERYAPTVKDLASRDVVSRAMAMEIYEGRGCGKNKDHVLLKIDHIGAEKIMEKLPGIREISIQFAGIDPIKDPIPVVPTTHYMMGGIPTNYHGEVVVPQGDEYEVPVKGLYAAGECACASVHGANRLGTNSLLDLVVFGKAAGDSMIKFIKEQSDWKPLPANAGELTRQRIERLDNQTDGENVDALRRELQRSVQLHAGVFRTDEILSKGVREVMAIAERVKRTEIKDKSKVWNTARIEALELDNLIEVAKATLVSAEARKESRGAHASDDHPERDDENWMKHTLYHSDANTLSYKPVHTKPLSVEYIKPAKRVY

SEQ ID NO: 44666 - protein, 170 aa, Spinacia oleracea
MFPMVTGFINYGQQTIRAARYIGQSFMITLSHANRLPVTIQYPYEKLITSERFRGRIHFEFDKCIACEVCVRACPIDLPVVDWKLETDIRKKRLLNYSIDFGICIFCGNCVEYCPTNCLSMTEEYELSTYDRHELNYNQIALGRLPISITDDYTIRTILNSPQTKEKACD

SEQ ID NO: 44667 - protein, 226 aa, Brassica napus
  misc_feature (48)..(48): Xaa can be any naturally occurring amino acid
  misc_feature (172)..(172): Xaa can be any naturally occurring amino acid
  unsure (1)..(226): unsure at all Xaa locations
MAGGGAPAAKADEPQPHPPKDQLPNISYCITSPPPWPEAILLGFQHYXLVMLGTTVLIPTALVPQMSGGYEEKAKMIQTILFVAGINTLLQTTFGTRLPAVIGASYTFVPTTISIILSGRFSDTSNPVDRFERIMRATQGALIVASTLQMILGFSGLRRNVVRVLSPISAVXPLVGLVGFGLHEFGFPRVAKCIKIGLPELHILVFVSQYLPHVLNSGKNVFDRFA

SEQ ID NO: 44668 - protein, 653 aa, Yarrowia lipolytica CLIB122
MKFQVVTAALALAGLCSAQLAPIGKNDKYYNFTATWVNANPDGVHERRVIGINDQWPIPTINVTKGDRVIVDLYNDLGTQNVSLHWHGLFMEGQNAQDGPVWITQCPQSPEDSSFAFRYNFTVEQAGTYWYHSHVGGQYPDGLRGVFIVNDPEDPYKDEYDEHIWFTVSDWYHEEIPDLLPDFLSVYNPTGAEPIPSNILFNDTLNTTIKVEPGKTYKLSIINIGAFVSQYVEIMNHTMEVIEIDGVYTEKSDPIDLLYITSAQRYSVLLKTKDDASTNFPIMTTIDGTMLDLTPEDLVLYQTNWLQYNDDPNDRPEGPENYYWHTDKEGDGADDEFEERRFDDMDLVPLDGMKLLPDPDMTITVNVTMNNLNNGINYAFFNELTWVAPKVPVLYTVMSSPDGMETDATIYGDNTHTYVLKHNDVIDIVLNNEDAGTHPFHMHGRVFQVPYRSEAYEDDDMTPFDPEDEDIKFAEVPMRRDTVYVKPNGNMVMRFRADNPGVWFFHCHIEWHMEQGLAFTLVEAPEELKKQYVPPNHFDACKIAEVPTVGNAAGNDTDFLNLSGQNLQEKDLPAGFTARGIVALVFSCIAAFLGMGAVAWYGASDIKNQEIRMIQEFEREAGEEVDGAESLQDVQDEPVHIPHPHLHHNNATN

SEQ ID NO: 44669 - protein, 645 aa, Ashbya gossypii ATCC 10895
MRFRFQQFRFFGAPRAGARWRALVPPVLMLPAAAAASRQLLAPVRCDALLPDARGDTYEMGLYLASQRELREARERRRDGRGRGGVLRVLRMLLYGLHDAVVEPVRTVLRLLQLSAVFVPVLLAFPVTLVGRTVRAGSHGERSETQGALLWYRLVRKALEWAGPSFIKLGQWAGSRTDIFSEGLCAELGRLHSSAKPHGLQYTKRAIVEALGVQSFEEVFEEFREQPLGCGAIAQVYVGKLREELVRAKGVDLGPGGNRWCAVKVVHPHAARQISRDLRLMRFFAAAVDALPTMEWLSLPAEVEQFSILMNIQLDMRIECNNLAKFNDNFRGHTQIRFPRGFVELTSRSVLFEEYIDGFPMKAFLKVKNRIGDTSLCQKVSEPFISSFLKMMILDDFIHSDLHAGNVMLRFVRTDKLERHILSPEDETSDVVRRLVGMHRDHDPGFDVALREVLRDYTPQICFIDTGLITELNERNRTNFIALFNALAQFNGRRAGELMIERSRTPETAVDKDAFALKVDRLVKTVKQRTFTLGTVSIGDLLEQMLSMVRTHHVRMEGDFVSVVVAILLLEGIGRQLDPELDLFASSIPFLREFGMRRENQRMLHDMGRWPMLKVWLGLELRQLMTLSVRIINDLVKTDQLCPSY

SEQ ID NO: 44670 - protein, 253 aa, Mesorhizobium loti MAFF303099
MSGQGMRLENKVAIITGAASGFGEGMAKRFAQEGARVVVADLNAKGAERVASEIGEAAIWTQTDVSLRSEFDEMVYAAKSAFGRIDIMVNNAGYTHRNGDMLKVDEETFDLITAVNMKAIYHAALAVVPIMERQGGGVILTTASTAGLRPRPGLTWYNASKGWAITATKSMAVELAPKNIRVNCLCPVAGETGMLEKFMGADTPQIRETFRASIPLGRLSTPLDIANAALWLASDEAAFITGVALEVDGGRCI

SEQ ID NO: 44671 - protein, 871 aa, Oryza sativa
MEEGFVESGSFSRSSSFGGFEEWMALVRKRNGSGTPSSSSPQQPRSGGFAAQSSVSSEGLELGHPYSDAIDYSLSYQLPTTSLWDRLGRVTMMDIESSDFNWSSLSSLHHTKHTDTSTEPYEDDTSRSFEVTVNSGGVVFIALFKTSEYDDLPSKETAAVIKIAPSRMATQSERFGYELAKWLGVRTPQGRVIHNFSSEWHQMKDAVENARDAAISSCDELEEMICTEMLEALELSRCLFLMNYVHGSPLLENTMPFDSHDSAEKTAEALGRVLILDLVLRNEDRLRCRPLGWRGNYANLLVADRNAYANLDSLDDVYDSAIIRYKPEIIRSPQNRKPRRAVSISGSIGSDTSDLMLPDNPSQPEISSFHIIAIDSGVPRRPPACKRAKDQESYPKLVELTLNNWDYSSNLLFELSFGKLGIPGPEEFDVSSDLSYHSPLSESDMVAAVNSFRGGFRSALRDLQRFHIFLVTLYQKLDGLLKIFFNLMYKVLNEYDREDAGSSDSPCSTETHMDSHDSEVPKHMRRPSRTLSRDNFDLSSPSSRENFMIKNFKGSSDASRGLRLTMKLRDFNKYAKADGELCKEIEQWNDMLRTEVVKLCQDNSFNTGFFEGIDNSIAVDAYELKVRLEHILERISLISDAASTERPSQITDYLYIGGALAARSTYTLKHLGITHVLCLCANEIGQAESQQPDRFDYQNFSINDDENADISDVFQDASDFIDYVQHLHGKVLVHCFEGKSRSATVVLAYLMLRKKFTLLEAWNMLKKVHRRAHPNDGFAKVLLDLDKKLHGKISMEWHHRRPAMKVCPICGKNAGLSSSSLKLHLQKAHRKISSGSVDTAMSLEIQKAVEAIKAGRGGGDSPTHSAEKVTS

SEQ ID NO: 44672 - protein, 487 aa, Manihot esculenta
MGSTDLNSKPHIVLLSSPGLGHLIPVLELGKRIVTLCNFDVTIFMVGSDTSAAEPQVLRSAMTPKLCEIIQLPPPNISCLIDPEATVCTRLFVLMREIRPAFRAAVSALKFRPAAIIVDLFGTESLEVAKELGIAKYVYIASNAWFLALTIYVPILDKEVEGEFVLQKEPMKIPGCRPVRTEEVVDPMLDRTNQQYSEYFRLGIEIPTADGILMNTWEALEPTTFGALRDVKFLGRVAKVPVFPIGPLRRQAGPCGSNCELLDWLDQQPKESVVYVSFGSGGTLSLEQMIELAWGLERSQQRFIWVVRQPTVKTGDAAFFTQGDGADDMSGYFPEGFLTRIQNVGLVVPQWSPQIHIMSHPSVGVFLSHCGWNSVLESITAGVPIIAWPIYAEQRMNATLLTEELGVAVRPKNLPAKEVVKREEIERMIRRIMVDEEGSEIRKRVRELKDSGEKALNEGGSSFNYMSALGNEWEKSWKTQRSERSLW

SEQ ID NO: 44673 - protein, 486 aa, Shewanella sp. ANA-3
MYCNHLTGGLNYTSKHFLLAYLLKAVFMNHSGFQAKRLIQLALPVLIAQVTQTMMGFIDTVMAGRVSAVDMAAVAVGTSLWLPAILFVQGLLMAFTPLFAHHNGANNQKAIQPLAFQGAYLALIGGLGVMAFLASAPLVLSHMNLEPQLYNLTIGYIDGILWGAPAFVLYQVLRGCSEGISYTLPTMIIGFVGLAVNIPANYIFIYGHFGMPAMGGAGCGVATALVFWAMLIAMTIYMQLHKKFAALAPFSQFHRPDFATMKKMTKLGMPIAMALFFEVSLFAIIALLLAPLGATVVASHQIALNFSAIVFMLPLSIGIAVSIRIGYYLGRDRADISAVVAKVGLWLALSLALSTAILTVLFRFQIAELYNSDPEVVVLAGSLMLMAALYQLSDSIQVVAAGALRGYKDTRSAFYITLFSYWGIGMTLGYTLAYTDFIVPAMGAHGFWTGLIAGLTSAALLFFIRLRYIQKHGVHLSLIEGDSVHH

SEQ ID NO: 44674 - protein, 203 aa, Triticum aestivum
MDYQQYISELSKTRQPSAIRALTPYLHEENMISLGAGQPNPSTFPFKSMSVTLESGETLQMDQQLFKRCLSYDLSSGLPQLNEWLKNLQEIEHKPSVKGYSLSVGVGSQDLLTKAFEMVIEPGTALLVEDPTYTGAIAHLRTQPCELIGVATDAEGVKPDALDKILTEWSSAPTSKGNGKKPKVLYTIPCGGNPTGATASLGR

SEQ ID NO: 44675 - protein, 263 aa, Cladonia mitis
  misc_feature (1)..(1): Xaa can be any naturally occurring amino acid
  misc_feature (6)..(6): Xaa can be any naturally occurring amino acid
  unsure (1)..(263): unsure at all Xaa locations
XEHGAXKVVAVNDPFIEPHYAAYMLKYDSQHGQFKGTIEVEGSDLIVNGQKVKFYTEKDPGAIPWKDTGAYYIVESTGVFTTTEKAKAHLKGGAKKVVISAPSADAPMFVMGVNEETYKSDIEVISNASCTTNCLAPLAKVMHDNFTIIEGLMTTIHSYTATQKTVDGPSAKDWRGGRTAAQNIIPSSTGAAKAVGKVIPSLNGKLTGMSMRVPTSNVSVVDLTCRLEKSVTYDEIKEAMKKASDGELKGIMAYSEDDLVSTD

SEQ ID NO: 44676 - protein, 804 aa, Pisum sativum
MASLTHSTSLRQRFDETLTAHRNEILSLLSRIEAKGKGILQHHQIIAEFEEIPEENRQKLVNGVFGEVLRSTQEAIVLVPFVALAVRPRPGVWEYLRVDVHGLVVDELSAAEYLKFKEELVEGSSNENFVLELDFEPFNASIPKPTQNKSIGNGVEFLNRHLSAKLFHGKESLQPLLEFLRLHNHNGKTIMVNDRIQNLNSLQHVLRKAEDYLIKIAPETPYSEFEHKFQEIGLERGWGDTAERVVETIQLLLDLLDGPDPGTLETFLGRIPMVFNVVILSPHGYFAQDNVLGYPDTGGQIVYILDQVRALEEEMLKRIKQQGLDITPRILIITRLLPDAVGTTCGQRLEKVYNTEHCHILRVPFRTEKGIVRKWISRFEVWPYLETFSEDVANELAKELQGKPDLIVGNYSDGNIVASLLAHKLGVTQCTIAHALEKTKYPESDIYWKKFDDKYHFSSQFTADLFAMNHTDFIITSTFQEIAGSKDTVGQYESHTAFTLPGLYRVVHGIDVFDPKFNIVSPGADLSIYFPYTETERRLTSFHPDIEELLYSTVENEEHICVLKDRSKPIIFTMARLDRVKNITGLVECYGKNARLRELVNLVVVAGDRRKESKDLEEIAEMKKMYGLIETYKLNGQFRWISAQMDRIRNGELYRVICDTKGAFVQPAIYEAFGLTVIEAMSCGLPTFATCNGGPAEIIVHGKSGYHIDPYHGDRAAETLVEFFEKSKADPTYWDKISHGGLKRIHEKYTWQIYSDRLLTLTGVYGFWKHVTNLERRESKRYLEMFYALKYSKLAESVPLAVEE

SEQ ID NO: 44677 - protein, 136 aa, Bradyrhizobium sp. BTAi1
MMTTWPDDDVILYDGICVFCSRWVQFVIARDAAKRFRFTPIQSPYGTRLAQAFGIDPKEPDTNAVVHGGRAHLKSDAALTVLSNLPGWGWTRALFAVPKPLRNAVYSVVARNRYRIFGKYDSCFVPDAELRRRVLE

SEQ ID NO: 44678 - protein, 278 aa, Cladonia mitis
VEHGAVKVVAVNDPFIEPHYAAYMLKYDSQHGQFKGTIEVEGSDLIVNGQKVKFYTEKDPGAIPWKDTGAYYIVESTGVFTTTEKAKAHLKGGAKKVVISAPSADAPMFVMGVNEETYKSDIEVISNASCTTNCLAPLAKVMHDNFTIIEGLMTTIHSYTATQKTVDGPSAKDWRGGRTAAQNIIPSSTGAAKAVGKVIPSLNGKLTGMSMRVPTSNVSVVDLTCRLEKSVTYDEIKEAMKKASDGELKGIMAYSEDDLVSTDLNGDNHSCIFDAKAG

SEQ ID NO: 44679 - protein, 443 aa, Glycine max
MKSGEDPTLGIPVHEELTNAADSPTLVDFLHADVTREKEDSNKRKKDGSTSCSLRKNRRCIAGEEDKGAKTSRQLRKQAARKPVNSSLNEDVEDNNDLDPSYNSNGDELQENDDEYEVDYPSRKRRVSNSSQKKPVAKSGKTSQKPKKANDDLEKTEEPPKKFSHSTRRRKRCVDKALLEIPEDELDRLNIPIKDIILLEEHRERLAKKEAMTSNTSSTNQSGGDSLHEAGSYNEGAYDDGAYDDGAYNDEEFLGSEDGRDPYDNQANEGITSTSVLLNYQSFREKKTPRGKWSKQETELFYEAVREMGTDFSVIQKTFFPDKTRHQIKLKYKKEERQQPLQLTDAVNNSAKDHPHSKLFIELLKLASTKAEEYPGRDASDLVMAEEVVDLTAGTHEEVPKAATKKEDADVKAQEDSVAVPSPEQSDDSDDDFQKWSQYKCGY

SEQ ID NO: 44680 - protein, 517 aa, basidiomycete PM1
MAKFQSLLTFITLSLVASVYASIGPVADLTISNGAVSPDGFSRQAILVNDVFPSPLITGNKGDRFQLNVIDNMTNHTMLKSTSIHWHGFFQHGTNWADGPAFVNQCPISTGHAFLYDFQVPDQAGTFWYHSHLSTQYCDGLRGPIVVYDPQDPHKSLYDVDDDSTVITLADWYHLAAKVGPAVPTADATLINGLGRSINTLNADLAVITVTKGKRYRFRLVSLSCDPNHTFSIDGHSLTVIEADSVNLKPQTVDSIQIFAAQRYSFVLNADQDVDNYWIRALPNSGTRNFDGGVNSAILRYDGAAPVEPTTTQTPSTQPLVESALTTLEGTAAPGNPTPGGVDLALNMAFGFAGGRFTINGASFTPPTVPVLLQILSGAQSAQDLLPSGSVYSLPANADIEISLPATSAAPGFPHPFHLHGHTFAVVRSAGSSTYNYANPVYRDVVSTGSPGDNVTIRFRTDNPGPWFLHCHIDFHLEAGFAVVMAEDIPDVAATNPVPQAWSDLCPTYDALSPDDQ

SEQ ID NO: 44681 - protein, 148 aa, Propionibacterium acnes KPA171202
MDHEHTATYDLQPHLVLTPEQWHERLSDEEYYVLREAGTEAPFVGEYTDTTTEGVYRCRACGAELFRSTQKFHSSCGWPSFYAPLAEDRVRYLNDESLPGRPRTEVRCAQCDSHLGHVFAGEGFDTPTDLRYCINSICLDLVPTDETT

SEQ ID NO: 44682 - protein, 457 aa, Staphylococcus aureus subsp. aureus Mu50
MAIAVLLNRMFRMEHNPLFEYIYQQKEDIDACYFIIPEEDMSSASDLKAQFYRGTLQRFYQSLHAEKLTPYVMSYDDIISFCKENNISEVVIAGDIMSYHLEEYDILHQRSLFNEARIAVTLIRGNHYFKASKTMNQQGEPYKVFTSFYRKWRPYLRHRDVYHYDLKSFEDFVIASPDDLVFDDIAFGSSQVIEQNKWQHFLDQDIQNYESGRDYLPEVLTSQLSVALAYGLLDIIEIFNDLLARYDEDEANHEAFIRELIFREFYYVLMTQYPETSYQAFKPKYRQIKWSQNEANFNAWCEGQTGFPIIDAAIMELTQTGFMHNRMRMVVSQFLTKDLFIDWTWGEKFFRKHLIDYDAASNIHGWQWSASTGTDAVPYFRMFNPIRQSERFDAKALYIKTYLPIFNQIDAKYLHDTQRNESNLFEQGIELGSHYPRQMVDHQEKRTQVLATFKALD

SEQ ID NO: 44683 - protein, 309 aa, Coxiella burnetii RSA 493
MSQSHQRTAIIGECLIELTPKNGKDFSLNFAGDTLNTAVYLVRSLSKTTMVTVDYVTALGADTFSHEMLNQWLGEGIGVSLVRQIPDKLPGLYLIRNDEKGERYFYYYRSQSAARALFEREEGDRLCQKLLEFDNLYLSGITLAMLYETGCDKLLDCLKVAHKKGKTICFDTNFRAHLWPNLDSARAIIEEILKLTTIGLPSFSDEKTLFGDKSPKETAERFHRYGVKEVVVKQGENGYWLSDETGEKQVAIERATKVIDTTGAGDAFNGAYLAARFEGLNSETASQKAAHLAATVVAYRGAIIPITRQ

SEQ ID NO: 44684 - protein, 349 aa, Torenia hybrida
MSMEVVVPKAQPITVCVTGASGFIGSWLVMKLLNRGYTVHATVRDPENMKKVKHLLELPRADDASLRLFKADMNVEGSFDEAVGSCECVFHMATPMDFESDDPENEVIKPTVDGMLSIIRSCAKAQTVKRLIFTNSAGTLNVEEHQKPVYDESNWSDLDFIYSTKMTGWMYFVSKVLAEKAAIKACKENNIDFISIIPPVVVGPFIIDNWPPSLITALSPITGNEAHYSIIKQGQFVHVDDLCEAHIFLSEHPKTEERYICSSHDATIYDIANMIREKWPEYDVPTEFEGIDKDIPVVRFSSKKLMGMGFTFKYTLEDMFREAIETCRDKGLLPYSSTRDHIHGEHKIE

SEQ ID NO: 44685 - protein, 259 aa, Tulipa gesneriana
MPISRIAIGSPQEATQAGALKAALAEFISTLIFVYAGQGSGIAFGKLSVDGVTTPAGLVAAAIAHAFALFVAVSVGANISGGHVNPAVTFGAFLGGNITLLRGVLYIIAQLLGSSVACLLLRFTTGLGTGHFGLVAGVSIWSGLVMEIVMTCGLVYTVYATAVDPKKGDIGTIAPIAIGFIVGANILVGGAFTGASMNPARSRSGRALVSWSWTSHWVYWVGPLIGGGIAGIVYDLFFINSTHEPAPKHRLLIGGWRRR

SEQ ID NO: 44686 - protein, 293 aa, Coxiella burnetii RSA 493
MADYASRFVTVKGAKMHYIETGQGEPVLFIHGMPTSSYLWRNIIPKLADKAHCVALDLIGMGESDKPDIDYTVNDHISYVECFIEALGLRNITLVMHGWGSVIGFDYARRHPKNIKALAFFESHIRPTTDWDMLSLPVQQLATLLHRPGASYRAIVEQNYLINKLLPASMMRKLSDEEMANYRRPFLTKESRKPLWQYLQDLPLGDSKRPVVTLIKNYSQWLKQAPQPKLMMYAVPGFVTTMATVQWAKEHLPNLTLVEFSDVLHFAQESIPDIFSEELRKWYLNEVRSVSFA

SEQ ID NO: 44687 - protein, 506 aa, Triticum aestivum
  misc_feature (82)..(82): Xaa can be any naturally occurring amino acid
  misc_feature (196)..(196): Xaa can be any naturally occurring amino acid
  unsure (1)..(506): unsure at all Xaa locations
MASHIVGYPRMGPKRELKFALESFWDGKSSAEDLEKVAADLRASIWKQMSEAGIKYIPSNTFSYYDQVLDTTAMLGAVPDRXYSWTGGEIGHSTYFSMARGNATVPAMEMTKWFDTNYHFIVPELSPATKFSYASHKAVSEYKEAKALGVDTVPVLVGPVSYLLLSKAAKGVEKSFSLLSLLDSILPIYKEVVTEXLKAAGASWIQFDEPTLVKDLAAHELAAFSSAYAALESALSGLNVLIETYFADVPAESYKTLTSLSGVTAYGFDLVRGTKTLELIKSAGIPSGKYLFAGVVDGRNIWADDLAASLSTLQSLEAVVGKDKLVVSTSCSLMHTAVDLVNETKLDSEIKSWLAFAAQKVVEVNALGKALAGLKDGAYFAANAAAQASRRSSPRVNNEEVQKAAAALKGSDHRRATPVSARLDAQQKKLNLPILPTTTIGSFPQTMDLRRVRREYKAKKISEEEYVSAIKEEISTVVQIQEELDIDVLVHGEPARNDMVEYFGEQ

SEQ ID NO: 44688 - protein, 142 aa, Dehalococcoides ethenogenes 195
MERTLLLVKPDGVNRGLSGEILGRMEKLGLKMIGLRMLQMDAVLADKHYAPHRERPFFKDLVTYITSGPIVAAVFEGENAVEKMRKAMGATDPAKSEKGTVRGDLGINIEQNTVHGSDSAENAKHEISLFFSESELVNYDRR

SEQ ID NO: 44689 - protein, 96 aa, Arabidopsis thaliana
EDSEVAEIFLRQVDSAAVFHNASTRFSDGFRFGLGAEVGISTSRIHARGPVGVEGLLTTRWIMRGKGQVVDGDNGIVYTHKDLPVLQRPEAVENGI

SEQ ID NO: 44690 - protein, 257 aa, Elymus lanceolatus
CELDNIMRLTGITGIINGMDVSEWDPTKDKFLTVNYNVTTALEGKALNKEALQAEVGLPVDRKVPLVAFIGRLEEQKGPDVMIAAIPEIVKDEDVQIVLLGTGKKKFERLLKSVEEKFPGKVRAVVRFNAPLAHQMMAGADVLAVTSRFEPCGLIQLQGMRYGTPCACASTGGLVDTIVEGKTGFHMGRLSVDCNVVEPADVKKVATTLKRAIKVVGTPAYQEMVKNCMIQDLSWKGPAKNWEDVLLELGVEGSEPG

SEQ ID NO: 44691 - protein, 254 aa, Magnetospirillum magnetotacticum MS-1
MPAQTVLAAAAALALGQGTPPLSSVSATTTYRRTEVNGVGLFYREAGPRDAPTLLLLHGYPSSSRQWDPLLPLLADRYHLIAPDYPGFGHSDAPSPADYAYTFDNLARTMEGLVTQLGLARYTLFLQDYGGPVGFRMALAHPERVSALIVQNANAYTEGLGAKWQGIARYWADPAAHPEQVDAFTSLEGAKQRHLGTSPNPERYNPDSWVDEYAGLTRPGAREIQAALLYDYRTNLAAYPAWQAWMRDHPLPTL

SEQ ID NO: 44692 - protein, 477 aa, Neisseria meningitidis Z2491
MSQYDVVVIGAGPGGYVAAIRAAQLGFKTACVDAGVNKAGNAPALGGTCLNVGCIPSKALLQSSEHFHAAQHEFAEHGITVGDVKFDVAKMIERKDAIVTKLTGGVKFLFQKNKVTSLFGTASFAGKNGDAYQIEVDNKGEKTVIEAKHVIVATGSVPRPLPQVAIDNVNVLDNEGALNLTEVPAKLGVIGSGVIGLEMGSVWNRVGAEVTILEAAPTFLAAADQQIAKEAFKYFTKEQGLSIELGVKIGDIKSEGKGVSVAYETAAGEAKTEVFDKLIVAIGRIPNTKGLNAEAVGLEKDERGFIKVDGECRTNLPNVWAIGDVVRGPMLAHKASDEGVAVAERIAGQKPHIDFNNVPFVIYTDPEIAWVGKTEEQLKAEGVEYKKGTSGFGANGRALAMGKAKGTVKVLADAKTDRILGVHMIGPVVSELLTEGVTALEFFASSEDIARIIHAHPTLSEVVHEAALAADKRALHG

SEQ ID NO: 44693 - protein, 435 aa, Rickettsia sibirica 246
MTNENNNDSEFAELKIRGKIFKLPILKASIGEDVIDISRVSAEADCFTYDPGFMSTASCQSTITYIDGDKGILRHRGYDIKDLAEKSDFLEVAYLLIYGELPSGEQYNNFTKQVAHHSLVNERLHYLFQTFCSSSHPMAIMLAAVGSLSAFYPDLLNFKEADYELTAIRMIAKIPTIAAMSYKYSIGQPFIYPDNSLDFTENFLHMMFATPCTKYTVNPIIKNALNKIFILHADHEQNASTSTVRIAGSSGANPFACISTGIASLWGPAHGGANEAVINMLKEIGSSEYIPKYIAKAKDKNDPFRLMGFGHRVYKNYDPRAAVLKETCKEVLKELGQLDNNPLLQIAIELEAIALKDEYFIERKLYPNVDFYSGIIYKAMGIPSQMFTVLFAIARTVGWMAQWKEMHEDPEQKISRPRQLYTGYVHREYKGIRER

SEQ ID NO: 44694 - protein, 370 aa, Bacillus anthracis str. A2012
MKSSNTEKREYETGNKGIEKLLQFGLKEGKVQALISPVMSFVLMALLVIIVGYGGMRVSSGALTTGELVAFILYLVQIIMPMSQLSMFFTQFQKAIGATERINTILEYEVEDHETGVKVTNAKQPIVLENVHFEYNEEEQVLKNIDFTIESGKVTAIVGPSGSGKTTLFSLLERFYEPTSGAIKLGKDAITNYSLQSWRRQIGYVSQDSPLIDGTIRDNICYGVEGEVTDEEIEKVAAMAYVDAFIHDLPNGYATEVGERGVKLSGGQRQRIAIARALLRNPQILMLDEATSSLDSKSESVVQKALNNLMKGRTTLVIAHRLSTVVDADKIIFIEKGNLTGSGTHDELLRTHDMYREFATQQLKIKEAAL

SEQ ID NO: 44695 - protein, 929 aa, Synechococcus elongatus PCC 6301
MTYSEVHWRLLLVDDDEDDFIITRDLLRDAQQAQIQLDWCSDFQEALATMGRQEHDVYLVDYRLGAESGLDLIDQAIQAGITRPIILLTGQGNEQLDASAIELGAADYLVKGQLDCQQLLRSIRYAIDRNLATTRLAESESRYRLLFEANPEPMWVFAKQGLQFLAVNQAASQFFGYSQQEFLAMTVLDIQSEEEKTRFLQFFESLICNQIVDPAVGVWAYRHKQGHLVFADVLIHDFEFDNQPCCLILAIDITEKQAARELAHQREQAFRKLLNDNRDPLLVISGDRRICYANPAAQKLLKLNLEQLESQSLDLPLLSDKLTEWALTLPDGSVAEVEIHRSETDWEGQPADLLSLRDIAERKASEQQLRLLKESLEASFNGVVIVDAIEPDMPVIYVNPAFERITGYSEAEMLGRNCRILQGNERDSLQIEEIHRGLSQAENVHVVIRNFRKDGQPFWNDLYISPIFNAQGNVTHFIGVQNDITEQKRYEEELSFSASHDVLTGLPNRAVLEDRLRQGCKMALRQKHSLAILFIDLDGFKLINDSIGHRSGDLLLVEVAQRMCEQVRAGDTVARIGGDEFIILLVDLKLENDVISIADRLLASVARPYHIQGIYLHVTASMGITLSDGDIEQPTQLIQQADLAMYKAKQEGRNNYQWYTNDLNLRLRERVHLRNELQKAIETEAFELYFQPKIEGCSGQVIGLEALLRWQHPQMGFISPATFVPIAEDTGQIIPLSQWVLETACRQLRDLLQQGIAAPSVAVNISTVQFRRINFVKSVQSALQKYQLKSEHLEIEITENVLFDNTEKAIEKLQRLKELGVNISIDDFGTGFSSLSYLKELPIDTVKIDRSFVQEINTDSRDAAITQGIISMAHHLRLNVVAEGVETEQQFKFLQQSNCDQYQGYYFAKPMPFEALKQYLMDEAARELP

SEQ ID NO: 44696 - protein, 708 aa, Saccharomyces cerevisiae
MARDLQNHLLFEVATEVTNRVGGIYSVLKSKAPVTVAQYGDNYTLLGPLNKATYESEVEKLDWEDESIFPEELLPIQKTLMSMREKGVNFVYGNWLIEGAPRVILFELDSVRHFLNEWKADLWSLVGIPSPEHDHETNDAILLGYVVVWFLGEVSKLDSSHAIIGHFHEWLAGVALPLCRKKRIDVVTIFTTHATLLGRYLCAAGDVDFYNNLQYFDVDQEAGKRGIYHRYCIERAAAHTADVFTTVSQITALEAEHLLKRKPDGILPNGLNVVKFQAVHEFQNLHALKKDKINDFVRGHFHGCFDFDLDNTVYFFIAGRYEYKNKGADMFIESLARLNYRLKVSGSKKTVVAFLIMPAKTNSFTVEALKSQAIVKSLENTVNEVTASIGKRIFEHTMRYPHNGLESELPTNLDELLKSSEKVLLKKRVLALRRPYGELPPVVTHNMCDDANDPILNQIRHVRLFNDSSDRVKVIFHPEFLNANNPILGLDYDEFVRGCHLGVFPSYYEPWGYTPAECTVMGVPSITTNVSGFGAYMEDLIETDQAKDYGIYIVDRRFKSPDESVEQLADYMEEFVNKTRRQRINQRNRTERLSDLLDWKRMGLEYVKARQLGLRRAYPEQFKQLVGETISDANMNTLAGGKKFKIARPLSVPGSPKVRSNSTVYMTPGDLGTLQDANNADDYFNLSTNGAIDNDDDDNDTSAYYEDN

SEQ ID NO: 44697 - protein, 257 aa, Elymus trachycaulus
CELDNIMRLTGITGIVNGMDVSEWDPTKDKFLAVNYDVTTALEGKALNKEALQAEVGLPVDRKVPLVAFIGRLEEQKGPDVMIAAIPEIVKDEDVQIVLLGTGKKKFERLLKSVEEKFPGKVRAVVRFNAPLAHQMMAGADVLAVTSRFEPCGLIQLQGMRYGTPCACASTGGLVDTIVEGKTGFHMGRLSVDCNVVEPADVKKVATTLKRAIKVVGTPAYQEMVKNCMIQDLSWKGPAKNWEDVLLELGVEGSEPG

SEQ ID NO: 44698 - protein, 458 aa, Escherichia coli CFT073
MMESKNKLKRGLSTRHIRFMALGSAIGTGLFYGSADAIKMAGPSVLLAYIIGGIAAYIIMRALGEMSVHNPAASSFSRYAQENLGPLAGYITGWTYCFEILIVAIADVTAFGIYMGVWFPTVPHWIWVLSVVLIICAVNLMSVKVFGELEFWFSFFKVATIIIMIVAGFGIIIWGIGNGGQPTGIHNLWSNGGFFSNGWLGMVMSLQMVMFAYGGIEIIGITAGEAKDPEKSIPRAINSVPMRILVFYVGTLFVIMSIYPWNQVGTAGSPFVLTFQHMGITFAASILNFVVLTASLSAINSDVFGVGRMLHGMAEQGSAPKIFSKTSRRGIPWVTVLVMTTALLFAVYLNYIMPENVFLVIASLATFATVWVWIMILLSQIAFRRRLPPEEVKALKFKVPGGVATTIGGLIFLLFIIGLIGYHPDTRISLYVGFAWIVVLLIGWMFKRRHDRQLAENQ

SEQ ID NO: 44699 - protein, 287 aa, Manihot esculenta
TLNLIPGMSKIQIRDLPEGVLFGNLESLFSQMLHNMGRMLPRAAAVLMNSFEELDPTIVSDLNSKFNNILCIGPFNLVSPPPPVPDTYGCMAWLDKQKPASVAYISFGSVATPPPHELVALAEALEASKVPFLWSLKDHSKVHLPNGFLDRTKSHGIVLSWAPQVEILEHAALGVFVTHCGWNSILESIVGGVPMICRPFFGDQRLNGRMVEDVWEIGLLMDGGVLTKNGAIDGLNQILLQGKGKKMRENIKRLKELAKGATEPKGSSSKSFTELANLVRSRGSYEN

SEQ ID NO: 44700 - protein, 605 aa, Escherichia coli CFT073
MMLNAWHLPVPPFVKQSKDQLLITLWLTGEDPPQRIMLRTEHDNEEMSVPMHKQRSQPQPGVTAWRAAIDLSSGQPRRRYSFKLLWHDRQRWFTPQGFSRMPPARLEQFAIDVPDIGPQWAADQIFYQIFPDRFARNLPREAEQDHVYYHHAAGQEIILRDWDEPVTAQAGGATFYGGDLDGISEKLPYLKKLGVTALYLNPVFKAPSVHKYDTEDYRHVDPQFGGDGALLRLRHNTQQLGIRLVLDGVFNHSGDSHAWFDRHNRGTGGACRNPESLWRDWYSFSDDGTALDWLGYASLPKLDYQSESLVNEIYRGEDSIVRHWLKAPWNMDGWRLDVVHMLGEAGGARNNLQHVAGITEAAKETQPDAYIVGEHFGDARQWLQADVEDAAMNYRGFTFPLWGFLANTDISYDPQQIDAQTCMAWMDNYRAGLSHQQQLRMFNQLDSHDTARFKTLLGRDVARLPLAVVWLFTWPGVPCIYYGDEVGLDGKNDPFCRKPFPWQVEKQDSALFALYQRMIALRKKGQALRRGGCQVLYAEDNVVVFVRVLNQQRVLVAINRGEACEVVLPASPLLNVAQWQRKEGHGQLTDGILALPAISATVWMN

SEQ ID NO: 44701 - protein, 257 aa, Elymus virginicus
CELDNIMRLTGITGIVNGMDVSEWDPTKDKFLAVNYDVTTALEGKALNKEALQAEVGLPVDRKVPLVAFIGRLEEQKGPDVMIAAIPEIVKDEDVQIVLLGTGKKKFERLLKSVEEKFPGKVGAVVRFNAPLAHQMMAGADVLAVTSRFEPCGLIQLQGMRYGTPCACASTGGLVDTIVEGKTGFHMGRLSVDCNVVEPADVKKVATTLKRAIKVVGTPAYQEMVKNCMIQDLSWKGPAKNWEDVLLELGVEGSEPG

SEQ ID NO: 44702 - protein, 179 aa, Gossypium herbaceum
GAWTAEEDRKLAEVITVHGAKRWKTIPSIAGLNRCGKSCRLRWMNYLRPNIKRGNISDQEEDLILRLHKLLGNRWSLIAGRLPGRTDNEIKNYWNSHLSKKVNQKEKHRGASARQGCKFAQQRLVENAKEQVREENTSTGFGESNISFDVDDFFDFSNVDTRNFEWVNRFLEVDDGFKF

SEQ ID NO: 44703 - protein, 414 aa, Rickettsia sibirica 246
MSYYDIIFSKHIDKIKSEGRYREFKALKRQADNFPFAEHANKQIVMWCINDYLGMSKHAKVMHASIDSLLKYGVGSGGTRNIGGNNIAILELEKELANLHKKQAALVFTSGFVANDTTLASLAKIMPDIVFFSDELNHASIIAGITSSRAEKYIYRHLDVKHLEELLQSVDINRPKIVVFESAYSMDGFFSPIKDIINLAKKYNALTFIDEVHTVGLYGKQGGGIAELLNCSDQIDIIQGTLAKAYGTIGGYITSSHNLVDAIRLTAPGFIFTTSLPPVISTAATHSIRHLKESNEERIKHQEVVTKLKNSFERFNIPYLKNESHIVPIIIGDPIKTAKASNMLLNEYGIYVQHINFPTVPRGTERLRIIPTPAHTDKMINDLSVALVQIFAELDIELSSAKELNEEVRLNLIA

SEQ ID NO: 44704 - protein, 516 aa, Arabidopsis thaliana
MAFTNVCLWTLLAFMLTWTVFYVTNRGKKATQLADAVVEEREDGATDVIIVGAGVGGSALAYALAKDGRRVHVIERDLREPERIMGEFMQPGGRLMLSKLGLEDCLEGIDAQKATGMTVYKDGKEAVASFPVDNNNFPYDPSARSFHNGRFVQRLRQKASSLPNVRLEEGTVKSLIEEKGVIKGVTYKNSAGEETTAFAPLTVVCDGCYSNLRRSLNDNNAEVLSYQVGFISKNCQLEEPEKLKLIMSKPSFTMLYQISSTDVRCVFEVLPNNIPSISNGEMATFVKNTIAPQVPLKLRKILLKGIDEGEHIKAMPTKKMTATLSEKKGVILLGDAFNMRHPAIASGMMVLLSDILILRRLLQPLSNLGNAQKISEVIKSFYDIRKTMSATVNTLGNAFSQVLIATTDEAKEAMRQGCYDYLCSGGFRTSGMMALLGGMNPRPISLIYHLCAITLSSIGHLLSPFPSPLRIWHSLRLFGLAMKMLVPHLKAEGVSQMLFPVNAAAYRKSYMAATAL

SEQ ID NO: 44705 - protein, 552 aa, Listeria monocytogenes str. 1/2a F6854
MTKFAQKTIYQVYPKSFYDTTGDGTGDIPGITAKLDYLQELGIEMIWLNPFYPSPQNDNGYDIADYIAVDPLFGTMDDVTTLIKEAKKRNIGIMIDLVLNHTSTEHPWFKKALAGDPFYRDFYYFRPAKADGSPPTNWVSKFGGNAWEKLPDSSEYYLHLYDVTQADLDWANPNVREALFDVVNFWIDKGVEGFRLDVLNVIAKPKFLEDDFEGDGRRFYTDGPGIHAYLKELHERTFGDKAIITVGEMSSTDIDNCIRYSNPDEKELSMVFHFHHLKVDYPDGEKWRLADVNFENLKSIFHTWQVAMSEENGWDALFWNNHDQPRALGRFASDKPEHYYHSATLLGATIHFMRGTPFVYMGEEIGMMNPKFPTIDDYVDVETLNHFDILQKNGLSEQEVMEIIKERSRDNSRTPMQWDDSQNAGFTTGTPWLKVADNAKEINVQTALSNKTSIFYFYQKLIALRKEHPVIQTGDYTPYLTEEDSIIAYKRSNETTSLLSIHHFGSEKKKIQLPTEFLNAEVLLSNYERQRISSELELAPYETLTLMQMKKA

SEQ ID NO: 44706 - protein, 677 aa, Saccharomyces cerevisiae
MHSWRISKFKLGRSKEDDGSSEDENEKSWGNGLFHFHHGEKHHDGSPKNHNHEHEHHIRKINTNETLPSSLSSPKLRNDASFKNPSGIGNDNSKASERKASQSSTETQGPSSESGLMTVKVYSGKDFTLPFPITSNSTILQKLLSSGILTSSSNDASEVAAIMRQLPRYKRVDQDSAGEGLIDRAFATKFIPSSILLPGSTNSSPLLYFTIEFDNSITTISPDMGTMEQPVFNKISTFDVTRKLRFLKIDVFARIPSLLLPSKNWQQEIGEQDEVLKEILKKINTNQDIHLDSFHLPLNLKIDSAAQIRLYNHHWISLERGYGKLNITVDYKPSKNKPLSIDDFDLLKVIGKGSFGKVMQVRKKDTQKIYALKALRKAYIVSKCEVTHTLAERTVLARVDCPFIVPLKFSFQSPEKLYLVLAFINGGELFYHLQHEGRFSLARSRFYIAELLCALDSLHKLDVIYRDLKPENILLDYQGHIALCDFGLCKLNMKDNDKTDTFCGTPEYLAPEILLGQGYTKTVDWWTLGILLYEMMTGLPPYYDENVPVMYKKILQQPLLFPDGFDPAAKDLLIGLLSRDPSRRLGVNGTDEIRNHPFFKDISWKKLLLKGYIPPYKPIVKSEIDTANFDQEFTKEKPIDSVVDEYLSASIQKQFGGWTYIGDEQLGDSPSQGRSIS

SEQ ID NO: 44707 - protein, 132 aa, Lotus corniculatus var. japonicus
ALYQWAFAIAAAGITSGSIAERTQFVAYLIYSSFLTGLVYPIVAHWFWSSDGWGSPARTENLLFGSGVIDFAGSGVVHLVGAVAGFWGAFIEGPRMGRFDHAGKPVPLRGHSGTLVVLGTFLLWFGWYGFNP

SEQ ID NO: 44708 - protein, 484 aa, Propionibacterium acnes KPA171202
MSTRLGGSSPAAGCPAVPSRFGAAGSGAPSGTEQEQGLQRGLKNRHIQFIALGGAIGTGLFYGAAESIEQAGPAIMVCYLIGGAVIFLIMRALGEMSVEHPTSGAFSYYAYRNWSPRAGFVSGYNYWFNYIAVSMAELTVVGKYVNFWFPQIPEWLSAGAFLVLITIINLTAVRAYGEFEFWFAVIKVVAILAMIVLGVLIIATGLGGGPPTGIGNLWRHGGFFPTGISGMLCGFVVVMFSFGGVELIGITAGEADDPRRSIPRAINQVVYRILIFYIGAISVMLCLFPWNQIGKAGSPFVTIFDKIGVAGAANILNVVVLTASMSAYNSGLYSNGRMLYSLAAQHNAPGIFWKTNRLGAPWVGVLASSVVTATAVLLTYLIPGKVFLYIISIALISGVINWTMIIITNLKFRRRIGPEGVAALEFRMPGNPVTSYVVLVFLALVVVIMAMMPSYRVALVVGPVWLALLWVGYDVSCLVRRRHA

SEQ ID NO: 44709 - protein, 1796 aa, Arabidopsis thaliana
MAKQPLRNKLQYWLKWDGTPNPNVALDELVKIKELVDKGQLVTIPISYKLETSDVRLLKQEFGTNFKVLADENRIAVRFRRRRELLAMLRSRRSRSRHGAQACAVMSAVLLLASVSLLYTRLSLFSSHSPNHLRSGSSEDTVLFPDSVLVSDSDVETTGGGGRGSTTSTEDRIDEHDDAIEDDGVSNEEDENQDAEQEQEVDLNRNKAASSSGFYFDHVNGVIRRAFNKRSIDEWDYDYTGFSIDSDSSGDKSSRAAFGSDDVPLDESIRRKIVEVTSVEDALLLKSGKKVSPLRQGWGDWFDKKGDFLRRDRMFKSNIETLNPLNNPMLQDPDSVGNTGLTRGDKVVQKWRLNQIKRNPFMAKKPLSVVSEKKEPNEFRLLSSVGEIKRGERKTLDNDEKIEREEQKNVESERKHDEVTEHMYADGTKWGYYPGIEPSLSFSDFMDSFFRKEKCSMRVFMVWNSPGWMFSVRHQRGLESLLSQHRDACVVVFSETVELDFFRNSFVKDSYKVAVAMPNLDELLQDTPTHVFASVWFDWRKTKFYPTHYSELVRLAALYKYGGVYLDSDVIVLGSLSSLRNTIGMEDQVAGESLNGAVMSFEKKSPFLLECLNEYYLTYDDKCLRCNGADLLTRVAKRFLNGKNRRMNQQELNIRPSSVFFPINSQQITNYFAYPAIEDERSQQDESFKKILNESLTFHFWNSVTSSLIPEPESLVAKLISSDHESSDLSLPSSPSSSPSQCLVKSVCSLVCTSYLRQNHVVSSPHRVNLDFDANSLTHEQAITVVASLASESGSMVALCFFYWAVGFEKFRHFMRLYLVTADSLLANGNLQKAHEVMRCMLRNFSEIGRLNEAVGMVMDMQNQGLTPSSITMNCVLEIAVELGLIEYAENVFDEMSVRGVVPDSSSYKLMVIGCFRDGKIQEADRWLTGMIQRGFIPDNATCTLILTALCENGLVNRAIWYFRKMIDLGFKPNLINFTSLIDGLCKKGSIKQAFEMLEEMVRNGWKPNVYTHTALIDGLCKRGWTEKAFRLFLKLVRSDTYKPNVHTYTSMIGGYCKEDKLNRAEMLFSRMKEQGLFPNVNTYTTLINGHCKAGSFGRAYELMNLMGDEGFMPNIYTYNAAIDSLCKKSRAPEAYELLNKAFSCGLEADGVTYTILIQEQCKQNDINQALAFFCRMNKTGFEADMRLNNILIAAFCRQKKMKESERLFQLVVSLGLIPTKETYTSMISCYCKEGDIDLALKYFHNMKRHGCVPDSFTYGSLISGLCKKSMVDEACKLYEAMIDRGLSPPEVTRVTLAYEYCKRNDSANAMILLEPLDKKLWIRTVRTLVRKLCSEKKVGVAALFFQKLLEKDSSADRVTLAAFTTACSESGKNNLVTDLTERISRGQIHIVVDQETVECSRVEAMTWYAFAAFFVACSVDSKDWRVGFRLLSPSEGSWLMSYSTIISNTSFLSLASKFTTRGSRLQCTVSMARSAVDETSDSGAFQRTASTFRNFVSKDSNSQFPAESGRYHLYISYACPWASRCLSYLKIKGLDDAISFSSVKPIWGRTKETDEHMGWVFPGSDTEVPGADPDHLNGAKSVRELYEIASPNYTGKYTVPVLWDKKLKTVVNNESAEIIRMFNTEFNHIAGNPDLDLYPSHLQAKIDETNEWIYNGINNGVYRCGFAKKQGPYEEAVEQVYEALDRCEEILGKHRYICGNTLTETDIRLFVTLIRFDEVYAVHFKCNKKLIREYPNLFNYTKDIFQIPGMSSTVNMNHIKQHYYGSHPSINPFGIIPHGPNIDYTSPHDRHRFSK

SEQ ID NO: 44710 - protein, 116 aa, Triticum aestivum
MGRLFLMHLEGNAYSCKFCRTHLGLAADIISKNFHSKHGKAYLFNRVVNVTSGINEDRMMMTGLHTVSDIFCVGCGSIVGWKYEAAHEKSQRYKEGKFILERFTVSGPEGHGKYPG

SEQ ID NO: 44711 - protein, 460 aa, Bradyrhizobium sp. BTAi1
MSTAEIHYLPQARAPLVPPMPPRAPDSMGAFRRVLLMGENAIATWSQRAYEDEIVRGRFFGSSSYILNTPDTIKHVLVDNWENYVRTDGAIRVLRPVLGEGLLIAEGRAWKHQRRTLAPAFTPRAVAGLIPHMIAVTDDTVTRLKQQCDAPVDLREIMQRMTLDIAGRTMFSFEMGRHGATLRDFVFEYGARLASPHLLDIVLPLSWPTPRDIARRRFRKRWTAFVTLLMAERRAAGKLDDAPPRDLFDLMGAARDPETGAAFTDAQLADEVATMILAGHETTATALFWALYLIALDPASQSKLAQEAGAASDLGDPDRLPFTRAVIDETLRLYPPAFLIARAASGPDRLADFPVKRGDVVLISPWLLHRHEKLWRAPNAFMPERFLPGAAPPERFAYLPFGAGARVCIGAHFALVEAVLALARLVGAFKIELIDRAPVMPIGVVTTQPDRSPLFRITPR

SEQ ID NO: 44712 - protein, 184 aa, Brassica napus
  misc_feature (21)..(21): Xaa can be any naturally occurring amino acid
  misc_feature (50)..(50): Xaa can be any naturally occurring amino acid
  unsure (1)..(184): unsure at all Xaa locations
VKQENENLQILDVRNAQLMEXSRAEFMTPSAFIFLYENQLFLTFRNRNVXVWNFRGELVTSFEDHLLWHPDCNTNNIYITSDQDLIISYCKADTEDQWIEGNAGSINISNILTGKCLAKITSSSGPPKEDESSSSSSSSLGNNSKLRRNAVAEALEDITALFYDEERNEIYPGNRPGFVHVWSN

SEQ ID NO: 44713 - protein, 250 aa, Haloarcula marismortui ATCC 43049
MKAVVLAAGKGTRLQPLTDDLPKALVEVDGKPLLTHCLDELISLDADEFVIVVGYRQQQIIDYYGSSYDGVPVTYVHQEEPAGLAHALLQAEPKIEHDFMLMLGDNVFRGNLDTVVQRQQEQRVDCAFLVEEVPKNEASRYGVCVTNKYGEITDVVEKPDDPPSNLVMTGFYTFSPAIFKACSLVQPSDRGEYELSDAIDLLMDSGRTIDAVRLNGWRVDVGYPENRDAAEQRLAEETATLASGGGNISR

SEQ ID NO: 44714 - protein, 156 aa, Zea mays
  misc_feature (32)..(32): Xaa can be any naturally occurring amino acid
  unsure (1)..(156): unsure at all Xaa locations
KKKPPPRPALPFTARPWRPGGRHQKSAFNAPXWTTNSGAHGGNNDSSLTGGARGPILLEDYHLGEKLPNWERDRIPYRVVHPRGPSAKGFFQGTHDITHLTCADFLRAPGVQTPVIVRFWRGIHERRIPQTLRDPRGFTTKFYTRHGNCDLTTNNF

SEQ ID NO: 44715 - protein, 127 aa, Argyreia nervosa
  misc_feature (11)..(11): Xaa can be any naturally occurring amino acid
  unsure (1)..(127): unsure at all Xaa locations
QEWNPATDKYXGVKYDIATVMQAKPLLKEALQAAVGLPVDRDIPLIGFIGRLEEQKGSDILYAAIPKFISMNVQIVILGTGKKKFEQQIEQLEVMYPDKARGVAKFNVPLAHMITAGADFMLIPSRF

SEQ ID NO: 44716 - protein, 279 aa, Staphylococcus aureus subsp. aureus Mu50
MLNEIQILNNGYPMPSVGLGVYKISDEDMTKVVNAAIDAGYRAFDTAYFYDNEASLGRALKDNGVDREDLFITTKLWNDYQGYEKTFEYFNKSIENLQTDYLDLFLIHWPCEADGLFLETYKAMEELYEQGKVKAIGVCNFNVHHLEKLMAQSSIKPMVNQIEVHPYFNQQELQEFCDRHDIKVTAWMPLMRNRGLLDNPVIVKIAEKYHKTPAQVVLRWHLAHNRIIIPKSQTPKRIQENIDILDFNLELTEVAEIDALDRNARQGKNPDDVKIGDLK

SEQ ID NO: 44717 - protein, 140 aa, Ipomoea eriocarpa
  misc_feature (129)..(129): Xaa can be any naturally occurring amino acid
  unsure (1)..(140): unsure at all Xaa locations
TQEWTPATDKYLGVKYDIATVMQAKPLLKEALQAAVGLPVDRDIPLIGFIGRLEEQKGSDILYAAIPKFISMNVQIVILGTGKKKFEQQIEQLEVMYPDKARGVAKFNVPLAHMITAGADFMLIPSRFXPCGLIQLHAMR

SEQ ID NO: 44718 - protein, 363 aa, Vicia faba
MDRRFIFAIVLFAAVATSSTDDTNTDDFIIRQVVDNEEDHLLNAEHHFTSFKSKFSKSYSTKEEHDYRFGVFKSNLIKAKLHQKLDPTAEHGITKFSDLTASEFRRQFLGLKKRLRLPAHAQKAPILPTTNLPEDFDWREKGAVTPVKDQGSCGSCWAFSTTGALEGAHYLATGKLVSLSEQQLVDCDHVCDPEQAGSCDSGCNGGLMNNAFEYLLQSGGVVQEKDYAYTGRDGSCKFDKSKVVASVSNFSVVSLDEEQIAANLVKNGPLAVGINAAWMQTYMSGVSCPYVCAKSRLDHGVLLVGFGKGAYAPIRLKEKPYWIVKNSWGQNWGEQGYYKICRGRNVCGVDSMVSTVAAAQSNN

SEQ ID NO: 44719 - protein, 257 aa, Elymus virginicus
CELDNIMRLTGITGIVNGMDVSEWDPTKDKFLVVNYDVTTALEGKALNKEALQAEVGLPVDRKVPLVAFIGRLEEQKGPDVMIAAIPEIVKDEDVQIVLLGTGKKKFERLLKSVEEKFPGKVRAVVRFNAPLAHQMMAGADVLAVTSRFEPCGLIQLQGMRYGTPCACASTGGLVDTIVEGKTGFHMGRLSVDCNVVEPADVKKVATTLKRAIKVVGTPAYQEMVKNCMIQDLSWKGPAKNWEDVLLELGVEGSEPG

SEQ ID NO: 44720 - protein, 316 aa, Prosthecochloris aestuarii DSM 271
MGFLSKLFGKKEVELKRPQVREDENLIRTLEGHQDRVLGVRFSPDGKKLVSGSFDEKVMLWDVATGAPLHTMSGHDTWVECVDYSPNGDRVASGSTDSTVRIWDPAPGKCVHLCKGHDTAVRMVAFSPDGKTLASCSRDTLIKLWDVETGRELKTLSGHISYIECVAWSNDGKRLVSCGEETVIRIWDVASGKNTASYATGDSLSHTACFSPDDSLIALCGRDAKVKILDAASGEIKHTLEGHDDGARSVCFSPDGTKAASVANDEKVILWDVVTGRLIHTYRGHVLEVQSVDISPDGTTIVSSSDDRKIKLWKLV

SEQ ID NO: 44721 - protein, 262 aa, Arabidopsis thaliana
MGSIRGNIEEPISQSLTRQNSLYSLKLHEVQTHLGSSGKPLGSMNLDELLKTVLPPAEEGLVRQGSLTLPRDLSKKTVDEVWRDIQQDKNGNGTSTTTTHKQPTLGEITLEDLLLRAGVVSETVVPQENVVNIASNGQWVEYHHQPQQQQGFMTYPVCEMQDMVMMGGLSDTPQAPGRKRVAGEIVEKTVERRQKRMIKNRESAARSRARKQAYTHELEIKVSRLEEENEKLRRLKEVEKILPSEPPPDPKWKLRRTNSASL

SEQ ID NO: 44722 - protein, 123 aa, Zea mays
  misc_feature (68)..(68): Xaa can be any naturally occurring amino acid
  unsure (1)..(123): unsure at all Xaa locations
MMALDYYGTDPSSLADGLANPSHALIYEFFMLADCALFSTTRIEVPGSSAKDAAKQLKEQQMVMPGHXESNLQMELNRYIPTAAAFGAVCIGALTVLSDLMGAMGSGTGMLLAVTIIYQDFET

SEQ ID NO: 44723 - protein, 257 aa, Elymus wawawaiensis
CELDNIMRLTGITGIVNGMDVSEWDPTKDKFLAVNYDVTTALEGKALNKEALQAEVGLPVDRKVPLVAFIGRLEEQKGPDVMVAAIPEIVKDEDVQIVLLGTGKKKFERLLKSVEEKFPGKVRAVVRFNAPLAHQMMAGADVLAVTSRFEPCGLIQLQGMRYGTPCACASTGGLVDTIVEGKTGFHMGRLSVDCNVVEPADVKKVATTLKRAIKVVGTPAYQEMVKKCMIQDLSWKGPAKNWEDVLLELGVEGSEPG

SEQ ID NO: 44724 - protein, 256 aa, Pseudoroegneria spicata
CELDNIMRLTGITGIVNGMDVSEWDPTKDKFLAVNYDVTTALEGKALNKAVLQAEVGLPVDRKVPLVAFIGRLEEQKGPDVMIAAIPEIVKDEDVQIVLLGTGKKFERLLKSVEEKFPGKVRAVVRFNAPLAHQMMAGADVLAVTSRFEPCGLIQLQGMRYGTPCACASTGGLVDTIVEGKTGFHMGRLSVDCNVVEPADVKKVATTLKRAIKVVGTPAYQEMVKNCMIQDLSWKGPAKNWEDVLLELGVEGSEPG

SEQ ID NO: 44725 - protein, 202 aa, Synechococcus elongatus PCC 6301
MLKFLKQVGDYAKESLQAAKAIGQGLGVTFDHMQRRPVTVQYPYEKLIPSERYRGRIHYEFDKCIACEVCVRVCPINLPVVDWVYNKETKKKDLKNYSIDFGACIFCGNCVEYCPTNCLSMTEEYELATYDRHELNYDNVALGRLPYKVTDDPMVTPFREFAYLPKGEYDPHVVPSDRPRAGQRPEELVDQYKQAAAANEEN

SEQ ID NO: 44726 - protein, 257 aa, Elymus elymoides
CELDNIMRLTGITGIVNGMDVSEWDPTKDKFLAVNYDVTTALEGKALNKEALQAEVGLPVDRKVPLVAFIGRLEEQKGPDVMIAAIPEIVKDEDVQIVLLGTGKKKFERLLKSVEEKFPGKVRAVVRFNAPLAHQMMAGADMLAVTSRFEPCGLIQLQGMRYGTPCACASTGGLVDTIVEGKTGFHMGRLSVDCNVVEPADVKKVATTLKRAIKVVGTPVYHEMVKNCMIQDLSWKGPAKNWEDVLLELGVEGSEPG

SEQ ID NO: 44727 - protein, 301 aa, Triticum aestivum
SSGESSIPEEDTYTRVEEFLEPLELCYRSLCDCGDKLIADGSLLDFMRQVSTFGLCLLKLDIRQESDRHIDAVDAITTHLGIGSYRDWPEEQRQDWLVNELRGNRPLFGPDLPQSDEVADVLGTFRVIAELPADSFGAYVISMATAPSDVLAVELLQRECGVKTPLRVVPLFEKLADLQQARATMELLFSIDWYKERINGKQEIMIGYSDSGKDAGRLSAAWYLYKAPGGDPWTWPEHPRRESSPSSHGPGPAPGGARWAGPNPPCPSLSEAGPKTVKGFGSGGTGPGARGIHKFPSGEEN

SEQ ID NO: 44728 - protein, 203 aa, Prosthecochloris aestuarii DSM 271
MLQQNDWVYTETLKEHFMNPKNILQGEDTDAFDGVGMEGNLSCGDQMMVVIKVDRDKEIITDCQWKTYGCASAIASTSVLSEMVKGMTLDQAFDVSPKDVTKELGGLPENKIHCSVLGDKALRAAINNYFERNGMADRMRKEQAKIICQCMNVTDAEIEEAVLEGARSFYELQEHTKIGTVCGQCKESAEGLIEQYCHLHFDH

SEQ ID NO: 44729 - protein, 415 aa, Listeria monocytogenes str. 1/2a F6854
MTELIKKGSAAKEAAQFLAQASTKQKNAALLNLSNDLLTHTASLLEENNKDIIRAREKGTPETMIDRLRLTEERIKEISEAVKQVVALKDPIGEVTNMWKNEAELTIGKTRVPLGVIGIIYESRPNVTVDASVLCFKTGNAVILRGGSDAIDSNKALMSVIQDSLEASGFPRSSVQLIEDTSRETARDMMRLNRFLDVLIPRGGAKLIQTVLENATVPVIETGTGNCHIYVDKAAEKQMAIDILVNAKCSRPSVCNAAETLLIHRDVADAFLPEMETALKEYNVELRADERAREILKDSKAATESDWEDEFLDFILAIKVVDSVDEAINHINKYGTKHSEAIISNDYATGQAFHQKVDAAAVYINASTRFTDGFAMGFGAEIGISTQKLHARGPMGLTELTSTKYIIFGDGQIRN

SEQ ID NO: 44730 - protein, 582 aa, Bacillus clausii KSM-K16
METFRRLATFYLPDKRFFVFSLIALFFVTAITVVYPVVLQIAIDVGISGGEYGIIPYLAIGLILIMAVKGIATYINQYFGDLFGVRAVYRLRKALYKKLQFLPFTYYDNAKTGDLMSRLTADVEAFRFFLSFGCAQLVNFVLLVGFSLIVMFYYSVPLTIVTMVTLPFLSVVVYKFDKRVHPGFRRVRKSLASLNTKVQENVSGMHTVKALAQEDTEKNRFHKQNDDYRAKNVEVANVWGTYFPLMEFIGNTSAVLLLGFGGYLAVQGQLTAGELTAFFSLVWFIIGPIMNLGFIINTFSQSKASGERLLEILDEGERKNGVEQTSSYTKLEGDVVFKNVELRYNNKAKNALTDISFHAPKGSTIGLVGATGSGKSSIIQLIMRFYEKTAGDIFIDGKPVEEYDVKELRSNIGLVLQQTFLFSSSIRDNLAYGNPDVPMEEIVAAAKRADAHDFISSLPDGYDTILGERGLGLSGGQKQRIAIARAMILNPSILILDDATSAVDMQTEMKIQQALKEIMEGRTTFVIAHRISSVKHCDKILVLEDGSIVQDGDHESLLQEEGLYRRIYDIQNQDQQYVLQQA

SEQ ID NO: 44731 - protein, 339 aa, Streptococcus pneumoniae R6
MQEKILVTGGAGFIGTHTVIELIQAGHQVVVVDNLVNSNRKSLEVVERITGVEIPFYEADIRDTDTLRDIFKQEEPTGVIHFAGLKAVGESTRIPLAYYDNNIAGTVSLLKAMEENNCKNIIFSSSATVYGDPHTVPILEDFPLSVTNPYGRTKLMLEEILTDIYKADSEWNVVLLRYFNPIGAHESGDLGENPNGIPNNLLPYVTQVAVGKLEQVQVFGDDYDTEDGTGVRDYIHVVDLAKGHVAALKKIQKGSGLNVYNLGTGKGYSVLEIIQNMEKAVGCPIPYRIVERRPGDIAACYSDPAKAKAELGWEAELDITQMCEDAWRWQSKHPNGFED

SEQ ID NO: 44732 - protein, 474 aa, Synechococcus elongatus PCC 6301
AAPILFWHRRDLRLSDNIGLAAARAQSAQLIGLFCLDPQILQSADMAPARVAYLQGCLQELQQRYQQAGSRLLLLQGDPQHLIPQLAQQLQAEAVYWNQDIEPYGRDRDGQVAAALKTAGIRAVQLWDQLLHSPDQILSGSGNPYSVYGPFWKNWQAQPKPTPVATPTELVDLSPEQLTAIAPLLLSELPTLKQLGFDWDGGFPVEPGETAAIARLQEFCDRAIADYDPQRNFPAEAGTSGLSPALKFGAIGIRQAWQAASAAHALSRSDEARNSIRVWQQELAWREFYQHALYHFPSLADGPYRSLWQQFPWENREALFTAWTQAQTGYPIVDAAMRQLTETGWMHNRCRMIVASFLTKDLIIDWRRGEQFFMQHLVDGDLAANNGGWQWSASSGMDPKPLRIFNPASQAKKFDATATYIKRWLPELRHVHPKDLISGEITPIERRGYPAPIVNHNLRQKQFKALYNQLKAAI

SEQ ID NO: 44733 - protein, 400 aa, Bacillus clausii KSM-K16
MKYAFAQRVRHLKSSAVRDILKVVNRGDVISFAGGLPDDGLFPLKAIEEAFSRVFASGNKALQYGETEGYLPLREVILERMEKKGITGLTADEMLLTTGSQQAIDLFSRVMIGPGDVIFTEEPTYLAALQVFQSYEATIIPVKCDADGMMMDDLVRKIKEYKPKVIYVVPTFSNPTGRVWTLERRKELVGLARKHHVLIFEDDPYGDIQFTPGGYTPIAALDDGSHVLYTSTFSKTAVPALRTGWITGPYQIIRMMAQAKQANDLHSNSIGHQALYHLCRNFDFDGHIHNISELYGHRKNVMVDCLKEAKERGSIQFIEPEGGMFLWVEAEPHVNTEALLPRAVEKGMAYVPGRPFYAGAPQLNTLRLNFTHATDAEIEKGMGIMLGIFEEAKEKSLLLN

SEQ ID NO: 44734 - protein, 446 aa, Oryza sativa
MAARGALRRVGKYEVGRTIGEGTFAKVKFAQNTESGESVAMKVVDRSSILKHKMADQIKREISIMKLVRHPNVVRLHEVLASRKKIFIILEFITGGELFDKIIRHGRLNEADARRYFQQLIDGVDFCHSKGVYHRDLKPENLLLDSQGNLKISDFGLSAWPAQGGALLRTTCGTPNYVAPEVLSHKGYDGALADTWSCGVILYVLLAGYLPFDEVDLTTLYGKIESAEYSFPAWFPNGAKSLIHRILDPNPDKRIRIEEIRNDEWFKKNYEPTREIESEEVNLDDVNAAFDDPEEDADHTLDDEAGPLTLNAFDLIILSQGLNLAALFDRRQDYDKLQNRFLSRKPAKVIMSSMEVVAQSMGYKTHIRNYKMRVEGLNANKTSHLAVMLEIFEVAPSIFMIELQRAAGDTSDYNKFINNYCSKLDDIIWNFPIEKSKSRISRLSKR

SEQ ID NO: 44735 - protein, 256 aa, Triticum aestivum
  misc_feature (32)..(32): Xaa can be any naturally occurring amino acid
  misc_feature (102)..(102): Xaa can be any naturally occurring amino acid
  unsure (1)..(256): unsure at all Xaa locations
MQRSGAVPPGCGGGSGTKLLATDTERTIVLGXTKRLPKVLPVEQDLWTGWKYLEKPREQTDNNCSRYRKALKANPVLGKRMINGCLYSLGDWIAQCYEGKPXIFEFDRTRMFRSGLVGFTLHGSLSHYYYHFCESLFPFKDWWAVPVKVAFDQTAWSALWNSIYFVALGFLRWESPSTIYKELKATFFPMLTAGWKLWPFAHLITYGVVPIEQRLLWVDCVELIWVTILSTYSNEKSEARILDDSSTTDPQDNNFR

SEQ ID NO: 44736 - protein, 353 aa, Pseudomonas putida
MYPRNTWYVACTPDEIADKPLGRQICGEKIVFYRGHENRVAAVEDFCRTRAPLSLGYVENGNLVCGYHGLVMGCDGKTVEMPGQRVRGFPCNKTFAVVERYGFIWVWPGDQAQADPSLIPHLEWAVNDDWAYGGGLFHIGCDYRLMIDNLMDLTHETYVHASSIGQKEIDEAPPYHRHRREVLSARHMENIMAPPFWRMALRGNGLADDVPVERWQICRFTPPSHVLIEVGVAHAGKGGYHAEQHKASSIVVWNFITPETDTSIWYFWVLACNFAAQDQALTANIREGQGKIFSEDLEMLERQQQNLLAYPQRNLLKLNIDAGGVQSRKILERLIANERMPQAELIATSASPA

SEQ ID NO: 44737 - protein, 546 aa, Oryza sativa (japonica cultivar-group)
MRAVLEEWIKQRESWKPFWVRGINMVGYSINGLHPVLFSSQADGDDDGIRAAPPPPPAEPAVPPRHRGHLHLFKKPLHRALSGLAATHGPVLLLHFGSRAVLHVTDPAVAEECLTDHDVTFANRPRLPSSCHLSNGYTTLGSSSYGPNWRNLRRIATVEVFSAHRLLRSADVRGGEVPHMARWLYLAAPAAGPSEPARADVKARAFELVLNVVARMVAGKQYYGGEGDAEAETEEAARFREMVREYFAMHGASNLQDFVLLLGLVDIGGAKRRAVKLSRERNTWAQRLIDEHRATATAAAATEARTMVGDLLKMQASEPEAYSDKVITALCLTGTDTSSSTIEWGMALLLNHPAAMAKARAEIDRFVGTGRVVEEADLPNLPYLQCIIRENLRLYPVGPLLAPHESSADCSVSVAGGGRYAVPAGTMLLVNVHAMHRDARFWGPDPESFSPERFEGGRSEGKWMLPFGMGRRRCPGEGLAVKVVGLALATLVQCFEWRRVGDEEVDMTEGSGLTMPKAVPLEALYWPRPEMVPALSGIFFIYNFFY

SEQ ID NO: 44738 - protein, 491 aa, SYNECHOCOCCUS SP. WH 8102
MSSLQIVWFKRDLRVDDHRPLLEAAARGPVLPLYVVEPELWQQPDASERQWLFCRESLLELRQALAELGQPLVVRSGDVVQVLERARRQFGVDGLWSHEETGNGWTYQRDKRVGAWARAHGIQWGEIRQFGVTRRMRSRNGWAKRWEEQMAEPITPAPAGVPALEEIDPGVIPERPCPELLPDDCSQRQTGGRSIGLGELRDFLQHRAPCYQRAMSSPKSAFTGCSRLSAYLAWGCLSMREVLQTSRHHSGRGVSSFESRLHWHCHFIQKLEDQPEIEFSDFHPYMRGIRETNAERLAAWTEGRTGVPFVDACMRALKAHGWINFRMRAMLMSFASYNLWLPWRDSGLHLARQFVDYEPGIHWSQCQMQSGSTSINTIRIYNPIKQGMDHDPQGVFIRQWCPELKDVSTIHIHEPWMLGGGRSAPIVDVTTSMQLAKDRIWEIRRSAGFDRHADAIQRMHGSRKAGLKPTASRRRQKRSNDNGVRQLSLEL

SEQ ID NO: 44739 - protein, 350 aa, Triticum aestivum
  misc_feature (253)..(253): Xaa can be any naturally occurring amino acid
  misc_feature (270)..(270): Xaa can be any naturally occurring amino acid
  misc_feature (292)..(292): Xaa can be any naturally occurring amino acid
  unsure (1)..(350): unsure at all Xaa locations
MASLTLPPAPPNPRQDAIDLHKAFKGFGCDSTTVSNILAHRDSMQRGYIQQEYKTMYSEELSRRISSELSGNHKKALSLWILDPAGRDATVLKEALSAESLDLKAATDIICSRTPSQLQIMKQTYYAKFGTYLEHDISQQTSGDHQKILLAYVGIPRYEGPEVDPTIVTHDAKDLYKAGEKKLGTDEKTFIRIFTERSWAHMAAVASAYRHMYDRSLQKVVKNETSGNFEVALLTILRCAENPAKYFAKVLRXSMKGLGTDDKTLVRVVXVTRTEIDMQYIKAEYYKKYKNXLADAIHSETQAVSDFLLPCWHVFPQRTPALLHYLPKANPVTWQIILSHVSDLRYSLPG

SEQ ID NO: 44740 - protein, 120 aa, Brassica napus
  misc_feature (30)..(30): Xaa can be any naturally occurring amino acid
  unsure (1)..(120): unsure at all Xaa locations
DARVSFEGGFAHVLAATQSPEEAGKKWFQXTSDAVREFLWVFEDTKNTNIENILSLSGDHRYRMNYMDFVQSHVENNADVTPSCAPVSESRASNFGLLKIDRRVRLTHFSEKPTGVDPKS

SEQ ID NO: 44741 - protein, 390 aa, SYNECHOCOCCUS SP. WH 8102
MATLLDQLSAMTVVVADTGDLEAIRKFTPRDATTNPSLILAAAQIPAYQSLIDEALRSSRKLIGDAAPVEDVVHEALDEISVIFGKEILKIVPRRVSTEVDARLSYDTDATIEKGRKLIRLYNDAGISNDRVLIKIASTWEGIKAAEVLEKEGIHCNLTLLFGFGQAVACAEAGVTLVSPFVGRILDWYKADTGRDSYPGPEDPGVISVTRIFNYYKTYGYKTEVMGASFRNLDEITELAGCDLLTISPKLLDQLRESDASLSQKLDATNPSGGEEQIHVDRERFDAMMAADRMATDKLGEGIKGFSKAIETLEHQLAHRLAELEGGEAFRHAVQEIFMLNDMNGDGCITRDEWLGSDAVFDALDLDHDGRLTPEEVRKGFGAALTLTTA

SEQ ID NO: 44742 - protein, 121 aa, Arabidopsis thaliana
NGFAQCATFQVTIVQSSTVFNDPPAILAKAEKFFGGAAGRGPNLVLFPGGLLGGYPGGFRFGLPVGVNTKKGLIRFRRSQAFVFNVPGLEVPGWVDLVGKNHVSLVLGAIEKEGFPFYGTV

SEQ ID NO: 44743 - protein, 147 aa, Brassica napus
MESDRRWSLAGKAALVTGGTRGIGRAVVEELARLGATVHTCSRNQEELKACLDDWKSNGLVVSGSVCDASDRDQREKLIQEVSSAFSGKLNILVNNVGTSVRKPTMEYTSEDYVKIMSTNLESAFHISQIAHPLLKASGGGSIVFIF

SEQ ID NO: 44744 - protein, 371 aa, Zea mays
MAHRVLLLLSLASAAAVAAAVDAEDPLIRQVVPGGDDNDLELNAESHFLSFVQRFGKSYKDADEHAYRLSVFKANLRRARRHQLLDPSAEHGVTKFSDLTPAEFRRTYLGLRKSRRALLRELGESAHEAPVLPTDGLPDDFDWRDHGAVGPVKNQGSCGSCWSFSASGALEGAHYLATGKLEVLSEQQFVDCDHECDSSEPDSCDSGCNGGLMTTAFSYLQKAGGLESEKDYPYTGSDGKCKFDKSKIVASVQNFSVVSVDEAQISANLIKHGPLAIGINAAYMQTYIGGVSCPYICGRHLDHGVLLVGYGASGFAPIRLKDKPYWIIKNSWGENWGENGYYKICRGSNVRNKCGVDSMVSTVSAVHASKE

SEQ ID NO: 44745 - protein, 257 aa, Elymus lanceolatus
CELDNIMRLTGITGIVNGMDVSEWDPTKDKFLAVNYDVTTALEGKALNKEALQAKVGLPVDRKVPLVAFIGRLEEQKGPDVMVAAIPEIVKDEDVQIVLLGTGKKKFERLLKSVEEKFPGKVRAVVRFNAPLAHQIMAGADVLAVTSRFEPCGLIQLQGMRYGTPCACASTGGLVDTILEGKIGFHMGRLSVDCNVVEPADVKKVATTLKRAIKVVGTPAYHEMVKNCMIQDLSWKGPAKNWEDVLLELGVEGSEPG

SEQ ID NO: 44746 - protein, 257 aa, Elymus virginicus
CELDNIMRLTGITGIVNGMDVSEWDPTKDKFLAVNYDVTTALEGKALNKEALQAEVGLPVDRKVPLVAFIGRLEEQKGPDVMIAAIPEIVKDEDVQIVLLGTGKKKFERLLKSVEEKFPGKVRAVVRFNAPLAHQMMAGADVLAVTSRFEPCGLIQLQGMRYGTPCACASTGGLVDTIVEGKTGFHMGRLSVDCNVVEPADVKKVATTLKRAIKVVGTPAYHEMVKNCMIQDLSWKGPAKNWEDVLLELGVEGSEPG

SEQ ID NO: 44747 - protein, 308 aa, Yersinia pseudotuberculosis IP 32953
METGKLVVLGSINADHILNIEQFPRPGETVIGQQYNVAFGGKGANQAVAAGRSGADIAFIACVGDDDIGERVRQQLTADKIDTQPIEAIKGATTGVALIFVNSDGENVIGINAGANSAVTPEYLRRYQQQVIDADALLMQLESPLDTVIAAAKLAKQHQTQVILNPAPARKLPDELLTLVDMITPNETEAERLTGIHIEQDDDAAKAAQILHDKGIATVIITLGSRGVWLSEQGKGKLVAGFKVNAVDTIAAGDTFNGALLTALLEGQSMDAAVRFAHAAAAIAVTRPGAQPSIPWRAEIDSFLQERV

SEQ ID NO: 44748 - protein, 141 aa, Prosthecochloris aestuarii DSM 271
MERTLTILKPDCVRKQLIGAVIDKIERAGFRVVAMKKTKLTAQTAGEFYAVHSQRPFYGELVEFMSSGPCVPMILEKENAVADFRTLIGATDPAEAAEGTIRNLFADSKGENIIHGSDSAENAQIEAGFFFSTEEAVRVNN

SEQ ID NO: 44749 - protein, 257 aa, Elymus wawawaiensis
CELDNIMRLTGITGIVNGMDVSEWDPTKDKFLAVNYDVTTALEGKALNKEALQAEVGLPVDRKVPLVAFIGRLEEQKGPDVMIAAIPEIVKDEDVQIVLLGTGKKKFERLLKSVEERFPGKVRAVVRFNAPLAHQMMAGADVLAVTSRFEPCGLIQLQGMRYGTPCACASTGGLVDTIVEGKTGFHMGRLSVDCNVVEPADVKKVATTLKRAIKVVGTPAYHEMVKNCMIQDLSWKGPAKNWEDVLLELGVEGSEPG

SEQ ID NO: 44750 - protein, 587 aa, Cryptococcus neoformans var. neoformans JEC21
MLSADQRQRAPFAHKSSCANLTATQPSALRSPFPPQSHWPTPPSAEGHQLQLTSDRSKWAQYPSPRKISNETCQAGFSDHPYAFGGIGATYSLDTPTSRRHSLPSLFNPNTHRRAFTFPSMSLPNPATVRFISLCFLWYACSAISNNTGKVILNHFKYPVTLTIVQFFFVAFYCAISSQKMLGWTGRLRQPTKNILKGTLPLAAFQVGGHIFGSMAISRVPVSTVHTIKALSPLFTVMAYALLFGVSYSPATYLSLLPLTLGVMLACSFDISFSNIFGLVCALGSTIVFVSQNIFFKKIMPTTSTNEVNSSSKLDKINLLYFSSSMAFILMIPLWIYSDARRLIDLWINPAASESGTSVLFYFFLNGTVHFAQSIIAFALLASTSPVTYSIASLVKRIAVICLAIIWFKQPVHTVQALGIVLTGAGLWMYNNAKRDVDRGEIKMRHVEALREGVLPSTKMDQCILEGSGIELSYKSAHNSPKPTYPNNYIDLPSSTTTAVNKTTFQVPPILDHTSHIEAPYPSPPASISSSTPADITYLGISKGRQHWLSGEGERFRPPVLNSIRSSVMEEARETGVNEGMAAVVTT

SEQ ID NO: 44751 - protein, 257 aa, Elymus wawawaiensis
CELDNIMRLTGITGIVNGMDVSEWDPTKDKFLAVNYDVTTASEGKALNKEALQAEVGLPVDRKVPLVAFIGRLEEQKGPDVMIAAIPEIVKDEDVQIVLLGTGKKKFERLLKSVEEKFPGKVRAVVRFNAPLAHQMMAGADVLAVTSRFEPCGLIQLQGMRYGTPCAYASTGGLVDTIVEGKTGFHMGRLSVDCNVVEPADVKKVVTTLKRAIKVVGTPAYHEMVKNCMIQDLSWKGPAKNWEDVLLELGVEGSEPG

SEQ ID NO: 44752 - protein, 156 aa, Candida glabrata CBS138
MPIDQEKLAKLQKMSAGNKVGGTRRKQAKKTGSGSAGNKDDTKLHNQLAKLHAVTIDNVAEANFFKDDGKVLHFNKVGVQVAPQHNTSVFYGMAQEKNLQELFPGIISQLGGEAIQALSQLAAQMEKAQANENAGEAKDEAIPELVEGQSFDAEVE

SEQ ID NO: 44753 - protein, 257 aa, Pseudoroegneria spicata
CELDNIMRLTGITGIVNGMDVSEWDPTKDRFLAVNYDVTTALEGKALNKEALQAEVGLPVDRKVPLVAFIGRLEEQKGPDVMIAAIPEIVKDEDVQIILLGTGKKKFERLLKSVEEKFPGKVRAVVRFNAPLAHQMMAGADMLAVTSRFEPCGLIQLQGMRYGTPCACASTGGLVDTIVEGKTGFHMGRLSVDCNVVEPADVKKVATTLKRAIKVVGTPAYHEMVKTCMIQDLSWKGPAKNWEDVLLELGVEGSEPG

SEQ ID NO: 44754 - protein, 808 aa, Thermosynechococcus elongatus BP-1
MTCVLLKAVVESDERADLRQFSRILQLGEKRYLLRNDILDAFADYCRDQERPVPPPSESRLSKLVFYTQEIIVDNESLCWIVRPRIAQQEVCRLLVEDLTIVPMTIPELLDLRDRLVNHYHPNEGDVFEIDVQPFYDYSPIIRDAKNIGKGVEFLNRYLSSKLFQDPRQWQQNLFNFLRIHRYNGYQLLINERIRSPQHLSEQVKQALVVLSDRPPTEAYSEFRFELQNLGFEPGWGNTVARVRDTLEILDQLLDSPDHQVLEAFVSRIPMLFRIALISPHGWFGQEGVLGRPDTGGQVVYILDQVKSLEKQMREDLELAGLGVLEAQPKIIVLTRLIPNAEGTLCNQRLEKIYGTNDAWILRVPFREFNPKVTQNWISRFEIWPYLETFAIDAERELRAEFGHVPDLIIGNYSDGNLVAFLLARRLKVTQCNIAHALEKSKYLFSNLYWQDLEDKYHFSLQFTADLIAMNAANFIISSTYQEIVGTPDSIGQYESYQSFTMPDLYHVVNGIELFSPKFNVVPPGVNEQVYFPYYHYTERLEGDRQRLEELLFTLEDPQQIYGYLEAPEKRPLFSMARLDRIKNLTGLAEAFGRSKALQERCNLILVAGKLRTADSSDREEIAEIEKLYQIIHQYNLHGKIRWLGIRLPKADSGEIYRIIADRQGIFVQPALFEAFGLTILEAMISGLPTFGTRFGGPLEIIQDGVNGFYINPTHLEEMAETIVRFLEACDRDPQEWQRISKAGIERVYSTYTWKIHCTRLLSLAKIYGFWNFSSQENREDMMRYMEALFHLLYKPRAQALLAEHLQR

SEQ ID NO: 44755 - protein, 104 aa, Brassica napus
  misc_feature (14)..(14): Xaa can be any naturally occurring amino acid
  misc_feature (35)..(35): Xaa can be any naturally occurring amino acid
  unsure (1)..(104): unsure at all Xaa locations
RIIYIDIGYYHGNXVQEAFDNTGRVITVSFQKLYXMHHKEYGLDDASFSNLFVPVIHKAVEVYRPEALVLHSRVYSLTGDALAKFNLFIKGHTACIVRSINAHL

SEQ ID NO: 44756 - protein, 214 aa, Thermosynechococcus elongatus BP-1
MTFEASPAQSATILLVDDDPNLVLLVKDYLEMQGYRVLTAAHGNEGLAMLQQQTPDLVICDVMMPQMDGYSFVSAVRQQTHLSWLPVLFLSAKGQTHDRIKGLQTGGDVYLVKPFEPEELLAQIQALLKQTARLREAQGRQALPGPTPPPGIELTPTETRILQYVARGMSNREIAAELHVSQRTVESHVSNMLGKTGCHNRTELARWAIDYHYV

SEQ ID NO: 44757 - protein, 316 aa, Yarrowia lipolytica CLIB122
MSFKLASGKSMPKVGFGLWKVPRDKTADTVYGAIKNGYRLFDGAFDYQNEREAGEGIRRAIKDGLVKREDIFITTKLWNTFHSKEHALQIAKEQNEWWGLDYIDLYLIHFPIPMQYIPISEKEWAGWTNATDSGPNPLAKIPTRETWEALEELVDTGIAKSIGVSNFTAQNIYDVQTYNKHPISALQIEHHPYLVQPQLTQLAKDNNIQVTAYSSFGPASFVEIGMDQKVPPLFENETITKIAKAHNKTPSQVLLRWATQRGIAVIPKSNNVERQTQNLESLDFDLTEAEIKEISNLNKNLRFNDPGVYANLPIFA

SEQ ID NO: 44758 - protein, 491 aa, Malus x domestica
MTSILMGYDIGVMSGASIYIEKDLKVTDTQIEIMIGVIEIYSLIGSAMAGKTSDWVGRRYTIVISGAIFFIGAILMGFSTNYTFLMCGRFVAGIGVGYALTIAPVYSAEVSPTSSRGFLTSFPEVFVNIGILLGYLSNYAFSFCPLDLGWRLMLGVGAIPSVGLAVGVLAMPESPRWLVMQGRLGEAKRVLDRTSDSKEESMLRLADIKEAAGIPEECNDDIVQVSGHSHGEGVWKELLVHPTPTVRHILIAAIGFHFFQQASGIDALVLYSPRVFAKAGITSTNQLLLCTVGVGLSKTVFTLVATFFLDRVGRRPLLLTSMAGMVGALVCLGTSLTIVDQHEGVRMTWAVILCLCCVLAYVGFFSSGIGPIAWVYSSEIFPLRLRAQGCGMGVAVNRLMSGILSMTFISLYKAITMGGTFFLYAAIGTVGWIFFFTMLPETQGRTLEDMEVLFGKFHKWRKANKLLEKKKRVAHGDIGTSDPDNRAHLLA

SEQ ID NO: 44759 - protein, 270 aa, Halobacterium sp. NRC-1
MWRAAVAPGMSAPTVAACQIAVADLDPAANLATIGERLAAVDSAGVDVAVFPEYALTGFVADDRVYAAALDRDGAILDRLAAAAAEHDVAVLAGYIEDAPDSDAYHNTVVYVTPGGERTHYRKRHLWAGEQDALTPGTEPVIVDTPVGRTGLVTCYDLNFVAVSAAFTRERVDALFVVGAWPGTYSENWRLLLRARALDGVRWVVGCGRTGRRTIPDAPVVEYAGRSAVVRPDGVVCQALNRGQRTLTATLDPDVLAEQRAFIPVLPGEA

SEQ ID NO: 44760 - protein, 347 aa, Triticum aestivum
MADHLQVQQKQLVLPPGFRFHPTDEEIIKFYVVPKVLDEAFVAAAIEDVNLNKYEPWELPEKAKMGEKEWYFYSRKDRKYPTGIRTNRATEAGYWKATGKDKEIFHPPFTLIGMKKTLVFYKGRAPRGEKTNWIMHEYRLESSKKLTSNPSITTRTVTRTNMASKEQWVVCRIFHKSTGLKKMVTPSYDMPMYTGAEHQQGFVDLDTLPPLMEYDMSSTCAHAPLFPGASSYKSHDVGTGSSMMGSVALPMMNYHYIGNNHHHQMMVNPTLPLSLYQHQQQHQQMMMHMGADQGLMVGAQPGSGLASMLSQEDAVAGLRNNYPGNTAATAVGETSLMNMGMDDIWQN

SEQ ID NO: 44761 - protein, 1168 aa, Medicago truncatula
MSSNPPPPENDPPPATSSPVSAKSRTLQKFPPIVNRRTATLSSNNVDDECKEENNKNKNHDNEEESEEEEEEEEEEEEDVLVTEREFERAECSYSSSILQASSLGLNQIRTRFSSPLRHSSSAGAPSFPIKDVVNNVAKFRSRVSHPKDLGEKVHWNQSKSLKARSQLLILEGNHAAYAKDFQSPRYQEILRLTSGKKRKNRPDIKSFSHELNSKGVRPFPVWKNRAFGQEIMEEIRAKFEKLKEEVDSDLGGFAGDLVGTLEKIPGSHPEWKEGLEDLLVVARQCAKMTAAEFWINCETIVQKLDDKRQDIPVGILKQAHTRLLFILSRCTRLVQFQKESVKEQDHILGLHQLSDLGVYSEQIMKAEESCGFPPSDHEMAEKLIKKSHGKEQDKPITKQSQADQHASVVIDNVEVTTASTDSTPGSSYKMASWRKLPSAAEKNRVGQDAVKDENAENWDTLSCHPDQHSQPSSRTRRPSWGYWGDQQNLLHDDSMICRICEVEIPILHVEEHSRICTIADKCDLKGLTVNERLERVAETIEMLLDSLTPTSSLHEEFNELSLERNNMSSRCSEDMLDLAPDNTFVADDLNLSREISCEAHSLKPDHGAKISSPESLTPRSPLITPRTSQIEMLLSVSGRRPISELESYDQINKLVEIARAVANANSCDESAFQDIVDCVEDLRCVIQNRKEDALIVDTFGRRIEKLLQEKYLTLCEQIHDERAESSNSMADEESSVDDDTIRSLRASPINGFSKDRTSIEDFEIIKPISRGAFGRVFLAQKRSTGDLFAIKVLKKADMIRKNAVEGILAERDILISVRNPFVVRFYYSFTCKENLYLVMEYLNGGDLYSMLRNLGCLDEDMARVYIAEVVLALEYLHSQSIVHRDLKPDNLLIGQDGHIKLTDFGLSKVGLINSTEDLSAPASFTNGFLVDDEPKPRHVSKREARQQQSIVGTPDYLAPEILLGMGHGTTADWWSVGVILYELLVGIPPFNADHAQQIFDNIINRDIQWPKHPEEISFEAYDLMNKLLIENPVQRLGVTGATEVKRHAFFKDVNWDTLARQKAMFIPSAEAHDTSYFMSRYIWNVEDDEHCAGGSDFYDHSETSSSGSGSDSLDEDGDECASLTEFGNSALGVQYSFSNFSFKNISQLVSINMMHISKETPDDSNPS

SEQ ID NO: 44762 - protein, 546 aa, Schizosaccharomyces pombe
MAGLDNAVMVRDDQGNPFILVRDQEKKRRLHGIDAVKSHILATKTVANIVRTSLGPRGLDKILISPDGEITVTNDGATILDQMEVEHQIAKLLVQLSKSQDDEIGDGTTGVVVLAGALLEQAEALIDKGIHPIRIADGYEKACQVAVKHLDAISDVVDFSPENTTNLFRSAKTSLGSKVVSKAHDHFANIAVDAVLSVADLQRKDVDFELIKVDGKVGGSVDDTKLVKGVVVDKDMSHPQMPHRIENAKIAILTCPFEPPKPKTKHKLDITSVSEFEALQAYEKEKFQEMIKHVKDAGANLVICQWGFDDEANHLLLQNNLPAVRWVGGPEIELIAIATNGRIVPRFEDLSSDKLGSAGIVREVSFGTTRDKILVIEKCANSRAVTVFVRGSNKMIVDEAKRALHDALCVVRNLIRDNRVVYGGGAAEISCSLAVTKEAEKIPGIDQYSMGAFADALDTIPLALAENSGLSSIEALTAVKARHVKENKAYLGIDCLQTGSNDMRKQFVIDPLIGKKQQLLLATQLCRMVLKVNDIIVAGSKDDDYN

SEQ ID NO: 44763 - protein, 366 aa, Arabidopsis thaliana
MAAASLHTSISPRSFLPLSKPSLKPHRSQILLRNKQRNCVSCALIRDEIDLIPVQSRDRTDHEEGSVVVMSTETAVDGNESVVVGFSAATSEGQLSLEGFPSSSSSGADLGDEKRRENEEMEKMIDRTINATIVLAAGSYAITKLLTIDHDYWHGWTLFEILRYAPQHNWIAYEEALKQNPVLAKMVISGVVYSVGDWIAQCYEGKPLFEIDRARTLRSGLVGFTLHGSLSHFYYQFCEELFPFQDWWVVPVKVAFDQTVWSAIWNSIYFTVLGFLRFESPISIFKELKATFLPMLTAGWKLWPFAHLITYGLVPVEQRLLWVDCVELIWVTILSTYSNEKSEARISESVIETSSSSTTTIDPSKE

SEQ ID NO: 44764 - protein, 219 aa, Triticum aestivum
AYLGDTIEQVCTKKQAGTGPEFPGYRRPTRPQGFASGSLDEDASSVRLFVKRGLEVFVAQSYSKNLGLYAERIGAINVICSAPEVADRVKSQLKRLARPMYSNPPIHGAKIVANVVGDPTMFGEWKEEMEQMAGRIKNVRQKLYDSLTEKDQSGKDWSFILRQIGMFSFTGLNRPQSDNMTDKWHIYMTKDGRISLAGLNLAKCEYLADAIIDSFHNVN

SEQ ID NO: 44765 - protein, 299 aa, Zea mays
MGRPPCCDKMGVKKGPWTPEEDLMLVSYVQEHGPGNWRAVPTNTGLMRCSKSCRLRWTNYLRPGIKRGNFTEQEEKLIVHLQALLGNRWAAIASYLPKRTDNDIKNYWNTHLKKKLKNMQGGEGGAGGKRPAVPKGQWERRLQTDIHTARQALRDALSLEPSATPLAKVEPLPTAPGCATYASSADNIARLLEGWLRPGSGKGPEASGSTSTTATTRQRPQCSGEGTASASASHSGGAAANTAAQTPECSTETSKMAGSSVGAGSAPAFSMLERWLLDDGMGHAEVGLMTDVVPLGDPQ

SEQ ID NO: 44766 - protein, 492 aa, Xanthomonas axonopodis pv. citri str. 306
MTAKPRLDFWQIWNMCFGFLGIQFGFALQNANASRIFQTLGAQVDDVPGLWIAAPLTGLVVQPVIGYLSDRTWTPWGRRRPYFMVGAVFTTLALLVMPNAPMLWVAAGTLWVLDASINISMEPFRALVGDQLPPSQRPTGYAMQSFFIGIGAIVASFLPWLLTHWGIANTAPPGQLPDSVRYAFYLGAAVLFLSITWTVLRTREYSPEQLAGFDDAHPPLAQAVSTGMVPTSMASVLWCGLGVLLAAAIAWQHGDRMLYVLAGLCFAYGVLLALARMLPATSMLVAIVQDVRSMPMTMRRLAWVQFFSWFALFAMWIYTTAAVTQVHFGASDTASAAYNDGANWVGVLFGAYNGFAALAAVVIPLLVRAIGLRWSHLCNLWLGAAGLLSMLVIRDPQWLLLSMLGVGFAWASILSLPYALLSDSVPAPKMGVYMGIFNFFIVIPQLVAASALGFVLRVWLGGQPIYALAIGGLSLLIAGVCVVRVPVASGGQ

SEQ ID NO: 44767 - protein, 233 aa, Zea mays
SDSDHCHSARYYLKDAVLDGGIPFNKAYGMTAFEYHGTDSRFNRVFNEGMKNHSVIITKKLLDFYTGFEGVSTLVDVGGGVGATLHAITSRHPHISGVNFDLPHVISEAPPFPGVRHVGGDMFASVPAGDAILMKWILHDWSDAHCATLLKNCYDALPENGKVIVVECVLPVNTEATPKAQGVFHVDMIMLAHNPGGKERYEREFRELAKGAGFSGFKATYIYANAWAIEFIK

SEQ ID NO: 44768 - protein, 558 aa, Bacteroides fragilis YCH46
MCGIAGIFNIKIQSRELRNKALRMARKIRHRGPDWSGMYCGGSAILAHERLSIVDPQSGGQPLYSSDRKQVLAVNGEIYNHRDIRAQYAGRYEFRTGSDCEVILALYRDKGIHFLEELNGIFAFALYDEEKDEYLIARDPIGVIPLYIGKDAEGHVYFGSELKALEGFCDEYEPFLPGHYYHSKERTMKRWYTRDWMEYKEENDKQADSRSPTRQIQDALENAVHRQLMSDVPYGVLLSGGLDSSVISAIAKKYAAKRIETDGASDAWWPQLHSFAIGLKGAPDLIKAREVAEYIGTVHHEINYTLQEGLDAIRDVIYFIETYDVTTVRASTPMYLLARVIKSMGIKMVLSGEGADEIFGGYLYFHKAPDARAFHEETVRKLSKLHLYDCLRANKSLAAWGVEGRVPFLDKEFLDVAMQLDPEIKMAPGKVIEKKVLREAFADMLPSGIAWRQKEQFSDGVGYSWIDTLKEITATAVSDEQMAHAAERFPIHTPMNKEEYYYRSIFEEHFPSESAARSVPSIPSVACSTAEALAWDTTFKNLNDPSGRAVKGVHEEAY

SEQ ID NO: 44769 - protein, 290 aa, Oryza sativa
MAALLVVVLVAMSAMVATANFNQEFDITWGDGRGKILEDGQLLTLTLDRTSGSGFQSKHEYLYGKIDMQLKLVPGNSAGTVTAYYLSSQGPTHDEIDFEFLGNVTGEPYTLHTNVFTQGQGQREMQFRLWYDPTKDFHTYSILWNPKHIIFMVDDMPIRDFRNLEGKGIAFPKNQPMRLYSSLWNADDWATQGGRVKTDWTHAPFSASYRGFRADACVVAAGGRTRCGATVGTDAAPGTGAAAAAGGWYNQELDLTRQQRMRWVQSKYMIYNYCTDPKRFPQGVPAECSM

SEQ ID NO: 44770 - protein, 72 aa, Clostridium perfringens
MQKTKMIFTIGPSSDSGEILREFIRIGMNAARLNFSHGDHASHKGKIELIKRLRKEGKSATAILLDIKGPKI

SEQ ID NO: 44771 - protein, 137 aa, Arabidopsis thaliana
  misc_feature (129)..(129): Xaa can be any naturally occurring amino acid
  unsure (1)..(137): unsure at all Xaa locations
MEQPMSPGTKSVDLRECMESLLRFSLRSHLNESVPSFDLDLTRDFCLHLLGEATDSTEKSAVYKLLATALSECLASEGDKNSNLEKYSKLIHGLGYDLINMLKEVNFELHVQEPYFTQLKDGLKTVEGXCAVGATWD

SEQ ID NO: 44772 - protein, 289 aa, Salmonella typhimurium LT2
MEYSILSNNLKMPMVGFGVFKVTDKEECQQSVLSAIRSGYRLIDTAAVYGNEDAVGDAVREAIATGLCTREELFITSKLWVQDMANYDLAKAGIEASLKKSGLDYFDLYLLHQAMGDYFSAWRALEDAYEAGKLKAIGVSNFYAHVLANFCETVRITPMVNQVELHPYFAQPAALETMKHYNVQPEAWAPLGGGRHKPYENVMLQGIADAHQKTIAQVVLRWNVQRGVTVIPKSTRQERIEENFAIWDFSLTDNEMAQINALDLGYVGEAVKHFNPEFVRGCLGVKIHD

SEQ ID NO: 44773 - protein, 182 aa, Arabidopsis thaliana
ADALSSPTSFAYKLSRGSSTSAMAEQTEKAFLKQPKVFLSSKKSGKGKRPGKGGNRFWKNIGLGFKTPREAIDGAYVDKKCPFTGTVSIRGRILAGTCHSAKMQRTIIVRRDYLHFVKKYQRYEKRHSNIPAHVSPCFRVKEGDHIIIGQCRPLSKTVRFNVLKVIPAGSSSSFGKKAFTGM

SEQ ID NO: 44774 - protein, 245 aa, Orpinomyces sp. PC-2
MKSIISIAALSVLGLISKTMAAPAPAPVPGTAWNGSHDVMDFNYHESNRFEMSNWPNGEMFNCRWTPNNDKFENGKLKLTIDRDGSGYTCGEYRTKNYYGYGMFQVNMKPIKNPGVVSSFFTYTGPSDGTKWDEIDIEFLGYDTTKVQFNYYTNGQGHHEHIHYLGFDASQGFHTYGFFWARNSITWYVDGTAVYTAYDNIPDTPGKIMMNAWNGIGVDDWLRPFNGRTNISAYYDWVSYDAPRN

SEQ ID NO: 44775 - protein, 159 aa, Arabidopsis thaliana
MAEQTEKAFLKQPKVFLSSKISGKGKRPGKGGNRFWKNIGLGFKTPREAIDGAYIDSKCPFTGTVSIRGRILAGTCHSAKMQRTIIVRRDYLHFVKKYPRYEKRHSHIPAHVSPCFRVKEGDHVIIGQCRPLSKTVRFNVLKVIPTGASAFGKKALTGV

SEQ ID NO: 44776 - protein, 545 aa, Oryza sativa
MEQYEVVEQIGRGAYGSAYLVVHKGERKRYVMKKIRLSKQNDKFQRTAYQEMSLMASLSNPYIVEYKDGWVDEGTSACIVTSYCEGGDMAERIKKARGVLFSEERVCRWFTQLLLALDYLHCNRVLHRDLKCSNILLTKDNNIRLADFGLAKLLMEDLASTIVGTPNYMCPEILADIPYGYKSDIWSLGCCMFEILAHRPAFKAADMASLINKINRSSISPMPPIYSSSLIYAKHDALFGRKQIVKSMLRKNPEHRPTAGELLRHPYLQPYLAESCSCSPIYLPVKPTKSNLGDKQQSRKPGSGRKRIIKTNGSSEALETAAEQAVDTRDNSTYISDVSTVGTQDACISQVSVDPQARNKAYQNIDDLTLFQQIEENLMTITDRQIDEAIFLKAVRTSSTVDVVPVSGAIQKPNEAPIPKEELTIGVVQEQRKEVKAHTHQGSKPGTGDVPIVTEESSPKSAVKLAHSDSTPAEWDHLNIVQQRADALESLLELCAKLLKQERLEELAGVLRPFGEGAVSSRETAIWLTKSLMTPPKLEGSPKLT

SEQ ID NO: 44777 - protein, 412 aa, Ricinus communis
FRQITKNQKKKVRKKTMALKLNPFLSQTQKLPSFALPPMASTRSPKFYMASTLKSGSKEVENLKKPFMPPREVHVQVTHSMPPQKIEIFKSLDNWAEENILVHLKPVEKCWQPQDFLPDPASDGFDEQVRELRERAKEIPDDYFVVLVGDMITEEALPTYQTMLNTLDGVRDETGASPTSWAIWTRAWTAEENRHGDLLNKYLYLSGRVDMRQIEKTIQYLIGSGMDPRTENSPYLGFIYTSFQERATFISHGNTARQAKEHGDIKLAQICGTIAADEKRHETAYTKIVEKLFEIDPDGTVLAFADMMRKKISMPAHLMYDGRDDNLFDHFSAVAQRLGVYTAKDYADILEFLVGRWKVDKLTGLSAEGQKAQDYVCRLPPRIRRLEERAQGRAKEAPTMPFSWIFDRQVKL

SEQ ID NO: 44778 - protein, 121 aa, Mycoplasma gallisepticum R
MAKKKKTVASNGIAHIHATSNNSIITITDINGNAITWSSSGAIGYKGAKKKTPYSAGVAAEKAAKEAMAMGLSTIKIYVNGVGRGKETAIRSLAACGLTITEIHDVTPIPHNGCRPPKKPR

SEQ ID NO: 44779 - protein, 152 aa, Zea mays
  misc_feature (45)..(45): Xaa can be any naturally occurring amino acid
  misc_feature (53)..(53): Xaa can be any naturally occurring amino acid
  misc_feature (92)..(92): Xaa can be any naturally occurring amino acid
  unsure (1)..(152): unsure at all Xaa locations
IPFLMYSLCLELVNHILSRLGLLRVCEFTLAEIEHFVDPKDKSHXFFYVANLXFLMFPRELQLSGESVKLMKLGEGVAMGTINNETLGYFTXRVYLFLTCLGIDKGRLHFRQHLPNEMAHYIADCWDAEIECSYGWIECVGIADRSAYDLKA

SEQ ID NO: 44780 - protein, 273 aa, Triticum aestivum
MAGGGDNSQTNGGSQEPRAMEEGRKDDYDQGCGLAISLPFVQKIIAEIFGTYFLIFAGCGAVTINKSKGQITFPGVAIVWGLTVMVMVYSVGHISGAHFNPAVTFAFATVRRFPWRQVPAYVLAQMLGATLASGTLRLMFGGRHEHFPGTLPTGSDVQSLVLEFIITFYLMFVISGVSTDNRAIGELAGLAVGATILLNVLIAGPVSGASMNPARTGGPALIGSEYRSIWVYVVGPVAGAVAGAWAYNLIRFTNKPLRELTKSTSFPREHDQE

SEQ ID NO: 44781 - protein, 230 aa, Glycine max
  misc_feature (34)..(34): Xaa can be any naturally occurring amino acid
  misc_feature (195)..(195): Xaa can be any naturally occurring amino acid
  unsure (1)..(230): unsure at all Xaa locations
DFDLDNTLYFFTAGRYEYRNKGVDMFLESLGRRXLNQKLKASNSSTTIVAFIIMPAATNSYAVEALKGQAVIKQLQETVNIITDRIGQRIFEKAARYSGGEIEDAVIDPRELLTNEDKVLLKRRVIALRRGNLPPIVTHNMVDDNGDLIMMQLRYLKLFNHREDRVKIVFHPEFLSSNNPLIGLEYDEVVRGMSXLGVFPSYYEPWGYTPAECTVMGLPAITTNFVSFGM

SEQ ID NO: 44782 - protein, 257 aa, Pseudoroegneria spicata
CELDNIMRLTGITGIVNGMDVSEWDPTKDKFLAVNYDVTTVLEGKALNKEALQAEVGLPVDRKVPLVAFIGRLEEQKGPDVMIAAIPEIVKDEDIQIVLLGTGKKKFERLLKSVEEKFPGKVRAVVRFNAPLAHQMMAGADVLAVTSRFEPCGLIQLQGMRYGTPCACASTGGLVDTIVEGKTGFHMGRLSVDCNVVEPADVKKVATTLKRAIKVVGTPAYHEMVKNCMIQDLSWKGPAKNWEDVLLELGVKGSEPG

SEQ ID NO: 44783 - protein, 333 aa, Xanthomonas oryzae pv. oryzae KACC10331
MSITHPAPHCAQSHTFASANPLAERSTRKAVILTVLMMVVEIVGGWTLNSMALLADGWHMSSHALALGLALFAYRFARQHAGDVRFTFGTWKVEVLGGYTSAILLLGVAGLMAFQSLERLFTPEPIQYQEATVIAVIGLLVNLICAWWLRDSHGHGHGHGHGHGHDSHGHTHTHEAHGHGHHHEAHSDLNLRAAYLHVVADAATSVLAIVALVAGMHWGVTWLDPIMGIVGAVLVTVWAWGLLRSTGSVLLDAEMDAPLVAEVKQVIAELGHAIDIADLHVWRVGSERYACVVSLVTAADIDAELVRRALQIHEELVHVTVELQRPALLNAAA

SEQ ID NO: 44784 - protein, 257 aa, Pseudoroegneria spicata
CELDNIMRLTGITGTVNGMDVSEWDPTKDKFLAVNYDVTTALEGKALNKEALQAEVGLPVDRRVPLVAFIGRLEEQKGPDVMIAAIPEIVKDEDVQIVLLGTGKKKFERLLKSVEEKFPGKVRAVVRFNAPLAHQMMAGADVLAVTGRFEPCGLIQLQGMRYGTPCACASTGGLVDTIVEGKTGFHMGRLSVDCNVVEPADVKKVATTLKRAIKVVGTPAYHEMVKNCMIQDLSWKGPAKNWEDVLLELGVEGSEPG

SEQ ID NO: 44785 - protein, 394 aa, Pseudomonas aeruginosa PAO1
MREVVIVDSVRTGLAKSFRGKFNLTRPDDMAAHCVDALLARNDLDPLLVDDCIVGAGSNEGAQGHNIGRNVAVLSGLGIQVPGMTLNRYCSSGLQAIAIAANQIASGCSEVIVAGGVESITLTLKSVNTDHLVNPLLQREVPGIYYPMGQTAEIVARRYGITREAQDAYALQSQQRMARAQADGLFADEIVPMTTRYAVEDKASGEKQVLDGVVDRDDCNRPDTTLEGLASLKPAFAEDGSVTAGNASQLSDGASMTLLMSLEKALALGLEPKAFFRGFTVAGCEPDEMGIGPVFSVPKLLKAKGLKIADVDLWELNEAFASQCLYCRDRLEIDNEKYNVNGGSIAIGHPFGMTGSRQVGHLVRELHRRNLRYGVVTMCVGGGMGASGLFEAVR

SEQ ID NO: 44786 - protein, 257 aa, Pseudoroegneria spicata
CELDNIMRLTGITGIVNGMDVSEWDPTKDKFLAVNYDVTTALEGKALNKEALQAEVGLPVDRKVPLVAFIGRLEEQKGPDVMIAAIPEIVKDEDVQIVLLGTGKKKFERLLKSVEEKFPGKVRAVVRFNAPLAHQMMAGADALAVTSRFEPCGLIQLQGMRYGTPCACASTGGLVDTIVEGKTGFHMGRLSVDCNVVEPADVKKVATTLKRAIKVVGTPAYHEMVKNCMIQDLSWKGPAKNWEDVLLELGVEGSEPG

SEQ ID NO: 44787 - protein, 337 aa, Vitis vinifera
MGSQSETVCVTGASGFIGSWLVMRLLERRLTVRATVRDPTNVKKVKHLLDLPKAETHLTLWKADLADEGSFDEAIKGCTGVFHVATPMDFESKDPENEVIKPTIEGMLGIMKSCAAAKTVRRLVFTSSAGTVNIQEHQLPVYDESCWSDMEFCRAKKMTAWMYFVSKTLAEQAAWKYAKENNIDFITIIPTLVVGPFIMSSMPPSLITALSPITGNEAHYSIIRQGQFVHLDDLCNAHIYLFENPKAEGRYICSSHDCIILDLAKMLREKYPEYNIPTEFKGVDENLKSVCFSSKKLTDLGFEFKYSLEDMFTGAVDTCRAKGLLRPSHEKPVDGKT

SEQ ID NO: 44788 - protein, 257 aa, Agropyron cristatum
CELDNIMRLTGITGIVNGMDVSEWDPTKDKFLSVNYDVTTALEGKALNKEALQAEVGLPVDRKVPLVAFIGRLEEQKGPDVMIAAIPEIVKDEDVQIVLLGTGKKKFERLLKSIEEKFPSKVRAVVRFNAPLAHQMMAGADILAVTSRFEPCGLIQLQGMRYGTPCACASTGGLVDTIVEGKTGFHMGRLSVDCNVVEPADVKKVATTLKRAVKVVGTPAYQEMVKNCMIQDLSWKGPAKNWEDVLLELGVEGSEPG

SEQ ID NO: 44789 - protein, 225 aa, Streptococcus pneumoniae R6
MHKILLIEDDQVIRQQIGKMLSEWGFEVVLVEDFMEVLSLFVQSEPHLVLMDIGLPLFNGYHWCQEIRKISKVPIMFLSSRDQAMDIVMAINMGADDFVTKPFDQQVLLAKVQGLLRRSYEFGRDESLLEYAGVILNTKSMDLHYQGQVLNLTKNEFQILRVLFEHAGNIVARDDLMRELWNSDFFIDDNTLSVNVARLRKKLEEQGLVGFIETKKGIGYGLKHA

SEQ ID NO: 44790 - protein, 336 aa, Triticum aestivum
  misc_feature (325)..(325): Xaa can be any naturally occurring amino acid
  unsure (1)..(336): unsure at all Xaa locations
MADASSRTDNSTVLDNDGKIYRLEQGQSGGAIMASNSSDRSDRSDKPLDQKTLRRLAQNREAARKSRLRKKSYVQQLESSKLKLAQLEQELQKARQQGIFISSSGDQTHAMSGNGAMTFDLEYTRWLEDQNKQINELRTAVNAHASDSDLRLIVDGIMAHYDEIFKVKGVAAKADVFHILSGMWKTPAERCFLWLGGFRPSELLKLLVNHLEPLTEQQMLGLTNLQQSSQQAEDALSQGMEALQQSLAETLAGSLGSSAGSSGNVANYMGQMAMAMGKLGTLENFLRQADNLRQQTLHQMQRILTIRQASRALLAIHDYFPTLSXLSPLGLARPRE

SEQ ID NO: 44791 - protein, 256 aa, Agropyron mongolicum
ELDNIMRLTGITDIVNGMDVSEWDPTKDKFLSVNYDVTTALEGKALNKEALQAEVGLPVDRKVPLVAFIGRLEEQKGPDVMIAAIPEIVKDEDVQIVLLGTGKKKFERLLKSIEEKFPSKVRAVVRFNAPLAHQMMAGADILAVTSRFEPCGLIQLQGMRYGTPCACASTGGLVDTIVEGKTGFHMGRLSVDCNVVEPADVKKVATTLKRAVKVVGTPAYQEMVKNCMIQDLSWKGPAKNWEDVLLELGVEGSEPG

SEQ ID NO: 44792 - protein, 319 aa, Triticum aestivum
MSTATGAAASNSLSPTTSRRSSPSSRILTTPRGSLSCRLLSSSPSQSPLGPVSAMASPGAAGEAASRKKLLIFDAEKDLAASLAEHAAGLSEKFAAERSAFTVVLSGGSLIKALRKLAEPPYLEAVDWSRWHVFWADERVVPKDHADSNYKLAMDEFLSKVPVPANQVYAMNDALSVEGAADDYENCLKQLIKNGVIAVSPVTGFPKFDLMLLGMGPDGHIASLFPGHPIVNENQKLVTYVKDSPKPPPERITFTFPVINSSAHIALMVTGAGKAGAVHKALSANESSSDLLPVEMVEPQDGEMTWFTDKPAMSMLSRI

SEQ ID NO: 44793 - protein, 373 aa, Arabidopsis thaliana
MGYLLEETLSSNSKTPIVIDDDNELGLMAVRLANAAAFPMVLKAALELGVFDTLYAEASRSDSFLSPSEIASKLPTTPRNPEAPVLLDRMLRLLASYSVVKCGKVSVGKGERVYRADPICRFFLKDNIQDIGSLASQVIVNFDSVFLNTWAQLKDVVLEGGDAFGRAHGGMKLFDYMGTDERFSKLFNQTGFTIAVVKKALEVYQGFKDVNVLVDVGGGVGNTLGVVTSKYPNIKGINFDLTCALAQAPSYPGVEHVAGDMFVDIPTGDAMILKRILHDWTDEDCVKILNNCWKSLPENGKVVVIELVTPDEAENGDINANIAFDMDMLMFTQCSGGKERSRAEFEALAAASGFTHCKFVCQAYHCWIIEFCK

SEQ ID NO: 44794 - protein, 278 aa, Cladonia arbuscula
VEHGAVKVVAVNDPFIEPHYAAYMLKYDSQHGQFKGTIEVEGSDLIVNGQKVKFYTEKDPGAIPWKDTGAYYIVESTGVFTTTEKAKAHLKGGAKKVVISAPSADAPMFVMGVNEETYKSDIEVISNASCTTNCLAPLAKVMHDDFTIIEGLMTTIHSYTATQKTVDGPSAKDWRGGRTAAQNIIPSSTGAAKAVGKVIPSLNGKLTGMSMRVPTSNVSVVDLTCRLEKSVTYDEIKEAMKKASDGDLKGIMAYSEDDLVSTDLNGDNHSCIFDAKAG

SEQ ID NO: 44795 - protein, 636 aa, Saccharomyces cerevisiae
MTNALLSIAVLLFSMLSLAQAETHTFNWTTGWDYRNVDGLKSRPVITCNGQFPWPDITVNKGDRVQIYLTNGMNNTNTSMHFHGLFQNGTASMDGVPFLTQCPIAPGSTMLYNFTVDYNVGTYWYHSHTDGQYEDGMKGLFIIKDDSFPYDYDEELSLSLSEWYHDLVTDLTKSFMSVYNPTGAEPIPQNLIVNNTMNLTWEVQPDTTYLLRIVNVGGFVSQYFWIEDHEMTVVEIDGITTEKNVTDMLYITVAQRYTVLVHTKNDTDKNFAIMQKFDDTMLDVIPSDLQLNATSYMVYNKTAALPTQNYVDSIDNFLDDFYLQPYEKEAIYGEPDHVITVDVVMDNLKNGVNYAFFNNITYTAPKVPTLMTVLSSGDQANNSEIYGSNTHTFILEKDEIVEIVLNNQDTGTHPFHLHGHAFQTIQRDRTYDDALGEVPHSFDPDNHPAFPEYPMRRDTLYVRPQSNFVIRFKADNPGVWFFHCHIEWHLLQGLGLVLVEDPFGIQDAHSQQLSENHLEVCQSCSVATEGNAAANTLDLTDLTGENVQHAFIPTGFTKKGIIAMTFSCFAGILGIITIAIYGMMDMEDATEKVIRDLHVDPEVLLNEVDENEERQVNEDRHSTEKHQFLTKAKRFF

SEQ ID NO: 44796 - protein, 263 aa, Triticum aestivum
CTNKNHASAPASADAWASTRATPAVPIGGCYRLIDIPMSNCFNSGINKIFVMTQFNSASLNRHIHRTYLGGGINFTDGSVEVLAATQMPGEAAGWFRGTADAVRKFIWVLEDYYKNKSIEHILILSGDQLYRMDYMELVQKHVDDNADITLSCAPVRESRASEYGLVKFDSSRRVVQFSEKPKGADLEAMKVDTSFLNFAIDDPAKYPYIASMGVYVFKRDVLLNLLKSRYAELHDFGSEILPRALHDHNVQAYVFTDYWEDI

SEQ ID NO: 44797 - protein, 463 aa, Streptococcus pyogenes MGAS10394
MEFRMSIKEQTDNNELENGMVRGLENRHVQLIAIAGTIGTGLFLGAGRSIALTGPSIIFVYMITGAFMFMMMRAIGEMLYYDPDQHTFINFISKYIGPGWGYFSGLSYWISLIFIGMAEITAVGAYVQFWFPSWPAWLIQLVFLVLLSSINLIAVRVFGETEFWFAMIKILAILALIATAIFMVLTGFETHTGHASLSNIFDHFSMFPNGKLKFFMAFQMVFFAYQAIEFVGITTSETANPRKVLPKAIQEIPTRIVIFYVGALVSIMAIVPWHQLPVDESPFVMVFKLIGIKWAAALINFVVLTSAASALNSTLYSTGRHLYQIANETPNALTNRLKINTLSRQGVPSRAIIASAVVVGISALINILPGVADAFSLITASSSGVYIAIYALTMIAHWKYRQSKDFMADGYLMPKYKVTTPLTLAFFAFVFISLFLQESTYIGAIGATIWIIVFGIYSNVKFK

SEQ ID NO: 44798 - protein, 133 aa, Brassica napus
MAGGGEELTVALLNKTAENGGEDDELGLTKKVWIESKKLWVVAAPAIFTRFSTFGVSMISQAFIGHLGPIELAAYSITFTVLLRFSNGILLGMASALETLCGQAYGAKQNHMLGIYLQRSWPVSPPIPPLPLS

SEQ ID NO: 44799 - protein, 538 aa, Xanthomonas axonopodis pv. citri str. 306
MLQTPWWRGAVIYQIYPRSFPDSNGDGVGDLPGIIAKLDYIAGLGVDAIWISPFFKSPMADFGYDIADYRAVDPLFGTLDDFDRLLDRAHALGLKVMIDQVLSHTSIEHAWFQESRQDRTNAKADWYVWADPREDGTPPNNWLSLFGGVAWQWEPRREQYYLHNFLVDQPDLNFHNAEVQQATLDNVRFWLDRGVDGFRLDAINFCFHDAQLRDNPAKPADKRVGRGFSADNPYAYQYHYFNNTQPENLAFLERLRALLDRYPDAVSLGEISSEDSLATTAEYTAKGRLHMGYSFELLVQDYSAAYIRGTVSRLEATMLEGWPCWAISNHDVVRAVTRWGGEDASPAFARMVVALLCSLRGSVCLYQGEELGLGEADVAFEDLRDPYGITFWPTFKGRDGCRTPMPWTDAPSAGFTSGKPWLPLSEPHRLAAVSVQQDDAQSVLRAVRAFLSWRRSMPALLEGAIAFYDIAEPVLMFRREHAGQVMLLAFNLSADITELALPAGAWRQIDVPGVERGVIEHGRVRLPGHAVVCAMGGQ

SEQ ID NO: 44800 - protein, 144 aa, Coxiella burnetii RSA 493
MAIERTLSIIKPDAVAKNVIGQIYSRFEKAGLKIIAAKMCHLSKPQAEKFYAVHKDRPFYPDLVKFMTQGPVMIQVLEGENAIVKNREIMGATNPKEALPGTIRADFADSIDANAVHGSDGPETAKEEIAFFFKPDESFNSIGV

SEQ ID NO: 44801 - protein, 457 aa, Escherichia coli O157:H7 EDL933
MQKYISEARLLLALAIPVILAQIAQTAMGFVDTVMAGGYSATDMAAVAIGTSIWLPAILFGHGLLLALTPVIAQLNGSGRRERIAHQVRQGFWLAGFVSVLIMLVLWNAGYIIRSMENIDPALADKAVGYLRALLWGAPGYLFFQVARNQCEGLAKTKPGMVMGFIGLLVNIPVNYIFIYGHFGMPELGGVGCGVATAAVYWVMFLAMVSYIKRARSMRDIRNEKGTAKPDPAVMKRLIQLGLPIALALFFEVTLFAVVALLVSPLGIVDVAGHQIALNFSSLMFVLPMSLAAAVTIRVGYRLGQGSTLDAQTAARTGLMVGVCMATLTAIFTVSLREQIALLYNDNPEVVTLAAHLMLLAAVYQISDSIQVIGSGILRGYKDTRSIFYITFTAYWVLGLPSGYILALTDLVVEPMGPAGFWIGFIIGLTSAAIMMMLRMRYLQRLPSAIILQRASR

SEQ ID NO: 44802 - protein, 278 aa, Cladonia arbuscula
  misc_feature (263)..(263): Xaa can be any naturally occurring amino acid
  unsure (1)..(278): unsure at all Xaa locations
VEHGAVKVVAVNDPFIEPHYAAYMLKYDSQHGQFKGTIEVEGSDLIVNGQKVKFYTEKDPGAIPWKDTGAYYIVESTGVFTTTEKAKAHLKGGAKKVVISAPSADAPMFVMGVNEETYKSDIEVISNASCTTNCLAPLAKVMHDNFTIIEGLMTTIHSYTATQKTVDGPSAKDWRGGRTAAQNIIPSSTGAAKAVGKVIPSLNGKLTGMSMRVPTSNVSVVDLTCRLEKSVTYDEIKEAMKKASDGDLKGIMAYSEDDLVSTXLNGDNHSCIFDAKAG

SEQ ID NO: 44803 - protein, 449 aa, Porphyra purpurea
MGKEKQHVSIVVIGHVDSGKSTTTGHLIYKCGGIDKRAIEKFEKEAAEMGKGSFKYAWVLDKLKAERERGITIDIALWKFETDKYNFTIIDAPGHRDFIKNMITGTSQADLAILVIASPPGEFEAGISQNGQTREHALLAYTLGVKQMIVACNKMDDKNVNWSKERYEEVSKEMDLYLKKVGYNPPKVPKVPTSGWTGENLFERTGGDHALGKWYKGPCLLEALDACDPPKRPVDKPLRLPLQDVYKIGGIGTVPVGRVETGVIKPGMVVTFAPSGLSTEVKSVEMHHEALTQAGPGDNVGFNVKNVSVKDLKRGYVCGDSKNDPPKGCASFNAQVIILNHPGEIHAGYAPVLDCHTAHIACKFSELILKMDRRSGKKLEDSPKMIKSGDAAMVKMVASKPMCVEAFTSYPPLGRFAVRDMRQTVAVGVIKSVEKKEVEGKMTKSAAKK

SEQ ID NO: 44804 - protein, 365 aa, Thermoanaerobacter tengcongensis MB4
MALTQREKEILRLIKKNPMISQEELAKMLGISRSAVAGHIANLMKKGFILGRGYVVRDLKGVTVIGGANIDIKGKPYKELRQHTSNPGHINIAPGGVGRNIAHNLAQLNVPVTFLSVVGNDDEGRRLLEETRQAGVNVEQVVISNTRRTGIYLAILNAIGDMDIALSGMDILEELNIQYLESKTEVIKNSEIVVFDANIPEESIRYITELCYNNNIPVVVEPVSIDKAKKLKNVLDKIDYITPNKEELESITEIKILDDEDMKKAVKYLRDKGIKNVIVTLGERGVYVSSEELEKFIEPYQTEIVDATGAGDALTAGLVYGIFNGYSLEVSAKLGLAAASLTISSPYTVNPFLNENQLKNIVKEI

SEQ ID NO: 44805 - protein, 492 aa, Ipomoea batatas
MDPSKYRPSSSFNTPFCTTNSGAPVWNNTCALTVGSRGPILLEDYHLVEKIQNFTRERIPERVVHARGASAKGFFEVTHDITHLTCADFLRAPGVQTPLIVRFSTVIHERGSPETIRDPRGFAVKMYTRGGNWDLVGNNFPVFFIRDGTQFPDVIHAFKPNPKSHIQENWRILDYLSHLPESLNTFAWFYDDVGIPTDYRHMEGFGVHTFTMINKEGKANYVKFHWKPTCGVKCLLEEEAIRIGGENHSHATQDLYESIAAGNYPEWKLYIQVMDPDHEDRFDFDPLDTTKIWPEELIPLQPVGRMVLNKNIDNFFAENEMLAMDPAHIVPGIYFSDDKMLQARVFAYADTHRHRLGPNYMLLPVNAPKCAHHNNSYDGYMNFVHRDEEVDYFPSKFDNTRNAERFPTPLRIVTGQRDKCVIEKENNFKQPGDRYRSWAPDRQDRFINRWVKALSEPRVTHEIRSTWISYLTQADRSLGQKVASRLNIRPTM

SEQ ID NO: 44806 - protein, 435 aa, Magnetospirillum magnetotacticum MS-1
  misc_feature (431)..(431): Xaa can be any naturally occurring amino acid
  misc_feature (433)..(433): Xaa can be any naturally occurring amino acid
  unsure (1)..(435): unsure at all Xaa locations
MANSVGMAIGGRFKGERLNRPDLPLFDYNVYAICSDGDLMEGVSQEAASIAGHLRLSNLCWIYDNNTITIEGHTELAFSEEVAARFLAYGWQVLRVADANDTHAISAAIETFLQSSDRPTLIIVNSIIGYGAPTKQNTSKAHSDALGPDEVKGAKRAYGWPEESEFLVPDGVYDTFSEGIGKRGAALYAQWQGFFDAAKAADAEHAEDLSAFLEGRLPEGWDKDIPVFAPDPKGLATRESSGKVLNAIAQHVPFLLGGSADLAPSNKSNLTFEGAGSLTPFEPGGRNIHFGVREHAMGSIVNGLGLVGLRAYGATFLVFADYMRPPIRLAALMELPVFHIFTHDSIGVGEDGPTHQPVEQLLSLRCIPGLVTLRPADANEVAEAYRVIFSLKDQPAVLALSRQPLPTFDRSKYGAASGTAKGAYVLADCEXHXRT

SEQ ID NO: 44807 - protein, 146 aa, Brassica napus
  misc_feature (51)..(51): Xaa can be any naturally occurring amino acid
  misc_feature (67)..(67): Xaa can be any naturally occurring amino acid
  misc_feature (71)..(71): Xaa can be any naturally occurring amino acid
  misc_feature (124)..(124): Xaa can be any naturally occurring amino acid
  unsure (1)..(146): unsure at all Xaa locations
YFKRNNGKNMGTIRTSKKANLALAKDNPRFEFKDKDTPSKTSPRFQPPTKXLKKCRILDSIISHGCXLGEXASTFIIGERSRLDYGVELQDTLMLGADSYQTESEIASLLAEGNVPIGIGRDTXIRKCIIDKNAKIGKNVMILNSD

SEQ ID NO: 44808 - protein, 334 aa, SYNECHOCOCCUS SP. WH 8102
MTRFPSTCSLDVVGIGNAIVDVLVQTDDAFLAQHGLQKGGMALIDEQQAETLYTASGPGLETSGGSVANTMVGIAQLGGRAGFIGRVRDDQLGGIFSHDIRAVGARFDTPAATTGATTARCLIYVTPDAERTMCTFLGASTQLEPEDLDLSMVRDTKVLYLEGYLWDSPAAKRAFIAAADVCREAGGQVALSLSDGFCVDRHRESFLELVNGHVDVLFANEVEIKSLYETDDFDTALKKVGGCCSVIAVTRGGEGSVVLSGDQRWDIGIFGLGELVDTTGAGDLYAGGFLHGYTQGESLGRCGQLGALCAGQIVTQLGARPQVSLRELAAAHLN

SEQ ID NO: 44809 - protein, 217 aa, Triticum aestivum
  misc_feature (73)..(73): Xaa can be any naturally occurring amino acid
  misc_feature (186)..(186): Xaa can be any naturally occurring amino acid
  unsure (1)..(217): unsure at all Xaa locations
MLKLRLATYKINRKNRILKSYIHLQWLHYLRSAATEAEWQRNQYVPTVEEYMIEAVNSFAEGPIMLTSLYFVXTKLEEYIIKDPEYDELLRIKGNCGRLLNDTRGFKRESSEGKLNIISLLVLQSGGSMSIEGAQETVQESIASCRRDLLRMVVREDRVVPRACKEVFWRFCRTVHLFYCHTDGFXSPKEMLCTMNAIFREPLKLQTTSPLAVQSEN

SEQ ID NO: 44810 - protein, 504 aa, Bifidobacterium adolescentis [sequence omitted]

SEQ ID NO: 44811 - protein, 149 aa, Clostridium thermocellum ATCC 27405
MFGIVPFGRRGMGVSRRGRDLFDIDSFFDDFFDDRFFPAFYGGNQIKVDIRENDKEYILEADIPGVDKENITVEVNGDVLTISAKWDEQTEIKKENYLRRERRASSMSRSFTLENVDSDRITAKHENGVLTLILPKKEPRSRGRRINIS

SEQ ID NO: 44812 - protein, 468 aa, Haloarcula marismortui ATCC 43049
MSGPEAEQQSVVLYDIEDKPPLGKAIPLGIQHVLAMFLGNVAPPLILAGAVGSVTGETTFLVQMALIVAGIATIVQAYPVGPVGARLPVVMGTSFAFLGPLIGIGNQFGIAAVFGASLLAAPVEVIMGVSFDRFRRFFPPLVTGIVVMLIGLTLIPTGMNYAAGASAGPSAEGYGSFVNLGLAGLVLIVTVGLNQFFEGFLRVISVFVGIIVGYLAALALGVVDLSAVAAAGWVTVPVPLKYGLAFEPSAVVTVAFLYIITGMETIGDISGTVSATGRNATREEIRGGLVADGVMSVFGAVFNALPNTSFSQNVGLVNFTGVASRYVAGIGGVVLLALGFIPKVGAVVSAMPDAVLGGGALILFAMIFSSGARLITQNVELDHRNSTILAMSMALGLGVAFRPEILQNFPSEVQTLFGSALVTGGMAALILNIVFPGGSVGTGPTEYTAGLEPDPVETGAGAPPVDDD

SEQ ID NO: 44813 - protein, 680 aa, Helicobacter pylori
MKKKANEEKAPKRAKQEAKAEATQEIKQENKTKESNKAKESKIKENKTKESKIKEAKAKEPIPVKKLSFNEALEELFANSLSDCVSYESIIQISAKVPALAQVKKIKELCQKYQKKLVSSSEYAKKLNAIDKIKNTEEKQKVLDEELEDGYDFLKEKDFLEWSRSDSPVRMYLREMGDIKLLSKDEEIELSKQIRLGEDIILDAICSVPYLIDFIYAYKDALINRERRVKELFRSFDDDDENSVSDSKKDDDSEEDEENEERKKVVSEKDKKRVEKVQESFKALDKAKKEWLKALEAPIDEKEDELVRSLTLAYKRQILKDRLYDLEPTSKLINELVKTMETTLKSGDGFEKELKRLEYKLPLFNDVLIANHKKILANITNMTKEDIIAQVPEATMVSVYMDLKKLFLTKEASEEGFDLAPNKLKEILEQIKRGKLISDRAKNKMAKSNLRLVVSIAKRFTSRGLPFLDLIQEGNIGLMKAVDKFEHEKGFKFSTYATWWIKQAISRAIADQARTIRIPIHMIDTINRINKVMRKHIQETGKEPDLEVVAEEVGLSLDKVKNVIKVTKEPISLETPVGNDDDGKFGDFVEDKNIVSSIDHIMREDLKAQIESVLDQLNEREKAVIRMRFGLLDDESERTLEEIGKELNVTRERVRQIESSAIKKLRSPQYGRILRNYLRI

SEQ ID NO: 44814 - protein, 126 aa, Triticum aestivum
  misc_feature (39)..(39): Xaa can be any naturally occurring amino acid
  misc_feature (53)..(53): Xaa can be any naturally occurring amino acid
  misc_feature (83)..(83): Xaa can be any naturally occurring amino acid
  misc_feature (91)..(91): Xaa can be any naturally occurring amino acid
  misc_feature (107)..(107): Xaa can be any naturally occurring amino acid
  misc_feature (114)..(114): Xaa can be any naturally occurring amino acid
  unsure (1)..(126): unsure at all Xaa locations
MNSQTSNLFDYALKSNDAWANYKGHQNPAFFQKAEAGQXSPSILWLGCSDSRXCRETTVLGLQPGDVFVHRNIANIISPTGYXTSMAVIEXYAVEHLKVNHIMLCGXTCCGGAXAALDDVRVRGVN

SEQ ID NO: 44815 - protein, 171 aa, Arabidopsis thaliana
MLRQTTKRAFLGLASQNPTPFPVVSRLYHPNVIDHYDNPRNVGSFDKNDPNVGTGLVGAPQCGDVMKLQVKFDGSGQIIDAKFKTFGCGSAIAASSVATEWVKGKSVEEVLTIKNSQIAKHLSLPPVKLHCSMLAEDAIKAAIKNYKEKQDKANGETVETIDSTYLHGIGS

SEQ ID NO: 44816 - protein, 400 aa, Arabidopsis thaliana
MATMISNLPRDLIEEIFSRVPLTSMKAVRLTCKSWNNLSKSESFTKVHIGRAATREEKTMIVDVMPHKLNLMSIVIDDVTPSAEFKGQFSLLHKNYRINQVLHYEGLLLCIMKDPTRIVVWNPYLGQTRWIQLRYFHRPHGIDHFRYALGYADKESCSSLKFLRFLDYFYKAPEEEFFWYEIYDFDSGLWTTLNVTPHWGIYSTCPCVSLKGNTYWPAKERSTQGFQDYIIRFDFTRERFGPLLALPTDRESSFVSLSCVKEEKLAALFKHRLHHDSYEYEFEIWITTKIEVEMVSWSKFLRMDMRPKMELPLTFYIDEEKKVFMGFDHGEYPKLLFLNVVGETGFLRKFENIQYRSPCSYVPSLVQVKKLARDRLRKQRSLENRRFAQNILRLARNGKS

SEQ ID NO: 44817 - protein, 917 aa, Pseudomonas syringae pv. syringae B728a
MLTKLGIKGRVLLLTILPASLMAAMLGGYFTWMQLSELQSQLLQRGEMIAQDLAPLAANALGRKDKVLLSRIATQTLEQTDVRAVSFLDTDRTVLAHAGPTMISPSPIGSGSQLLSSTGTDATRYLLPVFGSQRHLTSPIIPAEADTLLGWVELEISHNGTLLRGYRSLFASLLLILTGLAFTATLAVRMSRTINGPMSQIKQAVSQLKDGNLETRLPPLGSRELDELASGINRMAATLQNAQEELQLSIDQATEDVRQNLETIEIQNIELDLARKEALEASRIKSEFLANMSHEIRTPLNGILGFTHLLQKSELTPRQFDYLGTIEKSADNLLSIINEILDFSKIEAGKLVLDNIPFNLRDLLQDTLTILAPAAHAKQLELVSLVYRDTPLALSGDPLRLRQILTNLVSNAIKFTREGTIVARAMLEDETEEHAQLRISVQDTGIGLSSQDVRALFQAFSQADNSLSRQPGGTGLGLVISKRLIEQMGGEIGVDSTPGEGSEFWISLKLPKAREDKEESLNIPLGGLRAAVLEHHDLARQALEHQLEDCGLQTIVFNNLENLLNGVTAAHETPAAIDLAVLGVTALEISPERLRQHIWDLENLNCKVMVLCPTTEHALFQLAVHDVYTQLQAKPACTRKLQKALSELIAPRAVRADIGPPLSSRAPRVLCVDDNPANLLLVQTLLEDMGAEVVAVEGGYAAVNAVQQEAFDLVLMDVQMPGMDGRQATEAIRAWEAERNQSSLPIVALTAHAMANEKRSLLQSGMDDYLTKPISERQLAQVVLKWTGLALRNPAPERQNEALEVHVGPLVLDHEEGLRLAAGKADLAADMLAMLLASLDADREAIRVARANQDVHALIERIHRLHGATRYCGVPQLRSACQRAETLLKQNAPHTEEALNDLDKAIIRLEAEARVMA

SEQ ID NO: 44818 - protein, 461 aa, Yersinia pseudotuberculosis IP 32953
MSTQSAELDTAQPSPARPSELIYHLEDRPPLPQTLFAACQHLLAMFVAVITPGLLICQALGLPAEDTQRIISMSLFASGLASLLQIKTWGPVGSGLLSIQGTSFNFVSPLIMGGLALKNGGADIPTMMAALFGTLMVASCTEILLSRVLHLARRIITPLVSGIVVMIIGLSLIQVGLTSIGGGYGAMSDNTFGAPKNLLLAGAVLGVIILLNRQRNPYLRVASLVIAMAVGYLLAWALGMLPESRPVVDTALITIPTPLYYGLSFDWNLLIPLMLIFMVTSLETIGDITATSDVSEQPVRGPLYMKRLKGGVLANGLNSMLSAIFNTFPNSCFGQNNGVIQLTGVASRYVGFVVAIMLIILGLFPAVAGFVQHIPEPVLGGATLVMFGTIAASGVRIVSRETLNRRAIMIMALSLAVGMGVAQQPLILQFAPDWIKTLFSSGIAAGGITAIVLNLLFPQEK

SEQ ID NO: 44819 - protein, 1173 aa, Mycobacterium avium subsp. paratuberculosis K-10
MSTATHDERLDRRVHELIATDPQFAAAQPDPAITAALEQPGLRLPQIIRTVLDGYADRPALGQRVVEFVTDAKTGRTSAQLLPRFETITYSEVAQRVSALGRALSDDAVHPGDRVCVLGFNSVDYATIDMALGAIGAVSVPLQTSAAISSLQPIVAETEPTLIASSVNQLSDAVQLITGAEQAPTRLVVFDYHPQVDDQREAVQDAAARLSSTGVAVQTLAELLERGKDLPAVAEPPADEDSLALLIYTSGSTGAPKGAMYPQSNVGKMWRRGSKNWFGESAASITLNFMPMSHVMGRSILYGTLGNGGTAYFAARSDLSTLLEDLELVRPTELNFVPRIWETLYGEFQRQVERRLSEAGDAGERRAVEAEVLAEQRQYLLGGRFTFAMTGSAPISPELRNWVESLLEMHLMDGYGSTEAGMVLFDGEIQRPPVIDYKLVDVPDLGYFSTDRPHPRGELLLRTENMFPGYYKRAETTAGVFDEDGYYRTGDVFAEIAPDRLVYVDRRNNVLKLAQGEFVTLAKLEAVFGNSPLIRQIYVYGNSAQPYLLAVVVPTEEALASGDPETLKPKIADSLQQVAKEAGLQSYEVPRDFIIETTPFSLENGLLTGIRKLAWPKLKQHYGERLEQMYADLAAGQANELAELRRNGAQAPVLQTVSRAAGAMLGSAASDLSPDAHFTDLGGDSLSALTFGNLLREIFDVDVPVGVIVSPANDLAAIASYIEAERQGSKRPTFASVHGRDATVVRAADLTLDKFLDAETLAAAPNLPKPATEVRTVLLTGATGFLGRYLALEWLERMDMVDGKVIALVRARSDEEARARLDKTFDSGDPKLLAHYQQLAADHLEVIAGDKGEANLGLGQDVWQRLADTVDVIVDPAALVNHVLPYSELFGPNALGTAELIRLALTSKQKPYTYVSTIGVGDQIEPGKFVENADIRQMSATRAINDSYANGYGNSKWAGEVLLREAHDLCGLPVAVFRCDMILADTTYAGQLNLPDMFTRLMLSLVATGIAPGSFYELDADGNRQRAHYDGLPVEFIAAAISTLGSQITDSDTGFQTYHVMNPYDDGVGLDEYVDWLVDAGYSIERIADYSEWLRRFETSLRALPDRQRQYSLLPLLHNYRTPEKPINGSIAPTDVFRAAVQEAKIGPDKDIPHVSPPVIVKYITDLQLLGLL

SEQ ID NO: 44820 - protein, 449 aa, Mycobacterium avium subsp. paratuberculosis K-10
MARLEQTRRLVTEIPGPASLELSKRRAAAVSHAVNVSVPVFVARAGGGIVEDVDGNRLIDLGSGIAVTTIGNSAPRVVDAVRAQVAEFTHTCFMVTPYESYVAVAEMLNRITPGAGDKRSVLFNSGAEAVENAVKVARAYTRKPAVVAFDHAYHGRTNLAMALTAKSMPYKGGFGPFAPEIYRAPLSYPYRDGLLDKELATDGEKAAARAINIIDGQIGADSLAAVIIEPIQGEGGFIVPVEGFLPTLLDWCRRNDVLFIADEVQTGFARSGAMFACEHEGPNGLEPDLICTAKAIADGLPLSAVTGRAQIMDAPHVGGLGGTFGGNPLACAAALATIETIESDGLIERARQLERLITEPLLRLQARDDRIGDVRGRGAMIAIELVKSGTAEPDKDLTQRLSVAAHAAGVIVLTCGMFGNIIRLLPPLTISDELLAEGIDILGGLLADL

SEQ ID NO: 44821 - protein, 333 aa, Pyrococcus furiosus DSM 3638
MRPKVGVLLKMKREALEELEKYAEVEVIPYPSEEELKNKIHEFDGIIVSPVTKITKDVLEKAERLKVISCHSAGYDHIDVEEATRKGIYVTKVSGLLSEAVAEFAVGLLINLMRKIHYADKLIRRGEWESHVKIWTGFKGIESLYGKKVGILGMGAIGKAIARRLIPFGVELYYWSRHRKVDVESELHATYMDIDELLEKSDIVILALPLTKDTYHIINEERVKKLEGKYLVNIGRGALVDERAITEAIKQGKLKGYATDVFENEPVREHELFKYEWETVLTPHYAGLAVEAQEDVGFRAVENLISIFRGIVPEDLVNKEVLKIRPIESVKML

SEQ ID NO: 44822 - protein, 216 aa, Vibrio sp. Ex25
MNYQAAIFDMDGLLLDTERVCMRIFQEACEVQNLPFYEDVYLSIIGRNAAGIEAIFRKAYGENLDRLHHEWRTRYNAVVKHQAIPVKNGVVELLEWLKAQGLPIAVATSTAKEVAKIKLELAGLSKYFDNLTTGCEVNHGKPDPEIYLLAANRLDVEPSQCLAFEDSNNGVRAAVAANMVTYQIPDLVEPCEEVKQFGHSIVPSLHEALDALKQNR

SEQ ID NO: 44823 - protein, 181 aa, Persea americana
VNMATGDHKKEPFISLNPFGQVPALEDGDLKLFESRAITNYISHEYAGKGTDLICKDSKKMAIVAVWMEVEAHHFDPEASKLVWELFYKPIYGLTTDPAAVTALSEKLAKVLDVYEGPLAHSKYLGGDCFHFADLHHLPCLNYLMTTQVKELFDSRLHVSAWCQDILARPAWAKVVEMQKK

SEQ ID NO: 44824 - protein, 546 aa, Zea mays
MVDSKSRHGNQTADVSGITSAKDPTSTKTSLDRLKQPMPYKGRKELMNFLHETMQSPNKSTMPTPVSQRKRVAAPFGSVDRKLFILTPMPLRSGGSAVAGAGMFNNKVQDMENIEEKVHVLELKVLLRSFHQGCKVDVWSAGVTLFSSLKNVTKMLHLSDKRNIKEIAKLKGSEELWEVAKLHNCESSYPSDLFDVKFPLCSVDLREWLSSEDALMHEFFAPGRDNFRKLRMLRRSAGSDAAWVEWTWKHPTTNQPTNQASSRRVEASGPRRHKRKREDKASAAPPPMPPLLTSPASLPSASPLLVSCIGALHRPGPFLHQRAAASVHFLAPHRKTRPPPAMSWLGKLGLSGLGGSPRASEASAALAQGPDEDQPAPGNEFAQFGAGCFWGVELAFQRVPGVTRTEVGYSQGNIHDPTYEDVCTGTTNHNEVVRVQYDPAACKYDDLLDTFWARHDPTTPNRQGNDVGTQYRSGIYYYNPEQEKAARESLEKQQKLLNRKIVTEIVPAKRFYRAEEYHQQYLEKGGRFGFGQSAAKGCNDPIRCYG

SEQ ID NO: 44825 - protein, 481 aa, Malus x domestica
MTSILLGYDIGVMSGASLFIKENLKISDVQVEIMNGTLNLYSLIGSALAGRTSDWIGRRYTIVLAGTIFFIGALLMGFAPNYAFLMFGRFVAGVGVGYALMIAPVYTAEISPASFRGFLTSFPEVFVNIGILLGYVSNYAFSKLPIHLNWRIMLGVGAFPSVILAVGVLAMPESPRWLVMQGRLGDAKRVLQKTSESIEECQLRLDDIKEAAGIPKESNDDVVQVSKRSHGEGVWKELLLHPTPAVRHILIAALGIHFFEQSSGIDSVVLYSPRIFEKAGITSYDHKLLATVAVGVVKTICILVATVFLDKFGRRPLLLTSVAGMVFSLSCLGASLTIVDQQHGKIMWAIVLCITMVLLNVAFFSIGLGPITWVYSSEIFPLQLRAQGCSMGVAVNRVTSGVISMTFISLYKAITIGGAFFLYAGIAAVGWVFFYMLYPETQGRTLEDMEVLFGKYHKWREANALLQKAKQVDGDDKGQVH

SEQ ID NO: 44826 - protein, 570 aa, Kluyveromyces lactis NRRL Y-1140
MESVIRSSAKICPFMHSATGSMQSVKALKNANLPAIAQQCPFMGKAMEQRRGYASSASGASAAAAATATASTSASNSNSSVEASASADVVDHATKEASFDYQGLFDSDLAKKRMDKSYRFFNNINRLAKEFPMAHRKLEDDKVTVWCSNDYLALSKNQEVIEVMKKTLDKYGAGAGGTRNIAGHNKHALQLEAELATLHKKEGALVFSSCFVANDAVISLLGQKIKDLVIFSDELNHASMIVGIKHASTKKHIFKHNNLDQLEELLAMYPKSTPKLIAFESVYSMSGSVADIDKICDLAEKYGALTFLDEVHAVGLYGPHGAGVAEHCNFDAHRKAGIASPEFRTVMDRVDMITGTLGKSFGTVGGYVAGSLQLIDWVRSYAPGFIFTTTLPPAVMAGAAEAIRYQRSHLDLRQDQQRHTTYVKDGLADLGIPVMPNPSHIVPVLVGNPHLAKQASDILMDKHRIYVQAINFPTVARGTERLRITPTPGHTNDLSDILMDALEDVWSTLQLPRVRDWEAQGGLLGVGDPNHVPQPNLWTKDQLTLTNNDLHPNVKQPIIEQLEVSSGIRY

SEQ ID NO: 44827 - protein, 208 aa, Arabidopsis thaliana
MASSASKFIKCVTVGDGAVGKTCMLICYTSNKFPTDYIPTVFDNFSVNVVVEGITVNLGLWDTAGQEDYNRLRPLSYRGADVFVLAFSLISRASYENVFKKWIPELQHFAPGVPIVLVGTKMDLREDRHYLSDHPGLSPVTTSQGEELRKHIGATYYIECSSKTQQNVKAVFDAAIKVVIKPAVKQKEKKKKQKPRSGCLSNILCGKN

SEQ ID NO: 44828 - protein, 231 aa, Bartonella quintana str. Toulouse
MPQINLIIFDCDGVLVDSEYLAAKIGSQLLKQTGYEISPEELSERYTGLIFRDILKRIEQETEKPISAHLIDQMSNLFRAQIKTELRAIDGIREAVEKVKSRYPCCICSNAKSVDIKEMLITVGLYDLFEDKIFSAPEVGTKKAKPAPDVFLFAAHLLHAKPSNTIVIEDSIHGVHAATAAGMRVIGFTGGSHSYLSHSNALVDAGAETSIAKHAHLLEVLEAMAIWQNSS

SEQ ID NO: 44829 - protein, 353 aa, Magnaporthe grisea 70-15
MASATEGKSPHDVCFEERPMPKLASEHDVLVAVNYTGICGSDVHYWHHGSIGDFVVKDPMVLGHESAGTVVEVGSAVKTLQVGDRVALEPGYPCRRCRDCLAGRYNLCPEMRFAATPPYDGTLAGFWTAPADFCYKLPESVSLQEGAMIEPLAVGVHIVRQAKVSPGQSVVVMGAGPVGLLCAAVARAFGATTVVSVDIVESKLEVAKQIAATHTYLSQRISPQDNAKALIAAAGLEDNGGADVVIDATGAEPSIQTSIHAVRVGGSYVQGGMGKPDITFPILAFCCKEVTASGSFRYSAGDYRLAIDLVANGKVNLKALITETVPFDKAQEAFTKVSEGQVIKVLIAGPNEK

SEQ ID NO: 44830 - protein, 615 aa, Propionibacterium acnes KPA171202
MGPASLRQALPRSARPYPACAKDHLMTHVPCTPAAEIPETLAPTGALGLTSAQLQARLDEIHPVGSIDRTETEWFRTAVFYEVLVRSFKDSNGDGIGDFKGLTGKLDYLQWLGVDCLWLPPFYDSPLHDGGYDIRDYRWIREELGTIEDFKVFLDAAHDRGLRVIIDFVMNHTSDSHPWFQSSRADPDGPYGNYYVWSDTDEAYSDARIIFCDTEDSNWSWDSQRKQFYWHRFFHHQPDLNFEEPRVMEEMLDAVRFWMDLGIDGFRLDAVPYLIEAEGTNCENLPGTHKILKQLRAMVDEEYPGRILLCEANQWPDDVVEYFGNGDECQMAFHFPVMPRLYMGLRRGSRECISEILAHTPHIPDGCQWGTFLRNHDELTLEMVTEEDRHYMWEEYAPESRWRCNLGIRRRLSPLVDNDDAKIRLLNAMLLSLPGSPVLYYGDEIGMGDDPWLPDRDGVRTPMQWDDSETAGFSTALPEDFHLPLIRTFGHDPEHVNVARQMDDPSSLLVWTRAMLGIRRHHPVFGTGEFTDLGGPDMAVMSFLRHNEHETVLCLANFSDTERMVALHLPQFAGMTGSSLIHGQDAQPVKADGTLSVPLWPYGYRWLQMSREERS

SEQ ID NO: 44831 - protein, 416 aa, Streptococcus pyogenes MGAS10394
MTDMRRLGQRAKQASLLIAPLSTQIKNRFLSTLAKALVDDTQTLLAANQKDLANAKEHGISDIMMDRLRLTSERIKAIAQGVQQVADLADPIGQVIKGYTNLDGLKILQKRVPLGVIAMIFESRPNVSVDAFSLAFKTNNAIILRGGKDALHSNKALVKLIRQSLEKSGITPDAVQLVEDPSHAVAEELMQATDYVDVLIPRGGAKLIQTVKEKAKVPVIETGVGNVHIYVDAQADLDMATNIVINAKTKRPSVCNAAEGLVIHEAVAARFIPMLEKAINQVQPVEWRADDKALPLFEQAVPAKAEDFETEFLDYIMSVKVVSSLEEAISWINQHTSHHSEAIITRDIKAAETFQDLVDAAAVYVNASTRFTDGFVFGLGAEIGISTQKMHARGPMGLEALTSTKFYINGDGHIRE

SEQ ID NO: 44832 - protein, 139 aa, Glycine max
  misc_feature (100)..(100): Xaa can be any naturally occurring amino acid
  misc_feature (120)..(120): Xaa can be any naturally occurring amino acid
  unsure (1)..(139): unsure at all Xaa locations
GGNLALPHVMEHAYTYPGVEQLGGDMFESVPQGDAILMMCVLHDWSDEWCLKVLKNCYASIPSDGKVIVVVDGILPFEPKTTGASKSISQFDVLMMTTNXPGGKERSEEEFMALAKGAGXSGIRFTCFVSDLWVMEFFK

SEQ ID NO: 44833 - protein, 275 aa, Streptococcus pyogenes MGAS10394
MGMMKRQFEDVTRIVIKIGTSSLVLPTGKINLEKIDQLAFVISSLMNKGKEVILVSSGAMGFGLDILKMEKRPTNLAKQQAVSSVGQVAMMSLYSQIFAHYQTNVSQILLTRDVVVFPESLANVTNAFESLISLGIVPIVNENDAVSVDEMDHATKFGDNDRLSAVVAGITKADLLIMLSDIDGLFDKNPTIYEDAQLRSHVAVITQEIIASAGGAGSKFGTGGMLSKVQSAQMVFENKGQMVLMNGANPRDVLRVLEGQPLGTWFKQIEEVTHD

SEQ ID NO: 44834 - protein, 471 aa, SYNECHOCOCCUS SP. WH 8102
MSPAATKTAQPDIVLLANSEGEVREVKSNAETKKAPARRRSSKASAKDLTAAADELLSAADPKKAEAGKTKAKAAPKASTKKTTAKAATAKKPAAKKASAKKASSKTSAETDAAPAKAVVAKPEIVLSPEEKAKAIAAEKAAKAKALASIKIGPKGVYTEDSIRVYLQEIGRIRLLRPDEEIELARKIADLLHLEELAAQFESDNGREPDKKEWAALVEMPLIRFRRRLMLGRRAKEKMVQSNLRLVVSIAKKYMNRGLSFQDLIQEGSLGLIRAAEKFDHEKGYKFSTYATWWIRQAITRAIADQSRTIRLPVHLYETISRIKKTTKVLSQEFGRKPTEEEIAESMEMTIEKLRFIAKSAQLPISLETPIGKEEDSRLGDFIEADIENPEQDVAKNLLREDLEGVLATLSPRERDVLRLRYGLDDGRMKTLEEIGQIFDVTRERIRQIEAKALRKLRHPNRNGVLKEYIK

SEQ ID NO: 44835 - protein, 586 aa, Medicago sativa
MCGILAVLGCSDDSQAKRVRILELSRRLKHRGPDWSGLHQHGDNYLAHQRLAIVDPASGDQPLFNEDKSIIVTVNGEIYNHEDLRKQLPNHKFRTQCDCDVIAHLYEEYGENFVDMLDGIFSFVLLDTRDNSFIVARDAIGVTSLYIGWGLDGSVWIASELKGLNDECEHFEVFPPGHLYSSKDREFRRWYNPPWFNEAVIPTTPYDPLVLRNAFEKAVIKRLMTDVPFGVLLSGGLDSSLVAAVTARYLAGTKAAKQWGAKLHSFCVGLKGAPDLKAGREVADFLGTVHHEFQFTIQDGIDAIEDVIYHTETYDVTTIRAATPMFLMSRKIKSSGVKWVISGEGSDEIFGGYLYFHKAPNKEEFHQETCRKIKALHRYDCLRANKSTYAWGLEARVPFLDKDFIKVAMDIDPEYKMIKHEEGRIEKWILRKAFDDEENPYLPKHILYRQKEQFSDGVGYGWIDGIKDHAAKHVTDRMMLNASHIFPFNTPLTKEAYYYRMIFERFFPQNSARLTVPGGASVACSTEKAIEWDASWSSNLDPSGRAAFGVHNSAYENQVNSVAKTVEPEKIIPKMEISNLGVAIQS

SEQ ID NO: 44836 - protein, 729 aa, Streptococcus pyogenes MGAS10394
MATVSTGSLIFIVKKNSPMMSKLVFFWQNREKEFRDFGGFSEKSVYFCDTIDNRKRLILVVINREVLLMTFDAIDQLAVNTVRTLSMDAIQAANSGHPGLPMGAAPMAYVLWNHFMNINPKTSRNWSNRDRFILSAGHGSAMLYSLLHLAGYDLSVEDLKNFRQWGSKTPGHPEVNHTDGVEATTGPLGQGIANAVGMAMAEAHLAAKFNKPGFDIVDHYTFALNGDGDLMEGVSQEAASMAGHLKLGKLVLLYDSNDISLDGPTSMAFTEDVKGRFEAYGWQHILVKDGNDLEEIAAAIEAAKAETEKPTIIEVKTIIGFGAEKQGTSAVHGAPLGAEGIAFAKKAYQWTHQDFEVPAEVTERFAQGLQARGEKAEQAWNDLFAAYEAEYPELAAEYQKAFANEAAQVELEAHELGSSMASRVSSQQAIQQISEQVASFWGGSADLSASNNTMVKAETDFQPGHYEGRNVWFGVREFAMAAAMNGIALHGGTRVYGGTFFVFSNYLLPAVRMAALQNLPTVYVMTHDSIAVGEDGPTHEPIEQLASVRSMPNLNVIRPADGNETNAAWKRAIAETDRPTMLVLTRQNLPVLEGTKELAEDGLNKGAYILSEAKGDLEGILIATGSEVKLAMDTQEALEAEGIHVRVVSMPSQNIFDEQSAEYKESILPAAVTKRLAIEAGSSFGWAKYVGLAGKTLTIDTWGASAPGNRIFEEYGFTVANATELYKSL

SEQ ID NO: 44837 - protein, 128 aa, Oryza sativa (japonica cultivar-group)
MEDDKKEAASKYRGVRRRPWGKFAAEIRDPERGGSRVWLGTFDTAEEAARAYDRAAFAMKGAMAVLNFPGRTSSTGSSSSSSSTPPAPVTTSRHCADTTEKVELVYLDDKVLDELLAEDYSYRNNNNY

SEQ ID NO: 44838 - protein, 481 aa, Xylella fastidiosa Ann-1
MRPLPTLLTLSIAAAFGGFAATGMNAWLDNRAEAASNTNAISPISSLPTGTVPQTTAANQPLPSLAPMLQQVMPAVVSINSKQVVRVRNPFFDDPILRRLFPEIPQERINESLGSGVIIDARNGYVLTNHHVIENADAVQVTLADGRSFKAEFLGSDADTDIALIRIKANKLTEIKLADSNKLRVGDFVVAIGNPFGFTQTVTSGIVSAVGRSGILGLGYQNFIQTDASINPGNSGGALVNLHGQLVGINTASFNPQGSMAGNIGLGLAIPSNLARNVVEQLVTKGVVVRGTIGVQTQNIDARMAQSLGLSNPHGALVTRVLPNSAGAAAGLQPGDVILAANDQRVDNAETLHNYEGLQPVGSSVTLEVHRGGKPLKIRLTLKELPRAIAGETLDSRLSGAIFVDLPESLRQSGIGGVMVNKIKHGSRAAANGLVAGDVIIAASIGEFSDLASWRASFSHPPQRLILRVLRGNAQYDALMR

SEQ ID NO: 44839 - protein, 277 aa, Beta vulgaris
  misc_feature (15)..(15): Xaa can be any naturally occurring amino acid
  unsure (1)..(277): unsure at all Xaa locations
EDLQLLPKILTWCRXIHLFVGVVYCLISWTVGLPKRAPIDGTLLKLLIPVAVCHALGHVTSNVSFAAVAVSFTHTVKALEPFFNAAASQFILGQPIPITLWLSLAPVVIGVSMASLTELSFNWLGFISAMISNISFTYRSIYSKKAMTDMDSTNIYAYISIIALFVCLPPAIIVEGPQLIKHGFNDAITKVGLTKFVSDLFWVGMFYHLYNQLATNTLERVAPLTHAVGNVLKRVFVIGFSIIIFGNKISTQTAIGTSIAIAGVAIYSFIKAKMEEE

SEQ ID NO: 44840 - protein, 246 aa, Arabidopsis thaliana
MVKKSYPEVKEEYKKAVQRCKRKLRGLIAEKHCAPIVLRLAWHSAGTFDVKTKTGGPFGTIRHPQELAHDANNGLDIAVRLLDPIKELFPILSYADFYQLAGVVAVEITGGPEIPFHPGRLDKVEPPPEGRLPQATKGVDHLRDVFGRMGLNDKDIVALSGGHTLGRCHKERSGFEGAWTPNPLIFDNSYFKEILSGEKEGLLQLPTDKALLDDPLFLPFVEKYAADEDAFFEDYTEAHLKLSELG

SEQ ID NO: 44841 - protein, 475 aa, Burkholderia fungorum LB400
MVETDDMQSNAVHPCDQRLPAGQLLTLGIQHVLVMYAGAVAVPLIIGAALKLPKDQIAFLISADLFSCGIATLIQTLGLWIFGIRLPVIMGCTFAAVGPMVAIGTNPSLGILDIFGSTIAAGVVGILLAPAVGKLLRFFPPVVIGVVISVIGLSLMEVGINWAAGGVGNPDYGNPVYLGLSLIVLMLILLINKFARGFLANISVLLGIVAGFVIALALGRVNMEGVTHAPWVGFIMPFHFGLPHFDPLSIATMVTVMFVTFIESTGMFLAVGDMVDRPVDQKTLVRGLRVDGLGTLIGGIFNSFPHTSFSQNVGLIGVTGVKSRFVCAMGGVILVLLGLFPKMAQVVASVPAFVLGGAGIVMFGMVAANGIKVLSKVDFVKNHHNLFIVAVSIGLGLVPVVSPHFFSKLPPALSPLLHSGILLASVSAVVLNLIFNGVKSEKKARCEIRSAGHDFDGRGGNEPRRDEMLRAADLH

SEQ ID NO: 44842 - protein, 138 aa, Glycine max
  misc_feature (92)..(92): Xaa can be any naturally occurring amino acid
  misc_feature (111)..(111): Xaa can be any naturally occurring amino acid
  unsure (1)..(138): unsure at all Xaa locations
VKNHKSIILNHNPPPIKNPKSQIITSNHKSRTLNYKSQFKSQITTPNHKLSRSWSLIHDCKRDKEALCFQFNIKLNNVVDTQIANSLIEGKXRKVNKHISFVDLLADPRYXGVVYPEKEEVREILVGVGDEENEVGES

SEQ ID NO: 44843 - protein, 588 aa, Staphylococcus epidermidis RP62A
MAEKKIIVVGGGLAGLMSTIKAAEQGAHVDLFSIVPVKRSHSVCAQGGINGAVNTKGEGDSPWIHFDDTVYGGDFLANQPPVKAMADAAPKIIHLLDRMGVMFNRTKEGLLDFRRFGGTLHHRTAFAGATTGQQLLYALDEQVRSFEVDGLVTKYEGWEFLGIVKDEEDAARGIVAQNMTTSEIQSFGSDAVIMATGGPGIIFGKTTNSMINTGSAASIVYQQGAIYANGEFIQIHPTAIPGDDKLRLMSESARGEGGRIWTYKDGKPWYFLEEKYPDYGNLVPRDIATREIFDVCINQKLGINGENMVYLDLSHKDPHELDVKLGGIIEIYEKFTGDDPRKVPMKIFPAVHYSMGGLYVDYDQMTNIKGLFAAGECDFSQHGGNRLGANSLLSAIYGGTVAGPNAIKYVENVEKSYTDLDDSIFEARVKEEKEKFDHLLNMRGTENAYKLHRELGEIMTANVTVVRENEKLLETDKKIQELMKRYEDIDMEDTQTWSNQAVFFTRQLWNMLVLARVITIGAYNRNESRGAHYKPEFPERNDEEWLKTTMARYKGRSEKPEFTYEPVDVSLIPPRKRDYTSKSKGGNK

SEQ ID NO: 44844 - protein, 415 aa, Shewanella sp. MR-4
MSLIKQISADAAHAAHILAQLDESLKNTVLLDMARSLREKSYEIQSANLIDVHRAIQDNLSSAMVDRLTLNQHRIEAMAQGIETIAALPDPVGHERYIGKRPNGLSISKMRVPLGVVCMIYEARPNVTADAGALCFKSGNAVILRGGKEALHTSQVIASILQAVLTAYGLPKALISVIPDPDRALMLELMQQREFIDVIIPRGGEGLINYVTENSSIPVIQHFKGVCHLYVDKDANQDIALDLLLNGKTQRTGVCNALEGLLVHKDIAPRFLPRVAKALAEHQVKINACPPAAAYFDACTYMAEEDFGQEYLDLEIAIRQVDSFEVATQHIAKFGSHHTEVICTDNELTAAHFQRAVDASVVMVNASSRFSDGSELGLGAEIGIATTKLHAYGPMGLEALTTEKYLVSGTGQIRA

SEQ ID NO: 44845 - protein, 232 aa, Arabidopsis thaliana
MDALGGCGGAGGFWGWNGFDQRRKKKSSGDRGKKRNSGSSDSVDVSRDAGGYRFPLKQAVTAGALTFTGDTIAQLSGRWKKRTALKQSSSELDEGELWNIFSEHDWIRALRMSSYGFLLYGPGSYAWYQFLDHSLPKPTATNLVLKVLLNQVILGPSVIAVIFAWNNLWLGKLSELGNKYQKDALPTLLYGFRFWVPVSILNFWVVPLQARVAFMSMGSVFWNFYLSSTMSK

SEQ ID NO: 44846 - protein, 349 aa, Clostridium thermocellum ATCC 27405
MNVKALFLAGGLGTRLRPITNDLPKPMVPIMGKPLLERNIEKLKSYGIDEVVLSTCYKPHKIDKYFGDGKKFGVKISYITEDKPLGTAGAIKNAEELLSDTFLVFNADILSDIDIANMIRFHKEKGALATIAVTKVDNPSAYGVIEHDDDNFITAFKEKPQPHESKSNLINAGVYIFEKELLNHIPRGRAVSIERETYPLLLEKGYKMAVYNKCGYWLDLGTPGKYLKVHKDILKGLVPIGNYDFGQNRTYISKSAKIDRSAKIRGPVYIGENVVIGPSAVIGPNAVLFDDAVVGMGAKVVDSVVWDNVNVERGATVVNSVIMSNCRVDEDSEKYNSVLTENFSEPIAV

SEQ ID NO: 44847 - protein, 305 aa, Zea mays
MLRTLARMAPKNWTKESFTLNTGAKIPAVGLGTWQSKPGEVREAVKAALQGGYRHIDTALAYGNEKEVGQGIKDSGVPREEIWVTTKLDNPWHKRVEEGINSSLSSLGLDYVDLYLMHWPSSTDPDDLKKHYPDWDFKDTWAEMQKLPESGRVKNIGVSNFAIKNLEKLFADSRFKITPAVNQIELHPNNPSPKLLDYCKEKGIHCTAYSCLGSTDSPLYKNEKLKKLAESKGKSVQQVLLMWGLQRGTSVIPKSVTASRIMGNFELDGWELTDEEMKEISSLPERFKVCGDAWLPVKVFFGDDE

SEQ ID NO: 44848 - protein, 451 aa, Shewanella sp. MR-4
MAQHFDYICLGAGSGGIASANRAAMRGAKVLLIEAKHVGGTCVNVGCVPKKVMWYGAHIAEAMHLYAKDYGFDVSVNKFDWNTLVNSREAYIGRIHEAYGRGFTNNKVTLLNGYGRFVNGNTIEVNGEHYTADHILIATGGAPTIPNIPGAEYGIDSDGFFALREQPKRVAVVGAGYIAVEVAGVLHALGSETHLFVRKHAPLRNFDPMLIDALVDAMKTEGPTLHTNSVPQSVVKNADDSLTLHLENGESMTVDCLIWAIGRSPATGNIGLENTDVQLDSKGYVITDAQQNTTHKGIYCVGDIMAGGVELTPVAVKAGRLLSERLFNGMSDAKMDYSQIPTVVFSHPPIGTMGLTEPEARAQYGDDNVKVYTSSFTSMYTAVTSHRQACKMKLVCAGKEEKVVGIHGIGFGMDEILQGFGVAMKMGATKADFDAVVAIHPTGAEEFVTMR

SEQ ID NO: 44849 - protein, 78 aa, Silene vulgaris
MSCCNGNCGCGSACKCGSGCGGCKMFPDFAEGSSGSASLVLGVAPMASYFDAEMEMGVATENGCKCGDNCQCNPCTCK

SEQ ID NO: 44850 - protein, 596 aa, Listeria monocytogenes str. 1/2a F6854
MKIWNSIVGKIWSTIILLLIGILVISGFLVAMIYEKNNITRITNELEDKTASIITVMQENNEVISAENNNDSALILLDDTMGVIIEQNGKSVYQSQSPDTISSASANKLIQDKTLDKALEKDNSVTMKYNFKTEKSSLPVEISAQKFKLANGETGVVYVYQSYHDILKVNEKTMSTLIISGIIAIVITSILSFVFSSRMAFPLREMKKIAIAVSKGNFDNRVPTYTHDEIGELGVAFNDMAKQLKYNVSALRQEKEQLSNILVGMADGVIKFSVDKTIILSNPPAEEFLHNWFFSPENTEKVLIPVALNELLNDTLEKKESQVGEITFADHTYVAILTLLYTGEHVRSIVAVIRDMTEEKQLEKMKSDFVNNVSHELRTPISMLQGYSEAIIDGVAQSDEEVREFAQIIYDESLRIGRLVNDMLDLARMEAGFNQMDNQKLPLAPLLRKVISNFDVLAKENFVELGLELETPDLEYSYDPDRMEQVLINLIMNAIRHTGKEGYDGKVILKQTIDEARSNLVITVSDNGSGIAEEDIPYLFERFYKVDKARKRGKAVGTGIGLAIVKNIVEAHNGKISVESELGKGSDFIITLPLYK

SEQ ID NO: 44851 - protein, 564 aa, Photobacterium profundum SS9
MTLPLQTERLRETLMAQPLPNEMILKWASERPNEVYLRQIINRQFVDYTFAEVADKALRLVSALRDMGIQPGDKVALMSKNCAEWFITDLALMLGSYISVPVFPTAGADTVEHCVTHSESKILIVGKLDDAKAVNAVVEKYPDLPTISFAYPGTPTCTHEFNTVIAKSLPSEERPKHAQDALMSIVYTSGTSGLPKGAMLTYGSFSWSAQRIVDHIGMRDGERLFSYLPLAHITERVYIFGASILAGMQVAFPESLDTFIDDVKMHRPTLFISVPRLWTLFQQRILDKLPQAKLNILLKIPFISGVIKRKLADGLGLDQARMLGCGSAPVSPALLRWYENIGLNITEAWGMTESFAYSTINHPFRSDKIGTVGNAGPGVEIKISNGDEILVRGMGIFSGYYKNEKATQESFDEDGWLYTGDKGFLDEDGYLTIQGRLKDTFKTAKGKFVSPVPIEKRLFELCNIETMCVIGSGMPAPILLAIPHEFPNFDPKRYEHKIERTIETINKELESHAKIKGVLMVKEPWTIENGILTPTLKIKRHILENKYQGLGDDWPKDTLIQWEK

SEQ ID NO: 44852 - protein, 472 aa, Glycine max
MGMEEESSIIEGGASLPSSGSDAKKRRVTYFYEPTIGDYYYGQGHPMKPHRIRMAHNLIVHYSLHRRMEINRPFPASPADIRRFHSDDYVDFLSSVSPETLADSAFSRHLKRFNVGEDCPVFDGLFPFCQASAGGSLGAAVKLNRADADIAINWAGGLHHAKKSEASGFCYVNDIVLGILELLKAHRRVLYVDIDVHHGDGVEEAFYTTDRVMTVSFHKFGDFFPGTGHVKDIGVGSGKNYAVNVPLNDGMDDESFRSLFRSIIQKVMEVYQPEAVVLQCGADSLSGDRLGCFNLSVRGHADCLRFLRSFNVPLMVLGGGGYTIRNVARCWCYETAVAVGVEPDNKLPYNEYYEYFGPDYTLYVDPSNMENLNTSKDLEKLRNTLLEQISRLPHAPSVPFQTTPPTLQLPEEAEENMDRRPKLRKWDGEDYDSDPEEGGKDNSKFSNITAHMRDIADEMEEEKPEEHPSSCS

SEQ ID NO: 44853 - protein, 668 aa, Saccharomyces cerevisiae
MEDKFANLSLHEKTGKSSIQLNEQTGSDNGSAVKRTSSTSSHYNNINADLHARVKAFQEQRALKRSASVGSNQSEQDKGSSQSPKHIQQIVNKPLPPLPVAGSSKVSQRMSSQVVQASSKSTLKNVLDNQETQNITDVNINIDTTKITATTIGVNTGLPATDITPSVSNTASATHKAQLLNPNRRAPRRPLSTQHPTRPNVAPHKAPAIINTPKQSLSARRGLKLPPGGMSLKMPTKTAQQPQQFAPSPSNKKHIETLSNSKVVEGKRSNPGSLINGVQSTSTSSSTEGPHDTVGTTPRTGNSNNSSNSGSSGGGGLFANFSKYVDIKSGSLNFAGKLSLSSKGIDFSNGSSSRITLDELEFLDELGHGNYGNVSKVLHKPTNVIMATKEVRLELDEAKFRQILMELEVLHKCNSPYIVDFYGAFFIEGAVYMCMEYMDGGSLDKIYDESSEIGGIDEPQLAFIANAVIHGLKELKEQHNIIHRDVKPTNILCSANQGTVKLCDFGVSGNLVASLAKTNIGCQSYMAPERIKSLNPDRATYTVQSDIWSLGLSILEMALGRYPYPPETYDNIFSQLSAIVDGPPPRLPSDKFSSDAQDFVSLCLQKIPERRPTYAALTEHPWLVKYRNQDVHMSEYITERLERRNKILRERGENGLSKNVPALHMGGL

SEQ ID NO: 44854 - protein, 77 aa, Quercus suber
MSCCGGNCGCGTGCKCGSGCGGCKMFPDISSEKTTTETLIVGVAPQKTHFEGSEMGVGAENGCKCGSNCTCDPCNCK

SEQ ID NO: 44855 - protein, 479 aa, Vibrio sp. Ex25
MTNKKLTTAAGCPVAHNQNVMTAGPRGPQLLQDVWFLEKLAHFDREVIPERRMHAKGSGAYGTFTVTHDITKYTRAKIFSEIGKKTELFARFTTVAGERGAADAERDIRGFALKFYTEEGNWDLVGNNTPVFFLRDPLKFPDLNHAVKRDPRTNMRSSTNNWDFWTSLPEAFHQVTIVMSDRGIPASYRHMHGFGSHTFSFINAENERYWVKFHFKTQQGIKNLTDQEAEAIVGKDRESHHRDLYEAIERQDFPKWKMYVQIMPELEADEVNFNPFDLTKVWSQKDYPLIPVGEFELNRNPENFYAEVEQSAFNPAAIVPGIGFSPDKMLQGRLFAYGDAQRYRLGVNHHQIPVNTPRCPVHSYHRDGAMRVDGNFGSTLGYEPNYKQEWAEQPDYSEPPLRINGNADHYDHRVDEDYFSQAGNLFRLMSEEQRQTLFDNTARAMDGVPDFIKERHVNHAYQADEAYGKGLEIALGLNK

SEQ ID NO: 44856 - protein, 275 aa, Cladonia arbuscula
GAVKVVAVNDPFIEPHYAAYMLKYDSQHGQFKGTIEVEGSDLIVNGQKVKFYTEKDPGAIPWKDTGAYYIVESTGVFTTTEKAKAHLKGGAKKVVISAPSADAPMFVMGVNEETYKSDIEVISNASCTTNCLAPLAKVMHDNFTIIEGLMTTIHSYTATQKTVDGPSAKDWRGGRTAAQNIIPSSTGAAKAVGKVIPSLNGKLTGMSMRVPTSNVSVVDLTCRLEKSVTYDEIKEAMKKASDGDLKGIMAYSEDDLVSTDLNGDNHSCIFDAKAG

SEQ ID NO: 44857 - protein, 439 aa, Streptomyces avermitilis MA-4680
MVTGIGAVTCHGAGADTLWRAMTAAGTRLPDRPADPLARMDLPLISLVPDPDLRAERATRFASLAAAEALSDAGLDGPSLAAARTAVVFGSCMGEPGGNERGRGADDGWQPPFRLASALAGELGLFATVHDIGNACAAGGYALGIAADLVRAGEADVVIAGGSDAYSRVALGCFNRLGAVDPERCRPFERDRAGTVFGEGAGVFVVESAAHARARGVLSSPDGAPRLTGVAWSCDADHPTAPQADAEQVVRAMREALGAAPDTVGCVVPHGTGTRLNDVLESRALHRALGPRAARVPLYSLKALLGHTGGASAALGAVAAALILRHGEVPPNVPLKEQDPECEVLLPQGDAVPLADGARRVLVNAYGFGGNNASLVLESGTPTGPSGGSAAGERAGAASGGGVGSVSGGSGSAGGGAVVGPGGGSGGVVRRTVEGGGVS

SEQ ID NO: 44858 - protein, 235 aa, Zea mays
  misc_feature (185)..(186): Xaa can be any naturally occurring amino acid
  misc_feature (226)..(226): Xaa can be any naturally occurring amino acid
  unsure (1)..(235): unsure at all Xaa locations
MGRSPCCEKAHTNKGAWTKEEDDRLTAYIKAHGEGCWRSLPKAAGLLRCGKSCRLRWINYLRPDLKRGNFSDEEDELIIKLHSLLGNKWSLIAGRLPGRTDNEIKNYWNTHIRRKLTSRGIDPVTHRAINSDHAASNITISFEAAQRDDKGAVFRRDAEPTKAAAAAITHVDHHHRSNPHHQMDXXPGKPLKCPDLNLDLCISPPSHEGPMVDTKPVVKEEAGAGXVGVVGLCFS

SEQ ID NO: 44859 - protein, 228 aa, Helianthus annuus
HLGQLKRFSLRELQVATDNFSNRHILGRGGFGKVYKGRLADGTLVAVKRLKEERTQGGELQFQTEVEMISMAVHRNLLRLKGFCMTPTERLLVYPYMANGSVASCLRERPETQEPLDWPIRKRIALGSARGLAYLHDHCDPKIIHRDVKAANILLDEEFEAVVGDFGLAKLMDYKDTHVTTAVRGTIGHIAPEYLSTGKSSEKTDVFGYGVMLLELITGQRAFDLARL

SEQ ID NO: 44860 - protein, 117 aa, Beta vulgaris subsp. vulgaris
GEGTYGVVYKARDKVTNETIALKKIRLEQEDEGVPSTAIREISLLKEMQHGNIVRLQDVVHSEKRLYLVFEYLDLDLKKHMDSSPDFAKDPRMIKRFLYQILRGIAYCHSHRVLHRD

SEQ ID NO: 44861 - protein, 278 aa, Cladonia arbuscula
  misc_feature (1)..(2): Xaa can be any naturally occurring amino acid
  misc_feature (274)..(274): Xaa can be any naturally occurring amino acid
  unsure (1)..(278): unsure at all Xaa locations
XXHGAVKVVAVNDPFVEPHYAAYMLKYDSQHGQFKGTIEVEGSDLIVNGQKVKFYTEKDPGAIPWKDTGAYYIVESTGVFTTTEKAKAHLKGGAKKVVISAPSADAPMFVMGVNEETYKSDIEVISNASCTTNCLAPLAKVMHDNFTIIEGLMTTIHSYTATQKTVDGPSAKDWRGGRTAAQNIIPSSTGAAKAVGKVIPSLNGKLTGMSMRVPTSNVSVVDLTCRLEKSVTYDEIKEAMKKASDGDLKGIMAYSEDDLVSTDLNGDNHSCIFXAKAG

SEQ ID NO: 44862 - protein, 916 aa, Dechloromonas aromatica RCB
MQKTLLRQLKRSIGVGSEAELADLLASIRTAGTTLEPAFRGILEGLGDLLSRVDASYEQYERDLELRTRSLEISSAELSAANEKLRQSLAGRDNALRSLRKTIRDHLPEANEDAETLAEEDIAVLSRRVAAMVAESEHGLRELANQKFALDQHAIVSITDTAGIITYANDRFCAISGYAREELIGQNHRIVNSGIHPPELFRDMWHTIVLGKVWHGEVCNRARDGHLYWVNATVVPLLDAKGEPERYIAIRTEITDRKRMEAQLSEQLHLVEELIENIPLPIYLKDGSGRYIRLNRAFEQFFEVRREAFIGRTLHDLLPAEDARQHAEMDADLFAAKGTQTYEATVHSQDGIAHETIYRKAVLTRRDGSVSGLLGIIVDITDRKRAEIEVLRAKEAAEAANRAKSDFLANMSHEIRTPMNGVIGMTDLALETALTEEQREYLNIAKSSAESLLTVINDILDFSKIEAGKLQVEDIPFDLHRLIADTLKPLALRAHEKDIEILSDVVHDVPRFVKGDPSRIRQVLVNLVGNAIKFTEQGEIALQADLMQLQNGHAVIHFAVRDTGIGISADKQMLIFDAFAQEDSSTTRKYGGTGLGLSICRRLVELMGGTLWLHSEPGKGSTFHFSVQLQISENAIPLVIHPVDVTGRHMLIVDDNATNRRILRGMLATLHVTCQEADSGKTALALMREQGSQFDCILLDAQMPEMDGYELARHLHAEHPALPPMLMLSSGALRGDALRCQEAGIAGFFAKPISSDELLSALGRLFDNSPKESSPEPSPLLTRHSLREAQRVLNILLVEDHPTNQKLALGLLNKWGHHGTLAQNGQEALDILASQSFDIILMDMQMPVMSGVEATQRIRAREAAMQLPRTPIIAMTAAAMQDDRDACLAAGMDDYLAKPIKVKELQALLLAYTSAP

SEQ ID NO: 44863 - protein, 233 aa, Streptococcus pyogenes MGAS10394
MDIFGEFLGTALLVLLGNGVVAGVVLPKTKTHASGWIVIATGWGIAVAVAVFISGKIAPAHLNPAVSLAFAMSGTIAWSTAIAYSLAQLLGAMLGSTLVFLQFRPHYLAAESQADILGTFATGPAIRDTSSNLLSEIFGTFVLMLGILAFGLYDMPAGLGTLCVGTLVIGIGLSLGGTTGYAINPARDLGPRLVHAILPLNNKGDSDWSYAWIPVVGPIIGAALAVLLFQVMS

SEQ ID NO: 44864 - protein, 387 aa, Streptomyces avermitilis MA-4680
MGAVASIGDSVEEIFGSLVEGRSGLAPLRGYDRDNFRAQVAYEIDDRPAPGVDEPLRATRWLERAVAAAAADAGLGDDLSRVPVLVGTTLRELRSVELSWRDGIPFDAADLHFGTMLRRRFGAVDTHTVANACSASLYALALGADLLDLGAADTVVVAGVDTITESTYGLLDRCYPEAPDRVRPFDRARRGMLQGEGAVAVVLRREADGPGPGARVHTRVRGVAVNCDAHHPSAPDAKNIAAAVQEAHLRAGVRPADIDLVMLHGTGTPLNDEAESTALGTVFGGLDPSPYMTAIKSMTGHTAGASGLHSLVAAVDVLRTGTIPPTVYLDDPVEAVAGFRLVRGTAERASAPLRIAQIDSFGFGGLNAVAVVERVDGPPASEEGAGQ

SEQ ID NO: 44865 - protein, 428 aa, Streptomyces avermitilis MA-4680
MNASINTDARGHGGPEDPRPEAAGRRVVITGLGVVTSIGIGVEAFTAGLRAGRSGVKPITAFDTTGFAHANGCEVTDFEPERWLDRQHPEELGRASQFAVAAARMAVADAGLHEEDVRARRSLVSVGTTDGESRDLDQLVAAGLENGPEEYEPAVARRIPAGRLSAGIVRELELEDVEAVTIPTACAAGNYAVGYGYDALRSGDVDIALCGGADAACRKTFTGFYRLGTIAPEVCRPFDKDREGILTGEGAGILLMESLDSALARGARIYAEVLGYGLACDALHPVAPDRDSIARTIRIAHRNAGITPDQVDFVSAHGTGTKANDITEAGAIRQVFGEDAMPRTVSIKSMIGHSMGAASAVSAAACALAITEGFIPPTVNHRETDPECGVDCVPNQAVETELSVVQNNALAFGGNNAVLILGAYRSAA

SEQ ID NO: 44866 - protein, 327 aa, Silicibacter pomeroyi DSS-3
MSETARTVVIEGFGGPEVLQLRDLPVGEPGPGELRIRHQACGLNFIDVYQRTGLYPLALPHALGMEAAGIVEAVGEGVTHLKPGDRAAYAATPPGAYAQARVMPAAQVCPLPDEISFDQAAAMMLKGLTVDYLFHRTTPLSRGDTVLFHAAAGGVGLIACQWAKAEGITLIGTAGSDEKCALAKAHGATHVINYRTENFTDRVRELTDGKGVDVVMDSIGADTFEGSLDCLKPLGMMISFGNASGPVPPVNIGMLGQKGSLKLTRPTLFTHISDHAACQAMARRLFGKVTGGEVKIRIDQRFPLDQVADAHRALEARQTTGSTILEL

SEQ ID NO: 44867 - protein, 193 aa, Streptomyces coelicolor A3(2)
MQPLIDNARMFGQRPEEFTGHAEGQSPEVLFITCSDSRVVPALITGARPGQLFELRTAGNIVPPHGTGHPSGEAATVEYAVQVLGVADIVVCGHSHCGAVGALVRGDDLTAVPAVRDWLAHAADEPKPCDPADPTVAGAVQHHVLAQLLRLRSYPCVERRLADGRLRLHGWYYEVHTGLVRAHRADTDAFETL

SEQ ID NO: 44868 - protein, 475 aa, Vicia faba var. minor
MTMEEKEEHSTEAAVTSHNDSKLFDDDDRVKRTGTVWTTSSHIITAVVGSGVLSLAWAIAQLGWIIGLSVMIFFSLITWYTSSLLSECYRTGDPHFGKRNYTFMEAVHTILGGFYDTLCGIVQYSNLYGTAVGYTIGASISMMAIKRSNCFHSSGGKDGCRISSNPYMISFGVIQIFFSQIPDFHEMWWLSIVAAIMSFTYSLIGLGLAIAKVAENGSFKGSITGVSIGTVTEAQKVWGVFQSLGNIAFAYSYSQILIEIQDTIKSPPSEMKTMKQATKISIGVTTIFYMLCGGMGYAAFGDLSPGNLLTGFGFYNPYWLIDIANAALIIHLVGAYQVYAQPLFAFVEKIMIKRWPKIKKEYKLTIPGFRPYHLNLFRLIWRTIFVITTTFISMLIPFFNDVLGLIGAAGFWPLTVYFPVEMYIKQKKITKWSYKWISMQTLSVICFVVSVVAFVGSVSSIVVDLKKYKPFTTDY

SEQ ID NO: 44869 - protein, 404 aa, Oryza sativa
EEADQVERKLVLGRYELGRLLGQGTFAKVYYGRDLRSGESVAIKVIDKARLRRTEGMVEQLRREISIMRMVRHPNVVGIREVLASRARVFVVMEYARGGELFAKVARGRLTEEHARRYFQQLVAAVGFCHGRGVAHRDLKPENLLLDEEGRLKVTDFGLAALPEQLRQDGLLHTQCGTPAYVAPEVLRKRGYDGARADLWSCGVVLYVLLCGFLPFQHENYAKMYQKIFKAEYQVPPWVSGDARRLIVRLLVVDPAKRISIPEIMRTPWFKKGFVPPVPTSPVSPKKWEEDDVLLDGGDSGAMSPRTCNAFQLISSMSSGFDLSGMFESEQKAATVFTSRAPAATVIQKLEAVGRSLGYSATRGKGWKLRLEATASVQRDVKSVGCISFSFFARGYVQAKSRDV

SEQ ID NO: 44870 - protein, 486 aa, Vicia faba var. minor
MVENISRTNLSYRGDTGGIEEAIDDAPLQTDSKFYDDDGRVKRTGTVWTTCSHIITGVIGSGVLSLAWSVAQMGWIAGPATMIFFSIITLYTSSFLADCYRSGDTEFGKRNYTFMDAVHNILGGPSVKICGVVQYLNLFGSAIGYNIAAAMSMMEIRKSYCVHSSHGEDPCHVSGNAYMIAFGVAQLFFSQIPDFHNTWWLSIVAAVMSFFYSTIALALGISKVAETGTVMGSLTGISIGTVTPAQKVWGVFQALGNIAFAYSYSFILLEIQDTIKSPPSEGKAMKKAAKLSIGVTTTFYLLCGCTGYAAFGDAAPGNLLAGFGVSKAYILVDMANAAIVVHLFGAYQVYAQPLFAFVEKEAGKKWPKIDKGFEVKIPGLPVYNQNIFMLVWRTIFVIVPTLIAMLIPFFNDVLGVIGALGFWPLTVYFPVEMYIIQKKIPKWSRKWICLEIMSTFCLFVSVVAGLGSLIGVWIDLKKYKPFSLEN

SEQ ID NO: 44871 - protein, 105 aa, Zea mays
  misc_feature (19)..(19): Xaa can be any naturally occurring amino acid
  misc_feature (37)..(37): Xaa can be any naturally occurring amino acid
  misc_feature (79)..(79): Xaa can be any naturally occurring amino acid
  unsure (1)..(105): unsure at all Xaa locations
KFQSLKNVTRGNFSCFTQXKNAQNTFSELLNMGVLPXAKENDTLAVAKIKFGDNDTLSAITTAMVKANNPFQITDVDGXYTANPRHDPNAQPIEVVSEISPLEAD

SEQ ID NO: 44872 - protein, 130 aa, Sesbania rostrata
MELQDCAGQIGYALVPMIARGVMLGPDQPVILHMLDIPPAAESLNGVKMELVDAAFPLLKGVVATTDVVEACTGVNIAVMVGGFPRKEGMERKDVMSKNVSIYKSQASALEKHAATNCKVLVVANPANTN

SEQ ID NO: 44873 - protein, 492 aa, Solanum melongena
MDLSKYRPSSAYDTPFLTTNAGGPVYNNVSSLTVGPRGPVLLEDYHLIEKLATFDRERIPERVVHARGASAKGFFEVTHDVSHLTCADFLRAPGVQTPVICRFSTVVHERGSPESIRDIRGFAVKFYTREGNFDLVGNNVPVFFNRDAKSFPDTIRALKPNPKSHIQENWRILDFFSFLPESLHTFAFFYDDVCLPINYRHMEGFGVHAYQLINKAGKAHYVKFHWKPTCGVKSMTEEEAIRVGGTNHSHATKDLYDSIAAGNYPEWKLFIQIMDPEDVDKFDFDPLDVTKTWPEDILPLMPVGRLVLNRNIDNFFAENEQLAFNPGHIVPGVYYSEDKLLQTRIFAYADTQRHRIGPNYMQLPVNAPKCAHHNNHRDGAMNFMHRDEEVDYLPSRFDPCRPAEQYPIPSCVLTGRREKCVIPKENNFKQAGERYRTWEPDRQDRYINKWVESLSDPRVTHEIRSIWISYLSQADKSCGQKVASRLLVKPTM

SEQ ID NO: 44874 - protein, 384 aa, Haloarcula marismortui ATCC 43049
MFLYLYSIFGNCFHPITRPGGCDRRHENGFPQPTRNGSMRAAIYRGPGDITVEEVPRPEIESPTDAIVRVTHTAVCGSDLWFYRGQSDREEGSRVGHEPMGIVEEVGDDVRSVEPGDRVFAPFVVSCGRCEFCRKGLHTSCVNGDSWGGDNGGGQGEYVRATEADGTLVRVPDRHADDEDTLEAILPLTDVMGTGHHAAVSAGVSEGDTCIVVGDGAVGLCGVLAARRLGAERIIAMGHHEDRLELAESFGATETVAARGQDAVDAADDLTNGGANHVLECVGAASAMETAIDVCRPGGTVGYVGVPHGLDDSGLDMFSLFGDNIGLNGGIAPVRAYADELLADVLQGTLDPSPIFTKTVDLNGVPEGYQAMDEREAIKVLVKL

SEQ ID NO: 44875 - protein, 533 aa, Yarrowia lipolytica CLIB122
MPSIQKPIPVTLLSGFLGAGKTTLLENILKANHGYKIAVVVNDMSALNIDASLLVNHKVSQKKESMVQLQNGCICCTLRGDLLEEMAQLAFSGKFDYIVIESTGISEPMQVAETFTQEFTTAMLDAEDKVDLGMDEKVLRQIAEHGGLAKLTALDTAVTVIDSFNFLPNFETFDLLKDRWEIGMPEDERTISDLLVDQIEFSDVIILNKTDTISTKKQNKIKALVRKLNPVAKVITTNFCKVDLKEIINTGLFQFDKAATSAGWLQSIHEMTVRDVAAGSKLAPKPETEEYNINNFVYRARTPFHPLRLHELIRDKFLVMEYNTPSGADVHDGHENATQEAEDDDQQLEPVDEDGDSPMSQEEWEDEEDSDDESVELIDEKVVLENKKNSVFGNLLRSKGYFWLATRHILQGEWSQAGAILTIKPGQPWFCVMSENSWPDDETVRAYIKKDFQGIYGDRRNEIVFIGENIDTEKLTKALDHCLLTPTEMRKFERIMKRFNGDVIKTEAKLNTAWEDGFEDWPDIIAGGDDDEE

SEQ ID NO: 44876 - protein, 379 aa, Methylobacterium dichloromethanicum
MMRAMMVQSEDHRSVDFPSLTKPLFEDTKKVFGSTEGTIFLFPASGTGIWESALSNTLARGDKVLAARFGQFSHLWIDMAQRLGLDVVVQEEEWGTGAKPEKIEEALRADKNHEIKAVMVVHNETATGVTSNIGAVRKAIDAAGHPALLFVDGVSSIGSLPFKADEWKVDCAIAGSQKGLMLPAGLGVICVSQKALKAAEGQSGRNDRLARVYFDWEDQKKQNPTGYFPYTPPLPLLYGLREALACLFEEGLENVYHRHAVLGEATRQAVAAWGLKTCAKSPEWNSDTVTAILAPEGVDAAKIIKHAYVRYNLALGAGLSQVAGKVFRIGHVGDLNELSLLGAIAGAEMSLIDNGVKVTPGSGVAAASSYLRENPLAKA

SEQ ID NO: 44877 - protein, 320 aa, Bordetella parapertussis 12822
MPSQLEALRRHTVVVADTGDFEAMRALRPTDATTNPSLILKAVQQEAYRPLLVQTARAHQGASPAEITDRLLVAFGRQILDIVPGRVSTEVDARLSFDTRATVERARGLIALYQAAGVPRERVLIKIASTWEGIQAARVLQAEGIRCNLTLLFCLPQAAACADAGVQLISPFVGRIYDWHKKNAGAEWVEDARRGANDPGVQSVSRIYRYYKRFGIETEIMGASFRNVDQILALAGCDLLTISPELLTRLSQTEGEVPAALSPQAGHDDADAVRLDGGEVAFRTQLNEDAMASEKLSEGIRLFVADARKLDALIESHGAA

SEQ ID NO: 44878 - protein, 648 aa, Cryptococcus neoformans var. neoformans JEC21
MLPPPSSRQSSYVYSTHARRGSSPSAPKRIASFRSVAENALGLEPEDDDEEEELRAELGVDDEVALAEEQRERGLEETLETLGFGAYHWRLLALCGFGWMSDNSALQCIAVILPRVQVHFNLSSKVVGLLSASTMAGMMIGAVGWGVVSDLLGRTMPFNATLFLTGVFGIGASFSPSFSILCCWMFCLGSAVGGSMPTDGTLFLENLPHSKQYLLTLLSVFFSFGAVLSSVISLVFLPGASCGTYDGCDIDKHENDGWRRVLFVLGLFNLVCALARWFLFKLQESPRYLVSNGREREAILALQTIADFNDHTINIQRADVQSRECSAIEPSTRRSSFASPSRDEEGISYGGVESDTERKMKNQPVRSGSSFYKEDEDDMFERSFIPTEGQIEEEREGLMEGESVDNDEVDADMSSRSNDRFKAQIDGWKKAPVVWWKSWIAQMAKLFVPQWRRTVILMWIIWGSMSYAYTMFNVWLPAVLESRAKGHGDAAIKEALGDFVLYSLAGCPGSVVGAWMVQTRLGRRKSLAICTLCTGLSTFAFIRVEQKWAVVVSSMVISAAATAMYAVLYGMTPETFGTSIRGTACGTSAALSRLTGVIAPVSAGFLLTITPSLPVFTSAAVFCMTAACSMALPFERVGGTGRGSRMMH

SEQ ID NO: 44879 - protein, 236 aa, Streptococcus pyogenes MGAS8232
MNFIGELLGTFILVLLGDGVVSACILNKTKAQNSGWIAIVLGWGIAVTVAVYISGFMSGAHLNPAVTLAMAAIGSLPWSQVVTYLVAQFLGAMLGALVLYLHYYPHWNETKDAGTILACFSTGPAIRHTWSNLFGEALGTAVLVITVMAIGPNKVAAGFGPIIVGFVVMAVGFSLGATTGYAINPARDLGPRIMHALLPIPNKGDSDWSYAWIPVLGPILGGVAGALIYQAILNMM

SEQ ID NO: 44880 - protein, 504 aa, Zea mays
  misc_feature (197)..(197): Xaa can be any naturally occurring amino acid
  misc_feature (457)..(457): Xaa can be any naturally occurring amino acid
  misc_feature (484)..(484): Xaa can be any naturally occurring amino acid
  unsure (1)..(504): unsure at all Xaa locations
MQFSSVLPLEGKACMSPVRRGSGGYGSERMRINCCSIRRNKALRRMCFSARGAVSSTQCVLTSDAGPDTLVVRTSFRRNYADPNEVAAVILGGGTGTQLFPLTSTRATPAVPIGGCYRLIDIPMSNCFNSGINKIFVMTQFNSASLNRHIHRTYLGGGINFTDGSVEVLAATQMPGEAAGWFQGTADAVRKFIWVLXGDQLYRMDYMELVQKHVDDNADITLSCAPVGESRASDYGLVKFDSSGRVIQFSEKPKGAALEEMKVDTSFLNFAIDSPAEYPYIASMGVYVFKRDVLLDLLKSRYAELHDFGSEILPKALHEHNVQAYVFTDYWEDIGTIRSFFDANMALCEQPPKFEFYDPKAPFFTSPRYLPPTKSDKCRIKDAIISHGCFLRECAIEHSIVGVRSRLNSGCELKNTMMMGADLYETEDEISRLLAEGKVPIGVGENTKISNCIIDMXCQGWKERLHNKQRGRPRSRPAGRRILXIRSGIVVVLKNATIKDGTVI

SEQ ID NO: 44881 - protein, 536 aa, Mycobacterium avium subsp. paratuberculosis K-10
MSDEPTQPPNPAGADAPGVTRRRLLTTGAVSAALGVGIGDGATLLWSQSARKRGPWPWLQPNRNDAPPVAGLHLQFGKNAGTEVVVSWHSTDAVRNPRVVFGTPASGFGRTVAADTRTYRDAKSGIEVRVNHARLTGLTPDTDYVYAALHDGAQPQQGTVRTAPMGRKPLRFTSFGDQSTPALAKMPNGRYATDNIGSPAAADTTMAIERIGPLFNLVNGDLCYANLAQNRIRTWSDWFENNSRSARFRPWMPAAGNHENELGNGPIGYGAYQTYFALPDSGSSPQTRGLWYSFTAGSVRVISLNNDDVAFQDGGNSYVHGYSGGEQKRWLATELAAARRDPDVDWLVVCMHQTAISTADRTNGADLGIREEWLPLFDQYQVDLVVCGHEHHYERSHPLRGALGTDTRTPIPVDTRSDLIDATRGTVHLVIGGGGTSAPSNAMFFPEPRCRVLTGVGAFDPGLGRKAPIYVIEDAPWSAFRDRDNPYGFVAFDVDPGPAGGNTSISATHYALTGPLGEMSVIDRFTLTKPRGDGAR

SEQ ID NO: 44882 - protein, 511 aa, Synechococcus elongatus PCC 7942
MAALSLADRVVVTAEQMQAIESRLFAAGMPVAALMEKVAGLLSQRLQMAYPDRTQRWGIWVGPGHNGGDALVVARELHLQGYPVQIWHPFERRKPLTEAHLQFAQHLGISIACDYPEHCDRWLDGGFGFGLNRPLNEATQTAIAQLNDSGKPILSIDLPSGLDTDSGEPLGAAIRAERTYCLGLWKQGLLQLVAAPWHGELERVDFGIAEADIVAVLGAVPDRQILTDEAAIAALPLPIAADAHKYRRGQLLLIAGSQRYRGAALLAALAARSSGVGMMTLAVPASLSAIAIAQVPEALVVACPETETGEIAELPIDCDRYNAIAIGPGVGTGPTIRTILHRVLQQSTPFLIDADALTVLAQHPEDWALRPAEARTVITPHAGEFQRLFGSAPTPASLSSAASERSLILVRKGPSPTVVTPVGASWALVDSTPALARGGSGDVLTGLLGGLLAQTDAVSAAIAATWWHSRTAQAIAQKQTALGVTPTELAAQLTPWLGQRLQSEIAQYLAS

SEQ ID NO: 44883 - protein, 408 aa, Ralstonia solanacearum
MTTAATHPSYALETRYGARNYAPLPVMLERGEGVWLFDTAGRRYLDMMSAYSAVSFGHSHPRLVAALVEQAGRLTLTSRAFHNTELGPFLADVCRITRMDRALPMNTGAEAVETAIKAARKWAREVKGTPPDAAEIIVFDNNFHGRTTTIVGFSSHEQYRYGFGPFAAGFRRIPFGDAEALKAAIGPHTGAILIEPIQGEGGIVVPPPGYLKLARDLATQHNALLVCDEVQTGLGRTGDVLASWHEDVQPDLVVLGKALGGGMVPVSAIAGREDVIGVFQPGDHGSTFGGNPLAAHIGRAALALLQEAQLPRHAARLGEAFIAELQSLIGHGVRQVRGRGLMIGLQLDADIDAHDFAAALAGHGVLTKDTYGNVVRLTPPLVIAQQELELARDVIRRTLADWPRRKAA

SEQ ID NO: 44884 - protein, 726 aa, Ashbya gossypii ATCC 10895
MSKRKSPHDFLFREELGHGSYSTVYRVVERSSQHQYAIKICSKRHIIGENKVKYVTIEKNTLNLLGQANHPGIIKLYYTFHDQENLYFVMDLAPGGELLQLLRRQRVFSEAWARHYMCQLVDTVEYIHSMGVIHRDLKPENVLLDKEGRLMIADFGAAYTVGQSDAGSDGDKPATSFVGTAEYVSPELLLENKSYYSSDVWALGCMLYQFLQGTPPFRGQNEMETFEQIVNLDYTWRIPANPLAAGLVSKILVLDPSQRYTLEQIKKHKWFSGVDWNNKEKIWRGSWTIASESTPRPRVGYKSRELLDTPIKNIPVVTQRNKKPTKMNTTSSIVEWRKMLGLSGNDLGIKATLGGNGLPIAPFTPTSGITPDNRGDNAVAPAKTRDAFRPMSSRVISSPHSKPSGRPAALPLPLQTGTPSHNVVQQIVVNTPGRTETSSPYVSPTVPVRNAIWKQDWVQLHEIPYSAKYSGLTLAGFSQVSDTLIADLISHHANELRTLSRTGILSLDNTGYLSFIEQGRARPLSRIIDPDLSIYEYQLGHSTEDDFLILEKYKQSIWIVWPNKPTSASRRIPIKETWAQTLSKYKKQVSDEEELSAKLNRTCVSSWGSRTPSPTYPAEGKTRVAVQPQDIPLPSPAKSSSNSGVSEPISKIPPRQLVSASEQSHKAKSEAHTKKANSYSYIAPNDMVLSSSRYEVLRTASNNDSKSNGAAVSGASAAFRTLRVNK

SEQ ID NO: 44885 - protein, 507 aa, Xanthomonas oryzae pv. oryzae KACC10331
MRPGSLMVLALLAPTLIAPPVFAQSVLTRDNGAKVGDNQNSQTAGPNGPTLLQDVQLIQKLQRFDRERIPERVVHARGTGVKGEFTATADVSKLTKAKVFSAGERTPVFVRFSSVVHGNHSPETLRDPHGFATKFYTSEGNWDLVGNNFPTFFIRDAIKFPDMVHAFKPDPRTNLDDDSRRFDFFSHVPEATRTLTLLYSNEGTPAGYRFMDGNGVHAYKLVNAQGEVHYVKFHWKTLQGIKNLDPKQVAAVQAKDYSHLTNDLVAAIKKGDYPKWDLYVQVLKPEDLAKFDFDPLDATKIWPDVPEQKVGQMVLNKNVDNFFQETEQVAMAPANLVPGIEPSEDRLLQGRIFSYADTQLYRIGANGLSLPVNRPRVAVNNGNQDGQGNIGQTTSGVNYEPSRLQPRPQDASARYSELPLSGTTQQAKITREQNFKQAGELYRSYSKKDRADLVQSFGESLADTDTESKHRMLSFLYKADPEYGSGVTRVAKGDLSRVKQLASSLQD

SEQ ID NO: 44886 - protein, 428 aa, Escherichia coli CFT073
MKIATIKTGLTSLAMLPGLVMAAPAVADKADNAFMMICTALVLFMTVPGIALFYGGLIRGKNVLSMLTQVTVTFALVCILWVVYGYSLAFGEGNNFFGNINGLMLKNIELTAVMGSIYQYIHVAFQGSFACITVGLIVGALAERIRFSAVLIFVVVWLTLSYIPIAHMVWGGGLLASHGALDFAGGTVVHINAAIAGLVGAYLIGKRVGFGKEAFKPHNLPMVFTGTAILYIGWFGFNAGSAGTANEIAALAFVNTVVATAAAILGWIFGEWALRGKPSLLGACSGAIAGLVGVTPACGYIGVGGALIIGVVAGLAGLWGVTMLKRLLRVDDPCDVFGVHGVCGIVGCIMTGIFAASSLGGVGFAEGVTMGHQLLVQLESIAITIVWSGVVAFIGYKLADLTVGLRVPEEQEREGLDVNSHGENAYNA

SEQ ID NO: 44887 - protein, 445 aa, Vibrio vulnificus CMCP6
MSLSLSSALAPLPATAALPFSVSGQELPSLAPMLERVTPAVVSIAVEGKQVERSRIPDQFQFFFGPDFPTEQVRERPFRGLGSGVIINANKGYIVTNYHVIKGADEIRIQLHDGREYDAELIGGDEMSDVALLKVDGAKDLTEIKLADSDKLRVGDFSVAIGNPFGLGQTVTSGIVSALGRSGLNIENFENFIQTDAAINSGNSGGALVNLNGELIGINTAILGPNGGNVGIGFAIPSNMMKNLTDQILEFGEVKRGMLGVQGGEITSELAEALGYNSSKGAFVSQVVPDSAADKAGIKAGDIIVSLNGKKIDTFSELRAKIATLGAGKEIELGVVRDGKDKRFDVTLGESQQTKAKADKMHEGLAGAELANTTSDDRIAGVKVINVADNSPAAQYQLQKDDIIIGVNRQRVKNLADFRAIVEKQTGVLALNIQRGERTIYLVIR

SEQ ID NO: 44888 - protein, 350 aa, Vibrio vulnificus CMCP6
MRSVVLGLVTALLVLLAVPSLRSNVITTTLDVSPQDASSLQISFNQAVRNAAPAVVNIYSRKYVENDRSKLSTQGLGSGVIVSEKGYIITNYHVVAQADQIVVALQDGRVAAAQLVGKDRRTDIAILRIEGNNLPVIPLNSNYKAKVGDVVLAIGNPYNLGQTTTFGIISATGRSSISADGRQAFIQTDAAINEGNSGGALVNTKGELVGINTASFQQATDLETYGISFAIPFPLANKIMEKIIADGRVIRGYIGIDGQDINAVTARLLGNEHIGGIVVLGVDPNGPAANAGFEAQDIILSIDDKKIQGRQSVMDIVTDLRPGTTVDVGIIRKGQEMTLKVTIAEDNREI

SEQ ID NO: 44889 - protein, 344 aa, Dechloromonas aromatica RCB
MKSGRVITSRCSDNDNEEMTMPHAIRFHQTGGPEVLSWEDVDLPAPAPGEATVRHHAVGLNYIDTYHRTGLYPLTLPSGIGMEGAGVVEAVGEGVGEVKVGDRVAYAGGPLGAYAEVRNIPAHRLLKLPDSISFATGAAMMLQGLTAAYLLRKTYRVQPGDAVLIHAAAGGVGLIACQWAKALGATVIGTVGSSAKAELAKAHGCDHVINYSSENFTQRVREITAGEGVAVVYDGVGKDTFIGSLDSLRPLGMMVSYGNASGPVPPLDLLLLSQKGSLFITRPTIATYTAKRADLEALGAELFDAVVSGKVRIEVNQTYALKDAAQAHRDLEARKTTGSTILLP

SEQ ID NO: 44890 - protein, 228 aa, Helianthus annuus
HLGQLKRFSLRELQVATDSFSNKNILGRGGFGKVYKGRLADGSLVAVKRLKEERTPGGELQFQTEVEMISMAVHRNLLRLRGFCMTPTERLLVYPYMANGSVASCLRERPPNEPPLDWPTRKRIALGSARGLSYLHDHCDPKIIHRDVKAANILLDEEFEAVVGDFGLAKLMDYKDTHVTTAVRGTIGHIAPEYLSTGKSSEKTDAFGYGIMLLELITGQRAFDLARL

SEQ ID NO: 44891 - protein, 238 aa, Helianthus annuus
FFPPPPFVPPPPFPVPGGNSATGALAGGVAAGAALLFAAPAIAFAWWRRRKPQEFFFDVPAEEDPEVHLGQLKRFSLRELQVATDTFSNKNILGRGGFGKVYKGRLADGSLVAVKRLKEERTPGGELQFQTEVEMISMAVHRNLLRLRGFCMTPTERLLVYPYMANGSVASCLRERPPNEPPLDWPTRKRIALGSARGLSYLHDHCDPKIIHRDVKAANILLDEEFEAVVGDFGLAKL

SEQ ID NO: 44892 - protein, 253 aa, Listeria monocytogenes str. 4b F2365
MGKLNGKVAVVTGAASGMGQQIAILFAKEGAKVVVADLNLEAAQKTVALIEKEQGTSLAVVANVTKQDDIESMINKATETYGTLDILVNNAGIMDNFVPAGELTDELWDKVFAINTTGVMRATRKALHIFEEKGQGVIVNIASAGGLFGSRAGAAYTASKHAVVGFTKNVGFQYANKNIRCNAIAPGAVNTNIGTTIYAPDQFGQERAMIGMGTNPRAGDASEIAKVALFLASDDASFVNGTVITADAGWTAY

SEQ ID NO: 44893 - protein, 171 aa, Arabidopsis thaliana
GSHMGIQETDPLTQLSLPPGFRFYPTDEELMVQYLCRKAAGYDFSLQLIAEIDLYKFDPWVLPNKALFGEKEWYFFSPRDRKYPNGSRPNRVAGSGYWKATGTDKIISTEGQRVGIKKALVFYIGKAPKGTKTNWIMHEYRLIEPSRRNGSTKLDDWVLCRIYKKQSSAQK

SEQ ID NO: 44894 - protein, 554 aa, Shewanella sp. ANA-3
MDNAIKTPVEMLAHWANTRGDEIYLRQPIKGQYLDFTWNEVQEKVQQLAGALRHLGLEPGDKIAVLSKNCAEWFITDLALMHGGYISVPIYPTANTDTIRYVLQHSGAKAIFLGKLDHWADQEAGVGGELLRLAMPYETMPAQYQWEQLLKMGNPLIEAPLPELDQTMTLIYTSGSTGQPKGAIQTFASYGWTCQAVVRDLRTNGNDRLLSYLPLAHITERVAIEGSSFYSGSTVAFVESLDSFVADVQRAKPTVFFSVPRLWSLFQKNIIDKIGVGKLNLLLKIPLISSLVKHKIHKGLGLNHCRLLGSGSAPIPPSLIHWYHSIGLDICEAWGMTENCAYSIINYPFDVRKIGTVGKPVQDCQIRQGEDGELLLKSPGLMTAYYLQPEATAAAFDPDGFFHTGDLCAIDADGCVTITGRVKDNFKTAKGKYVAPVPIERKLAQDPHVELICVIGSGLPHPVALVQLSEGATLQAREEVRTSLKATLDSVNPHLESHEHVDAIVVVNEPWTIENDVLTPTLKIKRHVLEKAFSERVDGIRGAQVRWEDELSAK

SEQ ID NO: 44895 - protein, 459 aa, Rickettsia sibirica 246
MEQYDVAVIGGGPGGYVAAIRAAQLKKKVVLVEKEHLGGVCLNWGCIPTKSLLKSAEVFEYIKHAKDYGIDAKGAEINIKKIVERSREISNKLAGGVKLLLKKNKVTVIDGVASLAGNKVININDKPTVKAGNIIIATGARSRVLKGFKPDGKQIWTSKEAMIPQHVPKSMIIVGSGAIGIEFASFYNSIGVDVTVIEAHNRILPAEDMEISGIAHKNFEKKGIKIITNAKLIKQTKSKDKIEVELELADKTQKLQAEILLMAVGITANTENLGLEKTKIKVENGYITTNGLMQTAASGIYAIGDVAGVPCLAHKASHEGIIAAESIAGLKPHTINKHNIPGCTYSSPQIASVGLTEEEATTLGYELKIGRFPFIANGKALVSGDSDGLIKTIFDAKTGELLGAHMIGSEVTELIQGYVVSKNLEGTELDLINTIFPHPTLSEMMHESVFSAYDRAIHI

SEQ ID NO: 44896 - protein, 228 aa, Helianthus annuus
HLGQLKRFSLRELQVATDSFSNKNILGRGGFGKVYKGRLADGSLVAVKRLKEERTPGGELQFQTEVEMISMAVHRNLLRLRGFCMTPTERLLVYPYMANGSVASCLRERPPNEPPLDWPTRKRIALGSARGLSYLHDHCDPKIIHRDVKAANILLDEEFEAVVGDFGLAKLMDYKDTHVTTAVRGTIGHIAPEYLSTGKSSEKTDVFGYGIMLLELITGQRAFDLARL

SEQ ID NO: 44897 - protein, 120 aa, Beta vulgaris subsp. vulgaris
VSEEYKLVPDTLYLTVNLIDRFLSGNYLEKQKLQLLGVTCMLIASKYEEVSAPQVEDFCYITANTYAREEVLNMERKVLNFLCFQLSVPTIKTFLRRYVHAAQATEDSLVDLEFLAKYLV

SEQ ID NO: 44898 - protein, 275 aa, Cladonia arbuscula
  misc_feature (179)..(179): Xaa can be any naturally occurring amino acid
  misc_feature (206)..(238): Xaa can be any naturally occurring amino acid
  unsure (1)..(275): unsure at all Xaa locations
GAVKVVAVNDPFIEPHYAAYMLKYDSQHGQFKGTIEVEGSDLIVNGQKVKFYTEKDPGAIPWKDTGAYYIVESTGVFTTTEKAKAHLKGGAKKVVISAPSADAPMFVMGVNEETYKSDIEVISNASCTTNCLAPLAKVMHDNFTIIEGLMTTIHSYTATQKTVDGPSAKDWRGGRTAAXNIIPSSTGAAKAVGKVIPSLNGKLTGXXXXXXXXXXXXXXXXXXXXXXXXXXXXXXXXXKASDGDLKGIMAYSEDDLVSTDLNGDNHSCIFDAKAG

SEQ ID NO: 44899 - protein, 278 aa, Cladonia mitis
VEHGAVKVVAVNDPFIEPHYAAYMLKYDSQHGQFKGTIEVEGSDLIVNGQKVKFYTEKDPGAIPWKDTGAYYIVESTGVFTTTEKAKAHLKGGAKKVVISAPSADAPMFVMGVNEETYKSDIEVISNASCTTNCLAPLAKVMHDNFTIIEGLMTTIHSYTATQKTVDGPSAKDWRGGRTAAQNIIPSSTGAAKAVGKVIPSLNGKLTGMSMRVPTSNVSVVDLTCRLEKSVTYDEIKEAMKKASDGDLKGIMAYSEDDLVSTDLNGDNHSCIFDAKAG

SEQ ID NO: 44900 - protein, 481 aa, Vicia faba var. minor
MVVEKNASNNHHQTFYVSIDQQIDSKFFDDDGRVKRTGTSWTASAHVITAVIGSGVLSLAWAIAQLGWIAGPIVMFLFAWVTYYTSVLLCECYRNGDPVNGKRNYTYMEVVHSNLGGFQVQLCGLIQYLNLVGVAIGYTVASAISMMAIVRSNCFHRSGGKDPCHMNSNIYMIAFGAVQIIFSQIPDFDQLWWLSIVAVVMSFTYSTIGLGLGIGKVIENKKFAGTITGINDVTKAQKTWGSLQALGDIAFAYSFSMILIEIQDTIKAPPPSESKTMKKATLISVIVTTFFYMLCGCFGYAAFGNSSPGNLLTGFGFYNPFWLLDIANAAIVIHLIGAYQVYCQPLFAFVENYTAKRFPDSDFVNKDVKIPIPGLDRYKLNLFRLVWRTVYVILTTLISMLLPFFNDIVGLLGAIGFWPLTVYFPVEMYIIQKKIPKWSTKWICLQLLSGACLIITIAATIGSIAGLILDLKVFKPFKTIY

SEQ ID NO: 44901 - protein, 280 aa, Streptococcus pyogenes MGAS10394
MMVTTVKMTSGYEIPVLGFGTYQAADGEEAYQSTLAAIKADYRHIDTAAIYKNEESVGRAIKDSGVLREDLFITTKLWNDAHSYEGAKDALAASLDRLGLDYVDLYLIHWPNPKALRNTWKEANAQAWQYMEEAVEAGLIKSIGVSNFMVHHLEALQETAKITPAINQIRLAPGCYQKEVVDYCKANEILLEAWSPLGQGEIFDNETMQQLANKYDKTVAQVALAWSLAEGFIPLPKSVHDERIKENMAIFDVSLTPEDKKTIRYLSGMSAIPNPDTTSF

SEQ ID NO: 44902 - protein, 503 aa, Bartonella quintana str. Toulouse
MVKKTFFPTLAAVGFSAALETALFFSGCGSSLWMTEARANSVFASLVQQQGFANIVSQVKPAVVSVQVKSNKKKKEWFFSDFFSSPGLDQLPDQHPLKKFFQEFYDRGKPSNKSLKRPHRLRPIAFGSGFFISSDGYLVTNNHVISDGTSYTVVLDDGTELNAKLIGTDARTDLAVLKVDEKRTFSYVDFGDDSKLRIGDWVVAIGNPFGLGGTVTAGIVSARGRDIGTGVYDDFIQIDAAVNRGNSGGPTFDLNGKVIGVNTAIFSLSGGNVGIAFAIPAAIAKQVVQQLIEKGSVQRGWLGVQIQPVTKEISDSIGLKEAKGALITDPLKGPAAKAGIKAGDVIISVNGEKINDVRDLAKRIANIKPGETVTLGVWKSGKEENIKVKLDTMPDDKVMKEDSKYSNGRNDSNETLEDYGLIVAPSDDGIGLVVTDVDSDSDAADKGIRPGDVIVTVNNKSVKKVSDITDTIKNAQKLGRKAILLQVRTNDQNRFVALPIFKK

SEQ ID NO: 44903 - protein, 376 aa, Gossypium hirsutum
MLADFMPFLANVLLQVGYAGMNITSKLALESGMKPLILVAYRQIFATLAIAPFAFFLERKTRPKLTMPILFQIFLCSLTGATANQVFYFVGLQNTTATIACALNNVLPAATFLLAAICRQEAVGIKKASGQAKVIGTLVCVGGAMLLSFYHGHIIGIGESSIHWNYANKMANSSPSPSGSNFFLGPFLVMASAVAWALWFIIQGQTSKSFPAPYTSTTLMCFMASIECTIIGIFSDPKPSAWSLSSSMRLIAALYAGIICNAVAFCVMSWCIQKRGPLYVSVFSPLLLVIVAILSWALLREKLYVGTVVGSLLIVGGLYAVLWGKDKEMKQMKGNEKGGGGGEQVVVEEGAVEVTKAGDRDHDLEMQSQQGGGARG

SEQ ID NO: 44904 - protein, 204 aa, Triticum aestivum
MFSGTQQKCKVCTKTVYPMDQLSTDGAVFHRACFKCHHCKSTLSFSSYSSFEGVPYCKPHFAQLFKETGSYNKSFQSQSPAKSATEKLTPELTRSPSKAAGMFSGTQDKCATCGKTAYPLEKVTVEEKSYHKSCFKCSHGGCALSPSNYAALEGILYCKHHFSQLFKEKGSYNHLIKCASVKRAAEAQTAQAAAQTAPAAAESS

SEQ ID NO: 44905 - protein, 241 aa, Glycine max
  misc_feature (50)..(50): Xaa can be any naturally occurring amino acid
  unsure (1)..(241): unsure at all Xaa locations
MEPRFVEYFRLATPELEYGRMNIGSRPAKRRPSEGIARSVSMPPLGLLFXWTQTRFHLPVWLGFGAAFKKVIEENVKNLNMLQEMYNQWPFFRVTLDLVEMVFAKGDPKIAALNDRLLVSKDLWPFGDQLRNKYEETRKLLLQVAGHKEILEGDPYLKQRLRLRHAPITTLNIVQAYTLKRIRDPNYNVKVRPRISKESAEASKSADELVKLNPTSEYAPGLEDTLILTMKGIAAGMQNTG

SEQ ID NO: 44906 - protein, 393 aa, Arabidopsis thaliana
MAVHIHNPNFFHTHHLRASLTSASASPSSYLFHRHSASKYPSFLCKSNNKDDYLIDAPVSVGDGFSFSGGKYSDQPSPSDEWLKQGKWVKAHRVGGSGVEAKDPIFGLTMGASSQASKDLFRWFSVESGSVDSPPVILIHGFPSQAYSYRKTIPVLSKNYRAIAFDWLGFGFSDKPQAGYGFNYTMDEFVSSLESFIDEVTTSKVSLVVQGYFSAAVVKYARNRPDKIKNLILLNPPLTPEHAKLPSTLSVFSNFLLGEIFSQDPLRASDKPLTSCGPYKMKEDDAMVYRRPYLTSGSSGFALNAISRSMKKELKKYAEEMRTSLMDKNWKIPITVCWGQRDRWLSYEGVEEFCKSSGHNLVELPNAGHHVQEDCGEELGGIISRIISKSALF

SEQ ID NO: 44907 - protein, 470 aa, Bacillus subtilis subsp. subtilis str. 168
MNSAHNKNETTFQRSMKSRHLFMLSLGGVIGTGLFLSSGYTIQQAGPAGTILAYLVGAGIVYLVMLCLGELSVAMPVTGAFHTYAAKYIGPGTGFTVAWLYWLTWTVALGSEFTAAGLLMQRWFPHTSVWMWSAVFALFIFLLNAFSVKFFAESEFWFSSIKVLAIVLFILLGGSAMFGIIPIKGGEAAPMLSNFTAEGGLFPNGFVPILMTMLSVNFAFSGTELIGIAAGESVDPDKTIPKAIKTTVWRLSLFFVGTIFVLSGLIPIQDAGVIKSPFVAVFDRVGVPYAADIMNFVILTAILSAANSGLYASSRMLWSLSKEKTLHPTFAKLTSKGTPFNALVFSMIGGILSLLSSVFAPDTVYVVLVSISGFAVVVVWMGIAASQFMFRKRYIEAGNKVTDLKYRTPLYPFVPIAAFLLCLASVVGIAFDPNQRIALYCGVPFMAICYAIYYVKNRKSQPAADMTHSK

SEQ ID NO: 44908 - protein, 237 aa, Oryza sativa
DAQQPAAAAEEEARATRNPKPYSRRATAMADPAEHREEEEEAAAAAAGEDEDTGAQVAPIVKLEEVAVTTGEEDEEVLLDMKSKLYRFDKEGNQWKERGTGTVKLLKHKETGKVRLVMRQAKTLKICANHLVATTTKMQEHAGSDKSCVWHALDFADGELKEEMFAIRFGSVENCKKFREMVEEIAEQQGKNEEKENEEVSSTAGLVEKLSVTETKKEENAEKEETPAEEDKKDAKE

SEQ ID NO: 44909 - protein, 359 aa, Annona cherimola x Annona squamosa
QMGFAENQVSFDLLEQYLEQHPEASGWGSRLSSFRDNALFQDYHGLKTFRQAMASFMEQIRGGRAKFDPERIVLTAGATAANELLTFILADPGDALLVPTPYYPGFDRDLRWRTGVKIVPIHCDSNNKFQVTPQALENAYAAAKSMDIKVRGVLITNPSNPLGAAISRPILEEILDFVSRKNIHLISDEIYSGSVFSAAEFTSVAEILAASNYKDSERVHIVYSLSKDLGLPGFRVGTIYSYNDKVVTTARRMSSFSLISSQTQNLLASMLSDVDFTKKYIETNRERLRRRYASTIRGLRNAGIECLKGNAGLFCWMNLSPLLEKPTREAELKLWDSMLHEVKLNISPGSSCHCLEPGW

SEQ ID NO: 44910 - protein, 275 aa, Streptococcus pyogenes M49 591
MDIFGEFLGTVLLVLLGNGVVAGVVLPKTKTHASGWIVIATGWGIAVAVAVFISGKVAPAHLNPAVSLAFAMSGTIAWSTAIAYSLAQLLGAMVGSTLVFLQFRPHYLAAESQADILGTFATGPAIRDTSSNLLSEIFGTFVLMLGILAFGLYDMPAGLGTLCVGTLVIGIGLSLGGTTGYAINPARDLGPRLVHAILPLNNKGDSDWSYAWIPVVGPIIGAALAVLLFQVMSFPSLKELAIIGQLLCIFFIGLGKTLSYLKDKCYNNTITSAAA

SEQ ID NO: 44911 - protein, 511 aa, Oryza sativa
  misc_feature (352)..(352): Xaa can be any naturally occurring amino acid
  unsure (1)..(511): unsure at all Xaa locations
MAAMDLRVAAPASVAAAARCGTSLARPWPARAVGGGGGGGGRGRRLSVRTSVATTEAAAAAVGASEDAALEARDSKTVVAVILGGGAGTRLFPLTKRRAKPAVPIGGAYRLIDVPMSNCINSGINKVYILTQFNSASLNRHLSRAYNFSNGVAFGDGFVEVLAATQTPGSEGKRWFQGTADAVRQFDWLFDDAKAKDIDDVLILSGDHLYRMDYMDFVQSHRQRGADISICCLPIDDSRASDFGLMKIDDTGRVIAFSEKPKGDDLKAMQVDTTVLGLPQDEAKEKPYIASMGVYIFKKEILLNLLRWRFPTANDFGSEIIPASAKEINVKAYLFNDYWEDIGTIKSFFEAXLSLAEQPPRFSFYDANKPMYTSRRNLPPSMINNSKITDSIISHGCFLDSCRIEHSVVGIRSRIGSNVHLKDTVMLGADFYETDLERGELLAEGKVPIGIGENTKIQNCIIDKNARIGKNVTISNSEGVQEADRTSEGFYIRSGITIVLKNSIIADGLVI

SEQ ID NO: 44912 - protein, 478 aa, Burkholderia fungorum LB400
MHRATKIVATIGPASNTPEILLQMIQAGLDVVRLNFSHGTADDHRQRAGFVREAARQAGREVAIMADLQGPKIRVGKFENGKIMLVAGEPFVLDADCELGNEQRAGLDYKDLPRDLKPGDVLLLNDGLIVLNVSRVIGNEIHTVVKIGGELSNNKGINRQGGGLSAPALTAKDMEDIRTAMSLGVDYVAVSFPKNATDMEMARQLANIAGAPFGVKPKMIAKIERAEAIPALQGILDASDGIMVARGDLAVEVGNAAVPALQKRMIRMARESNKFVITATQMMESMIHAPVPTRAEVSDVANAVLDGTDAVMLSAESAAGKYPVQTIETMAAICIEAEKSEQSELDKDFLDRTFTRIDQSIAMGALFTAFHLGAKAIVALTESGSTALWMSRHWTHVPIFALTPRVGSERAMALYRNVTSLHLDTNTDRDTALQQALETVVSKGYASRGDMVVLTVGEPMGQAGGTNTLKIVRVGEPY

SEQ ID NO: 44913 - protein, 572 aa, Pseudomonas fluorescens PfO-1
MPSTTSRRTFVKGLAAGSLLGGLGLWRTPVWALNSPGQVNELSGTDFELFIGETPVNFTGQPRTALTINGSLPGPLLRWREGDTVTLRVRNRLKDSTSIHWHGILLPANMDGVPGLSFKGIEPGGVYVYQFKVRQHGTYWYHSHSGLQEQAGVYGPLVIDAREPEPFQYDRDYVVMLSDWTDEDPASLMKTLKKQSDYYNFHKRTVGDFVHDVGEKGWGATVADRTMWAQMKMNPTDIADVSGATYTFLMNGHAPDDNWTGLFRPGEKLRLRLINGSAMSYFDVRIPGLKMTVVAADGLHVKPVSVDELRIAVAETYDVIVEPAADAYTLFAQAMDRTGYARGTLAARAGLSAPVPALDPRPLVTMDDMGMGGMGSGGMNHGSMDMSGMDHSSMNMGPMQSHPDSEKDNPLVDMQAMTTAAKLDDPGLGLRNNGRRVLTYADLRSTFEDPDGRDPSRTLELHLTGHMEKFAWSFNGIKFSDAEPLLLKYGERIRLVLVNDTMMTHPIHLHGMWSDLEDENGNFQVRKHTIDMPPGTRRTYRVTADALGHWAYHCHLLYHMEMGMFREVRVEE

SEQ ID NO: 44914 - protein, 207 aa, Arabidopsis thaliana
MTGFSVSLFVSNLSNVASYLSPIFENIPSTKVVPAQIEKVVSLVSRTGRDLQRYDHAGYRQVVGWVPYRYKKQEVNGVETQVIQVLLVSAQKGKGMLFPKGGWETDESMEEAALRETIEEAGVTGELEEKLGKWQYKSKRHSIIHDGYMFALLVSQEFERWPEAEMRQRRWVSLDEAREVCQNWWMREALEAFINLKCLADDDESGN

SEQ ID NO: 44915 - protein, 761 aa, Pinus sylvestris
MQIFVKTLTGKTITLEVESSDTIDNVKAKIQDKEGIPPDQQRLIFAGKQLEDGRTLADYNIQKESTLHLVLRLRGGMQIFVKTLTGKTITLEVENSDTIDNVKSKIQDKEGIPPDQQRLIFAGKQLEDGRTLADYNIQKESTLHLVLRLRGGMQIFVKTLTGKTITLEVESSDTIDNVKAKIQDKEGIPPDQQRLIFAGKQLEDGRTLADYNIQKESTLHLVLRLRGGMQIFVKTLTGKTITLEVESSDTIDNVKAKIQDKEGIPPDQQRLIFAGKQLEDGRTLADYNIQKESTLHLVLRLRGGMQIFVKTLTGKTITLEVESSDTIDNVKSKIQDKEGIPPDQQRLIFAGKQLEDGRTLADYNIQKESTLHLVLRLRGGMQIFVKTLTGKTITLEVESSDTIDNVKAKIQDKEGIPPDQQRLIFAGKQLEDGRTLADYNIQKESTLHLVLRLRGGMQIFVKTLTGKTITLEVESSDTIDNVKAKIQDKEGIPPDQQRLIFAGKQLEDGRTLADYNIQKESTLHLVLRLRGGMQIFVKTLTGKTITLEVESSDTIDNVKAKIQDKEGIPPDQQRLIFAGKQLEDGRTLADYNIQKESTLHLVLRLRGGMQIFVKTLTGKTITLEVESSDTIDNVKAKIQDKEGIPPDQQRLIFAGKQLEDGRTLADYNIQKESTLHLVLRLRGGMQIFVKTLTAKTITLEVESSDTIDNVKAKIQDKEGIPPDQQRLIFAGKQLEDGRTLADYNIQKESTLHLVLRLRGGL

SEQ ID NO: 44916 - protein, 323 aa, Nicotiana tabacum
MATKTVCVTGSSGYIASWLVKFLLQRGYTVKATVRDPSDPKKTDHLHSLSGAKERLHLFKANLLEEGAFDAVVDGCEGVFHTASPFYHGVKDPQAELIDPALKGTLNVLGSVAKTPSIRRVVLTSSVAAVAFNGKPRTPEVVVDETWGSDPDFCRESQLWYVLSKTLAEDAAWKFVKEKAIDMVTINPAMVIGGLLQPILNTSCAAVLQLINGAETYPNATLGWVNVKDVALAHILAFENPSANGRYLMVEAVAHYSELVKILREHYPTMKLPEKCVDDKPFPPKYQVNIERAKQLGVEFTPLAESIKETVESLKEKKFYSDA

SEQ ID NO: 44917 - protein, 279 aa, Haloarcula marismortui ATCC 43049
MTQQQSPTDGGPRASGMPMLGLGTWQNEDAEQCAESVRTALEAGYRHIDTAQAYDNESAVGDGIAAADVDRDDIFLATKVWISNLSHDDVIETTEESLDKLGVDSVDLLYVHWAAGEYEPEETLPAFDELVDRGLIDNVGVSNFEPHHVETAMDVLDAPVFANQVETHPFLQQSELREHAAEQDYELVAYSPLARGEVFGHDVIEAIADDHDASEAQVSLAWLREKGVTAIPKATSEAHITDNLASLDLSLTDADIDRIDNIDTVDRRVDPDFGPAAWD

SEQ ID NO: 44918 - protein, 652 aa, Saccharophagus degradans 2-40
MCGIAGLVSPSLPIDSLKATATAMAQAIEHRGPDAMGVWVEQEQKLAFSHRRLSIQDLSESGAQPMHSHSKRYTIAFNGEIYNFLEIKKPLIDAGFEFRGHSDTEVLLCAIEHWGLEQTIAKAKGMFAIALWDSQTKVLTLIRDRIGEKPLYYGVINGSFVFGSELKAIFAHTPAKALTLNKVAIASFLRHGYISAPNSVFVEVKKLSPGCRIDINLAKQSDWSIANLTPQPYWTVAQSANQPYLYTEQNQSEAISALDEKINKVINEQSIADVPLGAFLSGGIDSTVVSAVLQANTSTAIDTFTIGFEEKSFNEAEFAKEIAKHLGTKHHEHYVNQQDILELVNILPRVYDEPFADASQLPTILVNRFARSELTVCLSGDGGDELFAGYNRYVFTEAVLKKAAALPAVFKSILKALITSVAPGKWDKLYQALNSIAKRKGGAEFGNKLYKMVSLADAKSKAAAYEYLMSYWQQPEQVLKAFNGELAMQSPLSLEDDFINAAMAWDQQWYLPGDNLTKTDRASMAASLELRAPLLDIELIDFAWTVSPELKVRDGKSKWLLREVLYKYVPKELIERPKMGFSVPISQWIRTDLSAWVDELLDKEFIEKQGIFNYAPIQHALLEHRSGSYDHGKKLWTLLMFQAWFKTNIIDG

SEQ ID NO: 44919 - protein, 327 aa, Nicotiana tabacum
MSLAAKTVCVTGASGYIASWLVKFLLQRGYTVKASVRDPNDPKKTQHLLSLGGGAERLHLFKANLLEEGSFDAVVDGYEGVFHTASPFPYSVTDPQAELLAPAVKGTLNLLGSCAKAPSVKRVVLTSSIAVAYSGQPRTPEVVVDESWWTSPDYCREKQLWYVLSKTLAEDAAWKFVKEKGIDMVAINPAMVIGPLLQPTLNTSSGAVLNLVNGAETYPNSTFGWVNVKDVANAHILAFENPSANGRYLMVERVAHYSDILKILRDLYPTMRLPEKCADDNPLMQNYQVSKERAKSLGVEFTPLEESIKETVESLKEKRFFGGSSAM

SEQ ID NO: 44920 - protein, 413 aa, Erwinia carotovora subsp. atroseptica SCRI1043
MADSTSPRRFTRIDRLPPYVFNITAELKMAARRRGEDIIDFSMGNPDGPTPPHIVEKLCTVAQREDTHGYSTSRGIPRLRRAISRWYADRYEVDIDPESEAIVTIGSKEGLAHLMLATLDHGDTVLVPNPSYPIHIYGAVIAGAQVRSVPLVEGVDFFNELERAIRESIPKPKMMILGFPSNPTAQCVELDFFERVVELAKQYGVLVIHDLAYADIVYDGWKAPSIMQVPGAKDIAVEFFTLSKSYNMAGWRIGFMVGNSELVNALARIKSYHDYGTFTPLQVAAIAALEGDQQCVRDIAEQYRQRRNVLVRGLHEAGWMVDEPKASMYVWAKIPDAYAHLGSLEFAKRLLSEAKVCVSPGIGFGDYGDTHVRFALIENQDRIRQAVRGIKTMFRADGILPTTKPLAGKGPAA

SEQ ID NO: 44921 - protein, 493 aa, Arabidopsis thaliana
MSNQTQISDKYILGRELGRGEFGITYLCTDRETHEALACKSISKRKLRTAVDIEDVRREVAIMSTLPEHPNVVKLKASYEDNENVHLVMELCEGGELFDRIVARGHYTERAAAAVARTIAEVVMMCHSNGVMHRDLKPENFLFANKKENSPLKAIDFGLSVFFKPGDKFTEIVGSPYYMAPEVLKRDYGPGVDVWSAGVIIYILLCGAPPFWAETEQGVALAILRGVLDFKRDPWPQISESAKSLVKQMLDPDPTKRLTAQQVLAHPWIQNAKKAPNVPLGDIVRSRLKQFSMMNRFKKKVLRVIAEHLSIQEVEVIKNMFSLMDDDKDGKITYPELKAGLQKVGSQLGEPEIKMLMEVADVDGNGFLDYGEFVAVIIHLQKIENDELFKLAFMFFDKDGSTYIELDELREALADELGEPDASVLSDIMREVDTDKDGRINYDEFVTMMKAGTDWRKASRQYSRERFKSLSINLMKDGSLHLHDALTGQTVPV

SEQ ID NO: 44922 - protein, 433 aa, Candida glabrata CBS138
MDIVQLLFKRDDDDGPPPACAVDNDFNGHTNLRILSVFMVLISSAIGVYFPLLASRYSFINLPSWVFFIAKFFGSGVIVATAFIHLLEPASDSLGNPCLGGTFANYPWAFGICLMALFALFLIEIVSHHYVGKTMGGGHNHSHNMPTTFGQTHMHGVEDDMVDEDGSSSTHSHSHVAMDDKYGDVVKNNNYNYDDGSDDIESQKRPAFNVAQQKVRNDSNENDSLVGHVHNTTVDPLEHMPGHNHFSHDEVHQDITQIGSKANDQQKEQYLNQLTSLFILEFGILFHSVFVGLSLSVSGDEFKTLFVVIVFHQMFEGMGLGARITECYWPHSKRWLPYLLGFGYTITTPIAIAIGIGVRHSFVPGSRRSLIVNGVFDAISAGILVYAGLVELMAHEFLFTNQFKGEHGLRNMLAAYFVMALGAGLMALLGRWA

SEQ ID NO: 44923 - protein, 354 aa, Thinopyrum ponticum x Triticum aestivum
MDGNKGPVVVTGASGFVGSWLVMKLLQAGYTVRATVRDPANVEKNKPLLELPGAKERLSIWKADLSDEGSFDDAIAGCTGVFHVATPMDFDSKDPENEVIKPTVEGMLSIMRACKEAGTVKRIVFTSSAGSVNIEERQRPAYDQDNWSDIDFCRRVKMTGWMYFVSKSLAEKAAMEYASENGLDFISIIPTLVVGPFLSAGMPPSLVTALALITGNEAHYSILKQVQLVHLDDLCDAMTFLFEHPEANGCYICSSHDATIHGLARMLRDRFPEHSIPHKFAGVDDDLQPIHFSSKKLLDHGFSFRYTAEDMFDAAIRTCREKGLIPLGDAPAPAAAGKLGALAAGKGQAIGAET

SEQ ID NO: 44924 - protein, 495 aa, Arabidopsis thaliana
METKPNPRRPSNTVLPYQTPRLRDHYLLGKKLGQGQFGTTYLCTEKSTSANYACKSIPKRKLVCREDYEDVWREIQIMHHLSEHPNVVRIKGTYEDSVFVHIVMEVCEGGELFDRIVSKGHFSEREAVKLIKTILGVVEACHSLGVMHRDLKPENFLFDSPKDDAKLKATDFGLSVFYKPGQYLYDVVGSPYYVAPEVLKKCYGPEIDVWSAGVILYILLSGVPPFWAETESGIFRQILQGKLDFKSDPWPTISEAAKDLIYKMLERSPKKRISAHEALCHPWIVDEQAAPDKPLDPAVLSRLKQFSQMNKIKKMALRVIAERLSEEEIGGLKELFKMIDTDNSGTITFEELKAGLKRVGSELMESEIKSLMDAADIDNSGTIDYGEFLAATLHMNKMEREEILVAAFSDFDKDGSGYITIDELQSACTEFGLCDTPLDDMIKEIDLDNDGKIDFSEFTAMMRKGDGVGRSRTMMKNLNFNIADAFGVDGEKSDD

SEQ ID NO: 44925 - protein, 322 aa, Oryza sativa
MAAAGWPLSSSVADLLPASLSLTLLLASLVVVVVLAAAAFFFEHIRKIGCTHSLERTEVSAAFFEDPNSLNKVRCPSIYDPAEKYISLIIPAYNEEHRLPEALTETLNYLKQRSAVEKSFTYEVLIVDDGSTDHTSKVAFEFVRKHKIDNVRVLLLGRNHGKGEAVRKVRALAKKAESSLAPSSSPSQRLSDAEIAVFGSRAHLEKQALATRKWYRNFLMKGFHLVVLLTAGPGIRDTQCGFKMFTRAAARKLFTNIRLKRWCFDVELVYLCKHLRIPMAEVSVNWTEIPGSKVRMTSILHMVFELLLIKVGYGLSIWKIYS

SEQ ID NO: 44926 - protein, 681 aa, Triticum aestivum
  misc_feature (366)..(366): Xaa can be any naturally occurring amino acid
  unsure (1)..(681): unsure at all Xaa locations
LAWSRPRLTPEVTRDVCLLARMMAANLYCAQIEDLMFELSMWRCNDELRSRADELHQSSKKDAKHYIEFWKKVPPNEPYRVILGDVRDNLYNTRERSRELLSSGHSDIPEEATLTNLEQLLEPLELCYRSLCACGDRVIADGTLLDFLRQVSTFGLSLVKLDIRQESDRHTDALDAITSYLGIGSYREWSEERRQEWLLSELNGKRPLFGADLPMTEEVADVMGAFQVIAELPGDNFGAYVISMATSPSDVLAVELLQRECHIKTPLRVVPLFEKLADLEAAPAALARLFSIDWYRERINGKQEVMIGYSDSGKDAGRLSAAWQMYKAQEDLVKVAKQFGVKLTMFHGRGGTVGRGGGPTHLAILXSQPPDTINGSLRVTVQGEVIEQSFGEEHLCFRTLQRFTAATLEHGMRPPISPKPEWRALLDEMAVVATEEYRSIVFQEPRFVEYFRLATPETEYGRMNIGSRPSKRKPSGGIESLRAIPWIFAWTQTRFHLPVWLGFGGAFKHILKKDIRNFHMLQEMYNEWPFFRVTIDLVEMVFAKGNPGIAALYDRLLVSEGLQPLGEKLRANYEETQKLLLQVAGHKDLLEGDPYLKQRLRLRDAYITTMNVCQAYTLKRIRDPDYHVAFRPHLSKEVMDTSKPAAELVTLNPGRVSYAPGLEDTLILTMKGIAAGLQNTG

SEQ ID NO: 44927 - protein, 161 aa, Zea mays
MASSSGSGSSGFLSAALDAAATAGTEEELRALMAQRRAKRMLSNRESARRSRMRKQRHLDELTAQAAHLRRENAHVATALGLTAQGLLAVDADNAVLRTQAAELAARLGSLNDILACMNTTNAAAAAAFSDPYLAFDGAATALDDLLRSCPDSMMFEYQLC

SEQ ID NO: 44928 - protein, 461 aa, Photorhabdus luminescens subsp. laumondii TTO1
MQNNETQLKRGLTGRHIRFMALGSAIGTGLFYGSAAAIQQAGPAVLLAYLIGGAAVFMVMRALGEMAVHHPVAGSFSHYASHYLGPLAGFLTGWNYIFEMLIVCLADVTAFGFYMKLWFPHVEQWIWVLSIVCFIGAINLCHVKIFGEMEFWLSIVKVTAIIAMIIGGMIIMIYGFGQETDHATGIASLWEYGGFMPNGISGVIASLAIVMFAFGGIEVIGITASETKNPEKTIPKAINAVPFRILLFYVLTLFILMCIYPWNQIGQEGSPFVQIFSSLGINSAANILNIVVITAAISAINSDIFGAGRMMYGMAQEGQAPKSFTKLSRNGVPWMTVIVMSAVLLIGVILNYMIPEEIFVIIASIATFATVWVWLMILLSQVAMRRKMSKEEVKTLKFPVPMWPIAPALTIIFMVFVIVLLGYFEKTRIALIVGITWVILLSITYFFSKKKNISQIHQINK

SEQ ID NO: 44929 - protein, 143 aa, Rickettsia sibirica 246
MALTLKYFFKPKVTINYPYEKSPISPRFKGEHALRRYENGEERCIACKLCEAICPAQAIVIEADEREDGSRRTTRYDIDMTKCIYCGLCQEACPVDAIVEGPNFEFASLTHTALIYDKERLLQNGDRWEQALASKLHKDYEYR

SEQ ID NO: 44930 - protein, 692 aa, Arabidopsis thaliana
MLRLPSSMPIVSFPANPNLLINPQPSWPSRRGNSAVVVSAASRDVDSFTSKSGYLFSLSADEADSLSEYNFPRIDGMYKKKPLILLRRLAQIGTTFSYWFGLRLADEALERSDQMFKVRAAELRKLLVELGPAYVKIAQAVSSRPDLIPPIYLDELSLLQDQITPFSTEVAFNMIEDELGLPIDELFSEISPEPVAAASLGQVYQARLRRSGKVVAVKVQRPGVRAAIALDTLILRYIAGLIKKAGRFNSDLEAVVDEWATSLFKEMDYLNEAQNGIKFRKLYGGIKDVLVPKMYTEYSTSKVLVMEWVEGQKLNEVNDLYLVEVGVYCSFNQLLEYGFYHADPHPGNFLRTYDGQLAYLDFGMMGDFRPELRDGFMEACLHLVNRDFKALAKDFVTLGLLPPTAEKSAVTKALTDVFQDAISRGVRNISFGDLLGDLGKTMYRFKFRIPPYFSLVIRSLAVLEGIAIGISPNYKVLGSTYPWIARKILTDSSPQLKSSLQNLLYEEGVFRIDRLESLLSESLRTETALVQKPVVGTESNIAMKQMLAFTFTEQGSFVREILLREFAKGLDAYGLATLDSFTFSGSGPSSSLTEEDMTNLRTFYRLISLFSGMQKAKSQVKAVSKYGEALTPLDEASLVMYQLPSAQEMLPILSILPELPQESQQRLLQLPGDLVGRLVTRAFARTIRRIFL

SEQ ID NO: 44931 - protein, 397 aa, Arabidopsis thaliana
  misc_feature (110)..(110): Xaa can be any naturally occurring amino acid
  unsure (1)..(397): unsure at all Xaa locations
RTRLVAVSFPRTTCLGSSFSPPRLLRVSCVATNPSKTSEETDKKKFRPIKEVPNQVTHTITQEKLEIFKSMENWAQENLLSYLKPVEASWQPQDFLPETNDEDRFYEQVXELRDRTKEIPDDYFVVLVGDMITEEALPTYQTVMNTLDGAKDETGVSLTPWAVWLRAWTAEENRHGDLLNKYLYLSGRVDTRHVEKTIQYLIGSGMDTKYENNPYNGYIYTSFQERATFISHANTAKLATTYGDTTLAKICGTIAADEKRHEMAYTRIVEKLFEIDPDGTVQALASMMRKRITMPAQLMHDGRDDNLFDHYAAVAQRIGVYTATDYAGILEFLLRRWEVEKLGMGLSGEGRRAQDYLCTLPQRIRRLEERADDRVKRASKSKPSVSFSWIYGREVEL

SEQ ID NO: 44932 - protein, 242 aa, Pseudomonas putida KT2440
MGGRGMGISELKLPAAVKAHELADAKALSVSLAHDVAERLRAAIAAKGQACVVLSGGRSPVPFLEKLASEHLDWAKVTVSLADERWVPVEHADSNAGLLARHLLKGEAAKARFVGLYQQAENLDAAALKADQALAELPPIDVLVLGMGDDGHTASLFPASPNLEAGLDLAGPRRCLPMLAPSVPHQRLSMTRSLLASAAFIALSVQGQGKLATLRAALAGNDLTEMPIRAFLHDPLDIYWCP

SEQ ID NO: 44933 - protein, 484 aa, Nicotiana glutinosa
MVFISSNNQKQQLLSKIATNDGHGENSAYFDGWKAYENDPFHLINNPNGVIQMGLAENQLCFDLIQEWVVNNPKASICTIEGAENFKDIAIFQDYHGLPEFRQAVARFMENVRGDRVTFDPNRIVMSGGATGAHETLAFCLANPGDAFLVPTPYYPGFDRDLRWRTGVQLFPVVCDSSNDFKVTKKALETAYEKAQESNINIKGLLINNPSNPLGTLLDSDTLRDIVKFINSKNIHLICDEIYAATVFDQPKFISVSEIVEEHVGCNKDLIHIVYSLSKDMGFPGFRVGIVYSYNDTVVNIARKMSSFGLVSTQTQHLIASMLSDEIFVEKFIAESSERLGKRHGMFTKGLAQVGISTLKSNAGLFFWMDLRRLLKEPTFDSELELWRIIINEVKLNVSPGCSFHCSEPGWFRVCFANMDDETMRIALRRIRNFVLQTKGLNNKAAVKKQCSRSKLQISLSFRRMDDFMNSPVHSPMNSPLVRT

SEQ ID NO: 44934 - protein, 223 aa, Fusobacterium nucleatum subsp. vincentii ATCC 49256
MNIDPANPKMEGRDRFVLSKGHAAPAIYATLAEKGYFSKDELMTLRKFGSRLQGHPDMKKLPGIEISTGSLGQGLSVANGMALNAKMFNENYRTYVILGDGEVQEGQIWEAAMTAAHYKLNNLCAFLDNNNLQIDGNVSEIMGVEPLDKKWEAFGWNVIKIDGHDFEQILSALDKARECKDKPTMVIAKTIKGKGVSFMENVCGFHGVAPTLEELERALAELA

SEQ ID NO: 44935 - protein, 176 aa, Oryza sativa
  misc_feature (28)..(28): Xaa can be any naturally occurring amino acid
  misc_feature (42)..(42): Xaa can be any naturally occurring amino acid
  misc_feature (156)..(156): Xaa can be any naturally occurring amino acid
  unsure (1)..(176): unsure at all Xaa locations
MAPSVMASSATTVAPFQGLKSTAGMPLXRRSGNSSFGNVSNXGRIRCMQVCPIEGIKKFETLSYLPPLTVEDLLKQIEYLLRSKWVPCLEFSKVGFVYRENHRSPGYYDGRYWTMWKLPMFGCTDATQVLKELEEAQKAYPDAFVRIIGFDHVRQXVQLISFIAYKPPGCEESGGH

SEQ ID NO: 44936 - protein, 309 aa, Fusobacterium nucleatum subsp. vincentii ATCC 49256
MSKKSTRQAYGEALVELGRINNDIVVLDADLSKSTKTDLFKKEFPKRHLNIGIAEADLMGTAAGFATCGKIPFASTFAMFAAGRAFEQIRNTIAYPKLNVKIAPTHAGISVGEDGGSHQSIEDIALMRAIPGMVVLCPCDAVETKKMVFAAAEYNGPVYLRLGRLDVETVLDDNYDFQIGIANTLRDGSDVTIVSTGLLTQEALKAADELAKENISVRVINCGTIKPLDGETILKAAQETKFIITAEEHSVIGGLGSAVSEFLSETHPTLIKKLGVYDKFGQSGKGTEMLEKYELTAAKLISMVKENLK

SEQ ID NO: 44937 - protein, 412 aa, Geobacillus kaustophilus HTA426
MEKRRVVVTGIGAVTPLGNDAETTWKNIIAGQSGIDIVTRVNPDDFPAKVAAEVKDFDPSLFIDRREARKMDRFTQFAVAAALMAVKDANLDINESNAERVGVWIGSGIGGMETFEQQFEIFQQRGYRRVSPFFVPMMIPDMAAGQVSIILGAKGINSCTVTACATGANSIGDAFKVIQRGDADVMITGGTEAPITKMSFAGFCANTALSTNPDPKTASRPFDKKRDGFVMGEGAGIVVLEELEHALRRGAKIYAEIVGYGATADAYHITAPAPGGEGGVRAMRQALHDAGLKPEEIDYINAHGTSTEYNDKYETAAIKEVFGDHAYKLAVSSTKSMTGHLLGATGAVEAIFSVLAIRDGIIPPTINYETPDPECDLDYVPNEARKQDVRAVLSNSFGFGGHNATLIFKKYV

SEQ ID NO: 44938 - protein, 416 aa, Dechloromonas aromatica RCB
MSQRRVAITGLGLVSPYGGNTDDFFTRLCAGQSAVGHLLTDDVPRPLSIPFVSCSGFDPDVALGKPLASMMDRFAQLGMAAAFEAWDNAGLARQTDGESRDDWGVAWGTALGGTLAYEKGYRELWQQGRERLSPLTVILGMNNAANAHMSIQLGLGGVSMSHTVACASSAIAIGEAFRRVRSGEATIMLTGGSDVPQAYGVARAWEALRVMAPGDAETSAVACRPFSVDRRGLVLGEGGAALVLEDWEHAIARGARIHGEIVGYGTSCDHSHLVRPEAAGQVRALQLTLADAGLNPADIDYVNAHGTATTEGDPVEITALKTVFGNHAERLAVSATKSMHGHSLGAAAAIEAIATVLALREQTVPPTAHLVQLDPACTGVDHVTTARTGQPLRAALSNSFAFGGSNAVLAFRAVVQ

SEQ ID NO: 44939 - protein, 330 aa, Streptococcus agalactiae
MAVLILGGAGYIGSHMVDQLITQGKEKVIVVDNLVTGHRQAVHSDAIFYEGDLSDKTFMRQVFRENPDVDAVIHFAAFSLVAESMENPLKYFDNNTAGMIKLLEVMNECDIKNIVFSSTAATYGIPEQVPILETAPQNPINPYGESKLMMETIMKWADQAYGIKFVALRYFNVAGDKPDGSIGEDHKPETHLLPIILQVAQGVRDKIMILEDDSHTPDGTNVRDYVHPFDWPDAHILAVIYLRQGNESNVFNLGSSTGFSTFRCKAARRITGKKIPAQKAARRPGDPDTLIASSEKARQILGWEPKFDNIDKIISSAWAWHSSHPNGYED

SEQ ID NO: 44940 - protein, 466 aa, Sinorhizobium fredii
MSKRFRSRSAARAARHRLRRGEQDMSNRLNTTPNDLSAFWMPFTANRQFKKEPRLFVGAKDMYYTTHDGRTVLDGTAGLWCVNAGHCRPKITEAIREQAGELDYAPAFQLGHPKAFELANRLVDIAPEGLNHVLYTNSGSESVDTALKVALAYHRAKGNGSRFRLIGRERGYHGVNFGGISVGGIVANRKMFGTLLTGVDHLPHTHLPAKNAFTRGEPEHGGDLASELERIVTLHDASTIAAVIVEPVAGSTGVLIPPKGYLQKLREICTKHGILLIFDEVITGYGRLGTPFAAQYFDVKPDIITTAKGLTNGVIPMGAVFVTSEIHDAFMTGPEHLIEFFHGYTYSGNPIASAAALGTLDTYKEEGLLTRAAELASYWEEALHSLKDCPHVIDIRNIGLIGAVELEPIAGEPTKRAFSAFLKAYEKGLLIRTTGDIIALSPPLIIEKKQIDELIDKLRDVLKNNI

SEQ ID NO: 44941 - protein, 247 aa, Triticum aestivum
  misc_feature (224)..(224): Xaa can be any naturally occurring amino acid
  unsure (1)..(247): unsure at all Xaa locations
LNKFVQKSRLVPVRNSRDIVDPRVRRTLADYNIQKESTLHLVLRLRGGMQIFVKTLTGKTITLEVESSDTIDNVKAKIQDKEGIPPDQQRLIFAGKQLEDGRTLADYNIQKESTLHLVLRLRGGMQIFVKTLTGKTITLEVESSDTIDNVKAKIQDKEGIPPDQQRLIFAGKQLEDGRTLADYNIQKESTLHLVLRLRGGMQIFVKTLTGKTITLEVESSDTIXHVEAKIRTGGHPPDQHADLAGSS

SEQ ID NO: 44942 - protein, 480 aa, Cryptococcus neoformans var. neoformans JEC21
MPSINSTPVPVDFTKYFSKETTGRKRSQLKELRPYFEIPGMISFGVGIPHPSTWPVNGMTLSVPFAGKSVFVPGYNSRSPEDMLPLALYQEPSKNEPLRPDLTEELQYSATYGTKHLLSWIKEHIERVHAPPYEDWINLLTAGNTDGVDAVMRACFDRGDYMLVEEFAYPGLLSPAATLGIKCLGVPLDSEGIDPSALDEILTNWDETERGGPRPKMLVMVPTCSNPAGVTVPAHRKQEIYAICRKWDLLICEDDPYCFLQIRPNGADSPIVPSFLSLDTDGRVIRVDSFSKIVAPGSRLGFVTGHKVLVEKIMNTRESSTQCPSGFSIAAIAAILRAWGGHEGFERKYIPHISDIYSKRCLSIIDLLKKHVPSNTIEIPKPAGGMFLWVRLRIESHPSFPSEDPETISKQVFQAMIDEKVLMAPSEFFKAPSTSVWTPEQEAKRIFVRISFSLPPQDEMEEGAKRMGRALAREWGLEQA

SEQ ID NO: 44943 - protein, 657 aa, Prochlorococcus marinus str. NATL2A
MTKTNSQKNIFSSEDALAFWIPNRKEEQAINRRSHLNKITQVDQIWELLKVQLSDVLAVDSPHTFHPESFTYKELAENISKAAFSFTKLGVGPDDVVALFAENSPRWLIADQGLMRIGATDSVRGATAPPSELRYILEDSNAVGLIVQNSDVWERLSLNDDQINSLKFVLQLEGKACDGVFEWESFLKKGLNIENVSKQEKIIDRQPKRIATILYTSGTTGKPKGVPLTHSNLLHQIRSLACVANPSPGAPVLSVLPIWHSYERSAEYYFFSCGCTQTYTSIRHLKEDLPRVKPIVMATVPRLWESIKLGFEDAVDKMPRLRKTLIKSAISNSKAYKLARRKLYFLTIESVSSFEQISSFIEILLRYPMHRISSIYLWPKILTKICGGRLRFPISGGGAIAPHIDSFFEALGVELLVGYGLTETSPVLTCRRPWRNIRGGAGQPLPETEIKIVDPETFQIKKLRQKGLVLARGPQIMSGYLGKRSESKKVLDATGWFNTGDLGMLLSDGSLILTGRAKDTIVLSSGENIEPGPLEECLIASSLIEQAFLLGQDQKYLAALIVPRIDHVKEWLAERGVNSKVVLGISPENYELRQSLKLEMNQALANRLGSRREERLFSIALVEPFTIENGLLTQTLKQKREQIIQRDLKLINEIYGL

SEQ ID NO: 44944 - protein, 645 aa, Arabidopsis thaliana
MDTNTSGEELLAKARKPYTITKQRERWTEDEHERFLEALRLYGRAWQRIEEHIGTKTAVQIRSHAQKFFTKLEKEAEVKGIPVCQALDIEIPPPRPKRKPNTPYPRKPGNNGTSSSQVSSAKDAKLVSSASSSQLNQAFLDLEKMPFSEKTSTGKENQDENCSGVSTVNKYPLPTKQVSGDIETSKTSTVDNAVQDVPKKNKDKDGNDGTTVHSMQNYPWHFHADIVNGNIAKCPQNHPSGMVSQDFMFHPMREETHGHANLQATTASATTTASHQAFPACHSQDDYRSFLQISSTFSNLIMSTLLQNPAAHAAATFAASVWPYASVGNSGDSSTPMSSSPPSITAIAAATVAAATAWWASHGLLPVCAPAPITCVPFSTVAVPTPAMTEMDTVENTQPFEKQNTALRDQNLASKSPASSSDDSDETGVTKLNADSKTNDDKIEEVVVTAAVHDSNTAQKKNLVDRSSCGSNTPSGSDAETDALDKMEKDKEDVKETDENQPDVIELNNRKIKMRDNNSNNNATTDSWKEVSEEGRIAFQALFARERLPQSFSPPQVAENVNRKQSDTSMPLAPNFKSQDSCAADQEGVVMIGVGTCKSLKTRQTGFKPYKRCSMEVKESQVGNINNQSDEKVCKRLRLEGEAST

SEQ ID NO: 44945 - protein, 509 aa, Cryptococcus neoformans var. neoformans JEC21
MGNTPSHQQQPSRVSPPSTDAPQRHPSLRIHMPRRHVSPQSSNPTSPSSGRPGSGSPRRRKSLELPDLNKLSFTPAALTPAAPVPTTHTHTSHHFAPSTAAGHHARHPASPPLPGTPTGAPSLGSEAANGSGTGSSNRYWRDQLGARASPLAGANSLGALSKLEPTLSASSTGSRGGAMGSDVNPFFPDPYGVQDPSARNVKAIPIPIPGKDKGQDQPQVQQATAQAQAQPRPSDLGAIVPVQEEKPKDDGLVDVQIQWNGGGRNVYVAGTWDGGWAKRIKLHRSTHDFNTTIRLPPGQYRLKFIVDDSWRCSKQISTAVDDDGTLVNWIEVEAPKTAEEIKAEWAMDSEPAAKEEDTDESQWTSEIPPALILYQYIEELPFRFHPDELSSFLKSVPYIPNVPAPPTLPRILDKVIVNNDSKRLWDSKDHKGQPGYQHAPPAGVDDNSMLAVPNHVVLNHLTASAIRNGTLGVGTTTRYRKKYITTMFFRDQPAPNEHPANQPVPQSAH

SEQ ID NO: 44946 - protein, 519 aa, Candida glabrata CBS138
VGTPPQNVSLLLDTGSSDMWVIGSNNGYCKNSDNKSRNLDALGSNRFAKRASSVASASPSSATDSDGGDDGDDSGDAEQFYPTAASEIPAAAKTLDCQSLSLFDLEKSSSFKSNSTPFFTSYGDNSYASGLWGTDDVRLGNLSIADVFFAVANFSNSSTGVLGVGLPALESYNPALSDNFNVSDYLPVNASDADIDNISKPTYANFPQILKQKNVIEKVAYSLFLNDTNATNGQILFGAVDHSKYTGSLSTLPLVNSLYVEGINDTTQLEITLDGMGLKNSQGQFTIYNQKMPALLDSGTTVSYLPIDLHSLVAKQLKGIVDPQTGFIELKNCPAKNDNTQLVFNFGGAFISIKYTEFIEKSDDDNCYVTFMPQGEPGILLGDNFLRNAYIVYDLEDMEISIAQANFNGGAENIEAIVKNVPSAVKAPGYSASFTEFPSSYATTGNIFSGYNSTNSTGSAGSKTTMTSSRTSRNTNTASAAGNSSSSTRAKKNAGFAHEVPVSAISVIMVFNILLSMLL

SEQ ID NO: 44947 - protein, 314 aa, Glycine max
MQQKSTKQQLNHTLRERDRWIERHPLTLAFTTEQQKISSPSTARANSPNINMRSNFEAESQYLTELLAEHQKLGPFMQVLPLCTRLLNQEILRVSGKNGMMQNQGFSDYDRVQFGSPKPNLMPSLDIQPNFTGWNSLSHEGLAGVQGLNVDWQTSPGVPSSHIVKRILRLDIANDSYPNFNLVGRLLGPRGNSLKRVEATTGCRVFIRGKGSIKELDKEELLRGRPGYEHLNEPLHVLIEAELPVNVVDIRLRQAQEIIEELLKPMDESQDLYKRQQLRELAMLNSNFREESPQLSASPSTFNSNEMKRAKTDL

SEQ ID NO: 44948 - protein, 166 aa, Brassica napus
  misc_feature (156)..(156): Xaa can be any naturally occurring amino acid
  unsure (1)..(166): unsure at all Xaa locations
DQFLEPLELCYRSLCDCGDRPIADGSLLDFLRQVSTFGLALVKLDIRQESDRHTDVLDAITQHLGIGSYKEWSEDKRQEWLLSELSGKRPLFGHDLPKTEEIADVLDTFKVISELPHDSFGAYIISMATAPSDVLAVELLQRECGITHPLRVVPLXFEKLADLENA

SEQ ID NO: 44949 - protein, 573 aa, Arabidopsis thaliana
  misc_feature (441)..(441): Xaa can be any naturally occurring amino acid
  unsure (1)..(573): unsure at all Xaa locations
MVKSTSKDAQDLFRSLRSAYSATPTNLKIIDLYVVFAVFTALIQVVYMALVGSFPFNSFLSGVLSCIGTAVLAVCLRIQVNKENKEFKEGRDLRHTHINTPHALLRPITKHALMTLTFSSSAATVAVAAATVTSSARVPVYPLASSTLRGLVSFRLTAKKLFLPPLRSRGGVSVRAMSELVQDKESSVAASIAFNEAAGETPSELSHSRTFLDARSEQDLLSGIKKEAEAGRLPANVAAGMEELYWNYKNAVLSSGASRADETVVSNMSVAFDRMLLGVEDPYTFNPYHKAVREPFDYYMFVHTYIRPLIDFKNSYVGNASIFSELEDKIRQGHNIVLISNHQSEADPAVISLLLEAQSPFIGENIKCVAGDRVITDPLCKPFSMGRNLICVYSKKHMNVDPELVDMKRKANTRSLKEMATMLRSGGQLIWIAPSGGRDRXPNPSTGEWFPAPFDASSVDNMRRLVEHSGAPGHIYPMSLLCYDIMPPPPQVEKEIGEKRLVGFHGTGLSIAPEINFSDVTADCESPNEAKEAYSQALYKSVNEQYEILNSAIKHRRGVEASTSRVSLSQPWN

SEQ ID NO: 44950 - protein, 487 aa, Vigna radiata
MRRGLDNQAYYVLGHKTPNIRDLYTLGRKLGQGQFGTTYLCTENSTSNEYACKSISKRKLISKEDVEDVRREIQIMHHLAGHKNIVTIKGAYEDPLYVHIVMELCSGGELFDRIIQRGHYTERKAAELTKIIVGVVEACHSLGVMHRDLKPENFLLVNKDDDFSLKAIDFGLSVFFKPGQIFTDVVGSPYYVAPEVLLKHYGPEADVWTAGVILYILLSGVPPFWAETQQGIFDAVLKGHIDFDSDPWPLISDSGKDLIRKMLCSQPSERLTAHQVLCHPWICENGVAPDRAIDPAVLSRLKQFSAMNKLKKMALRVIAESLSEEEIAGLREMFQAMDTDNSGAITFDELKAGLRRYGSTLKDVEIRDLMEAADVDKSGTIDYGEFIAATVHLNKLEREEHLIAAFQYFDKDGSGYITVDELQQACAEHNMTDAFLEDIIREVDQDNDGRIDYGEFAAMMQKGNAGIGRRTMRNSLNLSMRDASSAQ

SEQ ID NO: 44951 - protein, 317 aa, Agrobacterium tumefaciens str. C58
MTRFIQMQSAGGPSVLQVIKQDLHAPRAGEVRLIQDAIGLNFVDTMIRKGQYPMALPAVPGFEAAGTITEVGSGVEGLSVGDRVAYFFSEGAYATERVIPTAPLIRLPADISNETAATFLAKGATAWMGIRGLHDLKSADTVMVLGASGSVGAILSRWARSLGATVIGVAGSPGKFDKVAAGSTHAFHAGEPDIAAKIRAIAPDGVDVVYDLVGRATFALAASSVRDGGVIAAIGAATGQPAPAPDLVRRGVDVRSGGTPQYVRGPAVENATSQLWDALRSGVFDDLETTRYPFDEIARAHDDVDNRRLSGLPVLIA

SEQ ID NO: 44952 - protein, 343 aa, Erwinia carotovora subsp. atroseptica SCRI1043
MKTLLPTSTAGSLPKPSWLAEPEKLWSPWKLQNEELIDGKKDALSLSLFDQLRAGIDIVSDGEQTRQHFVTTFIEHLSGVDFEKREVVKIRNRYDASVPTVVGAVTRQKPVFVEDAKFLRQLTKKPIKWALPGPMTMIDTLYDNHYKSREKLAWEFAKILNQEARELEAAGVDIIQFDEPAFNVFFDEVNDWGIAALERAIEGLKCETAVHICYGYGIKANTDWKKTLGSEWRQYEEAFPRLQTSNIDIISLECHNSHVPMDLLELIRGKKVMVGAIDVATNAIETPEEVADTLRKALQFVDADKLYPSTNCGMAPLPRRVATGKLNALSAGAEIVRRELLAK

SEQ ID NO: 44953 - protein, 511 aa, Synechococcus elongatus PCC 6301
MAALSLADRVVVTAEQMQAIESRLFAAGMPVAALMEKVAGLLSQRLQMAYPDRTQRWGIWVGPGHNGGDALVVARELHLQGYPVQIWHPFERRKPLTEAHLQFAQHLGISIACDYPEHCDRWLDGGFGFGLNRPLNEATQTAIAQLNDSGKPILSIDLPSGLDTDSGEPLGAAIRAERTYCLGLWKQGLLQLVAAPWHGELERVDFGIAEADIVAVLGPVPDRQILTDEAAIAALPLPIAADAHKYRRGQLLLIAGSQRYRGAALLAALAARSSGVGMMTLAVPASLSAIAIAQVPEALVVACPETETGEIAELPIDRDRYNAIAIGPGVGTGPTIRTILHRVLQQSTPFLIDADALTVLAQHPEDWALRPAEARTVITPHAGEFQRLFGSAPTPASLSSAASERSLILVRKGPSPTVVTPVGASWALVDSTPALARGGRGDVLTGLLGGLLAQTDAVSAAIAATWWHSRTAQAIAQKQTALGVTPTELAAQLTPWLGQRLQSEIAQYLAS

SEQ ID NO: 44954 - protein, 209 aa, Candida glabrata CBS138
MSVDEVTKKFEETVSVDGPKTVLSDAKDFEVKHPLNTKWTLWYTKPAVDKSESWSDLLRPVTSFQSVEEFWAIVQNIPEPHELPLKSDYHVFRNDIRPEWEDSANAKGGKWSFQVRGRGAEIDELWLRTLLAVIGETIDEEDSQINGVVLNVRKGGNRFALWTKSCDKEPLSNIGARFKQVLKLADEDTLEFFPHSTANDRHSQPTITL

SEQ ID NO: 44955 - protein, 332 aa, Streptomyces tenebrarius
MRVLVTGGAGFIGSHYVRELLGGAYPAFADAEVVVLDKLTYAGNEANLAPVADAAGSRLRFVRGDICDAELVRTLMTGVDVVVHFAAESHVDRSILGATEFVMTNVLGTQTLLQAALEAGVGKFVHVSTDEVYGSIDEGSWPEDHPLEPNSPYSASKASSDLLARAFHRTHGLPVCVTRCSNNYGPYQFPEKVIPLFVTNLMDGRPVPLYGDGLNVRDWLHVDDHCRGIQLVVEGGRPGEVYNIGGGTELTNRELTERLLAVMGADWSMVEQVPDRKGHDRRYSVDITKISTELGYRPRVPFEEGLARTVAWYRENREWWEPLKRRAALAAR

SEQ ID NO: 44956 - protein, 179 aa, Triticum aestivum
  misc_feature (51)..(51): Xaa can be any naturally occurring amino acid
  misc_feature (104)..(104): Xaa can be any naturally occurring amino acid
  misc_feature (116)..(116): Xaa can be any naturally occurring amino acid
  misc_feature (126)..(126): Xaa can be any naturally occurring amino acid
  misc_feature (155)..(155): Xaa can be any naturally occurring amino acid
  unsure (1)..(179): unsure at all Xaa locations
MAPTVMASSATSVAPFQGLKSTAGLPVSRRSNGASLGSVSNGGRIRCMQVXWPSEGIKNSETLSYLATAQHGGLLKQVDYLIRSKWVPCLEFSKVGFIFREHNXRSPGYYDGRYWXTMWKLPMFGXCTDATQVINEVEEVKKEYLTRTSRIIGFXDNMRQVQCVSSMAFKQRAARSRKG

SEQ ID NO: 44957 - protein, 443 aa, Yarrowia lipolytica CLIB122
MSYNQGYNQGGYNQGPPQGYNQGGYNQGPPPQSYNQPPQGYNQGPPQHGGYNQGGYNQGGYNQGPPQHGGYNQGPPQHGGYNQGPPQHGGYNQGPPQHQQGGYQQGGYGGAPPPQHGGYGGAPPPQQFNQGPPPQHNPPYDPSNDASVLYHAMKGWGTDEKKLIQVMGSLKAYQVAPLNNFYRQKYGKTLQKHLTSETSGDFQFALEALCYTPPEFDAFCVHHAVRGLGTKENWLDEILLCRSNYEMQQIKNAYQFLFKKDMVQDVLSDLSFKTKQMFEIVLNRQDINRPVDPNRVQQDVYELHKAFKGLGTDEVQVMGILCNRSQAEVAAINAQFHATYAKRLVHALESEFSGHMENALTFIVKYSTDKYQCQAEYLEKAMAGPGTDERALTNRIVRLHWDQQGKPQVMRAYQNVYKRDLVSRVKGETSGDYERLLVALLQN

SEQ ID NO: 44958 - protein, 630 aa, Trichodesmium erythraeum IMS101
MTHCLNPNCQIPQNPDWNKYCQNCGSKLLLKDRYRPLNLIGQGGFGRTFLATDEDKPSKPYCVIKQFFPASQGTNNINKAAQLFEKEATRLDQLGKHSQIPELMAHFTQDGRQYLVQEFIAGQNLAEALKIENSYNEDQIRGLLKNLLPVLQFIHSHNVIHRDIKPENIIRRQNSDRELVLVDFGAAKYALGTALLKTGTTIGTPEYTAPEQNRGKAVFASDLYSLGVTCLHLLTKISPFELFDVGEGTWVWRRYLQNNSISEKLGDILDKLVENAVNRRYQSADEVMENLNADDLTFIQDKTVIQKPEITPEPLPSKTWKCIDTLTGHRKWVCSVALRNDQKILASGSEDETIKLWEVDSGREILTIRGHSGYVNSVAFSPDGKILASGSDDKTIRLWEVQTGKLLCILGDWGRGEYFGHSGGVTAIAFHPDGKSLASASKDKNVKVWRLGDDIYDPNYGRVIMTLTGHLQQVRAIAFSPDGKTLASGSQDNMIKIWDLSLGNTVKNLCHYYQGTHYIYTVAFSTDGKVLASGGRDRNIKIWEIESGEILKILEGHSSDIRQVVFSPQGDIIASGSEDGTIKIWDGKTGQEIGNLVGHSKYINSVTFSRDGKSLASGSSDNTIRIWRQE

SEQ ID NO: 44959 - protein, 210 aa, Photorhabdus luminescens subsp. laumondii TTO1
MADIENLPLENVVWHPHQLTRAQREVENGHPALVIWFTGLSGSGKSTVAGALEQALFQRGIKTYLLDGDNLRHGLCRDLGFSEQDRQENIRRVGEVASLMVDAGLVVLTAFISPYKAERKKVRELLEPGQFIEVFVDTPLEICESRDPKGLYKKARAGEIRHFTGIDSVYEVPDSPEIYLPGQQSVETSVTQLLVELKKSGIIRSRIHHG

SEQ ID NO: 44960 - protein, 143 aa, Methylococcus capsulatus str. Bath
MAVERTLSIIKPDAVAKNVIGEIYSRFEKAGLRIVAAKMAQLSREQAEGFYAVHRERPFFNDLVSFMISGPVMIQVLEGENAIAKNRELMGATNPRDAAPGTIRADFAVSIDENAVHGSDGPETAAQEIAYFFESDELCPRTR

SEQ ID NO: 44961 - protein, 149 aa, Streptococcus pneumoniae
QPNWINRDRFILSAGHGSMLLYALLHLSGFEDVSMDEIKSFRQWGSKTPGHPEFGHTAGIDATTGPLGQGISTATGFAQAERFLAAEYNREGYNIFDHYTYVICGDGDLMEGVSSEAASYAGLQKLDKLVVLYDSNDINLDGETKDSFT

SEQ ID NO: 44962 - protein, 431 aa, Vibrio parahaemolyticus RIMD 2210633
MTKSSELYQKAQQTIPGGVNSPVRAFNGVGGSPLFIERADGALIFDADGRAYIDYVGSWGPMILGHNHAVIREAVIDAAQRGLSFGAPTEMEIAMAELVSELVPSMEQIRMVSSGTEATMSAIRLARGFTGRDKIMKFEGCYHGHADSLLVKAGSGALTLGQPSSPGVPADFAKHTLTATFNDLDSVRELFAANKGEIACIIVEPVAGNMNCIPPVEGFHEGLREICDQEGALLIFDEVMTGFRVALGGAQAHYNIKPDLTTLGKVIGGGMPVGAFGGRKEVMQYVAPTGPVYQAGTLSGNPVAMAAGFACLNLLKEEGNEKRLASKTKQLADGFKSLAEKHGIPLVVNQVGGMFGFFFTDQETVTCYEDVTKCDIERFKRFFHLMLDHGVYLAPSAFEASFTSLAHGSKEIDATLEAADRCFAIIAAEAK

SEQ ID NO: 44963 - protein, 387 aa, Brassica napus
MAIRLSLICLLVSVTAIAADLTPERYWNSALPNTPIPNSLRHLFTSDFSDEESTNVQVGKGGVNVYTGKGKPGGGTAVNVGKGGVHVNTGKGKGTHVSVSGGKGHGGGVGVHTGKPGKRTDVGVGKGGVIVHTRHKGKPVYVGVKPGHNPFAYNYAASETQLHDDPKAALFFLEKDMVPGKAMNLRFNAEDGYNGKTAFLPRGEAETVPFGSEKSSEILNTFSVKPGSGEAEMMKKTIEECEAKRVGGEEKYCATSLESMVDFSVSKLGKDHVRAVSTEVAEKNAPMQKYRIAAAGVKKLSDDKSVVCHKQKYPFAVFYCHKAMMTSVYAVPLEGENGLRAKAVAVCHKNTSAWNPNHLAFKVLKVKPGSVPVCHFLPETHVVWFSY

SEQ ID NO: 44964 - protein, 247 aa, Thermobifida fusca YX
MSTLVLLRHGESVWNAEGLFTGWVDVDLSPKGEEEARRGGRLLAEAGIRPDVVHTSLLKRAIRTANIALEEAGLHWIPVKRSWRLNERHYGALQGKNKAQTRAEFGDEQFMIWRRSYDTPPPPLAEDSEFSQHNDPRYATLPPELMPRTECLADVVRRMLPYWYDAIIPDLAAGRTVLVAAHGNSLRALVKHLDNIDDKSIAGLNIPTGIPLVYELNDDFTPRKTGGEYLDPEAAKEAIEAVKNQGK

SEQ ID NO: 44965 - protein, 331 aa, Streptomyces avermitilis MA-4680
MATRAVARRKSAAGGTDAASSVRAVGGEIADRDLVGMYLDEIARTPLLDAAKEVELSQIIEAGVFARQILDGEEEPRAEATREELESLVADSERAKDVFIKSNLRLVVAVARRYPRSGLPLLDLIQEGNAGLVRAVEKFDYRKGFKFSTYATWWIRQAITRSIADQSRTIRLPVHLVEELGRIRRVQREFNREHGREPEPAEIAAELDSNPARVTDVLDWARDPVSLNMHVDDEGETQFGDLLEDTSAVSPEQSVLTLLRSEELDDLIGRLDQRTASIIKMRYGIDDGRERTLTEVGKEHGLTRERIRQIEKHALLELKKLARSTGFDAAA

SEQ ID NO: 44966 - protein, 406 aa, Methylococcus capsulatus str. Bath
MRRVVVTGIGIVSSIGNNKGEVVESLRLGRSGVCRSEEYGELGFRSQVYAPIRLNPDELIDRKIRRFMGDGAAFNYLAMQEAIADAGLEPGEVSNPRTGLIMGSGGPSTSNMLAAWSTFREKGVKKVGPYMVPRSMSNTNSACLATPFQIKGVNYSISSACATSAHCIGNAAEQIQLGKQDIVFAGGGEEVHWTMSVLFDAMGALSAKYNDTPECASRPYDVDRDGFVISGGGGVLVMEELEHAKARGARIYAELTGYGATSDGYDMVQPSGEGAVRCMRQAMATMSGAKVDYVNAHGTSTPVGDIRELEAMKTVFGEDVPPVSSTKSLTGHALGAAGVHEAIYSLLMLEHGFICASANIRNLDPGAAGVPIARERIDDARLDTVMSNSFGFGGTNATLIFQRYAG

SEQ ID NO: 44967 - protein, 290 aa, Glycine max
MSGLYNPNFSPARAASPQIRSNPEVDRVFFFFFFCSQYLSELLAEHQKLGPFMQVLPICSRLLNQEILRVSGMLSNQGFGDFDRLRHRSPSPMASSNLMSNVSGTGLGGWNSLQQERLCGPPGMTMDWQSAPASPSSFTVKRILRLEIPVDTYPNFNFVGRLLGPRGNSLKRVEATTGCRVYIRGKGSIKDPDKEEKLRGRPGYEHLNEPLHILIEAELPANVVDIRLRQAQEIIEELLKPVDESQDYIKRQQLRELAMLNSNFREESPGPSGSVSPFNSSGMKRAKTGR

SEQ ID NO: 44968 - protein, 692 aa, Schizosaccharomyces pombe
GTRNGVRSRPVWLPGPEKGSETIINETRSQQSRWLAYAENVIRPLIHYKYWPSSEVDENEEQWWRDYVKMNHAFADKICEIYKPGDFIIVQDYSLFLVPQLIRNKIDDAVIGFYHHHPFPSSEIARCFPRRRAILRSVLGADFIGFEDYSYASHFISCCSRVLDLEIGHDWVNLNGNKVTVRAITVGIDVPRIIRSSGNVSVSEKLEELNKRYENMKVILGRDRLDELYGVPQKLRSFQRFLRTYPEWRKKVVLIQITISSAFKHPKLLSSIKKLVQAINQEFGTDDYTPVHHVEEQLEPADYFALLTRADALFINSIREGVSNLALEYVVCQRDRYGMVLLSEFTATSAMLHDVPLINPWDYNECAGIISYALSTPLERRKMIERASYKQVTTHTMQSWTSSLIRSLAYKLAATKTDQRIPTLTPEHALSVYSKASKRLFMMDYDGTLTPIVRDPNAAVPSKKLLDNLATLAADPKNQVWIISGRDQQFLRNWMDDIKGLGLSAEHGSFVRKPHSTTWINLAELLDMSWKKEVRRIFQYYTDRTQGSSIEEKRCAMTWHYRKADPREWSFQALECEALLEELVCSKYDVEIMRGKANLEVRPSSINKGGIVKQILSSYPEDSLPSFIFCAGDDRTDEDMFRSLHKNTRINKETSFAVTIGSDKKLSIADWCIETLQMLLISALVWRILLTE

SEQ ID NO: 44969 - protein, 312 aa, Pseudomonas fluorescens PfO-1
MYLVCGEALFDFFSEDDAGGQASKVNFKAIAGGSPFNVAVGLRRLGVDSALFGGLSTDYLGRRLQQVLQDEGVHPDYLVDFAAPTTLAMVAVGANGSPHYSFRGEGCADRQLSLAHLPALGPEVRGLHFGSFSLVVQPIADTLLALVQRESGKRLISLDPNVRLNPEPNIDLWRERIATLVPLADLIKVSDEDLSLLYPEQDPARVIEGWLQHRCQVVFLTRGGEGATVFSRVHGSWSVPASSVKIADTVGAGDTFQAALITWLTEHELDSVEGVQHLSREQIDGMLRFAVQAAALTCSKTGPDLPYRHQLT

SEQ ID NO: 44970 - protein, 382 aa, Glycine max
MMEELNKPMDGSATSWLSDLEMDDYNLFPDECPLNLNLFDDQEFLSQDIASALQEQTQTLQQSLSSECPSKTVSNSSTDETTFDFERPAKLLKTTTSSSCCNSDSSTITKSLSPKLSPSSSFSSFQSQILSFDNPNPTSSSNTTTQFYGFDCTLNPTQNEMVSVSVPNMRKPRFPTQTAKGSPKNQNFETKTSHGKRSPAHAQDHIMAERKRREKLSQSFIALAALVPGLKKMDKASVLGDAIKYVKELKERLTVLEEQSKKSRAESVVVLNKPDLSGDDDSSSCDESIGADSVSDSLFEVESRVSGKEMLLRIHCQKQKGLLVKLLAEIQSHHLFVANSSVLPFGDSILDITIVAQMGESYNLTTKELVKNLRVAALKILS

SEQ ID NO: 44971 - protein, 454 aa, Gossypium hirsutum
  misc_feature (77)..(77): Xaa can be any naturally occurring amino acid
  unsure (1)..(454): unsure at all Xaa locations
MAERALTRVHSLRERLDSTLTAHRNEILALLSRIEGKGKGILLHHQIILEFEAIPEENERKLADGAFFEILKASQEXIVLPPWVALAVRPRPGVWEYIRVNVHALVVEELTVAEYLRFKEELVDGSSNANFVLELDFEPFNASFPRPTLSKSIGNGVEFLNRHLSAKLFHDKESMHPLLEFPEVHSHKGKNMMLNDRIQNLNSLQHVLKKAEEYLVALPAETPYAEFEHKFQEIGLERGWGDTAERVLEMIQLLLDLLEAPDPCTLEKFLGRIPMVFNVVILTPHGYFAQDNVLGYPDTGGQVVYILDQVRALENEMLNRIKQQGLNITPRILIITRLLPDAVGTTCGQRLEKVYGTEYSDILRIPFRTEKGIVRRWISRFEVWPYLETYTEDVAHEISKELQGKPDLIIGNYSGGNIVASLLAHKLGVTQCTIAHALEKTKYPDSDIYWKKLE

SEQ ID NO: 44972 - protein, 155 aa, Oryza sativa
  misc_feature (86)..(86): Xaa can be any naturally occurring amino acid
  unsure (1)..(155): unsure at all Xaa locations
MSMIRRSNVFDPFSLDLWDPFDGFPFGSGSGSLFPRANSDAAAFAGARIDWKETPEAHVFKADVPGLKKEEVKVEVEDGNVLQISXGERIKEQEEKTDKWHRVERSSGKFLRRFRLPENTKPEQIKASMENGVLTVTVPKEEPKKPDVKSIQITG

SEQ ID NO: 44973 - protein, 1053 aa, Bacteroides fragilis YCH46
MTLFTNIKSFDKSFLLKLWLSLILYQLSVCPVSAQKDTMDIKDYILIINTYTESFPWSNRLISTATNFVKDDPKLAVYTEHMNMIMIDNDSILDQFKDSLFDRYGSHRPRMLLLLGNSSLILKDDLRKMWGDIPMVLCAGKDYTGPEHYYLTKQPIPLSERVPLAELSQSCNLTYLYANLYIHENVEMMFRTLPRMKRFIYVGDERFVNQVNSQEIQEILRTKHPDVHYTFLSSRDIKKTNQLIDSLNFVDPRTTGILFSSWFHKRQFAGNMMLTMILPEIVSTVSPPIFALNMIELNDKESGMVGGYTYDQNHFNEKLSNMFSEILSGKSPRDLPHYLPTDGTPLINYQVLVRKGLSPDEWPAHTRFLNKPITFWDKYKYFLPGTTVCIALLVWFFLYRIRTLTHLRQIQLKEIEAMANYKNLIDNMPLLYMQEKLIVNEQGVADDLIYLNVNPHFEKHFFRREDVVGKRASELFPESLPEFLHFIQISLKENRAITFPYYFKKIDRFYDIVLKGAHQENVIDIFCVDSTELHRAQQKLNATNHKLSMALEVADIIPWKWDLLSKTILCDINKPIELSAQGNNVSEEQLAVPDSQYFSKIYKEDRIRVEQAYKDLIEGRLEKVKEEYRVINIRNHTHKIEWVEAQAAVETRDENGIPVTLVGSSQVITGRKKMEMELTSAKDRAEESNRLKSAFLANMSHEIRTPLNAIVGFSGILASTEEEEEKQEYVSIIENNNALLLQLISDILDLSKIEAGTLEFQYSDIELNTELKKLESTLKLKLKSDDVQLEFVPGLPVCPVCTEKNRLSQLIINLVTNAIKFTSRGSIRFGYEHRGKELYFYVTDTGCGIPKDKQESIFGRFVKLNSFAQGTGLGLSICRTLVEHMGGHIGVDSEEGKGSTFWFSLPYKAASTSAGTMQKTEIQPISVEKDKLTILIAEDNESNYRLFESILGHDYHLIHAWDGREAVERFKRENPQIILMDINMPVMDGYEATQEIRKYSAKVPIIAVTAFAYASDEQRVMENGFDGYMPKPINARQLKAQITEIMQKRIILL

SEQ ID NO: 44974 - protein, 342 aa, Pseudomonas fluorescens PfO-1
MDRAMKILVTGGAGYIGSHTTLALLEAGYEVVVLDNLCNSSDAALHAVEAICGKSALMIRGDVCDRALLDRIFQQHAIDAVLHFAGLKAVGESVRKPLEYYETNVSGSITLCQAMAAAGVFRLVFSSSATVYGEPAQMPIREDFPTGTPTNPYGQSKLIVENVLRDLCQSEPRWSIALLRYFNPIGAHHSGQMGEDPNGIPNNLVPYISQVAVGSLKELSIFGDDYPTVDGTGVRDYIHVVDLADGHLKALQAIADRTGIHTWNLGTGDGYSVLQVLRAFEQACGQPVPYRVMPRRSGDIAESWADASKAAKELGWKATRNLQDMVTDTWRWQSNHPRGYQG

SEQ ID NO: 44975 - protein, 235 aa, Hordeum vulgare subsp. vulgare
MASAEGGGDKYRSFLHGDGEKKTVWRHGAPPNYDLVNKLFEEERTKEWAEGSVEEKVQRLLKTWEMEMVHKVRPEDQKSVNLKNYSASTNGLKPLTREEVMAMGGYNAFLATTLPPEHRIYDPEAESVESATSTFLTAFPRGFAIEVLDVYSSPSAPRIAFKFRHWGYMEGPFKGHPPHGGRVEFFGVCVFHVDEDTKVEKAEFFYERGNFLASFLTAPAASASASGCPVMRGAD

SEQ ID NO: 44976 - protein, 336 aa, Bacillus cereus ATCC 10987
MAKVYYEKDVTVNVLKEKKVAIIGYGSQGHAHAQNLRDNGFDVVVGLRKGKSWDKAKEDGFSVYTVAEAAKQADVVMILLPDELQPEVYEAEIAPNLQAGNSLVFAHGFNVHFDQVKPPANVDVFLVAPKGPGHLVRRTFSEGGAVPALFAVYQDATGVATEKALSYADGIGATRAGVLETTFKEETETDLFGEQAVLCGGVTALVKAGFETLVDAGYQPELAYFECLHELKLIVDLMYEGGLENMRYSVSDTAQWGDFVSGPRVVTEDTKKAMGTVLAEIQDGTFARGWIAEHKAGRPNFHATNEKENEHEIEVVGRKLREMMPFVQPRVKVGMK

SEQ ID NO: 44977 - protein, 590 aa, Pseudomonas syringae pv. syringae B728a
MCGLAGELRFDHQPADLAAVERITHELAPRGPDAWGFHSQGPVALGHRRLKIMDLSDGSAQPMIDSNLGLSLAFNGAIYNFPELRAELESLGYQFHSGGDTEVLLKGYHAWGADMLPKLNGMFAFAIWERDSKQLFIARDRLGVKPLYLSKTDKRLRFASSLPALLKGGDISGMLDPVALNHYLNFHAVVPAPRTLLAGVEKLPPASWMRIDASGKVEQKVWWTLPYGPHEDEKNLTLEDWRDRVLDSTREAVAIRQRAAVDVGVLLSGGVDSSMLVGLLREVGVEDLSTFSIGFQDAGGERGDEFQYSDLIAKHYGTRHHQLRIQEREIIEQLPAAFRAMSEPMVSHDCIAFYLLSREVSKHCKVVQSGQGADELFAGYHWYPQVDGASDPVAAYRDAFVDRSYAEYAETVQPKWRTANDAAGDFVRDHFAQPGASAAVDKALRLDSTVMLVDDPVKRVDNMTMAWGLEARTPFLDYRLVELSARIPGKFKLPDGGKQVLKEAARMVIPSEVIDRKKGYFPVPGLKHLQGDTLNWVRELLTDSSQDRGLFNPAMVDKLLTNPEGQLTPLRGSKLWQLAALNLWLSEQGL

SEQ ID NO: 44978 - protein, 624 aa, Vibrio vulnificus CMCP6
MDHNPQSQLKLLVIRGKEQGYLTYAEVNDHLPAEIVDSEQVEDIIQMINDMGIKVVETAPDADDLALSDETNITDEDAAEAAAAALSSVESEIGRTTDPVRMYMREMGTVELLTREGEIDIAKRIEDGINQVQSSVAEYPGTIPYILEQFDKVQAEELRLTDLISGFVDPNADETAAPTATHIGSELAESDLEDEDNTDIDDEDEDEDEDGDSSSDSEEDVGIDPEMALEKFTQLRNSYQNLQLAVNEHGRESAQTAQAHELMLDVFKEFRLTPKQFDHLVNELRTAMDRVRTQERLIMKSAVEIAKMPKKSFIALFTGNESNEEWLDQILASDKPYVEKIKLHEEDIRRSIAKLRAIEEETSLSVNNIKDISRRMSIGEAKARRAKKEMVEANLRLVISIAKKYTNRGLQFLDLIQEGNIGLMKAVDKFEYRRGYKFSTYATWWIRQAITRSIADQARTIRIPVHMIETINKLNRISRQMLQEMGREPLPEELAERMQMPEDKIRKVLKIAKEPISMETPIGDDEDSHLGDFIEDTTLELPLDSATATSLKAATKDVLAGLTPREAKVLRMRFGIDMNTDHTLEEVGKQFDVTRERIRQIEAKALRKLRHPSRSETLRSFLDE

SEQ ID NO: 44979 - protein, 271 aa, Trichodesmium erythraeum IMS101
MKSYLAAAISMTSVPDLAKNLLQAEELIDLAIRQGAELVTLPENFSFLGGEEEKISQAEAIAKESEKFLKTIAQKYQITILGGGYPVPTTNGKVYNVASLIEPNGIEVARYEKAHLFDVNLPDGNTYQESNTVKAGMKLPSVYESKDYGNLGISVCYDVRFPELYRHLSNAGAEVLFIPAAFTAYTGKDHWQVLLQARAIENTCYIIAPAQTGNHYGRRQTHGHAMIVDPWGLILADTGDKPGVAIAEIDPTRLEQVRRQMPSLQHRVFIS

SEQ ID NO: 44980 - protein, 413 aa, Listeria monocytogenes str. 4b F2365
MDKRRVVVTGIGAVTPIGNDAETSWENAKKGVNGVAKMTRLNPDDFPVKIAAELKDFDVEKYLEKKEARKMDRFTHYAIASAEMAVQDSGLVIDDSNANRVGVWIGSGIGGMETFETQYEIFLNRGHRRVSPFFVPMMIPDMGSGQVSIRFGAKGINSTTVTACATATNSIGDAFKVIERGDADAMITGGAEAPITKMSLAGFTANKALSLNPDPETACRPFDKDRDGFIIGEGAGIVILEEYEHAKARGAKIYAEIVGYGATGDAYHITAPAPNGEGAARAMKMAIDDAGLTPDKVDYINAHGTSTPYNDEYETQAIKTVFGDHAKKLAISSTKSMTGHTLGASGGIEAIFALLTIRDNIIAPTIHLKNQDEVCDLDYVPNEAREANVNVVISNSFGFGGHNATLVFKRIED

SEQ ID NO: 44981 - protein, 308 aa, Glycine max
IRLEADASGNAPGRIEVGGKPPEVKEKLPIKRSKGSASGGNLNMWITGKNNEPGKIPGESANGIHSKSGESASDGTSEGSDENSQNDSQLKSRERQDSFEDEPSQNGSSVHAPQNGVHNRPQTVVNQTMSILPISTTSAPGAVPGPTTNLNIGMDYWGTPTSSTIPALHGKVPSTAVAGGMIAAGSRDGVQSQVWLQDERELKRQRRKQSNRESARRSRLRKQAECDELAQRAEALKEENATLRSEVSQIRSEYEQLRSENAALKERLGDIPGVATPGKEDLRSGQNDQHVSNDTQQSGQTEVVQGVH

SEQ ID NO: 44982 - protein, 245 aa, Xanthomonas oryzae pv. oryzae KACC10331
MSFHIRAITLDLDDTLWPFAPIGARIDQMLYDWMREHSPVTAERFPVEAMRALCERSFADNPHLHHDLSALRRLTLEMALRESGGDLALLEPAYEVFYAARNQVECYPDVLDALARIAAHVPVAALSNGNADLQRIGLMHHFAFQLGSREHGSAKPDPSIFLAACGRLEVSPAHVLHVGDHVRTDVLGALDAGLRACWINREGAVWSHPTQQPDLEFDSMTGLADWLDAQPPHPGPAHAGITLPA

SEQ ID NO: 44983 - protein, 367 aa, Streptococcus pneumoniae R6
MVKYGVVGAGYFGAELARYMQKNDGAEITLLYDPDNAEAIAEELGAKVASSLDELVSSDEVDCVIVATPNNLHKEPVIKAAQHGKNVFCEKPIALSYQDCREMVDACKENNVTFMAGHIMNFFNGVHHAKELINQGVIGDVLYCHTARNGWEEQQPSVSWKKIREKSGGHLYHHIHELDCVQFLMGGMPETVTMTGGNVAHEGEHFGDEDDMIFVNMEFSNKRFALLEWGSAYRWGEHYVLIQGSKGAIRLDLFNCKGTLKLDGQESYFLIHESQEEDDDRTRIYHSTEMDGAIAYGKPGKRTPLWLSSVIDKEMRYLHEIMQGAPVSEEFAKLLTGEAALEAIATADACTQSMFEDRKVKLSEIVK

SEQ ID NO: 44984 - protein, 621 aa, Lactobacillus reuteri
MNSKLKFYQSIRFKIALVFVLILMLTLECVGAVFVRQLEHQNLNTFKQTIELPSYVDNSLAEQLSRSNTKKANKQINQILSEVNNNNISEIRVVDSKSIVRGTSNADNRSAIGQKTTDQAIKATLLNNRSHTENLYDNSNHTRYYVNVIPLVDNSNNNVVGAVYLRASLESVYANINNITLVYLSAAMITIVLSLILAIIISQEITRPIEEMRKQTLRIARGDYSGQVKVLGNDELGQLAGAVNNLSVRVEEAQESSDSERRRLDSILSHMSDGVLATDRRGNVTIVNNMALQLLGVENEDDLIGKSIIDVLDIRHDYTVRQLVNGEQREMIIDMSNSGNNLILNAYFSPIQRESGFVSGLVCVLHDVTSQQKEERERKQFVSNVSHELRTPLTSVRSYVEALSDGAWQDKEIAPKFLKVVQDETDRMIRMINDLLSLSRMDAGTTKLNLEYVNINELFNYILDRFDMIIKKEEDPKKKKYTIERYFTKKDLWVEIDTDKFTQVIDNIMNNAIKYSPDGGVITTRLLETHNHVILSISDQGLGIPRKDLGRIFDRFFRVDKARSRKQGGTGLGLAISKEVINMLGGQIWVDSVEGKGSTFYISLPYVPYEEEDWDDEEAEK

SEQ ID NO: 44985 - protein, 493 aa, Arabidopsis thaliana
MANRFLRPNLIHRFSTVSPVGPPTTIIPEILSFDQPKPEVDLDLSDQARLFASVPISTLLRSTAILHATSIGPMVDLGSWLMSSKLMDTTVTRDLVLRIVKGTFYDHFCAGEDAAAAARRVSSVYESTGLKGMLVYGVEHAEDGGACDENIQKFIETVEAAKTLPSSHLSSVVVKITAICPMNVLKRVSDLLRWQYKNPNFKLPWKLNSFPVFSGLSPLYHTTSEPEPLTVEEERELEKAHERLKSVCLRCQESNVPLLIDAEDTILQPAIDYMAYWSAIMFNSDKDRPIVYNTIQAYLKDAGERLHLALRESEKMNVPIGFKLVRGAYMSSEAKLADSLGYKSPVHDTIQNTHDCYNDCMSFLMEKASNGSGIAVILATHNTDSGKLGARKASELGINKENGKIEFAQLYGMSDALSFGLKRAGFNVSKYMPYGPVDTAIPYLIRRAYENRGMMSTGALDRQLMRSLREELWLGEDTGDKCVSFMEYGKYRF

SEQ ID NO: 44986 - protein, 205 aa, Ustilago maydis 521
MASRKKVLLKVIILGDSGVGKTSLMNQYVNKRFSSAYKATIGADFLTREVMVDDRLVTMQLWDTAGQERFQSLGVAFYRGADCCCLCYDVNNAKSFETLDSWRDEFLIQAAPHDPENFPFVVLGNKIDVEESKRMVSQKRAMTWCQSKGNIPYFETSAKEAINVEQAFQTIARAALQQEAEAELYADYPDPIRIDQDNQQSGCNC

SEQ ID NO: 44987 - protein, 332 aa, Photorhabdus luminescens subsp. laumondii TTO1
MSQNTLKVNELYDDADLDESGIEADDFDEKLLKNDGDDLTDFENDLDVLQGMSQRVLDATQLYLGEIGFSPLLTAEEEVFFARRALRGDVLARQRMIESNLRLVVKISRRYSNRGLALLDLIEEGNLGLIRAVEKFDPERGFRFSTYATWWIRQTIERAIMNQTRTIRLPIHIVKELNVYLRTARELAHKLDHEPSPEEIAEQLDKPVDDVSRMLRLNERIISVDTPISGDSDKALLDVLSDENETGPEGTTQEDDMKKSIVKWLFELNSKQREVLARRFGLLGYEAETLEDVGKEIGLTRERVRQIQVEGLRRLKDIMQTQGLNIEALFRT

SEQ ID NO: 44988 - protein, 229 aa, Listeria monocytogenes str. 4b F2365
MKLVLIRHGQSEWNKLNLFTGWHDVDLSQEGVVEAMTAGKRIKEAGLEFDVAFTSVLTRAIKTLNYVLEESDQMWVPVHKSWRLNERHYGALQGLNKQETAEKYGADQVQKWRRSYDTLPPLLEENDERQAKNDRRYQLLDTHAIPAGENLKVTLERVIPYWMDTIAPEIKEGRRVVIAAHGNSLRALVKFLEGIGDDEIMDLEIPTGVPLVYELNDDLKPVNKYYLDK

SEQ ID NO: 44989 - protein, 251 aa, Trichodesmium erythraeum IMS101
MKSLIRLSAVLGVMVSSLIGPSLKDMSALALPEKEVLQKLTPVPVFTITDQNGSPLVRSIRREGNEVNSSVAGVFISKSDADAFVNKLKGENPDLAATVKVVPVSLGEVYEKSQSIQENGQRLEFAYVPIRRQVESAKALLEKNGQDFNNFSGVPLFMAKGGPDDGYLTIQRGEKQVIPMFFNKEDLQGMLDRAETQQPEVFSSVEIEVVNLEGVINALKNDDDPFLEKIIFIPPRESLEFVQQLRESDNK

SEQ ID NO: 44990 - protein, 498 aa, Pseudomonas fluorescens PfO-1
MHKQQLFLGIDCGTQGTKAIILDATSGQVLGQGAAAHTMISGANGRREQDTAQWLEAFTLGTRRALLAANVDGQSILGIGVSGQQHGLVLLDDQGQVLRPAKLWCDTETTPENDQLLAHLGGEQGSLERLGVVIAPGYTVSKLLWTKEQHPNVFSRIARVLLPHDYLNFWLTGRACSEYGDASGTGYFNVRTRQWDLQLLRDIDASGRLQSALPELIDAHQAVGTILPAIAEQLGINPNAVVSSGGGDNMMGAIGTGNIQPGAITMSLGSSGTVYAYAEAPKVSPDASVATFCSSSGGWLPLICTMNLTNATGAIRELFNLDLDAFNALVAQTPIGAEGVSMLPFLNGERVPPLPHATGSLHGLTIDNLTQANLCRAAVEGTTFGLRYGLDLLRQNGLQSRSICLIGGGSKSAVWRQIVADIMNTPVICTEQSEAAALGAAIQAAWCKSWSNGHEDTLADLCQRCVKLDLNSETLPVAANVAAFQQAYERYRLHVATL

SEQ ID NO: 44991 - protein, 328 aa, Vibrio sp. Ex25
MSNRVPTNILTGFLGVGKTTTILNLLKNKPENESWAVLVNEFGEIGIDGALMTDQGALIKEVPGGCMCCTAGVPMSVGITALLRQKPDRLLIEPTGLGHPKQVIATLTSEQYEPYVDLKATIALVDPRNLSDEKYLSNQNFVDQLDSADVVIGSKVDLCTSHDIDVFNDWVTDQSPSKVFSKLIHDGELPIEVLDIERVYGSASSHIESHHHEHAHQEPQFQLPPGETFVRKENKGQGYFSCGWLFGAEYTFDFDKLFSMLSDLTAERVKAVVNTDQGCYAFNVANRVVSVNEISLEGFESRLEVIDSQLLPWDELEQILLQLSGIKR

SEQ ID NO: 44992 - protein, 344 aa, Zea mays
MSKSGALDLASGLGGKINKVEVKSAVDEYEKYHGYYGGKEEARKSNYTDMVNKYYDLATSFYEYGWGESFHFAHRWNGESLRESIKRHEHFLALQLGLKPGMKVLDVGCGIGGPLREIARFSSTSVTGLNNNEYQITRGKELNRLAGISGTCDFVKADFMKMPFDDNTFDAVYAIEATCHAPDPVGCYKEIYRVLKPGQCFAVYEWCVTDHYDPNNATHKRIKDEIELGNGLPDIRSTRQCLRAVKDAGFEVVWDKDLAEDSPLPWYLPLDPSRFSLSSFRLTSVGRMITRTMVKALEYVGLAPQGSERVSSFLEKAAEGLVEGGKKEIFTPMYFFFVRKPLLE

SEQ ID NO: 44993 - protein, 404 aa, Dechloromonas aromatica RCB
MLPVSDLTVNPLLISAYTVTTSLGRGLEATREALRNGRSGLVPCAFETVQLATWIGEVAAVDDEKLPAALADYDCRNNRLTQMGLETDGFADRVREAIARYGKTRVGIFLGTSTAGILQTELAYRRRDPETGALPDDFHYRTTHNSFSLAEFTRDYFGLEGMAMAISTACSSSAKVFAAAARQLELGTIDAAIVGGVDTLCLTTLYGFASLQLTSAQPCRPYDAARNGISVGEGAAFALLERCDQPAAGSVLLLGTGESSDAYHMSSPHPEGLGAKMAMEAALRSAGLSTNDIDYINLHGTSTPANDAAEGKAVSALFGDHVPCSSTKGATGHTLGAAGAVEAIICALALTDGFLPGSPGTEHLDPAIPVDYLLQSCTGQPHRALSNSFGFGGSNCSLILGVAK

SEQ ID NO: 44994 - protein, 271 aa, Triticum aestivum
MLLLNPASEAAAAALDSIRQQLLEEPMAPARPAYCRSASFGSLVADQWSESLPFRPNDADDMVVYGALRDAFSCGWLPDGSFAAVKPEPLPSPDSYDGCCLGSFLASPPGLDAPWAEEAEVAATASRGKHFRGVRQRPWGKFAAEIRDPAKNGARVWLGTFDSAEDAAVAYDRAAYRMRGSRALLNFPLRIGSEIAAAAGQKRPSPQPASPDSPPPSSSAPGSSKRRKRGEAAAESMSMALVPPPPVQAPVQLTLPVQPWLATGAVQQLVS

SEQ ID NO: 44995 - protein, 372 aa, Haloarcula marismortui ATCC 43049
MATDSSDSVPMTVISGPLGAGKTTLVNRLLSEPGGRRIAVVVNDMGEINVDAELLADEAESGEEGVVDLSNGCICCRLQDDLVTEVTRLAEERTFDYLIVEASGISEPIPIARTLTVGPDGGDPPDGLHLDTTVSVVDAYGFWKAFDPEESLPEAAPGPERPLTEVLIDQIEFCDVLLLNKCDMVPADALDAVEAAVKALQPRAAIHRTTYSEVDPSDVLGTGRFDFEDAKRRQGWKQALAGAEDHANHEHDDEMSAAAAHGVESLIYRRDTPFHPVRFNDWLDDWDGAIVRAKGFAWVASRPETVLGVSQAGPSVQAGPIGEWGNDDPSTRLVFIGQEMDGDALIGELDDCLATDKERTETFASDPFPREG

SEQ ID NO: 44996 - protein, 357 aa, Arabidopsis thaliana
MDRPAVSGPMDLPIMHDSDRYELVKDIGSGNFGVARLMRDKQSNELVAVKYIERGEKIDENVKREIINHRSLRHPNIVRFKEVILTPTHLAIVMEYASGGELFERICNAGRFSEDEARFFFQQLISGVSYCHAMQVCHRDLKLENTLLDGSPAPRLKICDFGYSKSSVLHSQPKSTVGTPAYIAPEVLLKKEYDGKVADVWSCGVTLYVMLVGAYPFEDPEEPKNFRKTIHRILNVQYAIPDYVHISPECRHLISRIFVADPAKRISIPEIRNHEWFLKNLPADLMNDNTMTTQFDESDQPGQSIEEIMQIIAEATVPPAGTQNLNHYLTDDDMEEDLESDLDDLDIDSSGEIVYAM

SEQ ID NO: 44997 - protein, 509 aa, Arabidopsis thaliana
MDAQSVSEKLRSSGLLRTQGLIGGKWLDSYDNKTIKVNNPATGEIIADVACMGTKETNDAIASSYEAFTSWSRLTAGERSKVLRRWYNLLSRSEPLHFTKHRYDLLIAHKEELGQLITLEQGKPLKEAIGEVAYGASFIEYYAEEAKRVYGDIIPPNLSDRRLLVLKQPVGVVGAITPWNFPLAMITRKVGPALASGCTVVVKPSELTPLTALAAAELALQAGVPPGALNVVMGNAPEIGDALLTSPQVRKITFTGSTAVGKKLMAAAAPTVKKVSLELGGNAPSIVFDDADLDVAVKGTLAAKFRNSGQTCVCANRVLVQDGIYDKFAEAFSEAVQKLEVGDGFRDGTTQGPLINDAAVQKVETFVQDAVSKGAKIIIGGKRHSLGMTFYEPTVIRDVSDNMIMSKEEIFGPVAPLIRFKTEEDAIRIANDTIAGLAAYIFTNSVQRSWRVFEALEYGLVGVNEGLISTEVAPFGGVKQSGLGREGSKYGMDEYLEIKYVCLGDMNRH

SEQ ID NO: 44998 - protein, 158 aa, Triticum aestivum
MVKQKIVLKLPLDGERNRRKAFKAAVGMAGVTSATLEGDKIIILGDGVDPIALTTMLRRSLGKAELVSVSSGDDKKKDGGYGYGGYGYGGEKKKDGYGYGGADGGGGKDSKGNGGYHQNAVTPIPYPAYQQYNAMPSYPAYAYAPYQQQQQDPGCSIM

SEQ ID NO: 44999 - protein, 339 aa, Fusobacterium nucleatum subsp. vincentii ATCC 49256
MGGRSMEKTKIIFFDIKDYDKEFFKKYEKDYNFEMTFLKVRLTEETANLTKGYDVVCGFANDNINKETIDIMAKNGIKLLAMRCAGFNNVSLKDIHNRFKVVRVPAYSPHAIAEYTVGLILAVNRKIHKAYVRTREGNFSINGLMGFDLDGKTVGIIGTGKIGQILIKILKGFDMKVIAYDLFPNQKVADELGFEYVSLDELYAKSDIISLNCPLTKDTKYMINRRSMLKMKDGVILVNTGRGQLIDSADLVEALKDKKIGAVALDVYEEEENYFFEDKSNQVIEDDILGRLLSFYNVLITSHQAYFTKEAVDAITVTTLNNIRDFIEGKPLVNEVLQN

SEQ ID NO: 45000 - protein, 313 aa, Glycine max
MAKSIKFFELNTGAKIPSLGLGTWQAEPGVVAEALTTAIQVGYRHIDCASAYKNQAEIGSALKKLFDDGVVKREDLWITSKLWCSDHAPEDVPKALDKTLQELQLDYLDLYLIHWPVRMKSGTFGFNKEYLEQPDIPNTWRAMEALYDSDKARAIGVSNFSSKKLQDLLDIARVVPAVNQVELHPGWQQPKLRAFCESKEIHLSGYSPLGSPAALKSDILKNPVVTEIAERLGKTPAQVALRWGLQAGHSVLPKSTNESRIKGNFDIFDWSIPQDLMTKISEIKQERLVKASFFVHETYGAYRSIEDFWDGEL

SEQ ID NO: 45001 - protein, 445 aa, Triticum aestivum
MREILHIQGGQCGNQIGAKFWEVICDEHGIDGTGRYAGDSDLQLERINVYYNEASGGRFVPRAVLMDLEPGTMDSVRSGPFGQIFRPDNFVFGQSGAGNNWAKGHYTEGAELIDSVLDVVRKEAENCDCLQGFQVCHSLGGGTGSGMGTLLISKIREEYPDRMMLTFSVFPSPKVSDTVVEPYNATLSVHQLVENADECMVLDNEALYDICFRTLKLATPSFGDLNHLISATMSGVTCCLRFPGQLNSDLRKLAVNLIPFPRLHFFMVGFAPLTSRGSQMYRALTVPELTQQMWDAKNMMCAADPRHGRYLTASACFRGKMSTKEVDEQMLNVQNKNSSYFVEWIPNNVKSSVCDMPPRGLKMAGTFVGNSTSIQEMFRRVSEQFTAMFRRKAFLHWYTGEGMDEMEFTEAESNMNDLVAEYQQYQDATADEEYDEEEEEERDAE

SEQ ID NO: 45002 - protein, 308 aa, Pseudomonas fluorescens PfO-1
MTSKLEQLKQFTTVVADTGDFEAIARVKPVDATTNPSLLLKAAAIPAYAELLNASVRDCKGDVGLASDRFGVAVGQEILKVIPGRISTEVDARLSFDQDAVLKRAHRLIELYDKAGVGRDRVLIKIASTWEGIRAAEILEKEGIQTNLTLLFSFAQAAACADAGVFLISPFVGRIYDWYKKANGNDYTGADDPGVQSVTRIYNYYKANDYKTVVMGASFRNLSQIEQLAGCDRLTISPDLIEKLAADTGKLERKLAPGHAGEARLSLNEAQFRWLSNEDAMATEKLAEGIRQFARDQEKLEALLQAKL

SEQ ID NO: 45003 - protein, 446 aa, Xanthomonas oryzae pv. oryzae KACC10331
MRRSPAARPASIPPEPASGTGRRCRLGALSPARYASGPSLPLNAPMARPDLHGRISSLRKLHVAQDRVRVRRQVGRRDGVRLEIDGRWLTGFCSNDYLGLSQQFEVIAALQDAAARDGAGATASHLICGHHTAHETLEREIAEWLGYPSALLFGNGFIANLAVQQALLSEEDDVCVQDRLNHASLLDATRLAGCRLRRYPHLDVEGAMRQLKGAPEGAAMLASDAVFSMDGDVAPLRALSLVARMQDALFYVDDAHGVGVLGPQGRGCVADAGLGVAEVPLQLVTLGKALGGYGAVVVGDDALVRHLAETARPYIYTTALPPAQVAATLAAVRLARRDDWRRARLVELIAAFRDGARKHGFELMASDTPIQPLLCGEEATVMAMSAALEQAGFMVGAIRPPTVPEGKARLRVTLSALHTPQQVQALIDAIVQARDVVSRQPLRASA

SEQ ID NO: 45004 - protein, 475 aa, Saccharomyces kluyveri
MTSILSSTYRSPVARNLLKSSKTRGGLFLAARNYSNGEKTLKERFAEIFPSKAEEIKKLKKEHGKTVIGEVLLEQAYGGMRGIKGLVWEGSVLDPEEGIRFRGRTIPEIQKELPKAADGSEPLPEAIFWLLLTGEIPTETQVKALSADLASRSELPEHVVDLLDRLPKDLHPMAQFSIAVTALESESKLPKAYAQGVAKKDYWNYTFEDSLDLLGKLPVIASKIYRNVFKDGKLASVDPNADYGKNLANLLGFQNKDFVDLMRLYLTIHSDHEGGNVSAHTTHLVGSALSSPYLSLAAGLNGLAGPFDGRANQEVLEWLFKLREEVKGDYSKETIEKYLWDTLNSGRVVPGYGHAVLRKTDPRYTAQREFALKHFPDYELFKLVSTIYEVAPGVLTKQGKTKNPWPNVDSHSGVLLQYYGLTEASFYTVLFGVARAFGVLPQLIIDRAVGQPIERPKSFSTEKYIELVNSIKAKN

SEQ ID NO: 45005 - protein, 496 aa, Solanum tuberosum
MKKATVGAVVVGTAAAVAVAALIMRHRMGKSSKWARARAILKEFEEKCATPDGKLKQVADAMTVEMHAGLASEGGSKLKMLISYVDNLPTGDEGGVFYALDLGGTNFRVLRVQLGGKDGGIIHQEFAEASIPPNLMVGTSEALFDYIAAELAKFVAEEGEEFHPPPGRQRELGFTFSFPIMQTSINSGTLIRWTKGFSIDDTVGKDVVAELTKAMQKREIDMRVSALVNDTVGTLAGGRFTNKDVSIAVILGTGTNAAYVERAQAIPKWHGPLPKSGEMVINMEWGNFRSSHLPLTEYDHAMDTNSLNPGEQIFEKICSGMYLGEILRRVLLRMAEEAGIFGEEVPPKLKNSFILRTPEMSAMHHDTSSDLRVVGDKLKDILEISNSSLKTRRLVVELCNIVATRGARLAAAGILGIIKKMGKDTPRESGPEKIVVAMDGGLYEHYTEYSKCLENTLVELLGKEMATSIVFKHANDGSGIGAALLAASNSVYVEDK

SEQ ID NO: 45006 - protein, 559 aa, Ashbya gossypii ATCC 10895
MAQPQQTMAMPDLSNAIVAQDEMGRPFIIVKDQGNKKRQHGLEAKKSHILAARSVASIIKTSLGPRGLDKILISPDGEITITNDGATILSQMELDNEIAKLLVQLSKSQDDEIGDGTTGVVVLAGALLDQALELIEKGIHPIRVANGFNEAAKKAVAHLEQQADDMSADPEVFREYLFKAAKTSLGSKIVSKVHDTFAQMAVDAVMAVVDEGRKDVDFDLIKLEGRVGGSLGDSALIHGVVLDKDFSHPQMPKEVKPKEGKDGVKLAILTCPFEPPKPKTKHKLDITTVKEYQKLQEYEQEKFKEMIDYVKQSGADVVICQWGFDDEANHLLLQNELPAVRWVGGQELELIAIATNGRIVPRFQSLSPEKLGTCGSIRELEFGTTKERMLVIEECSNSKTVTCFLRGSNKMIVDEAKRALHDSLCVVRNMIRDSRVVYGGGAAEVTMSLAVASEADKQRGIDQYAFRAFAQALDSIPMILAENSGLDPIETLTTVKSKQVKENVSTIGVDCLGKGSNDMKELFVVDPLIGKKQQILLATELCRMILKIDNVIISGKDEY

SEQ ID NO: 45007 - protein, 385 aa, Arabidopsis thaliana
MSDLPRDLLAEILSRVPLTSLRAVRLTCKKWNDLSKDRSFLKKQIVETKKKQLESKEIEVIMMRNFRVYLTSIDIHNNVDPSFTPKGTLISLSDDANHHQVDNVSRVFHCDGLLLCITKDLHYRLVVWNPYFGQTRWIQPRNSYHRKDNYALGYDEKKNHKILRLKDNYYAPRERICEFELYSFESNSWKVVLDVSPDWYIPSYNRGLSLKGNTYWYATEKHVNVDFLICFDFTTEKFGPRLPLPFNATESPTYEDVVTLSSVGEEQLAVLFQSEYTLMMEIWVTSKVESTEVLWNKLFLEVDLIAISSHFQFLAEAGSFFIDQKKNVVVVFDKDMDEATDRDMAYVVGKNGYFKKVDIGEEAYTSCFPLVCSYVPSSEQIRQLT

SEQ ID NO: 45008 - protein, 375 aa, Candida glabrata CBS138
MSHEEVHDEFIAEDVTPNRPDETRGENGAPRRMLVREHRKIGRGAFGTVVQAYLTQDEQTWYGPFAIKKVPAQTEYKSRELQILRLTDHPNIVKLEYFFTHTSPKDNKVYQHLAMECLPETLQIEINRYTSNNLQLAIKHVKLYSYQIARGMLYLHALGICHRDIKPSNILVDPKTGVLKICDFGSAKRLEPNQPSISYICSRFYRAPELILGSTQYTTQVDIWGLGCVIGEMLIGRAIFQGQDPLLQLREIAKLLGPPDKKFIFFSNPRYTGPLYSTPLFNGTSLERFQKYFGHAGPDGIDLLMKVLKYEPELRFSPRRIMAHPFFDDLRNEKYFFPREQTQPVLLPELFNFNEFELQVIGELLQQIKPHSEEH

SEQ ID NO: 45009 - protein, 122 aa, Arabidopsis thaliana
MAKSSFKISNPLEARMSESSRIREKYPDRIPVIVEKAGQSDVPDIDKKKYLVPADLTVGQFVYVVRKRIKLGAEKAIFVFVKNTLPPTAALMSAIYEEHKDEDGFLYMTYSGENTFGSLTVA

SEQ ID NO: 45010 - protein, 539 aa, Candida glabrata CBS138
MKFLLFAAVAQAYLQLDFERQTAQDVALAKRHTSNGVANAMDVPIEQIGDLMYTVQLHVGTPPQNVTVQLDTGSSDLWFPVASNPYCKRNAKLAPKKVKALPATGFATENDQVAKKLRTFDCDAFGLFNSSMSSSFKSNDSSEFFVKYEDGTYASGMWGTDTFKLNHHNVSNITFALANIANASMGVLGVGFPAEETTDDPSPGSLIDKEHYQYDNFPIALKRTRTIKKVSYSIFLNDTNSKKGVILFGGVDHSKYQGTLWTVPMVNNLLTLNQTTTSRPEITLNGLGFRDDKKNVTLWGEKIPVLLDTGTTLAYAPKQVVDVIAKRVNGTIDSKTGGIKLKKCPNAKDNSELIFNFAGAEIPVSLLNMVEKRKGKCYLEIRYHEELSKTGMLLGDIFMRHVYSVFNMEDMEVSFAVANGNDSAPLQIEAIISDVPSAVKAPQYYNTFASSNLPSTVTNDIFASTATASMEPPSSVLESLKSKSSSTSSIDTSVPSDDKKIIDDDHSGHDHAKRDAYSNTAGILQISTTLVLVAMTLLL

SEQ ID NO: 45011 - protein, 173 aa, Arabidopsis thaliana
MNDADTNLGSSFSDDTHSVFEFPELDLSDEWMDDDLVSAVSGMNQSYGYQTSDVAGALFSGSSSCFSHPESPSTKTYVAATATASADNQNKKEKKKIKGRVAFKTRSEVEVLDDGFKWRKYGKKMVKNSPHPRNYYKCSVDGCPVKKRVERDRDDPSFVITTYEGSHNHSSMN

SEQ ID NO: 45012 - protein, 356 aa, Phaseolus vulgaris
MSSISDLVNLNLSDSTERVIAEYIWVGGSGMDMRSKARTLSGPVKDPSKLPKWNYDGSSTGQAPGQDSEVILYPQTIFRDPFRRGNNILVMCDAYTPAGEPIPTNKRHNAAKIFSNPEVVAEEPWYGIEQEYTLLQKDVQWPVGWPLGGFPGPQGPYYCGIGANKAFGRDIVDSHYKACLYAGINISGINGEVMPGQWEFQVGPSVGISAADELWVARYILERITEIAGVVLSFDPKPIQGDWNGAGAHTNYSTKSMRNDGGYEVIKKAITKLEKRHKEHIAAYGEGNERRLTGKHETADMNTFIWGVANRGASIRVGRDTEKAGKGYFEDRRPASNMDPYVVTSMIAETTLLWKP

SEQ ID NO: 45013 - protein, 1163 aa, Pseudomonas fluorescens PfO-1
MSSPSSVDEQRFRKLLSRNVSLPLGVGVISAVFFVSLITYLLSVIQWVEHTDRVINNANEAVKLTVDLETGMRGYLLSGDEHFLDPYETAKPRIAVALNTLLELTADNPAQTDRLRRLQALQTEWATYAQSMIDLQRASGDYKSAVKAGKGKRLTDEIRKQFEDVIETEQLLRASRNEDVRRTTIWSISLYLLFVAGISGLLAYVGRRDLVNLSQSYGATLAAQEASAKRLEQQAWLRNGQTQLAEQVLGQLTVNLLGRNILQFCAQYLGSAVAALYVREEHGGLKRVATYGFSREQEQQNQSIYSEEGLVGQVAQQARLIRLDSVPSDYFKVSSGLGEGLPRSVLVVPTSDDERVNGVIELGFLRPLTDRDVALLELIAGNIGTSIEAARYRQRLQEVLAETQQLNEELQVQQEELKTANEELEEQSRILKESQAHLETQQVELEQTNEQLAEQAQTLAEQRDAMDQKNTELNQAQVQLEERAEELQRSSKYKSEFLANMSHELRTPLNSSLILAKLLAENPQENLSAEQVKFAESIYSAGNDLLNLINDILDISKVEAGKLEVMPENTSVARLADGLRGMFEPLAAVKQLAFSVQLQPDAPSTLFTDRQRLEQVIKNLLSNAVKFTEHGTVSLTIAGQPDDRIAFIVRDSGIGIAADQQESIFEAFRQADGTTNRKYGGTGLGLSISRDLATLLGGSISVSSAPGQGSVFTLVLPQHYREPGDAPVAPLTFSPPAAAPVMASAVAVSPLASVEIPRFNDDRDKAPFNTRCILVVEDEPNFAHILYDLAHELGYQCLVAHGADEGYDLAKEFVPDAILLDMRLPDHSGLTVLQRLKEHAGTRHIPVHVISVEDRVEAAMHMGAIGYAVKPTTREELKDVFARLEAKLTQKVKRVLLVEDDDLQRESIARLIGDDDIEITAVGLAQDALELLRTTIFDCMVIDLKLPDMLGNDLLKRMSTEDICSFPPVIVYTGRNLTRDEEADLRKYSRSIIIKGARSPERLLDEVTLFLHKVESQLSHERQKMLKTARSRDKVFEGRKVLLVDDDVRNIFALTSALETKGAVVVIGRNGREAIEKLNEVEDIDLVLMDVMMPEMDGFEATMEIRKDPRWRKLPIIAVTAKAMKDDQERCLQAGANDYLAKPIDLDRLFSLIRVWLPKMERI

SEQ ID NO: 45014 - protein, 449 aa, Methylococcus capsulatus str. Bath
MSSIELGEWDVLIAGGSVAGSAAAAALSGLGLRVLIVEPDPDPGRRLAGELIHPPGIDGLLELGLIHDDVPQGSVVNGFAIFPFNDGEGAPATLLPYGEIHGRQRCGRVIEHTLLKSHLLETVRGFERVSVWLGARVTGMEHEDGKGYVATVTHEGTETRMEVRLIIGADGPMSQLRKMVGISHETQRYSGMIGLEVEDTHLPNPGYGNIFLNPAGVSYAYGIGGGRARVMFEVLKGADSKESIRDHLRLFPAPFRGDIEAVLAQGKPLAAANYCIVPEASVKANVALVGDARGCCHPLTASGITAAVKDAFVMRDALQATGLNFEAALKRYSVQCGRLQLTRRTLAEELREAFLAQTPEAELLSQCIFSYWRNSPKGRQASMALLSTLDSSIFSLASQYTLVGLQAFRLLPQWLGAKMGGDWFRGVAQLVSKSLKFQQDALNQALRAK

SEQ ID NO: 45015 - protein, 409 aa, Vibrio parahaemolyticus RIMD 2210633
MELATTVTELRYALDTFFFLISGALVMWMAAGFAMLEAGLVRSKNTTEILTKNFCLYAIACTTYLVIGYNIMYVDNGEGGWLPSFGGLIGTQGEGADHSLESDFFFQVVFVATAMSVVSGAVAERMKLWSFLLFSAVLTAFIYPMEGYWTWGGGFLSEAGFSDFAGSGIVHMAGASAALAGVLLLGARKGKYGKNGEIYPIPGSNMPLATLGTFILWFGWFGFNGGSQLMVSDFENATAVGQIFLNTNAAAAAGSIAALFVCKTTWGKADLTMILNGALAGLVAITADPLSPSPLYAVAIGAVSGALVVFSIIGLDKLKIDDPVGAISVHGVCGFFGLMVVPLSNGEATFGAQLLGAAVIFAWVFGASLVVWAILKATVGIRVTEEEEMEGMDMHDCGVGAYPEFVTVK

SEQ ID NO: 45016 - protein, 525 aa, Xanthomonas campestris pv. vesicatoria str. 85-10
MNHRIRNQMFGLIAMTLPLAACAQQPAPAAKDLAPIAANRSATPAPQLVAGLPDFTNLVEQVGPGVVNIETTITRKDAMARQQRSGPGGRGGGAMPDDDQMPEFFRRFFGPDFQMPGGPRQGPGGGDDDGGIAGKSMGSGFIISADGYVLTNHHVVDGASEVTVKLTDRREFKAKVVGSDEQYDVALLKIEAKGLPTVRLGDSNTLKPGQWVVAIGSPFGLDHSVTAGIVSATGRSNPYADQRYVPFIQTDVAINQGNSGGPLLNTRGEVVGINSQIFSASGGYMGISFAIPIDLAFSAAEQIKATGHVSRGMLGVAVGLIDSLKAQGLGLPDSRGALVNDIPAGSPAAKAGIEVGDVIRAVNGKSIDVASDLPPMIGLMAPGTKVTLDVLRDGKPRKVTVTLAPLQDGGENAAPRTAADEAKPSAPASVELLGLQVADLTAAERSRLGLEAGEGVRIAAVTGAAARSTQPPLSPGLIIARVGRTKVGSVAELNRALSSYKKGDVVMLLVTDGKATSYVALKAGG

SEQ ID NO: 45017 - protein, 479 aa, Gloeobacter violaceus PCC 7421
MSSIAIVWHRRDLRVHDNPALWQASRTGGQVLAVFIVDPTIVERDDTAPARIYFLRESVLELQKAYRTIGGRLAVRVGEPVQQLVALAQAVGAGAVYFNDDIEPYARERDARAAEALRAAGITVHACAEILLHPAGEVLTAAGGKPYTVYTPFWRQWSAKPKPKPFPTPERLEAPTVEEQSFPELAQLGRPFAGELLVSPGEQSGLEQLEAFAREGLYRYGERRDLPGCDGTSRLSAHLKFGTVGIRAVWARTMDAWKQAEHDRDRAGLAVWQQELGWREFYKYELFHLPQLAGRPFRREFENFQWDEDQERFERWCQGETGYPIVDAAMRQLNTVSWMHNRLRMIVASFLTKDLLLPYGWGERYFMQKLVDGDLSANNGGWQWAASVGTDPKPLRIFNPSTQAGRYDPKAVFIRRWLPELEGVDTALLVTSERLPPLMRAQHRYAQPIVEHKRQQQVFKERYRAVRAQQADPGARDSE

SEQ ID NO: 45018 - protein, 564 aa, Oryza sativa (japonica cultivar-group)
MACLAPHFKWAPCPHAHHHHSTSSLPSSSSSSTSAPSSSSRCSFSRGGPFRVHCAVTATTSAAAPVVVEAPGGGMRLAYAAAPDSSAPALQKKIQSALASEVFLNEEAVVTAAAAEAVALARAAAEAAQEVVRMVQNNKNERNTRPKKAVVNYLANEILRTEMKPNILDKYSDGILSEEIESYGILSDEAELDGDTQDIPSIAVKSARQTERRARRTRAAIKAATIVRTSPKPATSSKKKRSKGASSGTNPLGSLWKMTGRRLLTAKEEVEFSEGIQDLLKLEAIQAELAEYNGGQPTFAQWATAAGVDERTLRKRLDHGIYCKNRMVTSNVRLVISIAREFEGPGMELYDLIQEGMQGLIRGAEKFDASKGFRFSTYSHWWIKQAMRKSVSEQSQIFRLPAHMVEASYRVKECIKRLRRKLKRRPTNEEIAADTGMPIKRVEAAVNLPKYSVSLDSKIGSTDMTYQEVTADPTAETAEEMLNRLSMKRDVHKALDTLTTRERQVVTLRFGLEDGRIRTLQEIGNTMGVSRERIRQIESAAFRKLRSKKRVNALKDYLVPVGNW

SEQ ID NO: 45019 - protein, 617 aa, Mucor circinelloides
  misc_feature (443)..(443): Xaa can be any naturally occurring amino acid
  misc_feature (522)..(522): Xaa can be any naturally occurring amino acid
  unsure (1)..(617): unsure at all Xaa locations
MLSLKRIATTTKSNIFHRALLAQRSYSYINANEYSDPRHDKNVHVMHSRGVNLLHDPLLSKGTAFSIAERERLSIRGLVPPRCQEMDKQLLRIKRNLDACETPLAKFVFLAALHDRNETLYYKIIMEHLEELAGIIYTPTVGLASQMSHSIYRRSRGMYFSSQDRGQMSAMVYNWPHDKVDVIVVTDGSRVLGLGDLGANGMEIPIGKLSLYVAAGGIRPRAVLPVVLDVGTNNQDLLNDPLYLGMSHPRLEGEEYYSFIDEWVTAITSRWPDTLIQFEDFKYPHAYNLLAKYRNRITCFNDDIQSTSSITLAGILASLKSRGMSQEDLSNERIICVGAGSAGVGVCEGIIDCMVAQGRVKSREEAYSKIYMLDQYGLLGNPGVHLPSDEEHGHPYQPRTTKLDDRQYCYVKHDLRDQMGLEELVRKVKPTVLLGLTGIQGVXSEEAVREMAKHHERPVIFPLSNPDTHAECTAEEAFKWTDGRAIFASGSPFKDVELPNGKIGRTNQCNNSYSFPVSGLGXGITVSRASRVTPNMFLETARTIADMATPSQLKEGILFPGVSQLREVALNVGTRVCEVAFEEGYATAKLEEGEILSEVVRSSAYQPEYVPLVYRDH

SEQ ID NO: 45020 - protein, 377 aa, Arabidopsis thaliana
MTTTMSTLPVVLVDEILARVPITSLRSLRSTCKKWEASSKTNLVGGKATARKSSHVGFILIGDKICSMKLDLNGGDDFVDTSVNQVSAFDGFAISQLFHCDGLLFCISNNHYSNYTLMVCNMYLGETRLIQNRSLFESYQNFCSYAFGYDSSKNRNHKILRNNSVSGGYEIYSLKSDSWKDLNVDLEKSIHLWRLGSVSLKGNAYFRVIKVIEEGVWEYNLLCFDFTRESFGKLLSLPFESLGDEGEGIMVISCVRDDHLAVLYQRDTLGIWISTEIEPNKVSWREFLQVDLATLDGFPDVFIAGRFIVDEEKQVVVVFGQETELDLNHGNAFIFGRDGYFTSFTVGDAPPEDFTSYVPSLVSLQIDKTGKRKARDD

SEQ ID NO: 45021 - protein, 470 aa, Oryza sativa
MASGDGGDDAGVKRVADRYLKREVLGEGTYGVVFKAVDTKTGNTVAIKKIRLGKYKEGVNFTALREIKLLKELKDSNIIELIDAFPYKGNLHLVFEFMETDLEAVIRDRNIVLSPADTKSYIQMMLKGLAFCHKKWVLHRDMKPNNLLIGADGQLKLADFGLARIFGSPERNFTHQVFARWYRAPELLFGTKQYGSAVDIWAAGCIFAELLLRRPFLQFSTEETGNGQALVRIKLFKGLPENMMQAESCPTISLLTPWCWATRCHALVLLPSISTAYCLRFGYPGYLFWPYIFWPKKGFQGSSDIDQLGKIFAAFGTPKSSQWPDMVYLPDYVEYQFVSAPPLRSLFPMASDDALDLLSRMFTYDPKARITAQQALEHRYFLSVPAPTKPSQLPRPPPKGDSGNNKIPDLNLQDGPVVLSPPRKLRRVTAHEGMEVHMHRADRTEEHPSGARHMDDMSSQSSRIPICLLY

SEQ ID NO: 45022 - protein, 1102 aa, Cryptococcus neoformans var. neoformans B-3501A
MSGRPFKRESWRPTKRPPTFAAAAQQPPLSSANALPARTWGGTPVPTAPKRFERDPSSNVKEEAHLSRWDDKGSNDGKWDQRDWDQRDDRSRYGNSGNGKRRQSPSRQPDSTRDERFSSARRSYSPPVPAPSPANPSNYPATRRPLPPAQPPASHHHTRARRPSPDYGTSGPAAKKRKGGARKRDSPDYGVGSREDAASSYRRSPSPLSNRSRSRTRSRSRSPAPSHHSQSNSYSLPKTQTHTYTPSQSHRKRSPSPSMSDRQSSSGRWSKRDRYNNHQYGKYDKDDRNGKFDSRDNGWENEGNRNWRDRDTDRDGHRRDRGMGDRGGRRDKDWRQDKGYVYDRRDRERDRDRERDRDRDRDRGSGWQASRRDRDYPPIGPRGYTSSASQLRHDYQTAPSPPHSAHVQAPPPPSDFYDRRRDSPDSYGHQNHSHGQRQGRSPIQDREYPSRSNFVTNANANSILGTSTTRKWGESGRYLYEQSYQPPSTVSRATSVSRDYSPSPQHSYALPAATSDTVPLPVHPPAPLESSFQSLPDTAGPTAELQTRTSPVKISFGQPSGGAVKKGWKSISPKKKARVSLFDEDEEEIQGAKGEKEDKKEVMPEKEQDIMGEALPHPDTLIHRLTLASTRYTTLLTSLSAPLRAAFDSFSTLPSSPPPPPIDLFLDEYLGRKARDDEVKRVEEVWDAKKEWEREEEMGRRYLEEVGKGGRVEGVNVAPAEPGGARVSPAAVVVAPKPEPELAPIPVSGTELQAPAPGAEPHPQTQKVPIPLPPAATLVYQKLAAVGEGTYGKVYKALSLITHQPVALKRIRMENEKDGFPVTAMREIKLLQMLQHENVLRLVEMVVERGGVYMVLEYMEFDLTGLLAHPEIKFSPANIKSLSHQMLSGLSYLHRQSILHRDMKGSNILVNSRGELKLADFGLARVYAKKRREDYTNRVITLWYRSPELLMGETIYGPEVDMWSAGCIILELYTTKPIFQGSDELNQLEVIYALLGTPTEAEWPSVKELPWYELVKPKEEIGSKFRTSFAKWLSPAALDLVEGLLFYDPSQRLLADSALQTDYFLMEEPKMEKPTQLEGMGEHHEMSAKAERKRRRMEEGGE

SEQ ID NO: 45023 - protein, 142 aa, Zea mays
  misc_feature (4)..(4): Xaa can be any naturally occurring amino acid
  misc_feature (13)..(14): Xaa can be any naturally occurring amino acid
  misc_feature (16)..(16): Xaa can be any naturally occurring amino acid
  misc_feature (22)..(22): Xaa can be any naturally occurring amino acid
  misc_feature (24)..(24): Xaa can be any naturally occurring amino acid
  misc_feature (52)..(52): Xaa can be any naturally occurring amino acid
  misc_feature (54)..(57): Xaa can be any naturally occurring amino acid
  misc_feature (64)..(65): Xaa can be any naturally occurring amino acid
  misc_feature (114)..(114): Xaa can be any naturally occurring amino acid
  misc_feature (134)..(134): Xaa can be any naturally occurring amino acid
  misc_feature (136)..(136): Xaa can be any naturally occurring amino acid
  unsure (1)..(142): unsure at all Xaa locations
GALXTFAAGGGGXXAXAATAAXPXPLAPAPASSEKALLQFEDTGRLFAGEPXPXXXXTGGGAGXXSLGPLVDAATAALRSPAVAGSALGRAAPRATAYPHFFAGETPGEALAAXRPLWRGGMGGVLPYRIPDPXDXGACDRN

SEQ ID NO: 45024 - protein, 255 aa, Triticum aestivum
  misc_feature (63)..(63): Xaa can be any naturally occurring amino acid
  misc_feature (135)..(135): Xaa can be any naturally occurring amino acid
  misc_feature (180)..(180): Xaa can be any naturally occurring amino acid
  misc_feature (202)..(202): Xaa can be any naturally occurring amino acid
  unsure (1)..(255): unsure at all Xaa locations
MGRGRIEIKRIENTTSRQVTFCKRRNGLLKKAYELSVLCDAEVALIVFSSRGRLYEYSNNSVXATIDRYKKAHACGSTSGVPLIEVNAQQYYQQEAARLRHQIQMLQSTNKHLVGDSVGNLSLKELKQLESRLEXKGIAKIRARKNELLSSEINYMVKREIELQSDNIDLRTKIAEEEQXMQQVTIARPSAAPELNPFTALXMKCFFPANLFEAAVQAHAQAQAQAQAHAQASLQLNLGYQQLAPPGAGDVAHQF

SEQ ID NO: 45025 - protein, 544 aa, Neurospora crassa
MCFAVLQYVDFALLFAAGLPPHPPVKPTTATAANPSPAACTVSGNFGTKFNYEKFYENELEKKHKDKSYRYFNNINRLAKDFPRAHMATKEEKVAVWCANDYLGMGRNKHVLEAMHTTLDEYGAGAGGTRNISGHNKHAVELENSLAKLHATDAALVFSSCYVANDATLATLGSKLPDCVILSDSLNHASMIQGIRHSGAKKIIFKHNDVEDLEKKLAALPLHIPKIIAFESVYSMCGSIGPIEKFCDLAEKYGAITFNDEVHAVGMYGPHGAGVAEHLDWEAHQRGETKGTIADRIDIYSGTLGKAYGCVGGYIAGSAKLVDTIRSLAPGFIFTTTLPPAVMAGARAAIEYQMSYDGDRRLQQLHTRAVKEALADRDIPVIPNPSHIIPILVGNAELAKKASDKLLNDHQIYVQSINYPTVPVGQERLRITPTPGHTKQFRDHLVAALDSIWTELGIKRTSDWAAEGGFIGVGEAEAEPVAPLWTDEQLGIADAVAELRAQASDEKKGVINQLLESVALEQEREALNAAEEVADAAKAAAASA

SEQ ID NO: 45026 - protein, 490 aa, Bordetella parapertussis 12822
MTISPLQLLNDPSLLRTDALVDGRWIAASQRFAVHDPATGRKLADVANLDAAHAREAIAAAQAAWPAWRARTVKERSAILRKWFDLLLANQDDLARLLTAEQGKPFGEARGEIAYAASFVEWFAEEAKRINGETLPAFDNNRRLLVLREPIGVCAAITPWNFPLAMITRKVAPALAAGCPVIVKPAEHTPLTALAAAQLAVRAGVPAGVLGVLPADGANSIAIGKELCANDAVRHLSFTGSTEVGRILMAQSAATVKKLSLELGGNAPFIVFDDADLDSAVEGAMQSKYRNAGQTCVCANRIYVQDGVYDAFVEKLADAVRALKVGPGFDEGVTQGPLIEPEAVDKIERHIEDAVSKGGRVVAGGRRLGGLFFEPTVLVDATSQMLCAREETFGPLAPVFRFHADEDAIAAANATEFGLASYLYSRDVGRIFRAAEALESGMVGVNVGILATEHVPFGGVKQSGLGREGGRHGIDDYVEIKYMCVGDILK

SEQ ID NO: 45027 - protein, 408 aa, Xanthomonas oryzae pv. oryzae KACC10331
MSQVQHSSQMAPVAVTAFTSTTALGAGLATQAAALTARRSGLRRNDFGPQPLLPCWVGRVDGVEDVVLPDALQDWDCRNNRLAWLALQQDGMAQAVQAAAQRYGAERVAVIIGTSTSSIGASEEAYTRLVDDADGARFPEDLNRPIVHTPHSLGDFVQHATGLRGPCVTVATACSSSAKVFAQAARLMDARVIDAALVGGVDTLCGSVLFGFNALQVVAPEMCQPFDARRVGLSLGEAGGFALLERPAAAPDAALWLCGYGESSDAHHMSAPHPQGLGAQLAMRGALERGGLEPGAVGYLNLHGTATPANDSVEAAAVAAIFPGSLHASSTKAWTGHTLGAAGIVESVIALLALRDDVLPGTLNSEVPDPACGPQIRFDNAHARIDYAMNNSFGFGGNNCSLLFGRAR

SEQ ID NO: 45028 - protein, 482 aa, Candida glabrata CBS138
MKYTLLLNLISCAQALLKLDFEKVPEQNLALNKRDDKGLQLELENGGLLYAVQLSVGTPPQNITVQLDTGSSDLWFTSEANPYCKNNRKHSPKKSQIEPLNDADYPTSPNQIPKSLRDIDCKAFGFFNTSKSSTYKNNGTNFTLSYADTTFASGPWGVDTLSFNGVKVDNVTFGLAAFSNSTTPVFGISLPARETTNQLAANGSRIGPNSYEYSNFPMLLKEQGIVKKIAYSVYLNDTRSKYGSILFGAVDQSKYIGTLYTLPLVNSLYKQVSKPFQFEITLNGIGLQTADKNYTLYDQKLATLLDTGVTTSVLPAKVAALVASKVNGTIDDDNGFIKLDKCPNKKEKRTVVFNFGGAEISIDIRDLTRKIKGKCYLQMQARDDIEFAALGDIFLRHVYVVYNLEDEEISIANANFNYSTPDIQEIVSTVPGAVKAPQYYNTYSVYPTATAVTGDVFTPEATMSMSNNSVALRKRTTLKPLR

SEQ ID NO: 45029 - protein, 730 aa, Aspergillus niger
MRHFWLLPAVAGIAGAQCPYLSGEMSFTQEQDNAGDTIEVTEQPIDNTLYVNDTGSYMTTDFGTPISDQTSLKAGPRGPTLLEDFIFRQKLQRFDHERVPERVVHARGAGAYGTFKSYADWSNVTAADFLSANDKETPMFCRFSTVVGFRGSVDTARDVHGHACRFYTDEGNYDIVGINFAPFFIQDAIQFPDLVHAIKPMPNNEIPQAATAHTSAWDFFSQQSTALHSALWLMSGNGIPRSFRHMNGYGVHSFRFVAANGTSKVVRTPWKSQQGVASLVWDEAQAAAGKNSDYHRQDLYNAMPNGHYPKYELQAQIMDEADMLRFGFDLLDPTKLVPEEVVPYTPLGMMELNANPTNYFAEVEQAGFQPGHVVPGIDFTDDPLLQGRLFSYLDTQLTRHGGPNFEQIPVNRPRKPVHNNNRDGFGQQQIPTNNWAYTPNSMSNGYPMQANQTQGHGFFTAPYRYASGHLVRQTSPTFNDHWSQPAMFWNSLIPAEQQMVVNAIVFENSKVNSPHVRKNVVNQLNMVNNNLAVRVARGLGLDEPSPNPTYYTSNKTSNVGTFGKPLLSIEGLQVGFLASNSHPESIKQGQAMAAQFSAAGVDLNIVTEAYADGVNTTYALSDAIDFDALIIADGVQSLFASPALANQMNSTATSTLYPPARPFQILVDSFRYGKPVAAVGSGSVALKNAGIDSSRSGVYTGSSETTEKIAKEVLEGLYTFRFVDRFALDE

SEQ ID NO: 45030 - protein, 519 aa, Candida glabrata CBS138
MRSIVLVSLLAFTQAYLKLDFEKTPKISDELTKRADNDSFIAPLLNGGELYTVQIAVGTPPQNLTVQLDTGSSDLWFVSASNPYCKNNKKFAPKKQDLMPITSDDGFPTSPNQVPKALRNINCNKYGFFNASGSSTYSRNDTNFSLSYGDETFASGPWGTDTISLNGVKVENVTFGLASFSNSTNPVFGIGLPGDESTYAMFSEDTNGTTNTQYSNFPLQLKQQGKIDKVAYSIYLNSTKSKQGSILFGAVDHSKYSGPLYTLPIVNRFGHLVENPYELEVTLSGLGLQRATSNITLFDQLLPALLDTGTTYTYMPSSVAQYLANQTNGVIDKKTSLIKLAKCPSKKSNDTIVFNFSGAQIKIKMVDFVEKHKGKCYLPCVSQESSFFLLGDSFMRHVYTVFDLDDKEISIAQANFNSTKEDIEEISSTVPSAVKAPQYYSSYVDFPTEISVTGDIFAPQATEFVPKPNNTNNKTNFTQDLLDIENMLLRRHYENRATTLSTSLPIFLIALSAVTALFL

SEQ ID NO: 45031 - protein, 591 aa, Listeria monocytogenes str. 1/2a F6854
MEKAGIYHQPASSYAYSYDAKTLHIRIRTKRLDISKVTLIAADPYLWKDGKWQSESYTMRKIAETEEHDYWFFAITPEHRRLQYGFLLTDTEGETTFYGGRGFFEPTEANLATMDYYFKFPFIHAVDTFEAPEWVRNTIWYQIFPERFANGNPAISPENTLPWGSKDPNTTDFFGGDIEGIIEHLDYLAELGINGVYLTPVFEAPTNHKYDTIDYKKIDPHFGDKETFRKLVKEAHKRGIRIMLDAVFNHIGDTSPEWQDVVEKEEKSAYCDWFHIHSFPVRQNENGNIEGEPTLSYDTFAFTTHMPKLNTANPEVQKYLLDIATYWIREFDIDGWRLDVANEVDHAFWKEFKKAAQAEKEDIYILGEIWHDSWIWLLGDEFHAVMNYPFTQTIIENFIEEKITPEQMVSGINEQYMRYPNQVNEVMFNMLDSHDTARILTRANNDEDKVKQALAFMFAHTGSPCIYYGTEIGMDGGNDPGCRKCMEWDEAKQNQDMLAFTKQLIALRKDNQAIITSGELTWLEASSETGITAFSKELNGEKLHFLFNQTKKDQDFTISFANTAIDIWNNQAVSDNLTIPAKGFLVIKENS

SEQ ID NO: 45032 - protein, 356 aa, Phaseolus vulgaris
MSLLSDLINLNLSDTTEKVIAEYIWIGGSGLDLRSKARTLPGPVKNPSELPKWNYDGSSTGQAPGQDSEVIIYPQAIFKDPFRRGNNILVICDAYTPAGEPIPTNKRHNAAKIFSNPDVVAEEPWYGIEQEYTLLQKEVNWPVGWPVGGFPGPQGPYYCGVGADKAFGRDIVDAHYKACVYAGINISGINGEVMPGQWEFQVGPAVGISAGDELWVARYILERITEVAGVVLSFDPKPIKGDWNGAGAHTNYSTKTMRNDGGYEEIKSAIQKLGKRHKEHIAAYGEGNERRLTGRHETADINTFLWGVANRGASIRVGRDTEKAGKGYFEDRRPASNMDPYVVTSMIADTTILWKP

SEQ ID NO: 45033 - protein, 516 aa, Candida glabrata CBS138
MKELLYFTLLAGAQAYLKLDFTRVPSASVLEKRADDLSPVPLRNDVDQYIVQLAVGTPPQMVSVQLDTGSADLWFSGADNPYCKTNKKKAPKSKDLQPVDNSGFPTNPDQIGKKARNLDCKKYGFFNMSSSSTFKNNDTDIFLYYEDLSFVRGTWGTDVVSLGGLNISGVNFAVAEISNSSSGVLGVSLPSEESTYSINSNGTTNATNYQYSNLPLQLKEQGIIDKVTYSIYLNDTKSKYGSILFGAVDHSKYTGTLYTLPLVNSEYDVVNKPYELDITLNGIGYQSMSSNMTLYDQKVAALIDSGTTISEFPDEIVEVVAKQMNATVDPNGNGIRLAKCPSKKDNAKLLFNLGGALIYVDIKEFTTKVKGKCYLEIIPSGAESDLVILGDNFMRSVYTVFDLEANEVSIAQANFNSSLPAQIEEIKSTVPSAVKAPQYYNTFSAIASISSVTGDIFGPEATAYMAPPANVSNSSNSSNSSAVSLERRSYDNAATPLRLNSIILIGVAAILATIFM

SEQ ID NO: 45034 - protein, 283 aa, Glycine max
  misc_feature (224)..(224): Xaa can be any naturally occurring amino acid
  misc_feature (252)..(252): Xaa can be any naturally occurring amino acid
  unsure (1)..(283): unsure at all Xaa locations
APPPSVGLVIGVTGIVGNSLAEILPLADTPAGPWKVYGVARRPRPPWNADHPVEYIQCDVSDPADAEAKLSALTDVTHVFFVSWTNRSTEAENCEVNGAMLQNVLRAVIPNAPNLRHVSLQTGGKHYFGPFEFIGKIESHEPPFAEDMPRLDAPNFYYTQEDILFEETAKKEGLTWSVHRPQVIFGFSPYSLMNMIGTLSVYAAICKHEGVPVRSPGTRGAWEXYECFCEADQIAEGGIWTELDPYARNEAXGLAQRTTLFMWMHISSALPVPFGLEEIGADQ

SEQ ID NO: 45035 - protein, 356 aa, Phaseolus vulgaris
MSLLSDLINLNLSESTEKIIAEYIWVGGSGMDLRSKARTLPGPVDDPAKLPKWNYDGSSTDQAPGDDSEVILYPQAIFKDPFRRGNNILVICDVYTPAGEPLPTNKRYDAAKIFSHPDVVAEVPWYGIEQEYTLLQKDVNWPLGWPLGGYPGPQGPYYCGVGADKAYGRDIVDAHYKACVYAGINISGINGEVMPGQWEFQVGPSVGISAGDEVWAARYILERITELAGAVVSFDPKPIPGDWNGAGAHSNYSTKSMREEGGYEVIKKAIEKLGLRHKEHIAAYGKGNERRLTGRHETADINTFSWGVANRGSSVRVGRDTEKQGKGYFEDRRPASNMDPYVVTSMIAETTILWKP

SEQ ID NO: 45036 - protein, 519 aa, Candida glabrata CBS138
MKAIVVTSLLAFAQAYLKLDFEKSPKASSDLVKRDDEYVNVPLKNDGDLYLVQLAVGTPPQNITVQLDTGSSDLWFPSADNPFCKENKKYAPKGKDVQPLDDSGYPSASNQVPKSSRTLNCKKYGVFNSSESSTFKRNDSEFLLSYADMSFATGNWGSDVVSFNELNISNVNFALGSFANSSNGVLGVGLPDVESTYDGPYAGSRKNISDSHQYANFPITLKQNGVIDKIAYSLYLNSSKSKFGSVLFGAVDHNRYNGPLYTLPLANSLFQNFTDPFQLEITMNGLGLQGNDANITLYDKKSAALLDSGTTLTVVSKHIGDLIAAQVNGTIAGKDQCIRLPKCPSKKENKKLIFNFSGAEVAVDINQMMNKHKGKCYLQFAVHEDTSNDAIIFGDNFLRSVYLVYNLEDKEISIAPANFNSSLPENIEPIKSTVPSAIRAPQYYNTYSEHATATAVTGDIFAPEATMSMAPINKTNGSSNRTLNSSRFDLQKRVYSNQASLKNSSLIAFFLASLFALAL

SEQ ID NO: 45037 - protein, 521 aa, Candida glabrata CBS138
MVKPLVLLSLLAYAQAYVKLDFTKTPGSDLAKRDVVDPEAAQLTFDKDQYIVEVAVGTPPQKVLLQIDTGSSDLFVIEESNPYCKNNKNKAPKKKDLESPGDDYPRTPNQVPKSDRTLDCKKYGFYNRNESSTFNSNGTDLFITYGDNGFVRGTWGTDSVSVGNLNLSNLSIGVSPMTNTSTGILGVGLPGEESTFNYSSNVTGPSNYQYSNFPIRLKEEGLIEKIAYSIYLNETGSKYGSILFGAVDHSKYQGPLYTFPLVNSKYKEGSDPFQFEITMNGVGLVGKTDNITLYDQKLPTLLDSGSTISLLPRDVADLVAQQVNGTVDGKGNCIKLPKCPSKKDNQKLIFNFSGAEFSVNVTDFMEKHKGKCYLQFSALDGINFALLGDNFMNNVYTVFNLDDKELSLAQANYNSSLKPDIEEIKDTVPSAVLAPQYYNTFSADPTATAVTGNIFAPEATMSMAAPANASRNSSLNSTFNSSSNYSRVQMKKRTYPNSSSSLQANSAILIMIAAAITAMFL

SEQ ID NO: 45038 - protein, 227 aa, Triticum aestivum
  misc_feature (5)..(5): Xaa can be any naturally occurring amino acid
  misc_feature (37)..(37): Xaa can be any naturally occurring amino acid
  misc_feature (56)..(56): Xaa can be any naturally occurring amino acid
  misc_feature (67)..(67): Xaa can be any naturally occurring amino acid
  misc_feature (107)..(107): Xaa can be any naturally occurring amino acid
  misc_feature (158)..(158): Xaa can be any naturally occurring amino acid
  unsure (1)..(227): unsure at all Xaa locations
KHSLXIVVLLSKYRMTTLPVVDMGGNQIENIITQSSXVVHMLAECVGLPWFESWGXPRNSVNWAFLXMKPYRLVKVNEAQPVLKAFQLWREKGVGGVPVMDTNGTKXAIGNISIRDVQYLPSAPKIYKQYRTISTKDFLTAVRHISRSNTNVAVADTXTCKRDDVIKEIILKLDSTKIHRIYVVDDKGDTEGVITLRDIISKLVHEPRHYFGDFFDGVVPLPANSTV

SEQ ID NO: 45039 - protein, 383 aa, Arabidopsis thaliana
MGKIEEYKPVMAMTMIQLCYAGVTLFARATLVHGLSPRVFILYRQAFATIFIFPFLYLSRRKSKIAISSLDLKSFSLIFLVSLIGITINQNLYLEGLYLTSSSMGSAVGNIIPAITFLISFLAGYEKLNLRDIRGLAKIAGTILCVAGAISMTLLRGPKILNSESALPIAKSVLGHLKDQNTWLIGCLFLFSSTLCWSFWLILQVPISAYYPDNLSLSAWMCLFGTIQCAVVTFFLEKDPNAWILHSYSEFATCLYAGIGASALSFTVQAWAIAKRGPVFSALFNPLCTVIVTILAALFFHEEIYTGSLIGGLGVILGLYTVLWGKAKDVMMNQDLFFFDQKSEVKIHIEDSSNTTICNKDLKNPLLSKHKSTEEIQTHQQLY

SEQ ID NO: 45040 - protein, 90 aa, Zea mays
  misc_feature (40)..(40): Xaa can be any naturally occurring amino acid
  unsure (1)..(90): unsure at all Xaa locations
MVKVVKSTKGRQRIEMKCIQGEEARQVCFSKRRPSLFKKXSELSTLCGAEVAVVTFSPGGKCFSFGHPSTSSVTDRFLAVHTLDDGRAMA

SEQ ID NO: 45041 - protein, 399 aa, Oceanobacillus iheyensis HTE831
MTIVQSRQEAIFQSIEDNKDKYIQISQDIHAQPEIGNKEFYASSRLIQTLKDAGFTVESSVAGHKTSFFASKDSGIEGPTIAFLAEYDALPGIGHACGHNIIGTTSVAAAIGLAESLTETAGRVVVLGTPAEEGGPNGSAKGSFVKHGLLKDIDVALMLHPSGKTSLTSETLAVDPLEFHFYGKPAHASGAPEEGINALDAVIQLFNGINALRQQLPSDVRIHGIITHGGDAPNIIPEYAAARFYIRAESWSKTEETAEKVRAIAKGAALATGSTVKVERFQNEVKDFVLTNTLDNILKKELEKQGETVITEKKKGKGSTDAGNISYEVPTAHGHIKIGEDNLIGHTVEFREAAKSAAGNEAIITGAKALAATGYRLLTDSELLHRVRQSHEQGLAEKQ

SEQ ID NO: 45042 - protein, 557 aa, Arabidopsis thaliana
MNPQANDRKEFQGDCSATGDLTAKHDSAGGNGGGGARYKLMSPAKLPISRSTDITIPPGLSPTSFLESPVFISNIKPEPSPTTGSLFKPRPVHISASSSSYTGRGFHQNTFTEQKSSEFEFRPPASNMVYAELGKIRSEPPVHFQGQGHGSSHSPSSISDAAGSSSELSRPTPPCQMTPTSSDIPAGSDQEESIQTSQNDSRGSTPSILADDGYNWRKYGQKHVKGSEFPRSYYKCTHPNCEVKKLFERSHDGQITDIIYKGTHDHPKPQPGRRNSGGMAAQEERLDKYPSSTGRDEKGSGVYNLSNPNEQTGNPEVPPISASDDGGEAAASNRNKDEPDDDDPFSKRRRMEGAMEITPLVKPIREPRVVVQTLSEVDILDDGYRWRKYGQKVVRGNPNPRSYYKCTAHGCPVRKHVERASHDPKAVITTYEGKHDHDVPTSKSSSNHEIQPRFRPDETDTISLNLGVGISSDGPNHASNEHQHQNQQLVNQTHPNGVNFRFVHASPMSSYYASLNSGMNQYGQRETKNETQNGDISSLNNSSYPYPPNMGRVQSGP

SEQ ID NO: 45043 - protein, 329 aa, Gloeobacter violaceus PCC 7421
MSTFDVFALCNPLYDLQVQVSDALLVSFGFPKGGVCLIDREQYDELIPKLAGLPIHATPGGSAANTVIGIQQLGGTTCYTGKVGADSYGAAYRNGMISRGVQANLGVGSQPTGLSVILITPDAQRTMFTYLGACRELGLFDIDPDAIAQSRYLYITGYCWDTQNQKDAVLFAMEQARAAGVPIALSLSDPFVVRRHKEELRRVVNDHVDVLFGNQEEAEVFTETSSPEAAVDVLRSYCNTAVVTMSAAGSYIAHGSHVYRIEPFAVAAVDATGAGDMYAAGLLYGLTHDLAVPATGRLASYLAARVVAQLGPRLDAIDPQVVAELLAEA

SEQ ID NO: 45044 - protein, 561 aa, Bacillus subtilis subsp. subtilis str. 168
MKTDWWKDAVVYQIYPRSFQDSNGDGIGDLRGIISRLDYIKELGADVIWICPIYPSPNVDYGYDVTNHKAIMDSYGTMDDFHELLDQVHQRGLKLVMDFVLNHTSVEHPWFKEAELDKNSKYRSYYYWRPGTKNGPPTDWLSNYGCPVWQYEEHTGEYYLHMNAVKQADLNWENPEVRQAVYDMMKFWLDKGVDGLRIDQLHLISKKEYLPSYEDYINQQAEPKPFQPNGERIHDYLKEITDEVFSHYDVMSVGEVGSVTPEEGLKYTGTDKHELNMIFHFQHMELDQQPGKEHWDLKPLELSDLKSVLTKWQKKLEHQGWNTLFWCNHDQPRIVSRFGDDGEYRKASAKMLAAVIYFMKGTPYIYQGEEIGMTNAPFTRIEDYKDIQTINMYHKRVFEKGYDPNDVMRSILAKSRDHARTPMQWNSGKNAGFTDGTPWLKVNPNFTAINVEEAQGDPDSVLNYYKKLISLRKQYADLMKGSFDLLLPDDPQLFVYMRENSKQQLLSVNNFSKEQAVFQWPKNCGKAQASLLLSNYNNDDLDDEMVFRPYESRVYLLDKTN

SEQ ID NO: 45045 - protein, 404 aa, Lactococcus lactis subsp. lactis Il1403
MRKFEKSHKLDNVSYDIRGPVLDEAQRMRANGEKILRLNTGNPAEFGFLAPDEVISDLIQHAVDSEGYSDSKGIFSARKAIMQYCQLKGFPNLDINDIFTGNGVSELIVMAMQGLLDTGDEVLIPMPDYPLWTASVSLAGGTAVHYLCDEQAGWFPDIDDIRSKITSNTKAIVLINPNNPTGALYSKDLLLEIVQVARENNLIIFSDEIYDRLVMDGAVHVPIASLAPDLFVVTMNGLSKSHRIAGFRVGWMVLSGEKSHVKGYIEGLNMLASMRLCSNVLAQSVVQTSLGGTQSVDKLLLPGGRVYEQREFIYKAINDIPGLSAVKPQAAFYIFPKIDREMYKIDNDEQFVLDFLKQEKILLVHGRGFNWKEPDHFRIVYLPRVDELAEIQEKMERFLWQYRK

SEQ ID NO: 45046 - protein, 427 aa, Pseudomonas aeruginosa UCBPP-PA14
MSRSETLFNNAQKHIPGGVNSPVRAFKSVGGTPLFFKHAEGAYVLDEDDKRYVDYVGSWGPMILGHSHPDVLDAVRRQLDHGLSYGAPTALEVEMADLVCSMVPSMEMVRMVSSGTEATMSAIRLARGYTGRDSIIKFEGCYHGHSDSLLVKAGSGALTFGVPNSPGVPAAFAKHTLTLPFNDIEAVRKTLGEVGKEVACIIVEPVAGNMNCVPPAPGFLEGLREACDEHGVVLIFDEVMTGFRVALGGAQAYYGVTPDLSTFGKIIGGGMPVGAFGGKREIMQQISPLGPVYQAGTLSGNPLAMAAGLTTLRLISRPGFHNELTAYTTRMLDGLQQRADAAGIPFVTTQAGGMFGLYFSGADAIVTFEDVMASDVERFKRFFHLMLDGGVYLAPSAFEAGFTSIAHGDKELEITLNAAEKAFAALK

SEQ ID NO: 45047 - protein, 423 aa, Streptomyces glaucescens
MSPTNRTVVVTGIGATTPLGGDAASTWEGLVAGRSGVKPLEQDWAADQAVRIAAPVAVEPTEVLPRPQARKLDRSAQFALVAAKEAWADAGFTGKAGEDSSVDPDRLGAVIASGIGGVTTLLDQYDVLKEKGVRRVSPHTVPMLMPNGPSANVGLAVNARAGVHTPVSACASGAEAIGYAIEMIRTGRADVVIAGGTEAAIHPLPIAAFGNMMAMSKNNDDPQGASRPYDVARDGFVLGEGAGVIVLESAEHAARRGARVYAEAVGQGISADSHDIVQPEPEGRGIAHALQNLLERTDLEPAEIMHVNAHATSTPAGDVAELKALRKVFGDEADHFAVSATKSMTGHLLGGAGGVESVATVLALYHRVAPPTINVDNLDPEAEANADIVRGEARKLPVEGRIAALNDSFGFGGHNVVLAFRTV

SEQ ID NO: 45048 - protein, 325 aa, Desulfovibrio vulgaris subsp. vulgaris str. Hildenborough
MSKAIVLHAHGGVDNLHWEERDPGRPGAGEALIRHEAVGVNFIDIYHRTGLYPLPALPAVLGMEGAGIVLAVGEGVTEVQPGQRVAYAGRPIGAYAEERCIPARRLVPLPDAIPTRMAAAMMLRGMTARYLLHGCYPVRQGTTLLVHAAAGGVGSMLVPWACHLGATVIGTAGSPEKREKALAAGCHHVIDYRTGGVAARIRELTDGRGVDVVYDSVGQATFMDSLDCLRPMGTMVSFGQSSGAVPPFDPGVLAARGSLFLTRPSLMHYTERREDLLAHAADLFDVVARGVVSVHIDQSWPLAQVAEAHTALESRRTTGTMVLDV

SEQ ID NO: 45049 - protein, 145 aa, ASPERGILLUS NIDULANS FGSC A4
MTEEQVSEYKEAFSLFDKDGDGQITTKELGTVMRSLGQNPSESELQDMINEVDADNNGTIDFPEFLTMMARKMKDTDSEEEIREAFKVFDRDNNGFISAAELRHVMTSIGEKLTDDEVDEMIREADQDGDGRIDYNEFVQLMMQK

SEQ ID NO: 45050 - protein, 572 aa, Methanosarcina acetivorans C2A
MLGKQGIKSLIVLPLYVSGKLAGFMGLDNVVNTGTWEKDDVSILRIAVNLIGMGIQRKRTEKAIHEGEEIYRSMFKNAANLILLVEKNGNIVDCNSRVGELLGYRRFELLGQPIRNLIFPDCLEKIKKSSEEVENRGFSFNKEYRMVRKDGKTVDVNVNSSGLKDENGFHVQTIYIVEDITERKKAEKLVKENESRYRSLFQNNRAVMLLLDPDTGNILDANSAACAFYGYPREKMLGLNIADINILPKEQILEELEQEKSRDINHFYFTHRLSNGVLRDVERYSYPILMGGKKLLYAIVSDITDNRKMQSELVRAKMEAEIASKAKSEFLASMSHELRTPLNSIIGFSDMLLTQNFGPLNKKQLRYVNNISVSGNHLLKLINGILDLSKVEAGKMELKVEEFSVLDSISEVKVLLTPLASKKDIQILSVVDKELTTIRADRTKFKQILYNLVDNAIKFTHEDGFVIVDARVEGDQAKIMVKDTGIGISKAGVKKIFQPFTQLENSEYGKQKGTGLGLSLVKKFVEMHTGKIWVESEFGEGSKFIFTIPLSLTIPLSLTIPLSLTIPLNPAN

SEQ ID NO: 45051 - protein, 273 aa, Triticum aestivum
  misc_feature (122)..(122): Xaa can be any naturally occurring amino acid
  misc_feature (132)..(132): Xaa can be any naturally occurring amino acid
  misc_feature (193)..(193): Xaa can be any naturally occurring amino acid
  unsure (1)..(273): unsure at all Xaa locations
AYLGDTIEQVCTKKQAGTGPEFPGYRRPTRPCKARVHNRCPTCRQELGDIRCLALEKVAESLELPCKYYSLGCPEIFPYYSKLKHESQCNFRPYSCPYAGSECSVVGDIPFLVSHLRDDHKXVDMHSGCTFXNHRYVKSNPREVENATWMLTVFHCFGQYFCLHFEAFQLGMAPVYMAFLRFMGDENDARNYXSYSLEVGANGRKMIWEGTPRSIRDSHRKVRDSHDGLIIQRNMALFFSGGERKELKLRVTGRIWKEQQNPDSGACIPNLFS

SEQ ID NO: 45052 - protein, 489 aa, Thermobifida fusca YX
MTTIEREARIVEQVPKQVCIGGHWRDAQSGATFKVEDPATGSVLCEVADAGVADGMAALEMAAATQPTWAEYPPRERGEILRRAYELLMHRQEDLAVLMTLEMGKPVAESKGEIAYAAEFFRWFSEEAVRIDGSYSVAPNGQSRLLVMRQPVGPSLLITPWNFPMAMGTRKIGPAIAAGCTMILKPAQQTPLSALALADILHEAGLPEGVLSVLPTTDAAGLTGPLLRDGRLRKLSFTGSTPVGRALIKQSADQVLRTSMELGGNAPFLVFDDADLDAAVAGALQAKMRNIGEACTAANRFYVQSGVAEEFSRRLAERMAGLRMGRGTEPDVDVGPLIDDKARTKVQSLVDDAANRGARVLLGGKRGDGAGYFYHPTVLTDVPKDSEVCRTEIFGPVAPVIPFDTEEEALAEANRTEFGLVSYVYTENLRRALRMAEKLESGMVGLNQGIVSNPAAPFGGVKHSGLGREGGRVGIDEYLETKYVGIAGV

SEQ ID NO: 45053 - protein, 237 aa, Burkholderia fungorum LB400
MHPYIAEFIGTALVVLLGDGAVANVLLARTKGKGADLIVIVMGWAMAVFIAVYVTASFSGAHLNPVVTISLALAGKFAWTKVPGYVAAQMLGGMAGALLVWIAYRQHFAKEGDADVKLGVFCTAPAIRSVPHNLLTEMIATFVLILGVLYLASPQVGLGALDALPVGLLVLGIGISLGGPTGYAMSPARDLSPRLMHALLPIPGKRDSDWHYAWIPVCGPLLGGAAAACLYLYLHVH

SEQ ID NO: 45054 - protein, 395 aa, Methanosarcina barkeri str. fusaro
MNEQGLSEKEIFSYLEDVKSEDTDYYRVLSSMCTHPHRIAVEAHRLFIEANLGDLGLFAGAHRLEKEVIRMLGELLHAQSVEIPSGEACESSVCGYLTTGGTESNIQAIRGMKNLVTEDGKKSGEILNIVVPESAHFSFDKVANMMGIEVKRASLDPEFRVDIASAESLIDANTIGLVGIAGNTEFGQVDPIEELSKLALENELFLHVDAAFGGFVIPFLEKPYSFDFKVPGVTSIAIDPHKMGLSTIPSGALLFRSPFFMDSLKVNTPYLTTKSQFTLTGTRSGASAAATYAVMKYLGREGYRKNVQYCMQLTTKLVKEARKFGFEPLIEPVMNVVDLRVPNPDIVREQLLKKFGWNVSITRNPRSLRLVLMPHNTARDIEEFLQDLRKVTTEL

SEQ ID NO: 45055 - protein, 197 aa, Bacillus cereus ATCC 10987
MDTNITWHTASVSKDERRVKNGHHSFVIWFTGLSASGKSTVANAVARKLFEKNIGNYVLDGDNIRHGLNKDLGFSESDRMENIRRIGEVAKLFVDQGTVVLTAFISPFRVDRKQVRDLLAADEFIEVFVKCPIEECEKRDPKGLYKKARKGDIKDFTGIDSPYEEPEQAELIVETHKYSIEECAEQIVKYLQERSFI

SEQ ID NO: 45056 - protein, 505 aa, Candida glabrata CBS138
MLFLVPFLSVAQAYVALDFEKSHGDDLVKRDVQDVKLINSQKAMLYNIQLSVGTPPQNITAQLDTGSSDLWFPDSTNPYCKANKKQAPKSIASLDAGTRPTSPAQVPKSLRNLDCAEFGLFNSSASTTFNSNKTEFFISYLDSSYAEGVWATDNLYLNGLNISGLNFGLAYFSNSSNSVLGVGLTPLEASYDTDIKQDDSPRFQYPNFPQILKQKGAISKVTYSLYLNDTKSKYGQILFGGVDHSKYVGQLYTIPLVNSKYQKSPGVIADLEVTLNGLGIRDNTTNTNTTLYTQKLPALFDSGTSYSYVPYTMAQVIASQVNGTIDNKTEAIRLPKCPSKKDTREVVFNFNGVEIAIPLKQFYQKKSGKCYLDLMVAPPNNGPGLLLGDTFLRQVYTVFDLEAQELSIARANFNSSLPADVEEIKSTVPSAIKAPQYYNTFSAYDNATQVVGNIFDATATASMAPKNQSNSSNLSRRALNYENNSARSSTLSIVLVLAAITTLFM

SEQ ID NO: 45057 - protein, 508 aa, Candida glabrata CBS138
MRIDRALTTAAAAGYLRLPFTKITDNSLAKRADDDYLNVQLDNEQIFYGVEVSIGSDKQNMTLLVDTGSSDFWVLGAQNPYCKSNRGKKPKKKDQPSSVDPGRNGYPTKAEAIPYAERTFDCSDFKTFNSSSSNTFKSNDTDFFITYGDGSYVEGTWGTDQVALAGQTLENVTFAVAELTNNSYGLLGIGLPELESSITIDTAQLTNTSSVKKNPYMNFPESLKLNKLINKVVYSIYLNRTNDKFGSILFGAVDHNRYDGNLTTVPLVFSNRDFGTPRPNELMVTLNGMSFEATDGNVTQILNATSKFPALLDTGSTDTHLPVDVYNALAESTNGTYDQTQNKIRIPKCLSKKDKTILNFSLGGVNIGVPYKEMVKKIKGKCYINVAPTGSDFAILGDDVIRYAYMVFDLEDREISLAQASFNDTLPEDIEVVVSTIPGATRASAYSETYSPTFAVPSASSSGNTSSNGSTNLTRRFERRDIPLENKGVPTSLKGSVAAILLLVLWIA

SEQ ID NO: 45058 - protein, 195 aa, Zea mays
PTPGWHHYAGLMRGNVSPCAAAKARGKVRPEDVAEAARLAAAGQSFEVVYYPRASTPEFCVRAAAVRAAMRVQWSPGMRFKMAFETEDSSRISWFMGTVAGVQVTDPIRWPQSPWRLLQVTWDEPDLLQNVKRVSPWLVELVSSMPAIHLASFSPPRKKPRIPAYPEFPFEGQLLNPAFPPSPLPHGQQHHHNFL

SEQ ID NO: 45059 - protein, 402 aa, Xanthomonas oryzae pv. oryzae KACC10331
MSDVYLIDGIRTPIGRYGGALSSVRADDLGAVPIAALLVRHPQMEPAAIDDVYLGCANQAGEDNRNVARMSLLLAGVPSSVPGSTLNRLCGSGLDAVGTVARGIRAGELDLAIAGGVESMSRAPWVMGKADSAFARNQQLEDTTMGWRFINPRLQAAYGTELMGETAENLAQLHAIAREDQDAFALRSQQRVAAAQAAGFFDGEITSVAVAGRKGGDASTVEYDEAPRPNTTAEMLAKLKPVFRQPGTVTAGNASGLNDGAAALLLASAQAVQAHRLTPRARVLGFASAGVEPAYMGIGPVPATQRLLARLHLRIAQFDAIELNEAFAAQALACTRAFGLADDAAHVNANGGAIALGHPLGMSGARLALTLLRQLEASNGRLGLASMCIGVGQGVALAIERL

SEQ ID NO: 45060 - protein, 420 aa, Bartonella quintana str. Toulouse
MRRVVVTGLGLVSPLAANVEYSWKRLLERESGVRRITEFDVSDLPCQIAARIPLGDGTNGTYNADLHMEPKEQRKVDAFIVYAMAAVDQALADAEWFPKSDEDQISTGVLIGSGIGGIEGIVEAGYTLRDKGPRRVSPFFIPGRLINLASGYVSIKYDLRGPNHSVVTACSTGAHAIGDAARLIALGDADVMLAGGTESPINRISLAGFAACRALSTCRNDDPERASRPYDVDRDGFVMGEGAAIVVLEELEHAKRRGARIYAELIGYGLSGDAYHITAPSESGEGAQRSMMAALKRAQVNVSELDYINAHGTSTMADVIELAAVERVLGHYAAQVSMSSTKSSVGHLLGAAGAAEAIFCILAIRDNIAPATLNLDNPSIETKIDLVPHKPRERKIDTILSNSFGFGGTNASLVMRRFRG

SEQ ID NO: 45061 - protein, 259 aa, Mycoplasma mycoides subsp. mycoides SC str. PG1
MLEQIILTELFGTALLVLLGNGIVANVVLKGTKGQNAGWISITAGWGFAVFIAAGISVGLGGVAHLNPAVTIMFAIKAADNSFGFNAKALTQISGVAMFFIVLIVQFIGAILGSIFVDLLYWKHILATKSDNDFQPRVLAIHSTGATHKAPIFNFLMEFVGTIVLLVGIWGLNATKTSAFTAIGPLAIGLLVFGIGLSLGGTTGYAINPARDLGPRLVHTFLPLKDKGSSEWKYSWIPGLGPIAAAIFIGLIAMAVKIA

SEQ ID NO: 45062 - protein, 222 aa, Vibrio parahaemolyticus RIMD 2210633
MPEIKQLFENNSKWSEEIKSDRPEYFAKLAEGQKPDFLWIGCSDSRVPAERLTGLYSGELFVHRNVANQVIHTDLNCLSVVQYAVDVLKVKHIIVCGHYGCGGVNAAIDNPQLGLINNWLLHIRDLYFKHRSYLDQMPVEDRADKLGEINVAEQVYNLGNSTIMQNAWERGQDVEIHGVVYGIEDGRLEYLGIRSNSKETVEASYQKALSTILNPDNKLLCR

SEQ ID NO: 45063 - protein, 400 aa, Bacillus subtilis subsp. subtilis str. 168
MGKQQPISQRKLLGVAGLGWLFDAMDVGILSFIIAALHVEWNLSPEEMKWIGSVNSIGMAAGAFLFGLLADRIGRKKVFIITLLCFSIGSGISAFVTSLSAFLILRFVIGMGLGGELPVASTLVSEAVVPEKRGRVIVLLESFWAVGWLAAALISYFVIPSFGWQAALLLTALTAFYALYLRTSLPDSPKYESLSAKKRSMWENVKSVWARQYIRPTVMLSIVWFCVVFSYYGMFLWLPSVMLLKGFSMIQSFEYVLLMTLAQLPGYFSAAWLIEKAGRKWILVVYLIGTAGSAYFFGTADSLSLLLTAGVLLSFFNLGAWGVLYAYTPEQYPTAIRATGSGTTAAFGRIGGIFGPLLVGTLAARHISFSVIFSIFCIAILLAVACILIMGKETKQTELE

SEQ ID NO: 45064 - protein, 478 aa, Mycoplasma mycoides subsp. mycoides SC str. PG1
MTKEKLQKRMKRTKVITTIGPSTHSAEAIKELFNNGMTTIRLNFSHGSYEEHGYRIKAAKKISKALNKPISIMLDTKGPEIRLGKFKDNKQEVVKGQAITIYTDNYSYLNKECVQGEMTVAYDMSVDLKPEDMILIDDGKLELTVDSVEPQIIKATAFNHHIVKTNKRVNLPGIDFSLPFLSEKDEKDILFGCEQDVDYIAASFVNTAENVRQIKEILTKANANHIQIISKIESQVGLDNIDEIIEESDGIMIARGDLGLEIPYYDVPYWEKIIIRKCREKGKIVIVATQMLETMTENPSPTRAEVTDVYYATELGADATMLSGESAAGDYPFLTVHTMSTINKRAEVEFYNKIYYQVQLDNARNSTSGPRAEIADLLATKTKDGEYKYAIVLSKTGELLKTISKFRPNVTILGVSPDKKLWTSFGVWHSIFMNKVDTLDNLDNNVEKLSEIAKSWGAKFGEKVLVVRSTAIKEIEVI

SEQ ID NO: 45065 - protein, 282 aa, Shewanella sp. MR-4
MRISLLQCQSSRDVSANLLFIESQLEELTRQRLQWDKDAPHLVVLPECSLLFGGHESQQLAYAGDSHLSPLKSALSALAARYCVYMVAGTIPALAEDGRVYSRCYLFDDKGDTLGQYDKLHLFDVDVADGTKQYRESETFCPGNHISVIDTPFGKIGLTICYDLRFPDLFRALRLAGAEIITVPSAFTKVTGEAHWQVLLQARAIETQCFILAAAQWGAHNEGSRETWGQSMVIGPWGEVIAEQKTGTGWVHADIDVAEVHSIRSKMPVAQHNRFTAPNLKP

SEQ ID NO: 45066 - protein, 385 aa, Triticum aestivum
MIPAVKLSPAAFSVTNQRSKSALVPSVSILNMKKFASCSLRPLYLTWLDDPHTSELKPRRQLLDFRCAASAADDKESKAEVLPASSEAAQKLKISIYFATWWALNVIFNIYNKKVLNAFPYPWLTSTLSLACGSAMMLFSWVTCLVEAPKTDLDFWKALFPVAVAHTIGHVAATVSMSKVAVSFTHIIKSAEPAFSVLVSRFILGESFPMPVYLSLLPIIGGCGLAAATELNFNMIGFMGAMISNLAFVFRNIFSKRGMKGKSVSGMNYYACLSIMSLVILTPFAIAMEGPQMWAAGWQKALADVGPNVLWWIGAQSVFYHLYNQVSYMSLDQISPLTFSIGNTMKRISVIVSSIIIFRTPVRPVNALGAAIAIFGTFLYSQAKQ

SEQ ID NO: 45067 - protein, 173 aa, Triticum aestivum
  misc_feature (92)..(92): Xaa can be any naturally occurring amino acid
  misc_feature (141)..(141): Xaa can be any naturally occurring amino acid
  misc_feature (160)..(160): Xaa can be any naturally occurring amino acid
  misc_feature (166)..(166): Xaa can be any naturally occurring amino acid
  unsure (1)..(173): unsure at all Xaa locations
PFNQIISANIGNPQQLGQKPITFFRQVLSLLEYPTLLENEDVLLKQLGYKVDVIERAKWLLKSVGAIGAYSASNGAPAIRESIANFIERRDXHPADPKDIYLSAGASSGVNTLLSIICAKPTTGVLVPIPQYPLYTATLSXLGAKCVPYYLDESKGWGTXVEAIKXAYEQGNF

SEQ ID NO: 45068 - protein, 286 aa, Arabidopsis thaliana
MEKNTPVRKPHMSTADLLTWPENQPFESPAAVASRSAARSHQPSDGISKVVFGGQVTDEEVESLNKRKPCSNYKMKEITGSGIFSVYEENDDSELASANSATNGKSRTFQQPPAAIVSHISFGEEEIVTPKKPATVPEVAKQRELSGTLEYQSDAKLNKQFSDAKCKELSGHNIFAPPPEIKLRPTVRALAYKDNFDLGESDTKPDGELKTAKKIADRKFTDLSGNNVFKSDVSSPSSATAERLLSTAKLKEISGNDIFADAKAQSRDYFGGVRKPPGGESSIALV

SEQ ID NO: 45069 - protein, 376 aa, Bdellovibrio bacteriovorus HD100
MKEPTLGTFEIISKHGDHEQVVFCNDPHVGLKAIIAIHNTSLGPALGGTRMWNYKNEDEALVDVLRLSKGMTYKAAASGLNLGGGKAVIIGDPKTQKSEGLFRAFGQFVNSLNGKYITAEDVGTSVQDMEHIYMETPWVTGIPKDFGGSGDPSPYTAHGVLMGIKASAKEKFGTDSLKGIHIAVQGLGNVGSNLVKYLVEEGAVITVADIDMNRTKSVADKFGAKAVSSDDILFTECDILAPCALGAIVNDQTITKLKTKVIAGGANNVLAEARHGDQLKELGILYAPDYVINAGGLMNVFVELEGYSPERAFEKTKRVYDNILKVYEIAKRDGIGTHTAADRLAEERINTIGRLKQRHPGKSSRAFTTLREVHNR

SEQ ID NO: 45070 - protein, 218 aa, Zea mays
MASRNLSKALRGPARQLASAPRVQQRTFVSAARAAVRAGAVARPVASGPIQQQIRGVKTMDFAGHKEDVYERADWPQEKLLEYFKNDTLALIGYGSQGHGQGLNLRDNGLNVIVGVRKNGKSWKDAEQDGWVAGKNLFDVDEAIGRGTIVMNLLSDAAQSETWPAIKPQLVKGKTLYFSHGFSPVFKDLTKVEVPTDIDVILCAPKGSGRTVRSLFRG

SEQ ID NO: 45071 - protein, 378 aa, Helianthus annuus
MNMDEFLNSIWTAEENQAHTQAHPPTAATIGGGISTSAAMATNGASSSGQFLMGINANSAEPNMIARQVSLSRQGSLTLPGPLSRKTVDEVWSEIQKTRQDHQQPSNDNNSCNEQVPGAQRQPTYGEMTLEDFLVKAGVVREQNHPNAPPVPQQVPASFGLYPTNGNNRIIGPPPSSAHMVRPMLGLSTGGGASVIPPYSPLIRETPGYPGGKRAGNYQQQPPPYGGIGGNAGGVAGGYGQGLGIGSPPSPVSSDGIATTQLDSGNQYALEMGGIRGGRKRIIDGPVEKVVERRQRRMIKNRESAARSRARKQAYTVELEAELNMLKEENAQLKQALAEIERKRKQQFSEEIRMKGVTKCQKVRDKSRMLRRTSSCPT

SEQ ID NO: 45072 - protein, 1039 aa, Desulfovibrio vulgaris subsp. vulgaris str. Hildenborough
MVNLSLGRFSWRGQRREACRGLTFILRCHLLLLFLALSMAGAAWGASPRVLLLSSYGPAFPTFFQQVEGVRAVLASAGVVLDVEFMDSKRFTDESSVDHFESYLRYKLARLPAYDVVITSDDNALAFVMERHGGLLGKSPVVFCGVNNVGLARSLSGSETYTGVIEAVSMHETIKLVWSLKPSTQTLYVISDVMPAGKADLETFHDVVRGIASVRYQELSLENMGWEELGRRLQRVGANDAILLLSAYKDQRGVVRNFEEGLAFILQNTRSPVYHLWEHGMGKGLLGGKLISHYEQGRLAADMALKILAGASPASLPVIEGNDANAYLFDYEVLRRHGISTHRIPQGSRVINEPESIWRDYWRELLVAVAFVAVLCVLVVVLLKHVLRLREARTEIKRSETRYRLVFDQSPLGLVQYDGDGIIIDVNERFAELCGASRGQIIGFNYINQMHDARMLGAVLASLRGGIGGFEGVYTSPLGKKTAFIRCLFKGVKAPAGDVFIGIGIIEDVSDRKQAEEALRERELFLLETQRIAKIGGWKANIRTDYLFWSEEVNRILDLPEDYKPGLAEWLTSFMPEYLPRIRAMLEDVLHHGGTADIECEAMTRLGRRKWTHLRAVGRVDEGSGALVVGTFQDVDERKRTELELVEAKTKAVAANRAKDEFLANMSHEIRTPLNGIFGMLRMLADASLAPRQQELAEMAMRSCRRLADLLTDVLDISRIDAGKLEIVSIPFDLSRSIRQVRELFIPSAMQAGVSLHVHIDAAIPSRVVGDASRLQQVLTNLLGNAFKFTEKGSVTLRAEHLSPVLANSCRVLFSVEDTGCGIPDEKHGKLFTPFTQACEGFKRSHQGAGLGLSICRRIIRVMGGHLAFESEAGTGTTVYFTLNFGLPDGDEVQPEAAAASSAEPIPPLRVLVTEDDAVTRRYITYQLDRDGHTVAVAEDGRQALEQLSTGDFDMVLMDIQMPVMDGAEAILRIRKGEAGSRNTDIPVIALTAYALSGDRERLLQIGADDYVAKPAEVAQLHAAIARHVSRMQLRRADA

SEQ ID NO: 45073 - protein, 174 aa, Helianthus annuus
MTLEDFLVKAGVVAESSPGKVNEEGNLEPQETQWIGYQSHAVQQQNMIMAGHYQVQPSVTVPGNSLMDVGYMSPTSLMGSLSDRHMSGRKRFASGDVMEKTVERRQKRMIKNRESAARSRARKQAYTHELENKVSRLEEENERLRREKEVEKVIPWVPPPKPKYQLRRTSSAPF

SEQ ID NO: 45074 - protein, 405 aa, Shewanella sp. ANA-3
MNNRVAITQIGLCTPLGQTPEQVLARLIAGDTSAMQTSETLLFEESTLVAPVTESLPTIPAALAQFDCRNNQLLLAAALQIRDAVEQAKGEFGADRIGVVLGTSTSGISKGEAALAYRNQHGHFPADYHYFQQELGSTSDFLRQLFELQGPCYTISTACSSSAKVFASAKRLLEAKLCDMVIVGGIDSLCQLTVNGFHALESVSKGHCNPFSANRDGINIGEGAALFTLTLATDNTANEACVLLAGIGESSDAHHMSAPHPEGAGAIAAMQAALDDAQISAQQIDYINLHGTATPKNDAMESRAVASVFGDTPPPASSTKPLVGHTLGAAGAIEAAFCYLLLSPHNHHLALPPHRFDGQPDPQDPSIALVAPKQCAEHGRLNYVMSNSFAFGGSNACLIFCRKGA

SEQ ID NO: 45075 - protein, 1731 aa, Arabidopsis thaliana
  misc_feature (1275)..(1275): Xaa can be any naturally occurring amino acid
  unsure (1)..(1731): unsure at all Xaa locations
MQSIMDSSAVNATEATEQNDGSRQDVLEFDLNKTPQQKPSKRKRKFMPKVVVEGKPKRKPRKPAELPKVVVEGKPKRKPRKAATQEKVKSKETGSAKKKNLKESATKKPANVGDMSNKSPEVTLKSCRKALNFDLENPGDARQGDSESEIVQNSSGANSFSEIRDAIGGTNGSFLDSVSQIDKTNGLGAMNQPLEVSMGNQPDKLSTGAKLARDQQPDLLTRNQQCQFPVATQNTQFPMENQQAWLQMKNQLIGFPFGNQQPRMTIRNQQPCLAMGNQQPMYLIGTPRPALVSGNQQLGGPQGNKRPIFLNHQTCLPAGNQLYGSPTDMHQLVMSTGGQQHGLLIKNQQPGSLIRGQQPCVPLIDQQPATPKGFTHLNQMVATSMSSPGLRPHSQSQVPTTYLHVESVSRILNGTTGTCQRSRAPAYDSLQQDIHQGNKYILSHEISNGNGCKKALPQNSSLPTPIMAKLEEARGSKRQYHRAMGQTEKHDLNLAQQIAQSQDVERHNSSTCVEYLDAAKKTKIQKVVQENLHGMPPEVIEIEDDPTDGARKGKNTASISKGASKGNSSPVKKTAEKEKCIVPKTPAKKGRAGRKKSVPPPAHASEIQLWQPTPPKTPLSRSKPKGKGRKSIQDSGKARGPSGELLCQDSIAEIIYRMQNLYLGDKEREQEQNAMVLYKGDGALVPYESKKRKPRPKVDIDDETTRIWNLLMGKGDEKEGDEEKDKKKEKWWEEERRVFRGRADSFIARMHLVQGDRRFSPWKGSVVDSVIGVFLTQNVSDHLSSSAFMSLAARFPPKLSSSREDERNVRSVVVEDPEGCILNLNEIPSWQEKVQHPSDMEVSGVDSGSKEQLRDCSNSGIERFNFLEKSIQNLEEEVLSSQDSFDPAIFQSCGRVGSCSCSKSDAEFPTTRCETKTVSGTSQSVQTGSPNLSDEICLQGNERPHLYEGSGDVQKQETTNVAQKKPDLEKTMNWKDSVCFGQPRNDTNWQTTPSSSYEQCATRQPHVLDIEDFGMQGEGLGYSWMSISPRVDRVKNKNVPRRFFRQGGSVPREFTGQIIPSTPHELPGMGLSGSSSAVQEHQDDTQHNQQDEMNKASHLQKTFLDLLNSSEECLTRQSSTKQNITDGCLPRDRTAEDVVDPLSNNSSLQNILVESNSSNKEQTAVEYKETNATILREMKGTLADGKKPTSQWDSLRKDVEGNEGRQERNKNNMDSIDYEAIRRASISEISEAIKERGMNNMLAVRIKDFLERIVKDHGGIDLEWLRESPPDKANXRDYLLSIRGLGLKSVECVRLLTLHNLAFPVDTNVGRIAVRMGWVPLQPLPESLQLHLLELYPVLESIQKFLWPRLCKLDQRTLYELHYQLITFGKVFCTKSRPNCNACPMRGECRHFASAYASARLALPAPEERSLTSATIPVPPESYPPVAIPMIELPLPLEKSLASGAPSNRENCEPIIEEPASPGQECTEITESDIEDAYYNEDPDEIPTIKLNIEQFGMTLREHMERNMELQEGDMSKALVALHPTTTSIPTPKLKNISRLRTEHQVYELPDSHRLLDGMDKREPDDPSPYLLAIWTPGETANSAQPPEQKCGGKASGKMCFDETCSECNSLREANSQTVRGTLLIPCRTAMRGSFPLNGTYFQVNELFADHESSLKPIDVPRDWIWDLPRRTVYFGTSVTSIFRGLSTEQIQFCFWKGFVCVRGFEQKTRAPRPLMARLHFPASKLKNNKT

SEQ ID NO: 45076 - protein, 417 aa, Shewanella sp. ANA-3
MTQRNPLGRRVVVTGIGGISALGHDWPSIASSLKAQKNCVVTMAEWDKYDGLNTRLAAPITDFEVPSHYSRKKIRSMGRVSIMATRASELALMDAGLLDDPIVTSGEMGIAYGSSTGSTDPLVAFGDMLKNGDMSGVTATSYIRMMAHTTAVNVGVFFGLKGRIHTTSSACTSGSQGIGYAYEAIKYGQQTLMLAGGGEELCPTEAVVFDTLFATSTKNATPELTPRPFDAHRDGLVIGEGACTLVLEELEHAMARGAKIYAEIVGFGTNSDGQHVTQPNSDTMEIAIRLALKDAALTPDAIGYVNAHGTATDRGDVAETHATHAVFGADMPISSLKSYTGHTLGACGALEAWVSIEMMNAGWFAPTLNLDNIDPECAALDYIRGEPRTLDTDYVMSNNFAFGGINTSLIFKRWKTT

SEQ ID NO: 45077 - protein, 408 aa, Glycine max
MLPSFFFPFASAGRNDKRKHLLAFPYLIVKNLSFLIIWDITVHSASTCYWILTFITAIIFLSSHFWVRHDFSKILLDSKGMEFETPHQTCFMSNSSWFSQESHYTEWTREENKKFESALAIYDKDTPDRWLRVAAMLPGKTVYDVIKQYRELEEDVCEIEAGRIPVPGYPTSSFTLKMVDNQCYDACRKKPATLRSSDQERKKGVPWTEEEHRRFLMGLLKYGKGDWRNISRNFVVTKTPTQVASHAQKYYIRQKLSGGKDNKRRPSIHDITIVNLTSDQEKPLLLNDESHMTFEQQKLTSMPKVQLEWINHHDNGSRMVVNPNYDMFMSPSSGISSKTLKLQGQDFYECAFHETYAKLKNSGFRTTSRDFNKEVRQLFNMSISLYRLNLHHRMRHSGILSLGQRDNI

SEQ ID NO: 45078 - protein, 475 aa, Vibrio parahaemolyticus RIMD 2210633
MSKEIKAQVVVLGSGPAGYSAAFRCADLGLETVLVERYSTLGGVCLNVGCIPSKALLHVSKVIEEAKAMADHGVVFGEPQTDINKIRIWKEKVVNQLTGGLSGMAKMRNVTVVNGYGKFTGPNSILVEGEGESTVVNFDNAIVAAGSRPIKLPFIPHEDPRIWDSTDALELKEVPEKLLIMGGGIIGLEMGTVYHSLGSKVEVVEMFDQVIPAADKDIVKVYTKRIKDKFKLMLETKVTAVEAKEDGIYVSMEGKKAPAEAERYDAVLVAIGRVPNGKLIDGEKAGLEIDERGFINVDKQMRTNVPHIFAIGDIVGQPMLAHKGVHEGHVAAEVISGKKHYFDPKVIPSIAYTEPEVAWVGKTEKEAKAEGIKYEVATFPWAASGRAIASDCSDGMTKLIFDKETHRVIGGAIVGTNGGELLGEIGLAIEMGCDAEDIALTIHAHPTLHESVGLAAEVFEGSITDLPNKKAVKKK

SEQ ID NO: 45079 - protein, 428 aa, Triticum aestivum
  misc_feature (415)..(415): Xaa can be any naturally occurring amino acid
  unsure (1)..(428): unsure at all Xaa locations
CTLPNAPFPNNLPSSYRGVAIKILDKEKVLKVGLAEQVRREITTMRLVAHKSIVQLHEVMATRSKIYFVMEYMKGGELFDKVSKGGKLTEGAAHKYFQQLISAVDYCHSRGVYHRDLKPENLLLDENENLKVSDFGLSALSESKRQDGLLHTTCGSPAYVAPEVISKGGYDGAKSDIWSCGVILFVLVAGYLPFQGQNLIEMYRKIEKGDFKCPGWVSQKLQKLLYKIMDPDPNKRISIQKIKESTWFRKGPGENLTAKERLPSENATTDAVPTLGVRRRKNSHEDGKPLAVTNLNAFEIISFSTGFDLSGLFVEKESKKEARFTSEQPASAIVSKLEAVAKTLNLRVRKKDNGVVKMQVRKEGRNGVLQFDSEIFEISPSYHLIEMKQTSGDSLEYQKLLEESIRPALKDICLXAWHGADGQQEPQG

SEQ ID NO: 45080 - protein, 449 aa, Arabidopsis thaliana
MEEKQVKETRIVLVPVPAQGHVTPMMQLGKALHSKGFSITVVLTQSNRVSSSKDFSDFHFLTIPGSLTESDLQNLGPQKFVLKLNQICEASFKQCIGQLLHEQCNNDIACVVYDEYMYFSHAAVKEFQLPSVVFSTTSATAFVCRSVLSRVNAESFLIDMKDPETQDKVFPGLHPLRYKDLPTSVFGPIESTLKVYSETVNTRTASAVIINSASCLESSSLARLQQQLQVPVYPIGPLHITASAPSSLLEEDRSCVEWLNKQKSNSVIYISLGSLALMDTKDMLEMAWGLSNSNQPFLWVVRPGSIPGSEWTESLPEEFNRLVSERGYIVKWAPQMEVLRHPAVGGFWSHCGWNSTVESIGEGVPMICRPFTGDQKVNARYLERVWRIGVQLEGDLDKETVERAVEWLLVDEEGAEMRKRAIDLKEKIETSVRSGGSSCSSLDDFVNSM

SEQ ID NO: 45081 - protein, 370 aa, Mycoplasma mycoides subsp. mycoides SC str. PG1
MTYLGKFDPLKNEKVCVLDKDGKVINPKLMPKISDQEVLEAYKIMNLSRRQDIYQNTMQRQGRLLSFLSSTGQEACEVAYINALNKKTDHFVSGYRNNAGWLAMGQLVRNIMLYWIGNEAGGKAPEGVNCLPPNIVIGSQYSQATGIAFADKYRKTGGVVVTTTGDGGSSEGETYEAMNFAKLHEVPCIFVIENNKWAISTARSEQTKSINFAVKGIATGIPSIIVDGNDYLACIGVFKEVVEYARKGNGPVLVECDTYRLGAHSSSDNPDVYRPKGEFEEMAKFDPLIRLKQYLIDKKLWSDEQQAQLEAEQDKFIADEFAWVEQNKNYDLIDIFKYQYDKMDIFLEEQYKEAKEFFEKYPESKEGGHH

SEQ ID NO: 45082 - protein, 332 aa, Methylococcus capsulatus str. Bath
MKAIVMTRPGEAAEVLELRDLPEPALTAPTQIKVRLRAAGVNPIDTKVRRRGLFYDDALPAVLGCDGAGEVVEAGAEVDRFRIGDRVWFCNGGLGAEQGNYAEYTVLDQRWAAPMPASSAFASAAAGPLVLITAWGALYDRGRLQPGQTVLVHAAAGGVGHVAVQLAKLRGARVIATVGSEDKAALARGWGADETIDYRTQDFVAEVNALTGGRGADLVLDTVGPEVFRRSVECTAHFGDLVTLLDTGATSLAEARMRNLRIGFELMLVPMLRKLDAARDHHVEILRACGEWIDDGKLELYVSGVHPLEEAARVHDIIEAGHTTGKRVLCID

SEQ ID NO: 45083 - protein, 389 aa, Bacillus subtilis subsp. subtilis str. 168
MQKLSEEMKQTIMDIFEHLHANPEVSWKEYETTSFLKQKLEDLGCRTRTFSDCTGVVGEIGSGSPVVAVRADIDALWQEVNGTFRANHSCGHDSHMTMALGTLMLLKKQPELPKGTIRFIFQPAEEKGGGALKMIEEGVLDDIDYLYGVHVRPIQETQNGRCAPSILHGSSQHIEGTIIGEEAHGARPHLGKNSIEIAAFLVHKLGLIHIDPQIPHTVKMTKLQAGGESSNIIPGKASFSLDLRAQTNEAMEALIAETERACEAAAAAFGAKIELHKEHSLPAATQNKEAEAIMAEAITEIIGAERLDDPLVTTGGEDFHFYAVKVPNLKTTMLGLGCGLQPGLHHPHMTFDRNAMFTGIHILANACSKHFRRRNHLLPLTLLNAKKAA

SEQ ID NO: 45084 - protein, 422 aa, Glycine max
MGQDTKNYNNIASSPLLEPLPSSNSKRASKLQTLGNIIVTVVGTGVLGLPFAFRIAGWVAGSLGVAIVGISTYYCMLLLVMCREKLASEEPLGESNTYGDLGYRSFGTPGRYLTEVIIVVAQCAGSVAYFVFIGQNLYSVFQGQGLSMASYIFMLVPVEIGLSWIGSLSALAPFSIFADVCNVVAMGIVVKEDIQRAFGKGFSFGQRTMITSNIGGLPFAAGMAVFCFEGFGMTLALENSMQDRRKFPILLAQTFGGITLVYILFGFCGYMAFGEETRDIVTLNLPRNWSSLAVQVGLCVGLAFTLPIMLHPINEIFEGKLKIILRNNNDSTGLENICMYISRAIVVVGLAVLASFVPEFGVYASFVGSTLCAMLSFVMPATFHLKLFGSSLPIWQKALDSIVLLSGLFFAFYGTYNTIVGV

SEQ ID NO: 45085 - protein, 366 aa, Xanthomonas campestris pv. vesicatoria str. 85-10
MLFETLDTTGHEQVIFCHNRDAGLKAIIALHSTRLGPALGGVRMRPYASSEAALNDALRLSRTMTYKNALAGLNVGGGKAVIIGDPRTDKTEALFRAFGRFVDTLGGRYITSEDVGTDVNDMEQIYLESEYVTGVHQVHRGSGDPAPFTAYGALQALMASLNRKLGHEEVGKASIAIQGLGHIGMELVKLLKERGAKLYVADLNQALVDRAVAEYGAEAVRPDEIHQVSADVFAPCALEGAINEDTLPQLKAKIICGTANNQLASAAIGEELHRRGILYAPDYVVNAGGVMNVSLEIDGYNRERAMRLIRSIYHNLEKVFDLSTQLDVSPQQAADQIAEARIEAISKLKLPLGRTAPRFLHKLRGE

SEQ ID NO: 45086 - protein, 595 aa, Mycoplasma mycoides subsp. mycoides SC str. PG1
MFKVKFADIGEGLTEGTVAEVLVKVGDVVKEGQPLYFVETDKVNSEIPSPVAGKIAIINISTGQEIKVGDVVIEIDDGTSVSTSEPKVEVVEENASVVGATPVSNDVLPSRAPKPKPEAPKVDVQIEDTFDVCVVGAGIGGYVTAIKSAQLGLKTLIIEKEYYGGVCLNVGCIPTKTLLKTSHVYHDIMHKAKELGIVLQNTEKVVIDWAQVLQRKNGVVKKLTGGVKYLLDKNKVTQIKGEAVALDKNTISVNNKNYRVNNLIIASGSTPNHLPLPGFDQGRKDGIIIDSTGILSVPKIPETLVVIGGGVIGIEFSCLFASLGTKVTVLQGLPTVLEMLDKDIIDAMTKELKNRYNIEVITNASVKEFKNGSVVYEIDDKDQMIKGEYVLESVGRKTSITGFENIGLELTPRKAIVVNEYQETNLDGVYAIGDVVGKVMLAHTAVKGAIVAANRIAKKANKDHAEDIVMDYYRIPSCIYTHPEVSMIGKTEQQLKQENIEYKTFKFPFSAIGKALADNDTSGFVKIIIEPKYKTILGAHIIGNRATEMISEIAAVIECEGTITEIANTIHPHPTMSEAIGEAAEALETGKAIHF

SEQ ID NO: 45087 - protein, 335 aa, Schizosaccharomyces pombe
MQQTYKPNTSALKDGAPKATVDQKQLLPCKYRVGRVLGGGTYATVREAVHIETNKMYAAKIMNKKMMEKKQDFVKNEIAILKRVSYEHPNILHLVDFFETVNNLYLITELATGGALFDRICAKGSFYEADAAALMRTTTSAVKYLHDNGIVHRDLKPENLLYRSKDPNSDLLIADFGLSHFYEDSQYYMLMTACGTPEYMAPEVFRRTGYGKPVDMWAIGVITYFLLSGYTPFARPSQVEVIEAILANEYTFNDPCWSGISETAKDFIKKCLENDPSKRLTAADALKHPFLSENGPATSNLLPNVRENFNARKTFRTAYNAVRAFNTWKKLENKH

SEQ ID NO: 45088 - protein, 339 aa, Nicotiana tabacum
MEEKYELLKELGTGNFGVARLVKDKKTKELFAVKYIERGKKIDENVQREIINHRSLGHPNIIRFKEVLVTPSHLAIVMEYAAGGELFARICSAGRFSEDEARFFFQQLISGVSYCHAMEICHRDLKLENTLLDGSASPRVKICDFGYSKSGLLHSQPKSTVGTPAYIAPEVLSRKEYDGKIADVWSCGVTLYVMLVGAYPFEDPEDPKNFRKTIGRIMSAQYSIPDYVRISADCKNLLSRIFVANPSKRITIPEIKKHPWFLKNLPKDLMDGEHSKYEEASEQLQQSVEEIMRIIQEAKIPGEVSKPEGQATAGTAEPDDTEDDLESEIDSSNDFAVYV

SEQ ID NO: 45089 - protein, 307 aa, Arabidopsis thaliana
  misc_feature (204)..(204): Xaa can be any naturally occurring amino acid
  unsure (1)..(307): unsure at all Xaa locations
MAANGVATAGRQVSEKEADIQMMLSADVHLGTKNCNYQMERYVFKRRDDGIYIINLGKTWDKLQMAARVIVAIENPKDIIVQSARPYGQRAVLKFAQYTGVNAIAGRHTPGTFTNQMQTSFSEPRLLILTDPRTDHQPIKEGALGNIPTIAFCDTDSPMGFVDIGIPANNKGKHSIGCLFWLLARMVLQMRGTILAAQKWDVMXWICFSTGSPKKQSKRVMKKLKYRPIMEWLVVTSGPLLKYLMLHGLVKSNSQFLLHLQLALPLLLDGRLLLFQLLVGSKSSLISLARTRLDVDLIFLFSRFGED

SEQ ID NO: 45090 - protein, 339 aa, Nicotiana tabacum
MEEKYELLKELGAGNFGVARLVKDKKTKELFAVKYIERGKKIDENVQREIINHRSLGHPNIIRFKEVLVTPSHLAIVMEYAAGGELFARICSAGRFSEDEARFFFQQLISGVSYCHAMEISCWDLKLENTLLDGSASPRVKICDFGYSKSGLLHSQPKSTVGTPAYIAPEVLSRKEYDGKIADVWSCGVTLYVMLVGAYPFEDPEDPKNFRKTIGRIMSAQFSIPDYVRISADCKNLLSRIFVANPSKRITIPEIKKHPWFLKNLPKDLMDGEHSKYEEASEQLQQSVEEIMRIIQEAKIPGEVSKPEGQATERTTEQDDTEDDLESEIDSSNDFAVYV

SEQ ID NO: 45091 - protein, 673 aa, Fusobacterium nucleatum subsp. vincentii ATCC 49256
MDLLTQVMYLGIAVGILSLLAAFYYAKKVEHYQINIPKVQEITAAIREGAMAFLTAEYKILVVFVIVVAVALGIFISVPTAGAFVLGAITSAIAGNAGMRIATKANGRTAIAAKEGGLAKALNVAFSGGAVMGLTVVGLGMFMLSLILLVSRTVGISVNDVTGFGMGASSIALFARVGGGIYTKAADVGADLVGKVEAGIPEDDPRNPATIADNVGDNVGDVAGMGADLFESYVGSIIATITLAFLLPVDDATPYVAAPLLISAFGIISSIIATLTVKTDDGSKVHSKLEMGTRIAGILTIIASFGIIKYLDLDMGIFYAIVAGLVAGLVIAYFTGVYTDTGRRAVNRVSDAAGTGAATAIIEGLAIGMESTVAPLIVIAIAIIVSFKTGGLYGISIAAVGMLATTGMVVAVDAYGPVADNAGGIAEMSELPAEVRETTDKLDAVGNSTAAVGKGFAIGSAALTALSLFAAYKEAVDKLTSEPLIIDVTDPEVIAGLFIGGMLTFLFSALTMTAVGKAAIEMVEEVRRQFREFPGIMDRTQKPDYKRCVEISTHSSLKQMILPGVLAIIVPVIIGLWSVKALGGLLAGALVTGVLMAIMMANAGGAWDNGKKQIEAGYKGDKKGSDRHKAAVVGDTVGDPFKDTSGPSLNILIKLMSIVSLVLVPLFVSVMNR

SEQ ID NO: 45092 - protein, 363 aa, Nicotiana tabacum
MERLFLLSLLAFVLFSSAIAFSDEDPLIRQVVSETDDSHLLNAEHHFSLFKSKFGKIYASEEEHDHRFKVFKANLRRARLNQLLDPSAEHGITKFSDLTPSEFRRTYLGLHKPKPKLNAEKAPILPTSDLPADFDWRDHGAVTGVKNQGSCGSCWSFSTTGAVEGAHFLATGELVSLSEQQLVDCDHECDPEQQDACDAGCGGGHYATAFEYTLKAGGLQLEKDYPYTGKDGKCHFDKSKICAAVTNFSVIGLDEDQIAANLVKHGPLAVGINAAWMQTYVGGVSCPLICFKRQDHGVLLVGYGSHGFAPIRLKEKAYWIIKNSWGENWGEHGYYKICRGHNICGVDAMVSTVTAAHTTNPNL

SEQ ID NO: 45093 - protein, 474 aa, Burkholderia vietnamiensis G4
MQPAEIGTPLRRTLGARHINLMALGATIGVGLFLGSATAIRLAGPSILLGYAFVGVFVFFVMRALGEMAVAHPVAGSFNRYAYEYIGPRAGFVTGWTYWFMWILCIMAEVTAVAIYMKFWFPGMPAWVWSLAALATMGLLNFVAVRAFGELEFWFAAIKIVTIVFMILSGIGIIGFGFGNGGVATGIGNLWRHGGFLPNGMWGLASAIPMVVFAYLGVEIIGLTAGETKNPEKSLARAVNSVFWRIAIFYIGALFIIMSLYPWNAIGTQGSPFVLTFERLGIRGAAGIINFVVLSAALSSCNSGIFGTARIVFNLAQQGQAPRIFAHTSKSGIPACAVVLTLVAALLGVLLNYVAPKGLFEWLTAIGTFAGLFSWAIILVAHYRFRRQRVAQDNRMLMPWWPYSSYCTLAFLAVLVAFMLKFDETRVAVIVGPLWLAFLWIVYGLSAKNGASRQGVPSPSASFAVEGVTRDIRD

SEQ ID NO: 45094 - protein, 816 aa, Dendrocalamopsis oldhamii
MGEAAGDRVLSRLHSVRERIGDSLSAHPNELVAVFTRLVNLGKGMLQPHQIIAEYNNAIPEAEREKLKDGAFEDVLRAAQEAIVIPPWVALAIRPRPGVWEYVRVNVSELAVEELRVPEYLQFKEQLVEGSTNNNFVLELDLEPFNASFPRPSLSKSIGNGVQFLNRHLSSKLFHDKESMYPLLNFLRAHNYKGMTMMLNDRIRSLSALQGALRKAEEHLSGLSADTSYSDFHHRFQELGLEKGWGDCAKRAQETIHLLLDLLEAPDPSTLEKFLGTIPMVFNVVILSPHGYFAQANVLGYPDTGGQVVYILDQVRAMENEMLLRIKQQGLNITPRILIVTRLLPDATGTTCGQRLEKVLGTEHTHILRVPFRTENGIVRKWISRFEVWPYLETFTDDVAHEIAGELQANPDLIIGNYSDGNLVACLLAHKMGVTHCTIAHALEKTKYPNSDLYWKKFEDHYHFSCQFTTDLIAMNHADFIITSTFQEIAGNKDTVGQYESHMAFTMPGLYRVVHGIDVFDPKFNIVSPGADLSIYFPYTESHKRLTSLHPEIEELLYSDVDNHEHKFVLKDRNKPIIFSMARLDRVKNLTGLVELYGRNPRLQELVNLVVVCGDHGNPSKDKEEQAEFQKMFDLIEQYNLNGHIRWISAQMNRVRNGELYRYICDTKGAFVQPAFYEAFGLTVVESMTCGLPTFATAYGGPAEIIVHGVSGFHIDPYQGDKASALLVEFFEKCQQDHSHWTKISQGGLQRIEEKYTWKLYSERLMTLTGVYGFWKYVSNLERRETRRYLEMLYALKYRTMASTVPLAVDGEPSSK

SEQ ID NO: 45095 - protein, 1327 aa, Mycobacterium tuberculosis H37Rv
MRCGIVVNVTGPPPTIDRRYHDAVIVGLDNVVDKATRVHAAAWTKFLDDYLTRRPQRTGEDHCPLTHDDYRRFLAGKPDGVADFLAARGIRLPPGSPTDLTDDTVYGLQNLERQTFLQLLNTGVPEGKSIASFARRLQVAGVRVAAHTSHRNYGHTLDATGLAEVFAVFVDGAVTAELGLPAEPNPAGLIETAKRLGANPGRCVVIDSCQTGLRAGRNGGFALVIAVDAHGDAENLLSSGADAVVADLAAVTVGSGDAAISTIPDALQVYSQLKRLLTGRRPAVFLDFDGTLSDIVERPEAATLVDGAAEALRALAAQCPVAVISGRDLADVRNRVKVDGLWLAGSHGFELVAPDGSHHQNAAATAAIDGLAEAAAQLADALREIAGAVVEHKRFAVAVHYRNVADDSVDNLIAAVRRLGHAAGLRVTTGRKVVELRPDIAWDKGKALDWIGERLGPAEVGPDLRLPIYIGDDLTDEDAFDAVRFTGVGIVVRHNEHGDRRSAATFRLECPYTVCQFLSQLACDLQEAVQHDDPWTLVFHGYDPGQERLREALCAVGNGYLGSRGCAPESAESEAHYPGTYVAGVYNQLTDHIEGCTVDNESLVNLPNWLSLTFRIDGGAWFNVDTVELLSYRQTFDLRRATLTRSLRFRDAGGRVTTMTQERFASMNRPNLVALQTRIESENWSGTVDFRSLVDGGVHNTLVDRYRQLSSQHLTTAEIEVLADSVLLRTQTSQSGIAIAVAARSTLWRDGQRVDAQYRVARDTNRGGHDIQVTLSAGQSVTLEKVATIFTSRDAATLTAAISAQRCLGEAGRYAELCQQHVRAWARLWERCAIDLTGNTEELRLVRLHLLHLLQTISPHTAELDAGVPARGLNGEAYRGHVFWDALFVAPVLSLRMPKVARSLLDYRYRRLPAARRAAHRAGHLGAMYPWQSGSDGSEVSQQLHLNPRSGRWTPDPSDRAHHVGLAVAYNAWHYYQVTGDRQYLVDCGAELLVEIARFWVGLAKLDDSRGRYLIRGVIGPDEFHSGYPGNEYDGIDNNAYTNVMAVWVILRAMEALDLLPLTDRRHLIEKLGLTTQERDQWDDVSRRMFVPFHDGVISQFEGYSELAELDWDHYRHRYGNIQRLDRILEAEGDSVNNYQASKQADALMLLYLLSSDELIGLLARLGYRFAPTQIPGTVDYYLARTSDGSTLSAVVHAWVLARANRSNAMEYFRQVLRSDIADVQGGTTQEGIHLAAMAGSIDLLQRCYSGLELRDDRLVLSPQWPEALGPLEFPFVYRRHQLSLRISGRSATLTAESGDAEPIEVECRGHVQRLRCGHTIEVGCSR

SEQ ID NO: 45096 - protein, 2229 aa, GIBBERELLA ZEAE PH-1
MTTLLDALRQATQVDCDTLDANVQAIAFSEISRPLAGEPLLHHDALVKDAIEKARGALKEFQGSATFEEFVVQILTNPKLSYSTDGTMSDAHRIVNIFKALAPEFDTKRVCIKIPATWEGLQACRALEVEGIATLATTMFCMEQATLAADAQCTYIAPYVNELKVHFEAGYVDEHKAFDFCREAQTYYINHSCRTQVLAASLTSVDEVMQLAGIQHITISPNLLNGLASTKLSDWDGKLGDYFAQGPANKSWETRDYNALTKNESAWRMAFTRSGFGTSEGEFLFPVRARLMEKVTDISTSLAADVSDGWLQQTDPPEERVDLMIDPNSKRWTKVHRYFTKVLESDMAIEDVIRRSFTHHQYRMMAPTERTDVKEMQAANTKRYNALLAGRFKGIEDSLATRLTAMYFGLPAAPVDNPLEEIAMMLGLDEKEVPRYNFRPPLHFLTAHDRRNWGKETLKSEEATIDALPLPRAMEPTLSLRGGGDDDDLIGWTDDYTQEYETTALFTDGWTYLHGIYGRLPFVPRKWRSFSKVLRQLLQVKDYEYQDFSLLWYDRKLGKPKVIHDQLPLTKESPAMTFLDEHFADSTRSHKDCCALFIDNIHTDINKGPQHWEPIDGQLQSDTIKIGRSLGNAPNGPEDEVISYAYLAFPKTKVDTFKIGKYGSNQYNAHFCKTLNVLFGAPESSAHHHALFRLVDKKKNKTNWAVPIVYGAMGLPQWAWELLHPVNNPGADWMVECCWLNPGLEAVLLSNYYPKPNPYLITRNSRNGAERFNQAYRQICEMTTEAFDASVCRKIDSVFLIEGHKPKTAGELVIDGFQVRPRRDLKSWKLGIPGTPNDDTPRDLGKKLGESPNFYRTVHVNWRPGHCRLFPGWYSGGDFSVEMPRLSSTVVEFLEAMGELFKLVGPPNLNGTGPEDSCFLLTEAPSFDGLQVQDMDSPSYYIGVGATDDDWHDIRKSITSPFVSVSIVKKPKNTSWSTSISKHNLWGLRLDKEALRQNEMNGGGSRRDALQLYDLDGESVDILHGYPADPVPLEPIDPNNNVSVTTNGKPWTPTSRRRPDAFVPPRLLKIRSKSVGGAEGLHLPSTLVIGGASTPDGEPESDIGILATSRPKFRGFPPPPSEDEDDGDLAGGLAEDDHRRYSMYGDLLSDSGEEDGGGSRNKDADGDEAMEDTSLPSVPQADVIGGGEANDDDEDETPKLFGLQKIPEEKEPEDNPEDRPEQTVPPPSVTTSKPLFQASNTVGADDRAHTWATQPSIFTNEDQRAWPADAEIGLPITAAPVEKIHRLSGNVPMYSKAILTPTEQAELQHGFGDLRNILLKRTNMCPFQGCRFTWRLDQNEELNIHVFTAHAKRKCPFCDDALFGWWDKNQQIKHLGDKHPDEVKKMKVHGVQKGNISVPVTVNAPANLIGEAFAEEIRSWGPQYKLKAPPRLLTYPLLAWYDNFGTTAVKDPPKKCPIPSCSVPHLEHLSSHGVWTHFKNYHTDLEMDACPFCNLSFYVYGEKDKDGVRTVIPRSIDECIMHLDCHVYQLWDLLEPVVDQPTKVNMPSQGNKDFQTISAEKLESMRAEVVSKTVAAALARTGAATQSVADQSPPPQVSYGHVTDASQILRKCVYFEKCGAYVGSMTEKQYRRHVRVNHPKEISTLSSSSEDETDGEDQASTDDGSEDRGDDKPNDGDDGRDGAGKTAALKFGRLKPTSKPAQASTPSKPKEKAVLGKPPSPPDPDEMDISTDDNVVETESSRSEESAVMISEKTPTTKITTPQTPPPDGDSDTNEESGSSVSRGRRSVKALKSKRKAPTKRAEPDVDEDNTEDNGEKEIDDFDEDGEADGSGSKSSHTEGRGRSAKKAGKRRPRGDDDGDYEDEGDQDDDDFVMAGNNGRRYRRRAPSPDWIKVLGPEDPNFDPEDKMYCSKCLRKAPLRRAKSPNRSPIGRAGEIEAHTDKTKCCRIRNGLGSATGLPNRSGWIPANKLPGTLTSLKEDFLNRYPSYMRTMYPTSSRDHHASVWRSDPNNPENDAWFDVPWPPYEGLPPFPGDWIAPGLPWDDTPEGRQRRAMYIGNRVVDENYQYQSETDSDDDLKPDVNDIPDFQADLNPLKRPAEDEEETSDEPAPKKAKKSKTAATKTPKATGTKKTPAPKKAAAPSKTPAKTRSKAPSKAASKAPSKTPSKAASKTPSKAPSKTPSKAPSKAPSKASSKGPSKTPSRASSRKTTPSKTPSTPSTRPPSEAGDE

SEQ ID NO: 45097 - protein, 361 aa, Pseudomonas putida
MVRSIRTLNIQSTRSLFMNTLLPTSTAGSLPKPAWLAQPETLWSPWKLQDAQLVEGKQDALRLALQEQQHAGIDIVSDGEQTRQHLVTTFIEHLSGVDFEQRKTVRIRDRYDASVPTVVDALDRQKPLFVEDAKFHRPHTTQPIKWAVPGPMTMIDTLYDNHYKSREKLAWEFAKILNQEARELEAAGVDIIQFDEPAFNVFFDDVNDWGVATLERTIEGLKCETAIHICYGYGIKANTDWKKTLGSEWRQYEQAFPKLQQSSIDIISLECHNSHVPMDLLELIRGKKVMVGAIDVATHVIETPEQVAATLRKALQFLDAQKLYPCTNCGMAPLRRQVPRGKLKALSAGAAILPQEIANAR

SEQ ID NO: 45098 - protein, 467 aa, Gloeobacter violaceus PCC 7421
MNSWAASRNPAPGGRCDSVKNRSLAGERPLRTAKPSPGRTLAWPAPARLSWMAFLAGIASLPVASPVTLACWLVALAALVRSGVGHRLGPAGRYLAATALVLVAVVPFSVRPGDSLLGLFNYWPFFLFFGLAARLVDSPGRLRRVLQVVLVGALVTGGVGLVEWASGSNWQWEPVKGLVLLVIGSRQEAGILDRVTAFFAWPTSAAAYFLLVLPVALSTALGGEARLRPLAWAAFGAVGIALVGTASRNAWIIALLASVALLVVARRLVPVLSLAAAAAAVAVAGLGPTEWSVVELLRRVVPAALWQKVAESVTSGTASFESLINRFDAWQIAFEMTRRRPWTGWGLQTFPFVESEIFGRDAANLLHAHNLYLTYSAETGLPAALLLVGFYLWTLCVGVQRAVMLKGVARWQLAGLVAALASYLLFGLSDVPFYDARINGLFWLWSGLIWSFPAGGAAQRTIEAKPS

SEQ ID NO: 45099 - protein, 194 aa, Glycine max
MDFLSCGSGPCCQAVDMKWKLVGKCLNSRQARFPSVGNRSGSVRFHDNKELQRDFGSLSALEGSKRTNCKAYSESYDGYVIGGEEDVADISGVEEPATNNVVIPGLPDGSNGAPISSCFWEWKPKLNVHYEKAGCENVDSPHVLFLPGFGVGSFHYEKQLKDLGRDTRVWALDFLGQGLSLPFEDPAPYYNKEG

SEQ ID NO: 45100 - protein, 142 aa, Lactococcus lactis subsp. lactis Il1403
MEKEKLKKKLSLLAYRVTQENGTEAPFANEFDDFFEQGLYVDVVSGEALFTSLDKYQSGCGWPAFTQPIDKGVVKEKRDKSLFMERTEVRSSNADSHLGHVFTDGPLDKGDLRYCINSAALRFVPFDQLEAEGYGEYVKYFS

SEQ ID NO: 45101 - protein, 723 aa, Glycine max
MKADLAVTTWMVVLVMILMLPTTHRGKNAITDTLLSKFKSLNRSSGSVLTRMRSKGLNSAEGLIWNEASKVLGSKSKTQMKTQLERHENSLLRQENDKLRAENMSMREAMRNPICSNCGGPAMIGEISLEEQHLRIENARLKDELDRVCALAGKFLGRPVSSLTSSIGPPMPNSSLELGVGSNGFGQGLSTVPSTMPDFGVGISSPLAMVSPSSTRPTTTALVTPSGFDNRSIERSIVLELALAAMDELVKMAQTGEPLWIRSLEGGREILNHEEYTRTITPCIGLRPNGFVTEASRQTGMVIINSLALVETLMDSNRWSEMFPCMIARTSTAEVISNGINGTRNGALQLMHAELQVLSPLVPVREVNFLRFCKQHAEGLWAVVDVSIDTIRETSGAPTFVNCRRLPSGCVVQDMPNGYSKVTWVEHAEYDESQIHQLFRPLLSSGMGFGAQRWVTTLQRQCECLAILMSSAAPSREHSAISSGGRRSMLKLAHRMTNNFCSGVCASTVHKWNKLNAGNVGEDVRVMTRKSVDDPGEPPGIVLSAATSVWLPVSSQRLFDFLRDERLRSEWDILSNGGPMQEMAHIAKGQDHANCVSLLRASAINANQSSMLILQETCTDASGSLVVYAPVDIPAMHVVMNGGDSAYVALLPSGFAIVPDGSGEEQGGASQQRAASGCLLTVAFQILVNSLPTAKLTVESVETVNNLISCTVQKIKSALHCES

SEQ ID NO: 45102 - protein, 674 aa, Arabidopsis thaliana
MADSPVDSSPAPETSNGTPPSNGTSPSNESSPPTPPSSPPPSSISAPPPDISASFSPPPAPPTQETSPPTSPSSSPPVVANPSPQTPENPSPPAPEGSTPVTPPAPPQTPSNQSPERPTPPSPGANDDRNRTNGGNNNRDGSTPSPPSSGNRTSGDGGSPSPPRSISPPQNSGDSDSSSGLLLLLAVCICICCNRKKKKKSPQVNHMHYYNNNPYGGAPSGNGGYYKGTPQDHVVNMAGQGGGNWGPQQPVSGPHSDASNLTGRTAIPSPQAATLGHNQSTFTYDELSIATEGFAQSNLLGQGGFGYVHKGVLPSGKEVAVKSLKLGSGQGEREFQAEVDIISRVHHRHLVSLVGYCISGGQRLLVYEFIPNNTLEFHLHGKGRPVLDWPTRVKIALGSARGLAYLHEDCKKIFISHICISHPRIIHRDIKAANILLDFSFETKVADFGLAKLSQDNYTHVSTRVMGTFGYLAPEYASSGKLSDKSDVFSFGVMLLELITGRPPLDLTGEMEDSLVDWARPLCLKAAQDGDYNQLADPRLELNYSHQEMVQMASCAAAAIRHSARRRPKMSQVQKLIPLVGSIIVRALEGDMSMDDLSEGTRPGQSTYLSPGSVSSEYDASSYTADMKKFKKLALENKEYQSSEYGGTSEYGLNPSASSSEEMNRGSMKRNPQL

SEQ ID NO: 45103 - protein, 365 aa, Nicotiana tabacum
MDRLFLLSLPRFALFSSAIAFPDEDPLIRQVVSETETDDSHLLNAEHHFSLFKSKFGKIYASEEEHDHRFKVFKANLRRARLNQLLDPSAEHGITKFSDLTPSEFRRTYLGLHKPKPKVNAEKAPILPTSDLPADYDWRDHGAVTGVKNQGSCGSCWSFSTTGAVEGAHFLATGELVSLSEQQLVDCDHECDSEQQDSCDAGCGGGLMTTAFEYTLKAGGLQLEKDYPYTGKDGKCHFDKSKIAAAVTNFSVIGLDEDQIAANLVKHGPLAVGINAAWMQTYVGGVSCPLICFKRQDHGVLLVGYGSHGFAPIRLKEKAYWIIKNSWGENWGEHGYYKICRGHNICGVDAMVSTVTAAHTTNPNL

SEQ ID NO: 45104 - protein, 409 aa, Corynebacterium glutamicum ATCC 13032; identical to SEQ ID NO: 1436

SEQ ID NO: 45105 - protein, 265 aa, Triticum aestivum
  misc_feature (135)..(135): Xaa can be any naturally occurring amino acid
  misc_feature (221)..(221): Xaa can be any naturally occurring amino acid
  unsure (1)..(265): unsure at all Xaa locations
MEDERSTQSYQGGEAAEQVEVTDRGLLGNLLGKKKAEEDKEKKEEELVTGMEKVSVEEPEVKKEEHVDGEKKETLFSKLHRSSSSSSSSSDEEEEEVIDDNGEVIKRKKKKGLKEKLQEKLPGHKDTEGEHVTGXLPAPAAPASVQTHHDTDVVVEKIDGDVKTEATPAVPEEEKKGFLEKIKEKLPGGHKKPEDAAAVPVTHAAPGAPPVHAPGPGRQRXVASPASRSEKKGLLGKIMDKLPGYHKTGEEDKAAAATGEHKPSA

SEQ ID NO: 45106 - protein, 180 aa, Phaseolus vulgaris
MASSMISSPAVTTVNRAGAGAGMVAPFTGLKSLGGFPSRKMNNDITSVANNGGRVQCIQVWPTVGKKKFETLSYLPPLTKQQLAKEVDYLLRKGWVPCLEFELEHGFVYREHNKSPGYYDGRYWTMWKLPMFGCTDSSQVLKELYEAQTAHPDGFIRIIGFDNVRQVQCISFIAYKPPGY

SEQ ID NO: 45107 - protein, 256 aa, Phaseolus vulgaris
MATRRYSFGRTDEATHPDSMRASLAEFASTFIFVFAGEGSGLALVKIYQDSAFSAGELLALALAHAFALFAAVSASMHVSGGHVNPAVSFGALIGGRISVIRAVYYWIAQLLGSIVAALVLRLVTNNMRPSGFHVSPGVGVGHMFILEVVMTFGLMYTVYGTAIDPKRGAVSYIAPLAIGLIVGANILVGGPFDGACMNPALAFGPSLVGWQWHQHWIFWVGPLLGAALAALVYEYAVIPIEPPPHHHQPLATEDY

SEQ ID NO: 45108 - protein, 358 aa, Shewanella sp. ANA-3
MSMMNAQTMKAIVMQDGEVTLQQVDLPKPQVGQVLVRSLACGICGSDIHITRHYSEVFSFYRKLGVMPEGVDDHVPVMLGHEFCAEVVEFGPQTQQTLAVGTRVTSVPILMSQNGAGVGVTPGVNGAYSEYFILDEALLMPVPEHLPPEAVALTEPLAVGLHAVNRGDVGVEDTALVVGCGPIGLAAISALHLRGVRNIIAADLQGEKLQLAREFGATHTVNPGEQDEVAYAAEVAEGHRVVIFECVGIHKLIEGFVKRAPAKATIVVTGIHTAEANINYAYATVKELDMRFSYYYQPDEFAACLAELAQGTIPWRKLLTGKVGMDGVSGAFKQLMKPNPHIKVVIEPWRNGELETLN

SEQ ID NO: 45109 - protein, 628 aa, Campylobacter upsaliensis RM3195
MLKKQANTLRFLSADMIQKANSGHPGAPLGLADIMVVLSRHLSHNPKNPQWLNRDRLVFSGGHASALLYSFLHLSGYDISLEDLKHFRQLHSKTPGHPEITTPGVEIATGPLGQGVANAVGFAMAAKKAQNLLGKDLINHQIYCLCGDGDLQEGISYEACSLAGLHRLDNLILIYDSNEISIEGDVKIAFNEDIMKRFEAQGFEVEQINGHDFEEIDAAFCRAKKSSKPYLIIAKTTIAKGALELEGSHHSHGTPLGEDLIKRAKAKLGFDENANFIIDEDVKIRFLSAVELGDLAEAKWNKTLENSGKKELLNKLLNPDFSKIEFPNFKGKDLATRDSNGEILNVLAKNLEGFLGGSADLAPSNKTELKAMGDFVEGKNIHFGIREHAMAAINNAFARYGLFLPFSATFFIFSEYLKPAARIAALMKLKHFFIFTHDSIGVGEDGPTHQPIEQLSTFRAMPNFLSFRPANGVENAKAWQVALKNECPSAFILSRQKLKALDGAIFGDVENGAYLLKEHQNPTYTLLASGSEVSLCLDVALELEKEGILCNVISMPCYELFERQDKAYKERLLKGKVIGVEAANSKELYQFCDVLYIIESFGESGKDKAVFEHFGFSVPKLCAFVRQI

SEQ ID NO: 45110 - protein, 225 aa, Zea mays
  misc_feature (71)..(71): Xaa can be any naturally occurring amino acid
  unsure (1)..(225): unsure at all Xaa locations
RYYLKDAVLDGGVPFNKAYGMTAFEYHGTDARFNRVFNEGMKNHSVIITKKLLDFYTGFEGVSTLVDVGGXGVGATLHAITSRHPHISGVNFDLPHVISEAPPFPGVRHVGGDMFASVPAGDAILMKWILHDWSDAHCATLLKNCYDALPENGKVIVVECVLPVNTEATPKAQGVFHVDMVMLAHNPGGKERYEREFRELAKGAGFSGFKATYIYANAWAIEFIK

SEQ ID NO: 45111 - protein, 268 aa, Lactobacillus plantarum WCFS1
MAVVKVIRKLKAKRVVIKVGTSTLVYPDGSINLRAIDQLAFVISAMRHRGREVVLVSSGAIGVGLNYMGLKQRPKAIPEQQAIAAIGQTELISIYKERFAIYEQKIGQLLLTRDIFVYPKSHHNVLNTFEALLKQNVVPIVNENDTVAVDELDHETKFGDNDQLSAIVATNIGADLLIMLSDIDGFYDGNPNADARAQLLGHIEKVDQHTYKLAGGSGSRFGTGGMVTKLKAAERMIDANGQMILANGADPTIIFQILAGEPVGTLFG

SEQ ID NO: 45112 - protein, 116 aa, Brassica napus
VLNIYHELIAAGLRIWVFSGDADAVVPVTATRYSIDALNLRPLSPYGPWYIDGQVGGWTHQYAGLNFVTVRGAGHEVPLHRPKEALALFKAFISGTPLSTPESSISKDMSELVSDS

SEQ ID NO: 45113 - protein, 966 aa, Arabidopsis thaliana
MSMVDEPLYPIAVLIDELKNDDIQRRLNSIKRLSIIARALGEERTRKELIPFLSENNDDDDEVLLAMAEELGGFILYVGGVEYAYVLLPPLETLSTVEETCVREKAVDSLCRIGAQMRESDLVEHFTPLAKRLSAGEWFTARVSACGIFHIAYPSAPDVLKTELRSIYGQLCQDDMPMVRRAAATNLGKFAATIESAHLKTDIMSMFEDLTQDDQDSVRLLAVEGCAALGKLLEPQDCVAHILPVIVNFSQDKSWRVRYMVANQLYELCEAVGPEPTRTDLVPAYARLLCDNEAEVRIAAAGKVTKFCRILNPELAIQHILPCVKELSSDSSQHVRSALASVIMGMAPVLGKDATIEHLLPIFLSLLKDEFPDVRLNIISKLDQVNQVIGIDLLSQSLLPAIVELAEDRHWRVRLAIIEYIPLLASQLGVGFFDEKLGALCMQWLQDKVHSIREAAANNLKRLAEEFGPEWAMQHIVPQVLEMINNPHYLYRMTILRAVSLLAPVMGSEITCSKLLPAVITASKDRVPNIKFNVAKMMQSLIPIVDQAVVENMIRPCLVELSEDPDVDVRYFANQALQSIDNLRNQEFGRRTMTMMQYLIPEPKTKEILYEKTLQAAGPITLGEVKELTSKRKIIEESVNKTSKVIDSTTREMTRGLTSACEQDLHKLGEYLPLLFNLVHYTDKIKRVSNLKIRWSSGLISQTLIQRTCPKFFQVDNIMFEFGMVLFIYAVKLRERAMELVSTDSKKAVAVYREASGVFHHLSHEILPLLQTCLPPGKLPELTPPLCSALSLLCLAEGQAVTTEKAEESGKSASLLSKLHFGIFQFLSEAYALLSSRLTGEYKDLSTRFLEYVTTMGALHELKSQKYLAELLESEDRVGDAVGVLRRALAAAKKSTPSKDDKWIAIFKKEREDVAKNMAKYEKLNDSMMLQKIPIDREIPFPKGEKIVNLIPYTPTRVVRELRFKS

SEQ ID NO: 45114 - protein, 412 aa, Lactobacillus plantarum WCFS1 [sequence omitted]

SEQ ID NO: 45115 - protein, 331 aa, Arabidopsis thaliana
  misc_feature (204)..(204): Xaa can be any naturally occurring amino acid
  unsure (1)..(331): unsure at all Xaa locations
MADTSPRTDVSTDDDTDHPDLGSEGALVNTAASDSSDRSKGKMDQKTLRRLAQNREAARKSRLRKKAYVQQLENSRLKLTQLEQELQRARQQGVFISGTGDQAHSTGGNGALAFDAEHSRWLEEKNKQMNELRSALNAHAGDSELRIIVDGVMAHYEELFRIKSNAAKNDVFHLLSGMWKTPAERCFLWLGGFRSSELLKLLAXNQLEPMTERQLMGINNLQQTSQQAEDALSQGMESLQQSLADTLSSGTLGSSSSGNVASYMGQMAMAMGKLGTLEGFIRQADNLRLQTLQQMIRVLTTRQSARALLAIHDYFSRLRALSSLWLARPRE

SEQ ID NO: 45116 - protein, 432 aa, Phaseolus vulgaris
FVRKTNKNRDMPLDSDVFRVPPGYNAPQQVHITQGDLVGRAMIISWVTMDEPGSSAVRYWSEKNGRKRIAKGKMSTYRFFNYSSGFIHHTTIRKLKYNTKYYYEVGLRNTTRRFSFITPPQTGLDVPYTFGLIGDLGQSFDSNTTLSHYELSPKKGQTVLFVGDLSYADRYPNHDNVRWDTWGRFTERSVAYQPWIWTAGNHEIEFAPEINETEPFKPFSYRYHVPYEASQSTSPFWYSIKRASAHIIVLSSHIAYGRGTPQYTWLKKELRKVKRSETPWLIVLMHSPLYNSYNHHFMEGEAMRTKFEAWFVKYKVDVVFAGHVHAYERSERVSNIAYKITDGLCTPVKDQSAPVYITIGDAGNYGVIDSNMIQPQPEYSAFREASFGHGMFDIKNRTHAHFSWNRNQDGVAVEADSVWFFNRHWYPVDDST

SEQ ID NO: 45117 - protein, 193 aa, Zea mays
  misc_feature (76)..(76): Xaa can be any naturally occurring amino acid
  misc_feature (159)..(159): Xaa can be any naturally occurring amino acid
  misc_feature (186)..(186): Xaa can be any naturally occurring amino acid
  unsure (1)..(193): unsure at all Xaa locations
MDPTQFRPSRMHDTTLTTTNVAAIASEPYEELTAGAPAPILLEDYHLIEKVAHFARERIPERVVHARGASAKGFFXCTHDVTSLTCADFLRASGVRTPVIARFSTVIHERWSPETIRDPCGFAVKFYTREGNWDLLGNNFPVFFIRDGIKFPDVIHAFXPNPRSHVQEYWCVFDFLSHLPESLHTXFFFLFDH

SEQ ID NO: 45118 - protein, 305 aa, Botryotinia fuckeliana
MQIFVKTLTGKTITLEVESSDTIDNVKAKIQDKEGIPPDQQRLIFAGKQLEDGRTLSDYNIQKESTLHLVLRLRGGMQIFVKTLTGKTITLEVESSDTIDNVKAKIQDKEGIPPDQQRLIFAGKQLEDGRTLSDYNIQKESTLHLVLRLRGGMQIFVKTLTGKTITLEVESSDTIDNVKAKIQDKEGIPPDQQRLIFAGKQLEDGRTLSDYNIQKESTLHLVLRLRGGMQIFVKTLTGKTITLEVESSDTIDNVKAKIQDKEGIPPDQQRLIFAGKQLEDGRTLSDYNIQKESTLHLVLRLRGGQ

SEQ ID NO: 45119 - protein, 141 aa, Musa acuminata
MNGAIKVGAWGGNGGSAFDMGPAYRIISVKIFSGDVVDGVDVTFTYYGKTETRHYGGSGGTPHEIVLQEGEYLVGMAGEVANYHGAVVLGKLGFSTNKKAYGPFGNTGGTPFSLPIAAGKISGFFGRGGKFLDAIGVYLEP

SEQ ID NO: 45120 - protein, 887 aa, ASPERGILLUS NIDULANS FGSC A4
MSSHERESGMLSGIQNIIKRTDHLWHANHTKTAEARIFLCREAASLYGLRQNVRKNNNGMKETYTIGGVGILDLREMNGKSLPYSGVKQFVNTHTGAAPDHISTSFSYIAHILVLVSNYLSLRLPAEITLPHKDYPLPTIYTPSASYLPQELRAVPFSDQLPSSRPTSRTALAHASFPRPRPLCIDKSLPKLAKEDPGTYALFIEGVTLLAWNVSWLCRSQGLNLGSDSWEDVCDIGKNLWQLLVAPPGQSSALIATRKGSYQTRAHKDFPRTMIQRTKSFPMLGHYSHGTAHSFLGASEGTEFVRNWKLPSPTKVVDGLKSTLLGEMASAEWELLEENEWDDSRQPVSHESSHGSDLPHDDQSSYTSDTITLAPKLGAPDAPAIAARSKGTSGWTKLRHSSESRFCWFHELALLLVTQICTLWPESRLRLLICPKPKGPKIEHKQGHANMEYPKSQVSTPALLGIPNVVLPQEEQHRRNIYRDSSDGKSSCGSIKQGAYNTSLHVMALFLILVLSTLACSFPILARRFPRLPIPRRFLFLSRHFGTGVLIATAFVHLLPTAFVSLTDPCLPQFWSETYRAMPGFVAMISVFGVVLVEMFFAMKGAGHVHGSEYDQLISEANANGDRDSDYSRLEASESVDDIHLSAMRESSASMNMPRNSTEESSLDRSSTNFIKNGALPALGEGRNPVVRANLSSRYPAQVSSGPNMDDNTDPKMTLQNPHRQLLQCLLLEAGILFHSIFIGMAVSVATGTSFIVLLVAICFHQTFEGFALGSRIASLIPDLFPPSSMKPWLMSLAYGTTTPIGQAIGLVLHNFYDPASATGLLMVGITNAISSGLLLFAGLVELLAEDFLSEESYVILRGRRRLEACIAVAAGALLMAFVGAFA

SEQ ID NO: 45121 - protein, 294 aa, Escherichia fergusonii
IVFRAAQKRSDIEIVAINDLLDADYMAYMLKYDSTHGRFDGTVEVKDGHLIVNGKKIRVTAERDPANLKWDEVGVDVVAEATGIFLTDETARKHITAGAKKVVLTGPSKDNTPMFVKGANFDKYAGQDIVSNASCTTNCLAPLAKVINDNFGMIEGLMTTVHATTATQKTVDGPSHKDWRGGRGASQNIIPSSTGAAKAVGKVLPELNGKLTGMAFRVPTPNVSVVDLTVRLEKPATYEQIKAAVKAAAEGEMKGVLGYTEDDVVSTDFNGEVCTSVFDAKAGIALNDNFVKLV

SEQ ID NO: 45122 - protein, 429 aa, Arabidopsis thaliana
  misc_feature (388)..(388): Xaa can be any naturally occurring amino acid
  unsure (1)..(429): unsure at all Xaa locations
MVVRKVGKYELGRTIGEGTFAKVKFAQNTETGESVAMKIVDRSTIIKRKMVDQIKREISIMKLVRHPCVVRLYEVLASRTKIYIILEYITGGELFDKIVRNGRLSESEARKYFHQLIDGVDYCHSKGVYHRDLKPENLLLDSQGNLKISDFGLSALPEQGVTILKTTCGTPNYVAPEVLSHKGYNGAVADIWSCGVILYVLMAGYLPFDEMDLPTLYSKIDKAEFSCPSYFALGAKSLINRILDPNPETRITIAEIRKDEWFLKDYTPVQLIDYEHVNLDDVYAAFDDPEEQTYAQDGTRDTGPLTLNAFDLIILSQGLNLATLFDRGKDSMKHQTRFISHKPANVVLSSMEVVSQSMGFKTHIRNYKMRVEGLSANKTSHFSVILEXGDAEEYLKFYKTFCSKLDDIIWKPPDASMKNRVTKAKSKRR

SEQ ID NO: 45123 - protein, 270 aa, Pleurotus djamor
AHFDRERDPERVVHAKAAGAHGYFEVTHELSDITSNPLLTSVGKKVDLTARFSTVGGESGSADTARDPRGFAFKLRTEQGNWDWVFNNTPIFFIRDPAKFPHFIHTQKRDPQTHLKDADMFWDYLGQNPESIHQMMILFSDRGTPDGVDSMHGYSGHTFKWLKNDGTFVYVQVHVRADQGFKTLDGPTAHKLTADNPDYSTEKMFNRIEKGDYPSWTVYIQTMTPEQAESFRYNILDLTKVWPHAQYPLRPIGKVVLNKNPVTYFAEVEQ

SEQ ID NO: 45124 - protein, 571 aa, Zea mays
MPGGSSGPDGEVDAGFAKLQGEDFEYYMQTYSIMLGRNSKKSTVDVDLSSLGGGMNISRHHARIFYDFQRRRFALDVIGKNGCLVEGVLHLPGNPPVKLDSQDLLQIGDKKFYFLLPTRSIFASAAAARHAPIIPQQLPPPPYAHARAGRPRLSEFHDRSFEGDYGREVDEIGNGISETAMRGKLVKRNKKSSGDLDIYGGHRINVEAIGTLGEDSRSEIRSRGDRDIDNQQALQAEEKDVVSSVATVLSDLCGPGEWMPMAKLHNETVVSVAWSQQLQQFYRSYSKKQCSTEVLIIIIMGSRQVCPVELLEQFGNVWHPSRVRKYLTQDDWSPTETKGRPWFGLLALLRKYPEHFVINTRSKGRMTSEFVSLFPDSRELRATVTPPKQLGQRAGRGRMGDAGDKCALRLAATARKWLEDVRVDREGRVHPAVASGGQALTWLATAGARVSLAEPGRVVCSLRVGAPLTDAEGRWHAGAIAVAADNVCAAAVFTALGADVLTVQYSLSYFSPAHLDEEVEMEGRVVGRKAALAAATVEVRKKESGELVAICRQWMAPLSTTKVSTSTSSKL

SEQ ID NO: 45125 - protein, 382 aa, Nocardia farcinica IFM 10152
MNPVPQDTEIRTIEAAAAPTRFARGWHCLGLARDFSDGKPHAIEAFGTKLVVFRGENGTLNVLDAYCRHMGGDLSQGTVKGDAVACPFHDWRWSGNGRCTEIPYARRVPPLARTRTWHALEQDGMLFVWHDPEGSKPTPEVAIPRIEGAGDDRWTDWHWYTTVVNTNCREIIDNVVDMAHFFYIHGSLPTYFKNVFEGHIATQYFKSGARDDFPAPEGQPTMLGTSSVASYYGPSFMIDDLTYHFEYGDQRTVLLNCHYPIDANSFVLQYGIIVEKAPGLPEEAAMQTAVALGDWVKIGFEQDVEIWKNKARIDNPLLCEEDGPVYQLRRWYEQFYVDVADVTPEMVDRFEFELDTTKPLEAWQAQIRANMAAQSGTAEAPA

SEQ ID NO: 45126 - protein, 305 aa, Corynebacterium glutamicum ATCC 13032
MSVVGTGLFFGSPEEERDKLMQSLMDQKNKLSKSEGIPLVTLNDGKTIPQLGFGVFKVDPDEAERVVTEALEVGYRHIDTAAIYGNEEGVGRAIAKSGIPREELFITTKLWNDRHLDVEAAFEESLQKLGLDYVDLYLVHWPAPKNDNYVAAWKGLEKLGDRARSIGVCNFLPEHLEKLLAEATTVPAINQIELHPALQQRDAVEASLAAGITVESWGPLGQGRFDLGAEEPIAAAAKNHGKTPAQVVIRWHLQNGFVVFPKTVTKSRMVENIDVFDFELSDEEMAAITALERNDRGGSHPNDLN

SEQ ID NO: 45127 - protein, 166 aa, Pleurotus ostreatus
REYNLRPIIKKPAPGKPFPGGADHNINLNFAFDPATALFTANNHTFVPHTVPVLLQILSGTRDAHDLAPAGSIYDIKLGDVVEITMPALVFAGPHPIHLHGHTFAVVRSAGSSTYNYENPVRRDVVSIGDDPTDNVTIRFVADNAGPWFLHCHIDWHLDLGFAVVF

SEQ ID NO: 45128 - protein, 406 aa, Methanosarcina barkeri str. fusaro
MQVIVVGGFLGSGKTTTIINMGKYLAEKGKKVAIIVNEIGEVGIDGDVIKKFGFDTKEITSGCICCSLKVGLRVTVTHLANEYKPDILMIEPTGIAFPNLIKKEIELMNLGEQVKIAPLVTLIDGSRFKYLMKEVKEFAMRQIIDAEILGINKIDLIEPIRIPILEASVQQLNPKSRVVLLSGKDTGESFENFMRLVLPDLEELSKEVPTEITEEVKPSKAEPSAPQETENSIEASKVGSYSVEFAVENGNLSTEVSRELTTELMNTIKAKVLQLNPEFIGHIKLFLDNGSETVKQNITIYYEEPQEDVIKSKEGATPTLKILSAVSNVDKEAVKAAVNDSVHEVFERKQIKVNKIEHEHNHEHEHHEHEHHEHEHHEHEHHEHEHHEHEHHEKHKHGDQEEEISE

SEQ ID NO: 45129 - protein, 414 aa, Streptococcus pneumoniae R6
MKRMKLNRVVVTGYGVTSPIGNTPEEFWNSLATGKIGIGGITKFDHSDFDVHNAAEIQDFPFDKYFVKKDTNRFDNYSLYALYAAQEAVNHANLDVEALNRDRFGVIVASGIGGIKEIEDQVLRLHEKGPKRVKPMTLPKALPNMASGNVAMRFGANGVCKSINTACSSSNDAIGDAFRSIKFGFQDVMLVGGTEASITPFAIAGFQALTALSTTEDPTRASIPFDKDRNGFVMGEGSGMLVLESLEHAEKRGATILAEVVGYGNTCDAYHMTSPHPEGQGAIKAIKLALEEAEISPEQVAYVNAHGTSTPANEKGESGAIVAVLGKEVPVSSTKSFTGHLLGAAGAVEAIVTIEAMRHNFVPMTAGTSEVSDYIEANVVYGQGLEKEIPYAISNTFGFGGHNAVLAFKRWENR

SEQ ID NO: 45130 - protein, 544 aa, Candida albicans SC5314
MRLNSVALLSLVATALAAKAPFKIDFEVRRGESKDDLSPEDDSNPRFVKRDGSLDMTLTNKQTFYMATLKIGSNEDENRVLVDTGSSDLWVMSHDLKCVSAPNSKRNERSFGHGTGVKLNERELMQKRKNLYQPSRTIETDEEKEASEKIHNKLFGFGSIYSTVYITEGPGAYSTFSPFVGTEGGSGGSGGSNTCTSYGSFNTENSDTFKKNNTNDFEIQYADDTSAIGIWGYDDVTISNVTVKDLSFAIANETSSDVGVLGIGLPGLEVTTQYGYTYQNLPLKLKADGIIAKSLYSLYLNTADAKAGSILFGAIDHAKYQGDLVTVKMMRTYSQISYPVRIQVPVSKIDVESSSGSTTNILSSTTGVVLDTGSTLSYVFSDTLQSLGKALNGQYSNSVGAYVVNCNLADSSRTVDIEFGGNKTIKVPISDLVLQASKSTCILGVMQQSSSSSYMLFGDNILRSAYIVYDLDDYEVSLAQVSYTNKESIEVIGASGITNSSGSGTTSSSGTSTSTSTRHSAGSIISNPVYGLLLSLLISYYVLV

SEQ ID NO: 45131 - protein, 489 aa, Mycobacterium tuberculosis H37Rv
MSAASQRVGAFGEEAGYHKGLKPRQLQMIGIGGAIGTGLFLGAGGRLAKAGPGLFLVYGVCGVFVFLILRALGELVLHRPSSGSFVSYAREFFGEKAAYAVGWMYFLHWAMTSIVDTTAIATYLQRWTIFTVVPQWILALIALTVVLSMNLISVEWFGELEFWAALIKVLALMAFLVVGTVFLAGRYPVDGHSTGLSLWNNHGGLFPTSWLPLLIVTSGVVFAYSAVELVGTAAGETAEPEKIMPRAINSVVARIAIFYVGSVALLALLLPYTAYKAGESPFVTFFSKIGFHGAGDLMNIVVLTAALSSLNAGLYSTGRVMHSIAMSGSAPRFTARMSKSGVPYGGIVLTAVITLFGVALNAFKPGEAFEIVLNMSALGIIAGWATIVLCQLRLHKLANAGIMQRPRFRMPFSPYSGYLTLLFLLVVLVTMASDKPIGTWTVATLIIVIPALTAGWYLVRKRVMAVARERLGHTGPFPAVANPPVRSRD

SEQ ID NO: 45132 - protein, 409 aa, Zea mays
MSALGTLSGGAAGVSGLLRLRRRAAPAPAIAAPSHLPAGTVKCAAAVPDAAPIVWGRQLRPALLLPAALLPSLQPARRHTLQPPAAAAESAGEAKSVGFLEKYPALVTGFFFFMWYFLNVIFNILNKKIYNYFPYPYFVSLIHLVVGVVYCLISWSVGLPKRAPINGTLLKLLFPVALCHGIGHITSNVSFAAVAVSFAHTIKALEPFFSAAATQFILGQQVPFSLWLSLAPVVIGVSMASLTELSFNWTGFINAMISNISFTYRSIYSKKAMTDMDSTNVYAYISIIALIVCIPPALIFEGPKLMQHGFSDAIAKVGLTKFVSDLFLVGLFYHLYNQIATNTLERVAPLTHAVGNVLKRVFVIGFSIIVFGNKISTQTGIGTSIAIAGVAMYSYIKAKIEEEKRKKSA

SEQ ID NO: 45133 - protein, 422 aa, Staphylococcus aureus subsp. aureus MRSA252
MKNLILSVQHLLAMYAGAILVPIIVGTSLKFTPEQIAYLVTVDIFMCGVATFLQANKVTGTGLPIVLGCTFTAVAPMILIGQTKGIDVLYGSLFLSGILVIIIAPFFSHLVKFFPPVVTGSVVTIIGINLMPVAMNYLAGGQGAKDYGDVKNILLGLMTLIIILVLQRFTTGFIKSIAILIGLVLGTIGAGLLGMVDINQVNHAGWLGIPVPFKFSGFSFDVTSTLVFFIVAIVSLIESTGVYHALSEITGKKLERKDFRKGYTAEGLAIVLGSIFNSFPYTAYSQNVGLVSLSGAKKNNVIYGMVVLLLICGCIPKLGALANIIPLPVLGGAMIAMFGMVMAYGVSILGHIDFKNQNNLLIIAVSVGLGTGISAVPQAFKGLGEQFAWLTQNGIVLGAISAIILNFFFNGIKYKQTEENVK

SEQ ID NO: 45134 - protein, 340 aa, Bifidobacterium longum DJO10A
MTTVLVTGGAGFIATHTDIELLNKGYDVISVDNYGNSSPVALERVEQITGKPVKRYDGDVRDEALMERVFAENNIDWVIHFAGLKAVGESVAKPIEYYDNNLYSTLVLLKVMKKHNVKKIIFSSSATVYGTPKELPITEETPTGGTTNPYGTSKLFQEQILRDVHVADPSWTIVLLRYFNPVGAHESGLLGEDPKGIPANLTPYVAKVAVGELKEVQVYGDDYDTPDGTGVRDYIHVVDLAKGHVAVIDHIDKEGVFVYNLGTGHGYSVLEVIKAYEKAAGHPIPYAIKPRRPGDIAACYADASKAEKELGWKAELTIDDMAASSLNWQTKNPNGFRDAE

SEQ ID NO: 45135 - protein, 274 aa, Glycine max
  misc_feature (223)..(223): Xaa can be any naturally occurring amino acid
  unsure (1)..(274): unsure at all Xaa locations
MLAVFSGEVVEVPAELVAAGSRTPSPKTRASELVKRFLAGAEPAVSVELGSLGNLAYSHANQSLLLPRSFAAKDEIFCLFEGVLDNLGRLSQQYGLSKGGNEVLLVIEAYKTLRDRAPYPASFMLSQLTGSYAFVLFDKSTSSLLVASDPEGKVPLFWGITADGCVAFSDDIDLLKGSCGKSLAPFPQGCFYWNALGGLKSYENPKNKVTAVPADEEEICGAXPSWWKGLPLSRHFSRRFSRLRRWAKQATPFVWWWCNIMQQGACATLLCDLM

SEQ ID NO: 45136 - protein, 114 aa, Oryza sativa
QWLLVGDGAAAAAAEPNLVVSFGEMLIDFVPDVAGVSLAESGGFVKAPGGAPANVACAISKLGGSSAFVGKFGDDEFGHMLVDILKKNGVNAEGCLFFKHARSALLCVTFKSFS

SEQ ID NO: 45137 - protein, 431 aa, Bartonella henselae str. Houston-1
MSKNKAHITVNDKKIELSVRKGTLGPDVIEIASLYKETDTFTYDPGFTSTASCESKITYIDGNEGILLYRGYPIDQLAEKGDFLESCYLLLYGELPTKQEKIDFDRCIMQHTMVHEQFARFFHGFRRDSHPMAVMIACLGAMSAFYHDSIDITDPQQRMIASIRLISKVPTLAAMAYKYSIGQAFVYPRNDLSYAANFLRMCFSVPCEEYKINPVLTRAMDRIFTLHADHEQNASTSTVRLAGSSGANPFACIAAGVACLWGPAHGGANEACLKMLQEIGSVERIPEFIARAKDKNDSFRLMGFGHRVYKNYDPRAKIMQQTCHEVLKELNIQNDPLLDIAITLENIALNDEYFIEKKLYPNVDFYSGITLKALGFPTEMFTVLFALARSVGWVAQWKEMIEDPAQKISRPRQLYTGYAAREYIPIDKRVN

SEQ ID NO: 45138 - protein, 379 aa, Lactobacillus plantarum WCFS1
MQDEMLGIILAGGQGTRLGKLTKDTAKPAVPFGGRYRIIDFTLSNCANSGVNTVGVITQYQPLELNAHIGSGASWGFDSLNGGVTVLQPYSSSEGEKFFQGTAHAIYQNIEYIDQQDPKYLLVLSGDHIYKMDYDAMLKYHQEKKASLTVGVIHVTNEEAKRFGMMNTDATDRIIEFEEKPEHPKSDKASMGIYIFNWPTLRDYLVKSYATDKSLEDFGKNVIPSYLANNESVYAYAFKGYWRDVGTIKSLWQANMEFLSPHNRLNIGDRYWRIYSKAEVLPPMFLTETSQVNNAMVVDSCYVAGEIDHSILSQRVSVGMGSRVVDSMIMPGATIGKNVVIDHALIGEDAVIGDDAQIIGTTDKIAVVGYHETMGVEQP

SEQ ID NO: 45139 - protein, 390 aa, Lactobacillus plantarum WCFS1
MRREQVSAIINLLEPSDALQPLTAVRPVGMLPFGGRYRLVDFQLSSVINAGIQNVMVTVPRSGRSVADHLRSGRDWSLNTIRGGLFLSPYNDLKLVAPEKKAALLHHYYDNSIQFLKCSQSEYSVVMSTRNVGNIDLKALLRYHEERNSPVTAVYKRVDPASLIPENTILQLTAKGEATAVVPMSKAKISPKTKQVAKSMAIYLMSTVDLIELLQSANQRGDMISLEELMRQAVIQHNANAFEYTGFQANIHDINSYFAANMAVLDEANFRALFYSSRRIYTKVKNEIPTFFATGSQCRDSLCGTGGYIEGQLDHSVIFRDVLINRDSQVKNAIIMQGARIGAGCKLENVIIDKDAVIGPNLVLKGTSTTPLVISKGQHVFQQAEVAVHD

SEQ ID NO: 45140 - protein, 338 aa, Ranunculus acris
MTGKIKIGINGFGRIGRLVARVALARDDVELVAVNDPFITTDYMTYMFKYDTVHGQWKHHELKVKDEKTLLFGEKPVTVFGCRNPEEIPWGETGAEFVVESTGVFTTKEKASAHLKGGAKKVVISAPSADAPMFVVGVNHTEYKSDIDIVSNASCTTNCLAPLAKVINDRFGIVEGLMTTVHAMTATQKTVDGPSSKDWRGGRAASFNIIPSSTGAAKAVGKVLPALNGKLTGMAFRVPTVDVSVVGLTVRLEKKATYADIKAAIKEESEGKLKGILGYTEDDVVSTDFIGDNRSSIFDAKAGIALNDNCVKLVSWYDNEWGYSSRVVDLIVHMSKTQ

SEQ ID NO: 45141 - protein, 605 aa, Lactobacillus plantarum WCFS1
MQVTYNSFLPTYKTPFGAVTRQTPVQFTISVQTVTPVKQIDLCVAHDGQWDDEQALPLHPISPTMYTATFIPTQVGLYFYYFRIETATMTAYYGCVDGGYGGPGVQYVLREHVQMYQLTILKAVETLPQWYREGVAYQIFVDRFNNGNADGHVNAPKPNSFIYGQLTDRPLYVRDEHRAILRWDFYGGNLRGISAKIPYLQRLGVTIIYLTPIFEASSNHRYDTGDYLKIDPVVGDLTDFDNLVAAVHRAGMRLILDGVFNHVGVDSKYFNQAGHYPTVGATQSTTSPYYPWFTFIHYPHDYDSWWGIRDLPTVDKDDPTYRDFIFGKPDSVIDYWTQRGVDGWRLDVADELPDDFIAGIRRTLDRYPDKVLIGEVWEDASHKLAYGMRRHYLEGGGLQAVMNYPLRRLIIHVLNGTLTPAEWWRELMTLKENYPATTFRFNFNNIGSHDTPRILTMLAEDRQRLRLAVQLLLTLPGVPCLYYGDEALMMGGKDPDNRAFYPWQDADQAQVQFVADWANWRQRHPWLNTAHFVPFYLADYGIGYLYWQADQTVMVIVNVTTEPRTMTSHDLKLSGVPIKLAQAIQCCLVTQTLGGEQLRLIENFT

SEQ ID NO: 45142 - protein, 315 aa, Helianthus tuberosus
MSISCSDCFSDLLCCEDSGILSGDDRPECSYDFEYSGDFDDSIAEFIEQERKFVPGIDYVERFQSQVLDASAREESVAWILKVQRFYGFQPLTAYLSVNYLDRFIYCRGFPVANGWPLQLLSVACLSLAAKMEETLIPSILDLQVEGAKYIFEPKTIRRMEFLVLSVLDWRLRSVTPFSFIGFFSHKIDPSGMYTGFLISRATQIILSNIQEASLLEYWPSCIAAATILCAASDLSKFSLINADHAESWCDGLSKEKITKCYRLVQSPKILPVHVRVMTARVSTESGDSSSSSSSPSPYKKRKLNNYSWIEEDKR

SEQ ID NO: 45143 - protein, 357 aa, Helianthus tuberosus
MAILSPYSSSFLDTLFCNEQQDHEYHEYEYEDEFTQTTLTDSSDLHLPPLDQLDLSWEHEELVSLFTKEQEQQKQTPCTLSFGKTSPSVFAARKEAVDWILKVKSCYGFTPLTAILAINYLDRFLSSLHFQEDKPWMIQLVAVSCLSLAAKVEETQVPLLLDLQVEDTKYLFEAKNIQKMELLVMSTLKWRMNPVTPISFLDHIVRRLGLTDHVHWDFFKKCEAMILCLVSDSRFVCYKPSVLATATMLHVVDEIDPPNCIDYKSQLLDLLKTTKDDINECYELIVELAYDHHNKRKHDANETTTNPVSPAGVIDFTCDESSNESWELNAHHFREPSFKKTRMDSTIRVRVWFTYKL

SEQ ID NO: 45144 - protein, 594 aa, Thermosynechococcus elongatus BP-1
MSNQPLQRRTKIVATIGPAVSHPDKLRAIIQAGATTLRLNFSHGTHDDHQRSIRLIRQISYELGQPVGILQDLQGPKIRLGRFEHGSISLKRGDRFTLTSRPILGNQHISSITYPPLAQEVPAGATILLDDGRVEMLVEEVDKEAGELHCQVIVGGTLSNAKGVNFPGVYLSIKALTEKDREDLMFGLNQGVDWVALSFVRNPQDVLEIKELIANAGKQVPVIAKIEKHEAIEQMDAILSLCDGVMVARGDLGVELPAEDVPILQKRLIAAANRLGIPVITATQMLDSMVKSPRPTRAEISDVANAILDGTDAVMLSNETAMGEYPVEAVKMMATIAARIDNQPQLRQPPGAESTAVRSIPSAISQAVGQVAAQLHAKAIITQTKTGATARNVSKFRPQIPILAATPHIEVARRLQLVWGVEPLLTLDHPSMRESFQAAINAAQERGFLEEGDLVVMTAGTLQGVSGSTDMIKVELVTSVMGRGCGIGHGSVSGPARVVRQGMPVRTFNRGEILVAERTSAELVEVIRKAAGIITEEDSLTSHAAVLGLRLGIPVIVGVKNATRLIREGTILTMDVERGVVYSGARNGGERSPE

SEQ ID NO: 45145 - protein, 645 aa, Magnaporthe grisea 70-15
MAKARSSFLGSSSSTPRANDNDEDVGLLASHNQDVAHAAAAITSPRSVPGDPEQQQQQQHQQTHQQTSDSKPPSRRPQSLQNTERRPSALHSPSLTGESRTPRTPNRVRFDLQPIVVGGGVDAATANNGRRTSNGSAPGGPGQGLGGEFNHPLLALSSPSSRSSFDSYDSEFGVDSEPENAETERRLPLLTNIEAPSVSLANSGAEWANGGAEWAEDHNRPKSGLRAAFMNMANSIIGAGIIGQPYAFKNAGLLAGVFLLISLTVVVDWTICLIVINSKLSGANSFQGTVERCFGKPGLIAVSVAQWAFAFGGMVAFGVIVGDSIPHVFLAIWPDLRNIPVLGLLADRRAVIVIFTLGISYPLTLYRDISKLAKASTFALVSMLVIVFTVVIQGLLTPKELRGSFDTSLLTVNTGIAQAIGVISFAFVCHHNSLLIYGSLEKPTIDRFSRVTHYSTGVSMLACLLMALAGFLTFGDKTLGNVLNNFPADNTMVTIARLCFGLNMLTTLPLEAFVCREVMFNYYFPGDPFNLNLHLIFSSALVVSAMALSLMTCDLGVIFELVGSTSACAMAYILPPLCYIKLASRSWRTYCAWAVVVFGCLVFVVSLFQSLEKIITGNQAVLVVHRGLDTTEHSCLLWYFMPAST

SEQ ID NO: 45146 - protein, 223 aa, Glycine max
MPHFSLSPLSCAPSPLPPRRRIFLAPPRAAASSATDAASSSTSSSSSASNFAPKVVVTRERGKNAKLIAALAKHDNAFDWVVITSPEAGSVFLEAWRASGMPHVKIGVVGAGTASIFKEALQSSNRSLDIAFVPSKATGKVLATELPKIGSKCTVLYPASAKASNEIEEGLSNRGFEVTRMNTYTTVPVQHVDHTVLKIALAAPVVTVASPSSIRAWKNLLSD

SEQ ID NO: 45147 - protein, 416 aa, Burkholderia fungorum LB400
MPAVKPILKSNKLLNVCYDIRGPVLEHAKRLEEEGHRIIKLNIGNLAPFGFDAPDEIIQDMILNLPGSSGYSDSKGVFAARKAIMHYTQQKGVHGVELDDIYIGNGASELIVMALQGLLNDGDEVLLPAPDYPLWTAGVSLSGGTPVHYICDESNSWMPDLDDIRAKITPNTRALVVINPNNPTGALYSDELLLGLIEIARQHGLVIFADEVYDKIVYDGKKHTSMAALSEDVLTVTFNSLSKSYRSCGYRAGWMFISGLTAGENRRHAKDYFEGLGILASMRLCPNVPGQYAIQTALGGYQSINDLIVPSGRLYKQRELAYDMLTAIPGVSCVKPEAALYMFPRLDPKIYPIQDDQQFILDLLLEERVLLVQGTGFNWPTPDHFRVVFLPNVDDLADSINRIARFLDGYRKRHTA

SEQ ID NO: 45148 - protein, 332 aa, Thermobifida fusca YX
MGADTSNKPEFKRSPSHFVDRITADGSEGWPVEAGRYRLIVSRACPWANRAMIARRLLGLESAISLAVADPIQDERSWRFTLDPDGRDPVLGIRFLAEAYYARDPEYTGGISVPAIVDIPSGKLVTNDYLHIPANFATEWRSLHREGAPDLYPEPLRDEIDEISEVIFRDVNNGVYVCGFARTQQTYERAFTALFTRLDALSERLSRQRYLVGDSITVADIALFVTLVRFDAVYHGHFKCNRNKLTEMPVLWAYARDLFQTPGIGDTVDFDHIKRHYYVVHRDINPSGIVPLGPDLSGWLTPHGREELGGRPFGDGTPPGPPPEAERIPAQW

SEQ ID NO: 45149 - protein, 58 aa, Cryptococcus gattii
MLTSTPNQPSQKTFIVKQKLAKKARQNRPLPQWFRLKTDNKIQYNAKRRHWRRTKLNL

SEQ ID NO: 45150 - protein, 195 aa, Amylomyces rouxii
MAEIRRKLVIVGDGACGKTCLLIVFSKGTFPEFYVPTVFENYVADVEVDGKHVELALWDTAGQEDYDRLRPLSYPDSHVILICFAVDSPDSLENVQEKWISEVLHFCQGLPIVLVGCKKDLRNDPGTIEELRRNSQKPVSSEEGASIAQRISAYKYLECSAKTGEGVREVFEHATRAALMVSKKKKSKSGVCNLL

SEQ ID NO: 45151 - protein, 354 aa, Pseudomonas denitrificans
MTTARANQGKIPATVITGFLGAGKTTMIRNLLQNADGKRIGLIINEFGDLGVDGDVLKGCGAEACTEDDIIELTNGCICCTVADDFIPTMTKLLERENRPDHIIIETSGLALPQPLIAAFNWPDIRSEVTVDGVVTVVDSAAVAAGRFADDHDKVDALRVEDDNLDHESPIEELFEDQLTAADLIVLNKTDLIDASGLKAVRDEVSSRTSRKPTMIEAKNGEVAAAILLGLGVGTESDIANRKSHHEMEHEAGEEHDHDEFDSFVVELGSIADPAAFIDRLKGVIAEHDVLRLKGFADVPGKPMRLLIQAVGARIDQYYDRAWGAGEKRGTRLVVIGLHDMDEAAVRAAITALV

SEQ ID NO: 45152 - protein, 478 aa, Nicotiana tabacum
MAAVNGVGISWPSKLTQGQRPKLVFSPSPRRCTPSSSTIKMTASVDEKKKTFTLQKSEEAFSKAKELMPGGVNSPVRAFKSVGGQPIIIDSVKGSRMRDIDGNEYIDYVGSWGPAIIGHADDEVLAALAETMKKGTSFGAPCLLENTLAEMVISAVPSIEMVRFVNSGTEACMGVLRLARAFTGRPKIIKFEGCYHGHADPFLVKAGSGVATLGLPDSPGGPKAATSDTLTAPYNDISAVESLFEEHKGEVAAIILEPVVGNAGFIQPNLDFLAAIRKITKENDALLIFDEVMTGFRLAYGGAQEYFGITPDLTTLGKIIGGGLPVGAYGGRRDIMEMVAPAGPMYQAGTLSGNPLAMTAGIHTLKRLQGPGTYEYLDKITGELTQGILDAGKKTGHAMCGGYIRGMFGFLFAEGPVNNFSDAKKSDTEKFGRFYRGMLEEGVYFAPSQFEAGFTSLAHTSEDIQKTVAAAEKVLKQI

SEQ ID NO: 45153 - protein, 220 aa, Methanosarcina barkeri str. fusaro
MLIGGFSGSGKTTLIRKLVEHLEKQGQTVAVIADEIGEIGIDGDTIAEGEVETREITSNCVCCPLKISMEYTLRNLIASYNPDTIIIEPTGITPPGQIKRNIENMGIPGITFAPIVNLVDAGRLSQETGELQNFMKNQIGEAEILGINKVELINNREELLEICLFLRKLNSKARMVHFSARQGGENLDKLLGLLEENSRRKITQGRENSIQMSGVSAYSS

SEQ ID NO: 45154 - protein, 478 aa, Nicotiana tabacum
MAAVNGVGISWPSKLTQSQRPKLVFSPSPRRCTPSSSTIKMTASVDEKKKTFTLQKSEEAFSKAKELMPGGVNSPVRAFKSVGGQPIIIDSVKGSRMRDIDGNDYIDYVGSWGPAIIGHADDEVLAALAETMKKGTSFGAPCLLENTLAEMVISAVPSIEMVRFVNSGTEACMGVLRLARAFTGRPKIIKFEGCYHGHADPFLVKAGSGVATLGLPDSPGVPKAATTDTLTAPYNDISAVESLFKEHKGEVAAIILEPVVGNAGFIQPNPDFLAAIRKITKENDALLIFDEVMTGFRLAYGGAQEYFGITPDLTTLGKIIGGGLPVGAYGGRRDIMEMVAPAGPMYQAGTLSGNPLAMTAGIHTLKRLQGPGTYDYLDKITGELTQGILDAGKKTGHAMCGGYIRGMFGFFFVEGPVNNFSDAKKSDTEKFGRFYRGMLEEGVYFAPSQFEAGFTSLAHTSEDIQRTVAAAEKVLKQI

SEQ ID NO: 45155 - protein, 168 aa, SYNECHOCOCCUS SP. WH 8102
MPLSAVYLSRRSLLLGSIAGVFGSSWWPRPVLAASKAADATWDLTPDQWRERLSSEAYDVLRNEGTERPFTSPLNAEKRSGTYHCAGCDLSLFSSEAKFDSGTGWPSFWQPLQGAIATKVDFKLIIPRTEYHCSRCGGHQGHVFNDGPRPTGKRYCNNGVALVFRPAG

SEQ ID NO: 45156 - protein, 309 aa, Streptococcus pyogenes serotype M3
MIYLAEGCFWGVEEYFSQVDGVLDAVSGYANGRGDTTNYQLIHQTGHAETVEVTYDANRISLKELLLHFFRIIDPTSLNKQGNDRGSQYRTGIYYTDKADLAIIDEVFKEKAKDYKKKIVVEKAPLKHFIKAEEYHQDYLKKNPNGYCHIDINQATYPVIDESKYPKPSATEIKAKLSADEYRVTQKNETEKAFSNRYWDSFDAGIYVDVVTGEPLFSSKDKFESGCGWPSFSRPISPDVVRYKEDKSFNMTRTEVRSRSGNSHLGHVFTDGPKDQGGLRYCINSLSITFIPKADMEAKGYGYLLSSVE

SEQ ID NO: 45157 - protein, 463 aa, Bartonella henselae str. Houston-1
MGSFDFDLFVIGSGSGGVRAARLAGALGKRVAIAEEYRIGGTCVIRGCVPKKLYFYASQYAQEFSKSIGFGWKYADPIFNWEKLVAAKNKEISRLEGLYREGLQNSNVHIYESRAVFVDEHTLELSVTGERISAEKILIATGAKIVSNSAIKGSDLCLTSNEIFDLEKLPKSIVIVGGGYIGVEFANIFHGLGVKTTLLHRGDLILRNFDYDLRQLLNDAMVAKGISIIYEATVSQVQSTENCYNVVLTNGQTICADRVMLATGRVPNTTGLGLERAGVKVNEFGAVVVDEKMTTNVSHIWAVGDVTGHIQLTPVAIHDAMCFVKNAFENTSTTPDYDLITTAVFSQPEIGTVGLSEEDALHRYKRVEIYRTVFRPMRNVLSGSPEKMFMKLVVDGESRIVVGAHVLGENAGEIAQLIGISLKGKLTKDIFDKTMAVHPTMSEELVTMYKPSYVYENGEKLDN

SEQ ID NO: 45158 - protein, 159 aa, Triticum aestivum
GPTADLRLRMQKCMQTNAAVFRTAETLQEGCKQMDSIYKELKDLKVSDQSLVWNSDLIESLELQNLLLNGMQTIYSAENRKESRGAHAREDFKDRIDEYDYSKPLEGQTPKPIEQHWRKHTLTRMDPETGKVTITYRPVIDHTLDEKECKTVPPAIRSY

SEQ ID NO: 45159 - protein, 635 aa, Saccharomyces cerevisiae
MAPVTIEKFVNQEERHLVSNRSATIPFGEYIFKRLLSIDTKSVFGVPGDFNLSLLEYLYSPSVESAGLRWVGTCNELNAAYAADGYSRYSNKIGCLITTYGVGELSALNGIAGSFAENVKVLHIVGVAKSIDSRSSNFSDRNLHHLVPQLHDSNFKGPNHKVYHDMVKDRVACSVAYLEDIETACDQVDNVIRDIYKYSKPGYIFVPADFADMSVTCDNLVNVPRISQQDCIVYPSENQLSDIINKITSWIYSSKTPAILGDVLTDRYGVSNFLNKLICKTGIWNFSTVMGKSVIDESNPTYMGQYNGKEGLKQVYEHFELCDLVLHFGVDINEINNGHYTFTYKPNAKIIQFHPNYIRLVDTRQGNEQMFKGINFAPILKELYKRIDVSKLSLQYDSNVTQYTNETMRLEDPTNGQSSIITQVHLQKTMPKFLNPGDVVVCETGSFQFSVRDFAFPSQLKYISQGFFLSIGMALPAALGVGIAMQDHSNAHINGGNVKEDYKPRLILFEGDGAAQMTIQELSTILKCNIPLEVIIWNNNGYTIERAIMGPTRSYNDVMSWKWTKLFEAFGDFDGKYTNSTLIQCPSKLALKLEELKNSNKRSGIELLEVKLGELDFPEQLKCMVEAAALKRNKK

SEQ ID NO: 45160 - protein, 340 aa, Zea mays
  misc_feature (189)..(189): Xaa can be any naturally occurring amino acid
  unsure (1)..(340): unsure at all Xaa locations
MEKKKAAVPLVCHGHSRPVVDLFYSPVTPDGYFLISASKDSNPMLRNGETGDWIGTFEGHKGAVWSCCLDTNALRAASGSADFSAKVWDALTGDELHSFEHKHIVRACAFSKDTHLLLTGGMEKILRVYDLNQPDVAPKELDKSPGSVRTAAWLHSDQTILSSCTDMGGVRLWDVRTGKIVQTLETKLXITSAEVSQDGRFITTADGSSVKFWDANHFGLVKSYDMPCNVESASLEPKSGSKFVAGGEDLWVHVFDFFTGEEIACNKGHHGPVHCVRFAPCGESYASGSEDGTIRIWQLSPANADDNEVANANGKTTAGVNEVTTKIEGFHIPKEGQTEG

SEQ ID NO: 45161 - protein, 591 aa, Bacillus cereus ATCC 10987
MLWRSVVGKLWMTILLLVSFVLGFVAILLSQFFRTYYVDMSEARLQKVATSVSELIEEGADVKTIENIAYKFSDPLSRIIIVEDGKEISSSPKQEGLVTLTMDDLKEDKELAAVFTDKKEIKNNIRKASNSRKNKNTENDIMIVGKPVQSKNQSAVFVYESLQVPIQGMERTTDFIFLSAGIAIILTTFFAFFLSTRITAPLRKMREVAFEVSRGKFDAKAPMVSQDEIGELATALNQMGKQLKFNMNALQQEKEQLASILSSMADGVITLNQEGEVVVINPPAEHFLQVWQEEKEIELSKKLPSELVELFHLVVESEQQQVVEINLQKGNYVVLMTPLYNQTKIRGAVAVLRDMTEERRLEKMRQDFIANVSHELRTPMVMLQGYSEAILDDIVQTKEEINEFVQIIYDESVRLGKLVNELLDLARMESGNVELHIGEVDIHPFVEKIGRKFQGIAKDKEVALTVDFKNPIEQYPFDADRMEQVLTNLIDNAIRHTNAGGHVTLVIDTKNNGLIFEVQDSGAGIPEEDIPFLFDRFYKADKARTRGKKGGTGLGLAIAKNIVQGHDGKIAVSSVVGEGTTFSVYLPNRII

SEQ ID NO: 45162 - protein, 464 aa, Bartonella henselae str. Houston-1
MVTNELKRGMSKRQVIFLALGSAIGTGLFYGSAQAIKLAGPSVLIAYCIAGLAVFMVMRALGEMIIHNPLPGSFARYAANYISPLAGFLTGWTYVFEMILVGLADITAFATYMAFWYPDVAPWIWALSITLIITGINLAAVEVYGELEFWLSSIKIIAIIAIIILGIAIIFCGLGTSTISSAVSVDNLWKNGGIFPNGWFGFFACFSVVIFAFGGIEIIGMAVMEVQNPHQTISKAINSTPIRILLFYIMTLTILMALYPWNAIGLMESPFVSIFESLGISSAANILNVVVVTAAISAMNSGMYGAGRMIYGLSQESYALKKFQYLSKNGIPIFVILLIFIIFLLGVILNYFYHDRLFFLIAAMATFATVFVWVMILLSQIFMRLKMSKEMQCSLKFPIPFWPIGSIFSILFMVFIFILLWFFDDTRPILIVGASWISWLIICFYALKLFNFWKKKQYQSMNKD

SEQ ID NO: 45163 - protein, 614 aa, Ralstonia metallidurans CH34
MRRDRLSGILLPNLPRRRFVQGLAAGGVMAGLSALGGTAWAQSSGLPESASSGTAPVLTGTEFDLVIAESVVNFTGTPRVATTINGMLPGPTLRWRQGDTVTIRVTNRLHEHTSIHWHGIILPFQMDGVPGISFAGIAPGETFTYQFKVEQTGSYWYHSHSGFQEMTGVYGGIVIDPATGVDGVRADRDYTILLSDWTDEDPMRVLSKLKVQSDYYNYIKPTVFDFFRDVSNDGVKSAFEKRKMWNEMRMNPTDLADLSGATLTYLTNGVTPAGNWTGLFKPGEKVRLRFINGSGNTFYDVRIPGLKLKVIQVDGQNLEPVSVDEFRFGPGETYDVLVEPRDDAYTIFSQSMDRTGYARGTLAVRAGLNAQVPAVDKPEWLTMSDMMGGMGGMGGMDHSKMDMGGMNQGSMAGMNHGAMTMDHSQHAMGGMAMDASLKVPSTKARHAKTEYGANTDMRVDMARTNLDDPGIGLRNNGRRVLTLADQHTIGGPLDKRGPAREVELHLTGNMERYSWSIDGVEYGKSTPVRFKYGERLRVILHNDTMMTHPMHLHGMWSELESPDGSFQARRHTIPVQPAQRISFLVTADALGRWAWHCHLMLHMDAGMFREVLVA

SEQ ID NO: 45164 - protein, 294 aa, Helianthus tuberosus
MEQYEKVEKIGEGTYGVVYKARDKVTNETIALKKIRLEQEDEGVPSTAIREISLLKEMQHGNIVRLQDVVHSDKRLYLVFEYLDLDLKKHMDSCPEFSKDPRLVKTFLYQILRGIAYCHSHRVLHRDLKPQNLLIDRRTNALKLADFGLARAFGIPVRTFTHEVVTLWYRAPEILLGSRHYSTPVDVWSVGCIFAEMVNQRPLFPGDSEIDELFKIFRIMGTPNEETWPGVTSLPDFKSAFPKWSSKDLATVVPNLEKAGLDLLCKMLWLDPSKRITARTALEHEYFKDIGFVP

SEQ ID NO: 45165 - protein, 277 aa, Arabidopsis thaliana
LSLLFTLTVSTTTLFSPVFAGTFDTEFDITWGDGRGKVLNNGELLTLSLDRASGSGFQTKKEYLFGKIDMQLKLVPGNSAGTVTAYYLKSKGDTWDEIDFEFLGNLTGDPYTMHTNVYTQGKGDREQQFHLWFDPTADFHTYSVLWNPHHIVFMVDDIPVREFKNLQHMGIQYPKLQPMRLYSSLWNADQWATRGGLVKTDWSKAPFTASYRNFRADACVSSGGRSSCPAGSPRWFSQRLDLTAEDKMRVVQRKYMIYNYCTDTKRFPQGFPKECRH

SEQ ID NO: 45166 - protein, 449 aa, GIBBERELLA ZEAE PH-1
MKSRALHQVALRRAILSRPHVTPLAIRSASSVSQRPNSNFVSFPGALKSAFTSNLKFESPESYPALSTYRVVDQHGVVVDESFKPDISNEEVIRLYKDMVFISIMDLIMFDAQRQGRLSFYMVSAGEEAVSIGSSSVLDREDVMFTQYREQGVFKERGFTAKDFMGQLFGNVRDPSRGRSMPVHYGSKELNIHSVSSPLATQLPHASGAAYALKMQKLQNPSSKARVAVAYFGEGAASEGDFHAALNIAATRACPAIFICRNNGYAISTPTLDQYRGDGIASRGIGYGIDTIRVDGNDIWAVREVVKKAREMALEDGGKPILIEAMTYRVSHHSTSDDSFAYRARVEVEDWKRRDNPITRLRKWMEAQGIWDEAKEKEARTDLRKEILKAFSEAEREKKPPMRSMFEDMYEEMTDDLKAQMKELKEMLDKYPEEYDVSEFEGGKDTLKP

SEQ ID NO: 45167 - protein, 321 aa, Bradyrhizobium japonicum USDA 110
MMDSNRPNTYKAAVVQAASDPTSSLVSAQKAAALIEKAAGAGARLVVFPEAFIGGYPKGNSFGAPVGMRKPEGREAFRLYWEAAIDLDGVEVETIAAAAAATGAFTVIGCIEREQGTLYCTALFFDGARGLVGKHRKLMPTAGERLIWGFGDGSTMPVFETSLGNIGAVICWENYMPMLRMHMYSQGISIYCAPTADDRDTWLPTMQHIALEGRCFVLTACQHLKRGAFPADYECALGADPETVLMRGGSAIVNPLGKVLAGPCFEGETILYADIALDEVTRGKFDFDAAGHYSRPDVFQLVVDDRPKRAVSTVSAVRARN

SEQ ID NO: 45168 - protein, 365 aa, Arabidopsis thaliana
MLVKPSIISGLVRLTSHSPSSSSSVLRRQEFLVRTLCGSPIIRAMSSTSEADAESVLRTVTPSLDLKRHKGQAGKIAVIGGCREYTGAPYFAAISALKIGADLSHVFCTKDAAPVIKSYSPELIVHPVLEESYSISQLSEEDKREVQDKVLGEVGKWMERFDCLVIGPGLGRDPFLLECVSIIMLLAKKSNVPFVIDGDGLFLVTNSIDLVHSYPLAVLTPNVNEYKRLVQKVLNCEVDEQNAEDQLRSLAKQIGGVTILRKGKSDLISNGETVKSVSIYGSPRRCGGQGDILSGGVAVFLSWAQQLKSDPESPSENPAILGCIAASGLLRKAASLAFTKHKRSTLTSDIIECLGESLEDICPAS

SEQ ID NO: 45169 - protein, 395 aa, Glycine max
MDSMLLRSFPNINNASSLATTGSYLPNASWHNRKIQKEYNFLRFRWPSLNHHYKSIEGGCTCKKCNIKFVVKATSEKSFESEPQAFDPKSILDSVKNSLDAFYRFSRPHTVIGTALSIISVSLLAVEKISDISPLFFTGVLEAVVAALFMNIYIVGLNQLSDVEIDKINKPYLPLASGEYSFETGVTIVASFSILSFWLGWVVGSWPLFWALFVSFVLGTAYSINVPLLRWKRFAVLAAMCILAVRAVIVQLAFFLHIQTHVYKRPPVFSRSLIFATAFMSFFSVVIALFKDIPDIEGDKVFGIQSFSVRLGQKPVFWTCVILLEIAYGVALLVGAASPCLWSKIVTGLGHAVLASILWFHAKSVDLKSKASITSFYMFIWKLFYAEYLLIPFVR

SEQ ID NO: 45170 - protein, 383 aa, Arabidopsis thaliana
MTTLKTSSFSSLPWDLVEDILARVPATSLKRLRSTCKQWNFLFNDQIFTKMHFDKAEKQFLVLILRLYTVCSMSLDLRGLHDNIDPSIEVKGELSLIDPHCSSRKTFVSKVFHCNGLLLCTTMTGLVVWNPCTDQTRWIKTEVPHNRNDKYALGYGNYKSCYNYKIMKFLDLESFDLEIYEVNSNSWRVLGTVTPDFTIPLDAEGVSLRGNSYWIASHKREEIEEEEEEENEYFINDFLISFDFTTERFGPRVSLPFKCESSWDTISLSCVREERLSLFFQDDGTLKMEIWMTNNITETKTTTMSWSPFLKIDLYTYGHRFGNEVSFLVDEENKVIVCCDEEEDDINDTVYIIGENEYWRKEDIVQRSYRPRMFSYVPSLVQI

SEQ ID NO: 45171 - protein, 390 aa, Petunia x hybrida
MALSTTRTTVSKFLKPLTTAVSTTRHLSTTNTLTIETSLPFTGHNIDPPSRTVETNPNELLTFFKDMAEMRRMEIAADSLYKAKLIRGFCHLYDGQEAVAIGMESAITKKDCIITAYRDHCIFLSRGGTLFECFSELMGRKDGCSKGKGGSMHFYKKDSGFYGGHGIVGAQVPLGIGLAFAQKYSKEDHVTFAMYGDGAANQGQLFEALNMAALWDLPAILVCENNHYGMGTAEWRAAKSPSYYKRGDYVPGLKVDGMDALAVKQACKFAKEHALKNGPIILEMDTYRYHGHSMSDPGSTYRTRDEISGVRQERDPIERIRKLILAHDIATEKELKDIEKEKRKIVDEAIAKAKESAMPDPSELFTNVYVKGFGVEACGADRKEVRATLP

SEQ ID NO: 45172 - protein, 338 aa, Oryza sativa
  misc_feature (87)..(87): Xaa can be any naturally occurring amino acid
  misc_feature (117)..(117): Xaa can be any naturally occurring amino acid
  unsure (1)..(338): unsure at all Xaa locations
MDDSSFFMQWAMDTLHQLPSDSTAAAAYATDVAGDSGAFPSLQALRNASAAGGGGGFRDLTVQVDQVHRANSWSSSDSPGGGAARGXAGWAPDVTGGGGRGHRPMSWNFSAASAQPXTEDSGGGGGGGVVPAPLQAMETTATARAAVKKGGGGGSSSSAAAPGYVQDHIIAERRRREKINQRFIELSTVIPGLKKMDKATILGDAVKYVKELQEKVKTLEEEDGGGRPAAMVVRKSSCSGRQSAAGDGDGEGRVPEIEVRVWERSVLVRVQCGNSRGLLVRLLSEVEELRLGITHTSVMPFPASTVIITITAKASSLSNHPALLCLYICIKLPCVISS

SEQ ID NO: 45173 - protein, 323 aa, Zea mays
MAAGRELVVSFGEMLIDFVPTVAGVSLAEAPAFLKAPGGAPANVAIAVSRLGGGAAFVGKLGDDEFGRMLAAILRDNGVDDGGVVFDSGARTALAFVTLRADGEREFMFYRNPSADMLLTADELNVELIKRAAVFHYGSISLIAEPCRTAHLRAMEIAKEAGALLSYDPNLREALWPSREEARTQILSIWDQADIVKVSEVELEFLTGIDSVEDDVVMKLWRPTMKLLLVTLGDQGCKYYARDFHGAVPSFKVQQVDTTGAGDAFVGALLQRIVKDPSSLQDEKKLVESIKFANACGAITTTKKGAIPSLPTEAEVLQLIEKA

SEQ ID NO: 45174 - protein, 391 aa, Nocardia farcinica IFM 10152
MTSTPATGDQVRVIDSGLPPERYARGWHCLGLVRDFADGRPHQVSAFGTELVVFAGEDGKVNVLNAFCPHMGGNLAHGEVKGNTIACPFHDWRWRGDGKCADIPYARRVPPLARTKAWPTMEISGQLFIWHDPQGRKPPAELTIPEIPTYGDPGWTDWVWHSILVEDSHCREIVDNVVDMAHFFYVHYGMPTYFRNVFEGHTATQLMRSRPRADAVGVSTNTVDPSIESRSDATYYGPSYMIDKLWSAQYAEREEPNIYLINCHYPITPTSFRLQYGVIVEKPVGMDDEAANAMAAAVGRGIAIGFEQDVQIWKNKARIDNPLLCEEDGPVYQLRRWYEQFYVDVEDITPEMTNRFEFEIDTERALQNWQAEVDANLAAGRSAIAPNLVNR

SEQ ID NO: 45175 - protein, 409 aa, Streptococcus agalactiae NEM316
MKKKLVSSLLKCSLIIIVSFAGGAFASFVMNHNDNIPNGGVTKTSKVNYNNITPTTKAVKKVQNSVVSVINYKQQESRSDLSDFYSHFFGNQGGNTDKGLQVYGEGSGVIYKKDGKNAYVVTNNHVIDGAKQIEIQLADGSKAVGKLVGSDTYSDLAVVKIPSDKVSNIAEFADSSKLNIGETAIAIGSPLGTEYANSVTQGIVSSLKRTVTMTNEEGQTVSTNAIQTDAAINPGNSGGALINIEGQVIGINSSKISSTSNQTSGQSSGNSVEGMGFAIPSNDVVKIINQLESNGQVERPALGISMAGLSNLPSDVISKLKIPSNVTNGIVVASIQSGMPAQGKLKKYDVITKVDDKEVVSPSDLQSLLYGHQVGDSITVTFYRGENKQTVTIKLTKTSKDLAKQRANN

SEQ ID NO: 45176 - protein, 486 aa, Corynebacterium efficiens YS-314
MAMSEVPAAAQPGAAPGSSETTSDPNRRQELGTGLRTRHLTMMGLGSAIGAGLFLGTGVGIRAAGPAVLLAYIAAGVIVVLVMQMLGEMAAARPHSGSFSKYAEDAFGHWAGFSLGWLYWFMLIMVMGAEMTGAAAIMGAWFGVDPWIPALVCVVFFAIVNLAAVRGFGEFEYWFAFIKVAVIVVFLIVGVGLIFGLLPGSTFVGTSNFIGDHGFMPNGLSGVAAGLLAVAFAFGGIEIVTIAAAESDQPRRAISLAVRAVIWRISLFYLGSVLVITFLMPYESIDNAETAAESPFTRILDMANIPGAVGLMEAVIVLALLSAFNAQIYATSRLVFAMSRNQDAPRVFSVLSRSGVPTAAVLLSMFFAFVSVALQYFNPAGLLDFLLNAVGGCLLVVWAMIALSQLRLRPKLEHNGEISTVRMWGHPWLGILTLVLLAGLVLLMLGNEGSRSQVFSVAVVYGFLVALSFTTTRSPLRGKRTGLIDR

SEQ ID NO: 45177 - protein, 459 aa, Burkholderia fungorum LB400
MFADVRKIAALAWPVLIGQLAIIAFGVIDTAMVGRYSAVDLAALGLGSSIYISVYIGLTGILTALQPITAQLYGARRYDEIGEEVRQALWLALALTVIGFLILFFPGPVLHLARVPDALHDRTVAYLRILAFGLPAGLAFRVYGSVTNAVGKPRLVMILQIGALLLKVPLNTWFIFGGLGVPALGGPGCALASTTINWGLAVLGMVLLTRVDVFTPFAIFARFCWPVWRRQAAQLRLGIPMGLSYLIEVTSYTFMALFIARFGTTTLAGHQIAGNIGAVLYMTPLSIGIASSTLVAQALGAHRPEAARTLSRHGIMMAVAIACCYAAIVLALRPFIIEGYTPDAQVVAAALPLVLIVACYHLFDALQITTAFVLRAYKVAVVPTVIYAVALWGVGLGGGYALGFDVTGITPEWLTGARGFWVANTASLAIAGIGLLMYWRVVSKRHLRGETALRADSAA

SEQ ID NO: 45178 - protein, 546 aa, Burkholderia cepacia
MAAKDVVFGDSARSKMVEGVNILANAVKVTLGPKGRNVVLERSFGGPTVTKDGVSVAKEIELKDKLQNMGAQMVKEVASKTSDNAGDGTTTATVLAQSIVREGMKYVASGMNPMDLKRGIDKAVAAAVEELKKISKPCTTNKEIAQVGSISANSDSSIGDRIAEAMDKVGKEGVITVEDGKSLADELDVVEGMQFDRGYLSPYFINNPDKQVAVLDNPFVLLHDKKVSNIRDLLPVLEQVAKAGRPLLIIAEDVEGEALATLVVNNIRGILKTVAVKAPGFGDRRKAMLEDIAILTGGQVIAEETGLTLEKATLAELGQAKRIEVGKENTTIIDGAGEAASIEARVKQVRAQIEEATSDYDREKLQERVAKLAGGVAVIKVGAATEVEMKEKKARVEDALHATRAAVEEGIVAGGGVALIRARTAIAGLTGANADQNAGIKIVLRAMEEPLRQIVTNGGEEASVVVAAVAAGKGNYGYNAATGEYVDMVEAGVVDPTKVTRTALQNAASVAGLLLTTDAAVAELPKEDAPMPGGMPGGMGGMGMDM

SEQ ID NO: 45179 - protein, 372 aa, Zea mays
  misc_feature (101)..(101): Xaa can be any naturally occurring amino acid
  unsure (1)..(372): unsure at all Xaa locations
MVKVIQGRPAEMGFRMPAEWEPHEQCWMGWPERPDNWRENAGPAQEVFARTAIAISKFEPVTLCASAKQYPKVHELMEHQTNIRVVEMSMNDSWFRDMGPXFVTHKGDSGIAEQTIAGIDWQFNAWGGIYDDWSLDSDVAKKIVEIERIPRFPQKIILEGGSIHVDGEGTCITTEECLLNPNRNPNMTKLEIENELKDFLGVSKVIWIPRGLYGDEDTNGHIDNMCCFIKPGVILLSWTDDEKDHQYERSVEALSVLSQSVDAKGRQLQVVKIHVPGPLYMTEEEAQGVVSSGHSVPRPAGTRLAASYVNFYIANGGIIAPSFGDRWDEEAYAVLQKAFPDHEVVMVEGGREIALGGGNIHCITQQQPVRLS

SEQ ID NO: 45180 - protein, 515 aa, Halothermothrix orenii
MKLKRLSFFMFVTLLVFISVFPVYANDFEKHGTYYEIFVRSFYDSDGDGIGDLKGIIEKLDYLNDGDPETIADLGVNGIWLMPIFKSPSYHGYDVTDYYKINPDYGTLEDFHKLVEAAHQRGIKVIIDLPINHTSERHPWFLKASRDKNSEYRDYYVWAGPDTDTKETKLDGGRVWHYSPTGMYYGYFWSGMPDLNYNNPEVQEKVIGIAKYWLKQGVDGFRLDGAMHIFPPAQYDKNFTWWEKFRQEIEEVKPVYLVGEVWDISETVAPYFKYGFDSTFNFKLAEAVIATAKAGFPFGFNKKAKHIYGVYDREVGFGNYIDAPFLTNHDQNRILDQLGQDRNKARVAASIYLTLPGNPFIYYGEEIGMRGQGPHEVIREPFQWYNGSGEGETYWEPAMYNDGFTSVEQEEKNLDSLLNHYRRLIHFRNENPVFYTGKIEIINGGLNVVAFRRYNDKRDLYVYHNLVNRPVKIKVASGNWTLLFNSGDKEITPVEDNNKLMYTIPAYTTIVLEKE

SEQ ID NO: 45181 - protein, 967 aa, Glycine max; identical to SEQ ID NO: 1009

SEQ ID NO: 45182 - protein, 336 aa, Vibrio vulnificus YJ016
MNILVTGGSGYIGSHTCIQMIEAGMTPIILDNLYNSKLLVLDRIEQVTGVRPAFYQGDIRDSEILQHVFAQHDIQGVIHFAGLKAVGESVEKPLMYYDNNVSGTLNLVREMDKAGVKSLIFSSSATVYGDPASVPIREDFPTSATNPYGRSKLMVEECLTDFHKANPDWSITLLRYFNPVGAHESGLLGEDPQGIPNNLLPFVAQVAVGRREKLGVFGDDYPTPDGTGVRDYIHVIDLADGHLAALNKVGQQAGLHIFNLGTGQGNSVLEMVAAFEKAAQRPIPYEIKPRRAGDIAECWADPAYAEQVLGWKATRSLETMVVDTWRWQSNNPNGYE

SEQ ID NO: 45183 - protein, 745 aa, Legionella pneumophila str. Paris
MLDRASVVDEQFLKRVLQGDFPQLRSSMSPDTAELDKKTAIEFFDSQIKSRLLDIIARQLKEKGLSFYTIGSSGHEGNAVLGQVFRASDMAFLHYRSGAFFLQRAKQLPGIDGVKDILLSLVAAANDPISGGRHKVFGSVPLNIPPQTSTIASHLPKALGAALSITRARELGLPSKLAPDSVILCSFGDASTNHATSQATLNACSWITQQNYPLPIVFICEDNGIGISVPTPSSWIKSSVSSRPGIHYIECDGLNIADVFAKAQEADYLARVKKQPVFLHMRCVRLLGHAGSDIESQYNTQEEIEQREANDPLLHTAGILYREGWMSLQAMVELYQDNRALIEAKALEAIREPRMSSAEEIMASIVPRVEKKPKYPLPDDNRREQVFAGAYNQLTLKRNLCQQINFALTDLMMQYPNMLIFGEDVGKKGGVYRVTADLQARFGQRRVFDTLLDETTIIGTAIGLAHNGFIPVPEIQFLAYLHNAEDQLRGEASTLSFFSSGQYQNPMVLRIASLAYQKGFGGHFHNDNSIAVLRDLPGVIVACPSNGPDAAKMLRTCMRLAYEEGRVVVFLEPIALYMTKDLYSPGDNGWLFEYPSPDEMISQGEVGVYGEGDTVILTYANGYYLSRQAEKVLREVHNISVKIIDLRWLSPLPKDAILKEIAKAKRILIVDEGRQSGSISEGLMTLLMEEASPRLKIKRITGKDCFIPLGTAWQYLLPSQESIIDAVIALQSDKREKESGRLVVS

SEQ ID NO: 45184 - protein, 447 aa, Emericella nidulans
MREIVHLQTGQCGNQIGAAFWQTISGEHGLDGSGVYNGTSDLQLERMNVYFNEASGNKYVPRAVLVDLEPGTMDCVRAGPFGELFRPDNFVFGQSGAGNNWAKGHYTEGAELVDNVVDVVRREAEGCDCLQGFQITHSLGGGTGAGMGTLLISKIREEFPDRMMATFSVVPSPKVSDTVVEPYNATLSVHQLVEHSDETFCIDNEALYDICMRTLKLSNPSYGDLNHLVSAVMSGVTTCLRFPGQLNSDLRKWAVNMVPFPRLHFFMVGFAPLTSRGAYSFRAVSVPELTQQMFDPKNMMAASDFRNGRYLTCSAIFRGKVSMKEVEDQMRNIQSKNQSYFVEWIPNNIQSALCSIPPRGLKMSSTFIGNSTSIQELFKRVGDQFTAMFRRKAFLHWYTGEGMDEMEFTEAESNMNDLVSEYQQYQDASISEGEEEYAEEEIMEGEE

SEQ ID NO: 45185 - protein, 383 aa, Staphylococcus aureus
MNELEFVTKHRRHLHQHPELSLHEFETTAYIKAFLDSLNIKYDCPLETGVIAYLEGNGSHTIAYRADIDALPILEENDVPYRSQSDHVMHACGHDGHTTALMLFVQRCKDMQDAGQLPQNVVFIFQPAEETGGGANRLIKAGAFDKYPIEAVFGIHVNPFADEGIAVIRDEEITASATEYRFFLTGLSSHVADKEQGHSCGEALQHVLTQISQIQQFHLNGLKRNIVHIGHFKAGEAINTVPSNGYLEGTIRTYDIDDLTIVKNQMHKIAESVKLLFNVDCEVKFAEGYPPTINSPKLRTQIEDALIKADLNVYDKPTPFLFGEDFSFYGQQLAPAYFVFIGTRNEDKGFVTGLHTSHLNFDEKVLINVINFYENLLNNYKEV

SEQ ID NO: 45186 - protein, 711 aa, Glycine max
  misc_feature (181)..(181): Xaa can be any naturally occurring amino acid
  misc_feature (197)..(197): Xaa can be any naturally occurring amino acid
  unsure (1)..(711): unsure at all Xaa locations
LQTVNLRSSEILDHPHTQICNEGRQNALSEILEILTVVCETHNLPLAQTWIPCKHRSVLAQGGGVKKSCSSFDGRCMGKVCMSTTDIAFYIIDAHLWGFREACVEHHLQQGQGVAGRAFLSHGMCFCSNITQFYKTDYPLVHYALMFGLTSCFGICLVSSLTGNDDYVGEFLFSPPLTHMXGGPPPTISYVGPPPPXFQSLKIASGVELEDGSIEIIEATIERVHTRHESIPITPSIKSPPRLDTSPNMGEEVPQDPSEQQILMYCNDMNDGRSLGKNADGIDHMPSIETKNIKKPLERKRGKTEKSISLEVLQRYFAGSLKDAAKSLGVCPTTMKRICRQHGISRWPSRKINKVNRSLSKLKRVIESVQGAEGAFGLNSLSKSPLPIAVGSFPEPSTPNKFSQSASLSIKPSEPQVKENELNASKALEANRQAGMEDQLLGGRTQNLEKVINDKGGYTREVGREPKRTRTRNGSSEDSTNPTSHGSCHDSPPNESSPVKDIFITSNNDQCAGIKRSPESTLQPTINTPSRPTAYPMPDFVAVELQEPFGGMLIEDAGSSKDLRNLCPLVAEVILEDMIPEACGTNLPGPDLSPKLSMGTPNKAVTPFAAMKEMKTVTIKATYREDIIRFRASLTCGIVELKEEIAKRLKLEVGTFDIKYLDDDHEWVLIACDADLQECMDVSRSSGSNIIRVLVHDITSNLGSSCESSGE

SEQ ID NO: 45187 - protein, 373 aa, Methanosarcina mazei Go1
MYLSARHNLFSGNEDRKNMKVMIIGGFLGSGKTTAIQRISRQLSDAGKRTAIIVNEIGEIGLDGDTLNSPGITTRELTSGCICCTLKISMQYTLQTLEEEFRPDIVIIEPTGIAFPGQIREEIEVMGLSELSFSPVVTLVDPGRFGTEAKEIPKFIETQVKEAEILGINKMDIAPAEIVRATEKMLAELNPEARVLKFSAKLGDEQFEDLLIHLALPGIEKPSQEKKNSIEISEVSAHSVLYTLKSGVQNPEEGRQFIEGSLQSIRDRVKEINPDFIGHVKLSMKLPDSIIKGSVTSSGEAPQVEFIPRKNENLELRLLSAITKVPKVRLIEIVESSLEEKLRESGISFEKKEQQHGTLTKISEITKKEVRVE

SEQ ID NO: 45188 - protein, 417 aa, Alkaliphilus metalliredigenes QYMF
MSEKTLNPFEIAQQQVKGACDKLGVEDAVYEILKNPMRVMEVAIPVKMDDGSLKSFVGYRSQHNDAVGPFKGGVRFHQDVNRDEVKALSTWMTFKCGVVGVPYGGGKGGITVDPRDLSQGELQRLSRGYARAIAPIIGEKVDIPAPDVGTNGQVMSWFIDEYQKTTGEFAPGVFTGKPVDFYGSLARNEATGFGVAIMARDAAKKIGLSLNGATVAIQGFGNVGSFAAIYMVGMGAKVTAISDHTACIFDENGLDIDALIEYVKGNKQVQGFPGAQKELHRDELFGMDVDILMPCALENQITLKNVNDIKAKIVSEGANGPTTPEADKIMYDKGIIVVPDILANAGGVTVSYFEWVQNLMRYSWSFEEVQEKQEKLMVKSFDDIWTLMHEHNVDMRTAGYMMSIKRIATAMKYRGWY

SEQ ID NO: 45189 - protein, 311 aa, Glycine max
MATTTNAAAAPPRQLSQKEADIQMMLAADVHLGTKNCDFQMERYIFKRRNDGIYIINLGKTWEKLQLAARVIVAIENPQDIIVQSARPYGQRAVLKFAQYTGAHAIAGRHTPGTFTNQLQTSFSEPRLLILTDPRTDHQPIKEAALGNIPTIAFCDTDSPMRYVDIGIPANNKGKHSIGCLFWLLARMVLQMRGTIRPGLKWDVMVDLFFYREPEEAKQQEEEEAPAGDYAITDFNAGAIAADGQWPGTIDQSWSDAVPQPIPAAPGVNWGAPAEAPAAVAEGDWGEAVPPPQQIPVPPSGIDSVQPTGWE

SEQ ID NO: 45190 - protein, 548 aa, Mycobacterium tuberculosis H37Rv
MSDARVPRIPAALSAPSLNRGVGFTHAQRRRLGLTGRLPSAVLTLDQQAERVWHQLQSLATELGRNLLLEQLHYRHEVLYFKVLADHLPELMPVVYTPTVGEAIQRFSDEYRGQRGLFLSIDEPDEIEEAFNTLGLGPEDVDLIVCTDAEAILGIGDWGVGGIQIAVGKLALYTAGGGVDPRRCLAVSLDVGTDNEQLLADPFYLGNRHARRRGREYDEFVSRYIETAQRLFPRAILHFEDFGPANARKILDTYGTDYCVFNDDMQGTGAVVLAAVYSGLKVTGIPLRDQTIVVFGAGTAGMGIADQIRDAMVADGATLEQAVSQIWPIDRPGLLFDDMDDLRDFQVPYAKNRHQLGVAVGDRVGLSDAIKIASPTILLGCSTVYGAFTKEVVEAMTASCKHPMIFPLSNPTSRMEAIPADVLAWSNGRALLATGSPVAPVEFDETTYVIGQANNVLAFPGIGLGVIVAGARLITRRMLHAAAKAIAHQANPTNPGDSLLPDVQNLRAISTTVAEAVYRAAVQDGVASRTHDDVRQAIVDTMWLPAYD

SEQ ID NO: 45191 - protein, 446 aa, Lupinus albus
MGIEIEKCCVELSKVANSETHGEDSPYFAGWKAYDEDPYHEHTNPSGVIQMGLAENQVSFDLLEKYLEEHSETVKWGKRGRGFRENALFQDYHGLESFRKAMGSFMEQIREGRVKFDPSRIVLTAGATAANELLTFILANPGDALLVPTPYYPGFDRDLRWRTGVNIVPIHCDSSNNFQITPQALEAAYKEAEAMNIKVKGVLITNPSNPLGATIQRKVLEEILDFVTLKNIHLVSDEIYSGSVFSSSEFISIAEILEARNYKNAERVHIVYSLSKDLGLPGFRVGTIYSYNDKVVTTARRMSSFTLISSQTQHLLASMLSDKKFTENYIKTNRERLRKRYTMIIEGLRNAGIECLEGNAGLFCWMNLSPLLVLENKATREGELELWNETLHEMKLNISPGSSCHCSEPGWFRVCFANMSEETLELALKRIHHFMEKRRTRTEKLY

SEQ ID NO: 45192 - protein, 133 aa, Glycine max
MSKRKTREPKEENVTLGPAVREGEHVFGVAHVFASFNDTFIHVTDLSGRETLVRITGGMKVKADRDESSPYAAMLASQDVATRCKELGITALHIKLRATGGNKTKTPGPGAQSALRALARSGMKIGRIEDVTP

SEQ ID NO: 45193 - protein, 487 aa, Lupinus albus
MDLGSKTNQLLSKIATNDKHGENSPYFDGWKAYDNNPFHPSKNPNGVIQMGLAENQLCFDLIEEWIKNNPKASICTLEGVHKFRDIANFQDYHGLPEFRNALANFMSKVRGGNVRFDPNRIVMSGGATGANEVIMFCLADPGDAFLVPTPYYPAFLRDLCWRTGLQLIPVECDSSNNFKITREALEKAYNKAKEDNINVKGLIITNPSNPLGTTLDRETLKSLITFINENNIHLVCDEIYAATVFSSPSYVSVSELIQEMDQPCKKDLIHIIYSLSKDMGFPGFRVGIVYSFNDEVVNCGRKMSSFGLVSSQTQHMLASMLSDDSFVDKFLAESKKRLAKRHNIFSKVLEEVNITKFPSNAGLFCWMNLKSLLKEQTFEAEMMLWHMIINEVKLNVSPGSSFNCSEPGWFRVCFANMDDETVEVALTRIRTFIGKETKKPEMQVKSWQRNLQLSFSSIRRFVHETIMSPHMMSPHSPIPQSPLVKAT

SEQ ID NO: 45194 - protein, 540 aa, GIBBERELLA ZEAE PH-1
MCGIHASINTSPDQALSSELERCLCNRGPDHTGTVKTQLDNSHGELFITFTSTVLSLRGDHVARQPFVDPATGSVLCWNGEAWALRGEPVQGNDGEAILALLAEVSKDSGDVMDVLRDIDGPFAFIYLDKPAKRLYYGRDRLGRRSLLVKDELPFSLSSIAETPVDGWTEVEADGCYTLDLSADISAGLLPERHDWTTDISLVSSIGVFNDEIPQQSFSLESNSTSVQELRSRLAESLRLRVLDVPLPPNAAATDARVAVLFSGGLDCTVLARLCHDMIQADRCIDLINVAFENPRIAGQFPDLSREELYEKCPDRMTGRNAFAELSHVCPGRTWRFVTVNVPYAENLEHRPEVIRLIYPHNTEMDLSIGCALYFAARGRGLGQTSTEATPQPYSTTARVLLSGLGADELFGGYGRHGVAYTHRGYAGVVKELKLDVSRLGKRNLGRDDRAMSHWGREVRFPYLDERFVKWAIETPVWEKCDFENAGGEGILDAEKRVLRLVAQSLGMSSVSREKKRAIQFGARTAKMESGKVKGTTLLS

SEQ ID NO: 45195 - protein, 1131 aa, Burkholderia pseudomallei K96243
MKPADTLEDVGRAQFVAHMARRPRRARRREAPGVADTPLWYKDAIIYQLHVKSFFDANNDGVGDFAGLIAKLDYIAELGVDTVWLLPFYPSPRRDDGYDIADYRGVHPDYGTLADVRRFIREAHARGLRVITELVINHTSDQHPWFQRARRAKRGSVHRDYYVWSDTDLKYAGTRIIFLDTETSNWTHDPVAGQYYWHRFYSHQPDLNFDNPAVVREVLQIMRFWLDLGIDGLRLDAVPYLVEREGTSNENLPQTHAILKLIRATIDAEYPNRMLLAEANQWPEDVQEYFGDEDECHMAFHFPLMPRIYMSIASEDRFPIIDIMRQTPALAPSNQWAVFLRNHDELTLEMVTDSERDLLWQAYASERRARLNLGIRRRLAPLMERDRRRIELINSILLSMPGTPVIYYGDELGMGDNLHLGDRDGVRTPMQWSSDRNGGFSRADPELLVLPPVMGTLYGYDAINVEAQTRDPHSLLNWTRRILSTRRATRVFGRGAIRFLRPGNRKILAYLRELDGETPVLCVANLSRASQAVELDLSEFAGCVPTEMTSDSPFPPIGQLPYLLTFPPYGFLWFALSEHGREPAWHQQYAEPLPEYLTLVMRRGETQPGAALLDTLAQDALPSWLARRRWFASKERRVDSARFDALTPIPGEPFQYAEARVAVDGREERYVVPLASAWGSETPQPLFAQLALARVRRGHTVGLLTDAFALPSFAHGVLRQLRAGAAVPVAGGGRLEFRPEPDLARLDPGDAPGVRWFAAEQSNSSLVIGEAIVLKIVRKLAAGVHPEAEMGRHLRRIGYRNVAPLVGEVVRIGADGAPHTVAILQEYVDNQGDAWTRSCDFLKRAIEELALPAANDADAAAPSAEPEMIDGYATFAGIVGKRLGELHAALAQPSDDAAFAPQRVSPARVDGWIGDALGWFERAASLLAERLDTLEGQTRAAAELLVAQRAAVAEALRALVPRELDGCCIRIHGDFHLGQVLDVQGDALLIDFEGEPARPLEQRRAQSHPLRDVAGFLRSLSYASAAAQFTIEKAPQQAAERKRALFERFGQAAADRFVAQYREALSAASREFVEPRYADRLLALFLIEKASYELCYEAANRPDWLSVPANGLAALVARLIGGAAPQQEDAR

SEQ ID NO: 45196 - protein, 555 aa, secondary endosymbiont of Bemisia tabaci
MAAKDLKFGNDARKKMLKGVNILANAVKVTLGPKGRNVVLDKSYGAPSITKDGVSVAREIELEDKFENMGAQMVKEVASKANDAAGDGTTTATVLAQSIVTEGLKAVAAGMNPMDLKRGIDKAVEAAVEELKIISKPCKDSKEIAQVGTISANADAKVGKLISDAMKRVTNEGVITVEEASGLEDDLIVVEGMQFDRGYLSPYFINKQESSSIEFDNPYILLVDKKISNIRDMLSILEVVAKEGKPLLIIAEDVEGEALATLVVNTMRGIVKVSAVKAPGFGDRRKEMLQDIAVLTHGHVISEETGDSLEKATKENLGNAKRVVITKDATTIIDGAGEKSKIEARIQNIKKQIENATSDYDKEKLQERVAKLSGGVAVIKVGAPTEIAMKEKKARVEDALQATRAAVEEGVVPGGGVALIRVASKIANSSLKGDNEDQNVGIRVALRAMESPLRQIVVNAGEEASVIANKIKENKGNDNYGYNAQTEAYGDMIEMGILDPTKVTRSALQYAASIAGLMITTECMVTDLPKEEKASDMGAGGMGGIGGMGGMNGMM

SEQ ID NO: 45197 - protein, 265 aa, Oryza sativa
MADPAAEETVPAPPPTPAVDPAEGASDAPQPVELPADTAAASPEKVSSPPPEPAPAVRSRGFRLLGEDTSVHKALGGGKTADVLLWKDKKTSAVVIGGATVIWILFEVLDYHLLTLLSHVMIGALAILFLWSKATTFIKKSPPDIPVVQIPEDVAVNVSRALRSDINRALHLFREIALGHDLKKFLGVIVALWVLSEVGSCCDFLTLIYVAVLMLHTVPILYDKYQDKVDHFAGRAHSEACKHYEVLDAKVLSKIPRGPVKPKKN

SEQ ID NO: 45198 - protein, 426 aa, Triticum aestivum
MALYRRAASAIRRRGAGGLPLLPARAMASLFGHVEPAPKDPILGVTEAFLADPSPDKVNVGVGAYRDDSGKPVVLDCVREAERRIAGNLNMEYLPMGGSIHMIEESLKLAYGEDSEFIKDKRIAAVQALSGTGACRLFADFQKRFLPDSQIYIPTPTWSNHHNIWRDAQVPQRTFSYYHPESRGLDFAGLMDDIKNAPNGSFFLLHACAHNPTGVDPTEEQWREISYQFKLKNHFPFFDMAYQGFASGDPERDAKAIRIFLEDGHQIGCAQSYAKNMGLYGQRAGCLSILCEDEMQAVAVKSQLQQIARPMYSNPPVHGALVVSIILSDPELKNVWLGEVKGMADRIIGMRKALRENLEKLGSPLSWEHVTNQIGMFCYSGMTPEQVDRLTSEYHIYMTRNGRISMAGVTTGNVAYLANAIHDVTK

SEQ ID NO: 45199 - protein, 444 aa, Bacteroides fragilis NCTC 9343
MNAAKVLEDLKRRFPNEPEYHQAVEEVLSTIEEEYNKHPEFDKANLIERLCIPDRVYQFRVTWVDDKGNVQTNMGYRVQHNNAIGPYKGGIRFHASVNLGILKFLAFEQTFKNSLTTLPMGGGKGGSDFSPRGKSNAEVMRFTQAFMLELWRHIGPETDVPAGDIGVGGREVGFMFGMYKKLSHEFTGTFTGKGREFGGSLIRPEATGYGNIYFLMEMLKTKETDLKGKVCLISGSGNVAQYTAEKVLELGGKVVTMSDSDGYIYDPDGIDRAKLDYIMELKNLYRGRIREYAETYGCKYVEGARPWGEKGDIALPSATQNELNGDDARKLVANGVIAVSEGANMPSTPEAIKVFQDAKILYAPGKAANAGGVSVSGLEMTQNSIKLSWSSEEVDEKLKSIMKNIHEACVQYGTEPDGYVNYVKGANVAGFMKVAKAMMAQGIV

SEQ ID NO: 45200 - protein, 358 aa, Tuber borchii
MSENSTIVSNTANLVKFLNLDQKGSILAEYIWIDGANGVRSKTKTLFKKPSSVEDLPEWNFDGSSTGQAPGEDSDIYLRPVAIFPDPFRMGDNILVLAECWNADGSPNKFNHRHECAKIMEAHKDQKPWFGLEQEYTLFDLYGNPYGWPKGGFPGPQGPYYCGVGTGKVYCRDIVEAHYKACLFAGIKISGINAEVLPSQWEFQVGPCVGIEMGDHLWISRYLLHRVAEEFGVKISFHPKPIPGDWNGSGLHTNVSTQAMRDEGGMKAIEEAIQKLSTRHAEHIAVYGDDNTLRLTGRHETGNIDAFSYGVADRGSSIRIPRSCAKEGKGYFEDRRPASNACPYQITGIMMETICGGI

SEQ ID NO: 45201 - protein, 730 aa, Magnaporthe grisea 70-15
MASSEQSSTALSSQRKPLDLPQLKSEEDHDVVLKTIRMLVADLCQQFGGGHPGGAIGMAAIGVALWKYVMRYSPEEPEYFNRDRFVLSNVGASVKLTLGLSTGHTCLFQYVFLHLSGYKAMTFDQLKSYHSKRTDALCPGHPEIEHEGVEVTTGPLGQGVANAVGLAMATKNLASTYNRPGFPVVDNHTWCMIGDACLQEGVALEAISLAGHLALDNLTIIYDNNQITCDGSVDLTNTEDVNAKMRACGWHTVDVEDGCFDIGGIVRALAEARQAAHGKPTFINVRTVIGLGSAVAGKAEAHGAAFGAADVANMKRSVGFDLEQHFVIGDKVRDFFADIPKRGHNLVADWKGLVSKYAEAHPEVASEFDRRTKGELPENWRELIPKSFSDKPTATRASSGLVLNPIAKDVKSFMVGTADLTPSVHMTWDGMEDFQNPNIRPTCGINGSYTGRYIHYGVREHAMCAISNGLAAFNPGTFVPVTSSFFMFYLYAAPAVRMGALQKLQVIHAATHDSIGMGEDGPTHQPIELATLFRAMPNLLYMRPADSEETAGAWEVAIAERTRPSIVSTSRHKLPQLVGKSSRKGVAKGAYVVSEPADGKADVTILGVGAELCLALDVAEALAGKNIKVRVVSFPCWRLFDEQPVAYRRETLRRHEGIPAVVVEPYAPNGWERYADAGVCLRRFGHSLPGPEAYKYFEYETPKVTEKIEGYLKGLETGEWLRGEFADLQI

SEQ ID NO: 45202 - protein, 203 aa, Pichia angusta
MNNEYDYLFKLLLIGDSGVGKSCLLLRFAEDTYTQDYISTIGVDFKIRTIELDGKTIKLQIWDTAGQERFRTITSSYYRGAHGIIIVYDVTDQESFNNVNQWLQEIDRYATSGVMKLLVGNKCDLTDKKVVDYAVAKEFADSRGIKFLETSASQSTNVEQAFIVMSKQIKSQMANSQPASNTAGKPSVNLSGTSVINQQGGCC

SEQ ID NO: 45203 - protein, 488 aa, Corynebacterium efficiens YS-314
MTIRAAVSHPVGPSGRNPGTGQMRDAMQCGHGAGCGSRPPRCPRRPSIRGAVTHPRLTPWPPQKKYLFTGFKREQVFRFMVECVKGRPNVLAIVLAGGEGKRLFPLTEDRAKPAVPFGGTYRLIDFVLSNLVNAGYLKIAVLTQYKSHSLDRHISVSWNVSGPTGQYIASVPAQQRLGKRWFTGSADAILQSLNLISDEKPDYVIVFGADHVYRMDPSQMVDEHIKSGKSVSVAGIRVPRHEATAFGCIQSDDEGNITEFLEKPADPPGTPDDPDVTFASMGNYVFTTEALVRALKDDSENEDSEHDMGGDIIPYFVDRGDAHVYDFSRNIVPGATERDKGYWRDVGTIDAFYECHMDLISVHPIFNLYNKEWPIHTTVEGNLPPAKFVQGGIAQSSMVAPGSIISAGTVRNSVLSTDVIVEEGATVEGAVLMPGVRIGKGAVVRHAILDKNVVVRDGELIGVDHDRDSQRFKVSAGGVVTVGKNQVV

SEQ ID NO: 45204 - protein, 543 aa, Methanosarcina barkeri str. fusaro
MAAQPIFILREGSKRTHGSDAQHNNIMAAKAVAEAVRTTLGPKGMDKMLVDSMGDVVITNDGATILKEMDIEHPGAKMIVEVAKTQDAEVGDGTTTAAVLAGEFLTKAEDLLESGVHPTVIASGYRLAADQATKTIDTITISASPEDTETLEKIAATAITGKGAEAQKEHLSRLAVKAVKSVAEISEDGKITVDIEDIKVEKRPGGSIKDSEIVDGVIVDKERVHPAMPEVVENAKILLLSVPIELKKTETKAEIKITNPDQMQLFLDQEEAMLKEIVDKVIKTGANVVFCQKGIDDLAQYYMTKAGIFGMRRVKKSDMDKLSRATGAKIITSLDEIEESDLGHAGLVEEKDVTGSRMTFVTGCKDSKATSILLRGGTEHVVEGIERALEDALRVVGVALEDQKIVVGGGSPEIELSLRLKEYAATLKGREQLAVMKFAESLEIIPSTLAENAGLDPIDMLVEMRSQHEKGNKRAGLNVYTGKIEDMFENNVVEPLRIKTQAINAATEAAIMVLRIDDVIASSSPAKVGGPGAIPGGEMPEMM

SEQ ID NO: 45205 - protein, 593 aa, Pseudomonas aeruginosa
MHRTSRRTFVKGLAATGLLGGLGLWRAPAWALAGPGQQNLLAGDSFDLFIGETPVNLSGSPAAAMTINGSLPGPTLRWREGDNVTLRVRNRLAEDTSIHWHGIILPANMDGVPGLSFEGIAPGGLYEYHFKVRQNGTYWYHSHSGLQEQAGVYGALVIDAREPEPFSYDRDYVVLLSDWSDEKPQRILAKLKKQSDYYNFHKRTVGDFIDDVSANGWAATLADRKMWAEMKMSPTDLADVSGYTYTYLLNGQPPDGNWTGLFRPGEKLRLRFVNASAMSYFDVRIPGLKMTVVAADGQHVEPVSVDELRIAVAETYDVIVEPGGERAYTLFAQSMDRSGYARGTLALAEGLSAPVPTPDPRPLIGMDDMGMGGMDHGAMGHGAATRPASEMDHSKMAGMDMNGMDHSRMGMDTMPMQSHPASEDGNPLVDMQTMTPTPKLADPGLGLRDNGRRVLTYADLRSRFADPDGREPGRTIELHLTGHMEKFAWSFDGIKFSDAEPLRLTYGERLRIVLVNDTMMTHPIHLHGMWSDLEDEQGNFLVRKHTIDMPPGARRSYRVTADALGRWAYHCHLLFHMEMGMFREVRVDEGDNA

SEQ ID NO: 45206 - protein, 488 aa, Lupinus albus
MRLLSSKASCNTHGQDSSYFLGWEEYEKNPYDEAMNPEGIIQMGLAENQLSFDILESWLAKNQDVAGFKRDGKSIFRELALFQDYHGIPSFKKAMVDFMAEIRGNKVTFDPNHIVLTAGSTSANETLMFCLAEQGDAFLLPTPYYPGFDRDLKWRTGVEIVPIQCTSSNNFQITESALLQAHEDAKKRNLRVKGVLVTNPSNPLGTTMSRNELNLLIDFIKVNKDMHLISDEIYSGTVFSSPGFISIMEILKERNYLKDSSDAAQVWNRVHVIYSLSKDLGLPGFRVGAIYSDNDEVVAAATKMSSFGLVSSQTQYLLSAMLGDKKFTKNYLLENQKSLKRRHRMFIYGLQKTGISCLKSNAGLFCWVDMRHLLSSNTFEAEMELWKKIVYQVKLNISPGSSCHCTEPGWFRVCFANMSEDTLNLAMKRLTTFVATITGANESKKNSGTSRTMSLPNWVSGYLLVIIGTRRTIISRDDIAWSWLVCEV

SEQ ID NO: 45207 - protein, 495 aa, Bdellovibrio bacteriovorus HD100
MLADRRAKIVATIGPATRDEKNLEKAIKAGMNVARLNFSHGSHEDHLKVVHSLRKLSKELQAPVAILQDLQGPKIRVGKFENGSIEIKPGEKLVVTTAKVLGKPGLVPSDFQELPLACVPGTRILLDDGLMEVKVLQVRGEEIDVEVVYGGILKDRKGMNLPGVNLPVDCMTPKDLEDLQFGIANKVDYIALSFVRHARDIRKLRELIEAGNSNAKIVAKIEMVEAIENLEEICRLSDAVMVARGDLAVEVGQSRLPGYQKRIISVCNQLGKPVITATQMLDSMVENPRPTRAEITDVANAVLDGTDALMLSAESASGKYPFKCIRTMHEIITEVERNEEEYYKISLENEFLSTPASIAASASLSALKLNATAIICLTTSGKTANIISAFRPKARIISVTQHLDVLNGMELGWGIQTHAIKPYKTMEDILREVDLLLVSHGLGKTGDRVILTLGQPIACGAKTNSIYVHTVGGENVAKLPNDKLPLRCQEEPVVE

SEQ ID NO: 45208 - protein, 506 aa, Arabidopsis thaliana
MANNAAACAERATNDMLIGPDWAINIELCDIINMEPSQAKEAVKVLKKRLGSKNSKVQILALYALETLSKNCGESVYQLIVDRDILPDMVKIVKKKPDLTVREKILSLLDTWQEAFGGSGGRFPQYYNAYNELRSAGIEFPPRTESSVPFFTPPQTQPIVAQATASDEDAAIQASLQSDDASALSMEEIQSAQGSVDVLTDMLGALDPSHPEGLKEELIVDLVEQCRTYQRRVMALVNTTSDEELMCQGLALNDNLQRVLQHHDDKAKGNSVPATAPTPIPLVSINHDDDDDESDDDFLQLAHRSKRESARGTGQGNFNPILPPPPSSMRPVHVDSGAMDFLSGDVYKPQETFENVKPPSTSQSSNHDYSAPIFDEPVPQSKSPEHALFTKPVYDQTEQLPPAPWETQEPRKYPPSMSARTNKRPEYFQHNVPQHSSSASESSYDDLLGQSRNLSLNPTASAAPVTPPKKDDKPEDILFKDLMDFAKTRTSSSSSSKPNNQNNKPF

SEQ ID NO: 45209 - protein, 448 aa, Lupinus albus
MGLEIEKGCVKLSNIAISETHGEDSPYFAGWKAYDENPYHEITNPSGVIQMGLAENQVSFDLIEKYLEEHSEAATWGKGAPSFKDNALFQDYHGLKSFRTAMASFMEQIRGGRAKFDPSRIVLTAGATAANELLTFIIANPGDALLLPTPYYPGFDRDLRWRTGVNIVPIHCDSSNNFQITPKALEAAYKEAEAMNMKVKGVLITNPSNPLGATIQRKVLEEILDFVTLKNIHLVSDEIYSGSVFSSSEFISIAEILEARKYKNAERVHIVYSLSKDLGLPGFRVGTIYSYNDKVVTTARRMSSFTLISSQTQQLLASMLSDKVFTENYIKTNRERLRKRYTMIIEGLISAGIECLKGNAGLFCWMNLSPLLVLENKVTREGELELWNETLHEMKLNISPGSSCHCSEPGWFRVCFANMSEQTLELALQRIRDFMAKRSGTEKMIFQN

SEQ ID NO: 45210 - protein, 339 aa, Saccharomyces cerevisiae
MAGSTSSLVICAIGIYATFLTWALVQEPLATRTWPNSMGKFQFPNVISLIQASVAMMMGYLYLNWKKVEYPPRKMIKDHWKQLMLISFTQSSSGPLATTSLKHVDYLTYMLAKSCKMIPVLLVHLLLYRTPIASQKKVVALLVSLGVTIFTIGGNDGKKLKRSFNESGNDNKLQGFGLLFSSLFLDGLTNATQDKLLKANKAKEKGKQTLITGAHLMFTLNLFVILWNILYFIVIDCKQWDNAVSVLTMDPQVWGYLMLYSFCGAMGQCFIFYTLEQFGSLVLIMITVTRKMVSMILSIIVFGKSVRFQQWVGMFIVFGGITWEALNKKKANIPKAKSA

SEQ ID NO: 45211 - protein, 326 aa, Geobacter metallireducens GS-15
MDDFLEKEAVEPEEHAERQPDDFLEPEPTSFEYEEAEEEEEQEEEIKVVEVEHFDDAIKLYLREIQRTTLLTADEEKVLASRIAKGDKAARDKMIESNLRLVVKIAKRYINRGLPFLDLIEEGNMGLIKAVERFKLSKECRFSTYATWWIRQSIERALVNQSRTIRLPVHVSDDINKMLKITRELVNRFNREPTVKEVATEMNVNSAYIRRLMVLLKKTYSIERPMGENSDYFLIDTIEDTSSVSPAVLLEDLNKYEIVSKWFASLSENEQKILTLRFGLEDKEPQTLDTIGRSFGVTRERIRQIEAKSLEKLRKYIDNSDGSAIE

SEQ ID NO: 45212 - protein, 396 aa, Ricinus communis
MALKLNPFLSQTQKLPSFALPPMASTRSPKFYMASTLKSGSKEVENLKKPFMPPREVHVQVTHSMPPQKIEIFKSLDNWAEENILVHLKPVEKCWQPQDFLPDPASDGFDEQVRELRERAKEIPDDYFVVLVGDMITEEALPTYQTMLNTLDGVRDETGASPTSWAIWTRAWTAEENRHGDLLNKYLYLSGRVDMRQIEKTIQYLIGSGMDPRTENSPYLGFIYTSFQERATFISHGNTARQAKEHGDIKLAQICGTIAADEKRHETAYTKIVEKLFEIDPDGTVLAFADMMRKKISMPAHLMYDGRDDNLFDHFSAVAQRLGVYTAKDYADILEFLVGRWKVDKLTGLSAEGQKAQDYVCRLPPRIRRLEERAQGRAKEAPTMPFSWIFDRQVKL

SEQ ID NO: 45213 - protein, 140 aa, Methanosarcina mazei Go1
MAQNKIEKSEEDWKSVLTPEQYHVLRQKGTERPFSGNLYYNKEKGIYTCAACGQELFSSDTKFESGTGWPSFYDVISSDRVRLHEDNSYFMKRIEVVCSRCGSHLGHVFEDGPEPTGQRYCINSVSLGFTKEEDTGKEKE

SEQ ID NO: 45214 - protein, 400 aa, Staphylococcus aureus subsp. aureus MRSA252
MAKIPVTVLSGYLGSGKTTLLNHILQNREGRRIAVIVNDMSEVNIDKDLVADGGGLSRTDEKLVELSNGCICCTLRDDLLKEVERLVKKGGIDQIVIESTGISEPVPVAQTFSYIDDELGIDLTAICRLDTMVTVVDANRFVHDINSEDLLMDRDQSVDETDERSIADLLIDQVEFCDVLIINKIDLISEEELAKLEKVLSALQPTAKIIKTTNSEVDLKEVLNTQRFDFEKASESAGWIKELESGGHASHTPETEEYGISSFVYKRRLPFHAKRFNDWLESMPNNVVRSKGIVWLAQYNHVACLLSQAGSSCNIHPVTYWVASMSEAQQTQILAERQDVAAEWDPEYGDRHTQFVIIGTDLDEGAITKELDACLVNAQEIDADWQQFEDPYQWQIRPAR

SEQ ID NO: 45215 - protein, 420 aa, Yarrowia lipolytica CLIB122
MRPSLGKRSSFSHFSTAQQQPISPQQQRYPPGWNPYDEEATAGSSGPHTAAKTSRYSASAAPGEPYMWEQSAQASSYAPSTGMKYAPSDYQLPRRSAYFESTMPLYSVSWSTPAADGMSCLAVGTCNDESKNKIQVVHTEGNSFNLAAEASVPYPCTKLAWDSRLDAQGKRQFATSGDCLRIWSYDSSKGFLQQRCSLSNSKSGSISPITSFDWNKVAPHLIITSSIDTTCTLWDLNTSSARTQLIAHDQEVYDVQFTAGSTDVFASVGADGSVRVFDLRALDHSTIIYDPPKPPPLVRIAGCPYDGNILATFAGNSSKVLILDIRQPGMPIDVLQQHQAPVNAIQWCPQSVVVGGQRKRLLASSSDDSQIILWNTAVPGDYHLDSAFTDSAEVNNICWSASGDWIASVTNKGVQGVRLN

SEQ ID NO: 45216 - protein, 218 aa, Methanosarcina mazei Go1
MLKAIIFDMDGVLVDSMRFQADAWAKAFQDAGINIVREDIYELEGSNDKRLIKSIFKEARKEPEPEHFERLPEKKRDLLEFDRIKPFEGIPECLDELKRHFRLAMVSGSNRNTVGKIVDKFFSGYFDVVINGSDLERGKPDPDPYLKALEMLGLTKNECMVIENAPLGITAAKRAGLYCVAVASMLEPEKVQHADLVLEDHASLFDYLKSLIPGKPQT

SEQ ID NO: 45217 - protein, 385 aa, Arabidopsis thaliana
MTTTGSNSNHNHHESNNNNNNPSTRSWGTAVSGQSVSTSGSMGSPSSRSEQTITVVTSTSDTTFQRLNNLDIQGDDAGSQGASGVKKKKRGQRAAGPDKTGRGLRQFSMKVCEKVESKGRTTYNEVADELVAEFALPNNDGTSPDQQQYDEKNIRRRVYDALNVLMAMDIISKDKKEIQWRGLPRTSLSDIEELKNERLSLRNRIEKKTAYSQELEEQYVGLQNLIQRNEHLYSSGNAPSGGVALPFILVQTRPHATVEVEISEDMQLVHFDFNSTPFELHDDNFVLKTMKFCDQPPQQPNGRNNSQLVCHNFTPENPNKGPSTGPTPQLDMYETHLQSQQHQQHSQLQIIPMPETNNVTSSADTAPVKSPSLPGIMNSSMKPEN

SEQ ID NO: 45218 - protein, 492 aa, Hordeum vulgare
MDPYKHRPTSGANSAYWTTNSGAPVWNNNNALTVGHRGPILLEDYHLIEKLAQFDRERIPERVVHARGASAKGFFEVTHDVSQLTCADFLRAPGVQTPVIVRFSTVVHERGSPETLRDPRGFAVKFYTREGNFDLVGNNMPVFFIRDGMKFPDMVHAFKPSPKTNMQENWRVVDFFSHHPESLHMFTFLFDDVGIPLNYRHMDGFGVNTYTLISRDGKAHLVKFHWKPTCGVKCLLDDEAVTVGGTCHTHATKDLTDSIAAGNYPEWKLFIQTIDADHEDRFDFDPLDVTKTWPEDIIPLQPVGRMVLNKNIDNFFAENEQLAFCPAVTVPGIHYSDDKLLQTRIFSYADTQRHRLGPNYLMLPVNAPKCAHHNNHHDGLMNFIHRDEEVNYFPSRFDPTRHAEKYPMPPRVLSGCREKCIIDKENNFKQAGERYRSFDPARQDRFLQRWVDALTDARVTHEIQSIWVSYWSQCDASLGQKLASRLKIKPNM

SEQ ID NO: 45219 - protein, 492 aa, Nicotiana tabacum
MDLSKFRPSSAYDSPFLTTNAGGPVYNNVSSLTVGPRGPVLLEDYHLIEKLATFDRERIPERVVHARGASAKGFFEVTHDISHLTCADFLRAPGVQTPVICRFSTVVHERGSPESLRDIRGFAVKFYTREGNFDLVGNNVPVFFNRDAKSFPDTIRALKPNPKSHIQEYWKILDFFSFLPESLHTFAWFFDDVCLPTDYRHMEGYGVHAYQLINKAGKAHYVKFHWKPTCGVKCMSEEEAIRVGGTNHSHATKDLYDSIAAGNYPEWKLFIQIMDTEDVDKFDFDPLDVTKTWPEDILPLMPVGRLVLNRNIDNFFAENEQLAFNPGHIVPGLYYSEDKLLQTRIFAYADTQRHRIGPNYMQLPVNAPKCAHHNNHRDGAMNFMHRDEEVDYLPSRFDPCRHAEQYPIPSRVLTGRREMCVIEKENNFKQAGERYRSWEPDRQDRYVSKWVEHLSDPRVTYEIRSIWISYLSQADKSCGQKVASRLTLKPTM

SEQ ID NO: 45220 - protein, 591 aa, Arabidopsis thaliana
MSMVDEPLYPIAVLIDELKNDDIQRRLNSIKRLSIIARALGEERTRKELIPFLSENNDDDDEVLLAMAEELGGFILYVGGVEYAYVLLPPLETLSTVEETCVREKAVDSLCRIGAQMRESDLVEHFTPLAKRLSAGEWFTARVSACGIFHIAYPSAPDVLKTELRSIYGQLCQDDMPMVRRAAATNLGKFAATIESAHLKTDIMSMFEDLTQDDQDSVRLLAVEGCAALGKLLEPQDCVAHILPVIVNFSQDKSWRVRYMVANQLYELCEAVGPEPTRTDLVPAYARLLCDNEAEVRIAAAGKVTKFCRILNPELAIQHILPCVKELSSDSSQHVRSALASVIMGMAPVLGKDATIEHLLPIFLSLLKDEFPDVRLNIISKLDQVNQVIGIDLLSQSLLPAIVELAEDRHWRVRLAIIEYIPLLASQLGVGFFDEKLGALCMQWLQDKVHSIREAAANNLKRLAEEFGPEWAMQHIVPQVLEMINNPHYLYRMTILRAVSLLAPVMGSEITCSKLLPALTKRTTLSSSFRVPNIKFNVAKMMQSLIPIVDQAVVENMIRPCLVELSEDPDVDVRYFANQALQSIDNVMMSS

SEQ ID NO: 45221 - protein, 865 aa, Saccharomyces cerevisiae
MSYTNKRHTYYGGFTNDLSDTFQYPQRTDEQRRKHVTFGPYILGSTLGEGEFGKVKLGWPKNFSNSSNSTFDFPKQVAIKLIKRDSISNDYRKEVKIYREINALKHLSHPNIVKLEEVLQNSRYIGIVLEYACGGEFYKYIQKKRRLKEMNACRLFSQLISGVHYIHSKGLVHRDLKLENLLLDKNENLVITDFGFVNEFCSRNELMKTSCGSPCYAAPELVISAEPYEARKADIWSCGVILYAILAGYLPWDDDPNNPEGSDIGRLYNYINSTPLKFPDYILPIPRDLLRRMLVSDPKKRINLKQIKKHEWLKPHSSFLSITPDEWDKLNNTQSVFRLAKPRRRYGSRPQSSCSTSSLGSRSDKRDSLVIDSTLITFPAPPQESQNHIITRPASIASDQRLSPIRRSNRHNRSNSAASVALQAVVNADREYVLSHEQSLSPVQNIRQTTGNMTASLSPPPAISPGDIIIETTPIKRNTISGSSIVPSLEEESSTTMQTSKIQPNNMASSQNHQYNKNKTQNSLQSAKNFYRTSSSSHTKPRPTSYHPGSYTTPPYNSNTLSIYEINEKAKSSASSQTLNQRDTSPFDSTPYLALDTCITSSSSIESSPKLITHGQFSVAKPSVDLQSVSGDLIKYKRDADVVTRIYDEKYKQKRKSLRYSGIFSDISCDTVTEESDELRPPESPLQQHEGQESIDKAKTEDTSEKGSKSSNIAKATAQKHVNNHLERSLNEAESTKKRFSFLSLYSYDTSKSSLYSSMDSKRKPSPPSQRRPKKDDSYQTNSKNHYITASNMQTSHQVSKDLPAPTMVQNKCTLETKKAVRSNRSSIMVSEVNKASVDNKAAQSPEHSTAKRVLGFFKRRSMKI

SEQ ID NO: 45222 - protein, 494 aa, Hordeum vulgare
MDPCKFRPSSSFDTKTTTTNAGQPVWNDNEALTVGPRGPILLEDYHLLEKIAHFARERIPERVVHARGASAKGFFECTHDVTGLTCADFLRAPGARTPVIVRFSTVIHERGSPETIRDPRGFAVKFYTREGNWDLLGNNFPVFFIRDGIKFPDVIHAFKPNPKSHVQEYWRVFDFLSHHPESLHTFFFLFDDVGIPTDYRHMDGFGVNTYTFVSRAGKSHYVKFHWRPTCGVSCLMDDEATLVGGKNHSHATQDLYDSIDAGNFPEWKLFVQVIDPDEEDRFDFDPLDDTKTWPEDLVPLQPVGRLVLDRNVDNFFNENEQLAFGPGLVVPGIYYSDDKMLQCRVFAYADTQRYRLGPNYLMLPVNAPKCGFKNNHYDGAMNFMHRDEEVDYYPSRHAPLRHAEPASFPVPTRPVVGKREKTRIKKENDFVQPGERYRSWAPDRQDRFVRRFSDALAHPKVSHELRVIWIDFLSKCDKSCGMKVANRLNVKPSM

SEQ ID NO: 45223 - protein, 565 aa, Yarrowia lipolytica CLIB122
MLRTRFINSVNSARAMSRNINTLSQFPYPTLQQEESFFKSQVEDIEKWWASPRYEGIKRPYTAEKVAIHRGTLPQTYASSVQAEKLFNIFTERGKQGLPVHTTGSVDPVQMTQSAPHQEVVYISGWACSSLLTTTNEVSPDFGDYPYDTVPNQVDRIFRAQGLHDKKAWHEWMSLSHEERVKRDQEGKGRIDYLRPIIADADTGHGGLSAVMKLAKLFAERGAAAIHLEDQLHGGKKCGHLAGKVIVPTGSHISRLNATRMQWDIMGCSNLVIARTDSESAKLLSSAADPSDHEYILGVVKPIKPLAEVLLTAEANGATADMVNKLELEWTKEAEMMTYDEAVQRALTEAGKSDKIEEYLTKAKGKSNFEARQIADELAGKHIFFDWDAPKTREGHYHVQCGIEPAIKRALAFAPYADLIWLETKTPDLAQAQAFAKRIREKFPGKWLVYNLSPSFNWSAHGYSDEQLKSFVWDLAKSGFVMQLISLAGLHSNAVATHELSTRFKTEGMKAYVDLVQRKEKELGCDVLTHQKWSGANYLDSIISTVQSGSSGTSSTGGDSTENQF

SEQ ID NO: 45224 - protein, 492 aa, Solanum tuberosum
MDPSKYRPSSAYDTPFLTTNAGGPVYNNVSSLTVGPRGPVLLEDYYLIEKLATFDREKIPERVVHARGASAKGFFEVTHDISHLTCADFLRAPGAQTPVICRFSTVVHERGSPESIRDIRGFAVKFYTREGNFDLVGNNVPVFFNRDAKSFPDTIRALKPNPKSHIQENWRILDFFSFLPESLHTFAFFYDDVCLPTDYRHMEGFGVHAYQLINKEGKAHYVKFHWKPTCGVKSMSEEEAIRVGGTNHSHATKDLYDSIAAGNYPEWKLFIQTMDPEDVDKFDFDPLDVTKTWPEDLLPLIPVGRLVLNRNIDNFFAENEQLAFNPGHIVPGIYYSEDKLLQTRIFAYADTQRHRIGPNYMQLPVNAPKCGHHNNHRDGAMNMTHRDEEVDYLPSRFDPCRPAEQYPIPACVLNGRRTNCVIPKENNFKQAGERYRSWESDRQDRYITKWVESLSDPRVTHEIRSIWISYLSQADKSCGQKVASRLTVKPTM

SEQ ID NO: 45225 - protein, 421 aa, Polaromonas sp. JS666
MNKNQVLRLHVPEPSGRPGHETDFSYLHLSPAGAVRRPPVEASPADTSDLAYSLVRVLDDDNRAVGPWVPPVEPQRLRQGLRAMMKTRIYDARMLIAQRQKKISFYMQCLGEEAIATAHALALQPGDMCFPTYRQQGLLLARDDVDMVEMICQLMSNERDPLKGRQLPVMYSYKRAGFFTISGNLATQFIQAVGWGMASAIKGDSKIASAWIGDGATAEADFHTALTFAHVYRAPVILNVVNNQWAISTCQAIAGGEATTFAARGVGCGIASLRVDGNDFLAVYAASLWAAERARSNLGPTLIEWVTYRGGAHSTSDDPSRYRPVDDWAHFPLGDPIARLKAHLMQTGAWTEQEHEATQKELEAQVSAALKEAERYGSLADGHLAGAAAMFEDVYKDMPEHLRRQREQLLRGEMDTPRREA

SEQ ID NO: 45226 - protein, 498 aa, Acinetobacter sp. SE19
MGGIPHIPFCLTSVICQGCLIMNYPNIPLYINGEFLDHTNRDVKEVFNPVNHECIGLMACASQADLDYALESSQQAFLRWKKTSPITRSEILRTFAKLAREKAAEIGRNITLDQGKPLKEAIAEVTVCAEHAEWHAEECRRIYGRVIPPRNPNVQQLVVREPLGVCLAFSPWNFPFNQAIRKISAAIAAGCTIIVKGSGDTPSAVYAIAQLFHEAGLPNGVLNVIWGDSNFISDYMIKSPIIQKISFTGSTPVGKKLASQASLYMKPCTMELGGHAPVIVCDDADIDAAVEHLVGYKFRNAGQVCVSPTRFYVQEGIYKEFSEKVVLRAKQIKVGCGLDASSDMGPLAQARRMHAMQQIVEDAVHKGSKLLLGGNKISDKGNFFEPTVLGDLCNDTQFMNDEPFGPIIGLIPFDTIDHVLEEANRLPFGLASYAFTTSSKNAHQISYGLEAGMVSINHMGLALAETPFGGIKDSGFGSEGGIETFDGYLRTKFITQLN

SEQ ID NO: 45227 - protein, 371 aa, Magnaporthe grisea 70-15
MAHLPNPSLQVTADHQLKQVEASILSPGPGEVLLHVKCTGVCGSDVHFWKTGAIGTLVVEGDCILGHEAAGIVLSTGQDVTTLKPGDRVAIEPGVPCNKCFLCSEGRYNLCQEVQFAGVWPYHGTLQRYKVHPARWLHKLPDSLSYAEGALLEPLSVVLHGIRVAGLSLGRGAVICGAGPIGLIALAAARASGAHPIVITDVEPRRLEFAREFVPSCQTYRVDPTQSPEENARGIRALFGLKGGAVPDPDEYSAPPVVLECTGVESSVCTAAFTARRGGIVVVIGVGKSTMNNLPFMHLSLAEIDLRFINRYRDTWPAGIACLESGILPDLKKLVTHVFPLEKAIEGLTLASDPRNGSIKVQIVDEVDISP

SEQ ID NO: 45228 - protein, 354 aa, Glycine max
MASAAAVAAEDDAVNGFTRSEMYSENLAGTVDAYDRHVFLCYKSYVSWPARIEASDADPFPKRVAATFKARKNDLPLKTKITVCEAREEAGFADGDVLIFPDMIKYRGLEESNVDGFFEDVLVNGKPWTAGVPEVFSGSHVYVCAHGSRDVRCGVCGPVLIKKLHEEIELRGLKDQISVTACSHIGGHKYAGNVIIYSPRADGKIMGHWYGYVTPNDVPDLLDQHIAKGEVIQRLLRGQMGPSVADGKEADDQKVANGEETGKVKKNNHVESDNLSSKENVGGCCQGVNGVSCCRSASLEQNKEIEETPETHKKGSKICSNWPQLQQRDIRTAVGVLGAVAVVVVAYKLYRRAA

SEQ ID NO: 45229 - protein, 393 aa, Leptosphaeria maculans
MAVAVVFGASGISGWGITKALLDAKTQNAFSKIIALTNRSLSLAESGLPDDDRLQLHSGIDLQANVDDVIAKLRERIPSIGNVTHVFYTAFSTSHTDNQLMMKASNTKMLRTMVEAMETVAPSLSFIAVQTGSNHYGILFAEVLGERFGPVPLKEDLPRLPSPLRDSLMFYAMADEMDELSRGKSWKWCDIRPDMIVGYLPRPNSHSIAESIGYYLAFHAYLTPGEEVPFPGSEAAWNAKFSLTGQGVLGNFNVHLACKNSIENGEAFNIANKPFTTWASLWPLLAGYWGLKGTAPVGHHGIPDAASWVLDNMDRVKGWEEKYSMKPGRLFKIPWRYFHWALNMPFDRYLDLTRCEQTGFQQHEEHKESFETAWKCMQEAKLLPIVDKSSTPP

SEQ ID NO: 45230 - protein, 641 aa, Nocardia farcinica IFM 10152
MAHTTDDLVRTDIEEYLRRHERKSLLRLLTCGSVDDGKSTLIGRLLYDSKLVFADHLAQLERDSRTVGTQNGELDFALLVDGLAAEREQGITIDVAYRFFSTEKRKFIVADTPGHEQYTRNMVTGASTADAAVILVDARKGLLTQTRRHSFLVSLLGIRHIVLAVNKLDLVGYSQERFDKIAADYREFAAGVGLTEVTCIPISALRGDNITQHSAETAWYTGPTLVEHLESIPVDETDRGALRLPVQWVNRPDLDFRGYSGQIVGGTVRPGDRVRVLPSGRESTVDRVVTADGDLDSAVTGQSVTVVLADDIDVSRGDVLAAAARPPQVADQFEANLVWMSEQPMLPGRAYELKLATAGAVAQVARPKYTINVNTLEHTAARSLSLNEIGVCDLHLDRQITFDPYTANRDMGGFILIDRLTRDTVAAGMLKFALRRAGNIHWQHVDIDKHVRARAKGQQPAVVWFTGLSGAGKSTVANLVEKRLHEQGYHTYLLDGDNVRHGLNADLGFTDADRVENIRRVVEVARLLADAGLIVLTSFIAPFRAERQLARERIGAEYFLEVHVDAPLEVVESRDSKGLYAKARRGELVNFTGIDSPYEVPESPDLRLDSSGAQPPEALAEQVIERLRAVGKLEPETQAEM

SEQ ID NO: 45231 - protein, 124 aa, Glycine max
MALSKFLGFILLAAFFVSFTVAQSPAPAPSSGGRRISPAHSPKKAMSPAPAVSPTPQTALTPESSSSPPSPPSADSPSDLPAFSPSSISNSPAQAPAPVSGTVSNNYAVFGSVAFMLTAAVLAM

SEQ ID NO: 45232 - protein, 404 aa, Leptosphaeria maculans
MHSKPQRALVIGATGVSGWSLCLQLLQTQTPSAFESVDLLTNRPVSLSDAQWPTDSRLRVHSGIDLNRTSEEVIGSFRGIPDIGEITHVFYVACGMSPTYDFAETAKINVQMTKAALDAIEAVAVCTKHISFQAGSIVYGIPFADWLGDNFRPGPFNESFARVPPPFSDMVSHYRQEDYVKAMADKNSWTWSSIRPDTIIGFTPRNSPHCLSVSLGLYFAFYRYVYGKGAVLHFPGSESAWKADFTVIGQDQLARFHIFTSTHAASNGTPGALNISNGETTSWEQIWPKIVQYFDLVGAPPEPKMAEGDSDDASSPRFGPEWFQGVTAKATEFEAEYGLQPDFVTNIAWQYLTFLLNLKIDRVLDIEKARDLGFLESSNTVSDFEKSWDHMRKARIIPSVEQSD

SEQ ID NO: 45233 - protein, 1114 aa, Arabidopsis thaliana
MEFSIDRDKNLLMVVPETRIKTKQFEKVYVRRKSIKLPQNSMVHNTLIKMARQRIQKSMKESVMNQHIFKNFDSYLSVIYHPCCFVINNSQTTHKKKEKKNSKEKHGIKHSESEHLQDDISQRVTGKGRRRNSKGTPKKLRFNRPRILEDGKKPRNPATTRLRTISNKRRKKDIDSEDEVIPELATPTKESFPKRRKNEKIKRSVARTLNFKQEIVLSCLEFDKICGPIFPRGKKRTTTRRRYDFLCFLLPMPVWKKQSRRSKRRKNMVRWARIASSSKLLEETLPLIVSHPTINGQADASLHIDDTLVRHVVSKQTKKSANNVIEHLNRQITYQKDHGLSSLADVPLHIEDTLIKSASSVLSERPIKKTKDIAKLIKDMGRLKINKKVTTMIKADKKLVTAKVNLDPETIKEWDVLMVNDSPSRSYDDKETEAKWKKEREIFQTRIDLFINRMHRLQGNRKFKQWKGSVVDSVVGVFLTQNTTDYLSSNAFMSVAAKFPVDAREGLSYYIEEPQDAKSSECIILSDESISKVEDHENTAKRKNEKTGIIEDEIVDWNNLRRMYTKEGSRPEMHMDSVNWSDVRLSGQNVLETTIKKRGQFRILSERILKFLNDEVNQNGNIDLEWLRNAPSHLVKRYLLEIEGIGLKSAECVRLLGLKHHAFPVDTNVGRIAVRLGLVPLEPLPNGVQMHQLFEYPSMDSIQKYLWPRLCKLPQETLYELHYQMITFGKVFCTKTIPNCNACPMKSECKYFASAYVSSKVLLESPEEKMHEPNTFMNAHSQDVAVDMTSNINLVEECVSSGCSDQAICYKPLVEFPSSPRAEIPESTDIEDVPFMNLYQSYASVPKIDFDLDALKKSVEDALVISGRMSSSDEEISKALVIPTPENACIPIKPPRKMKYYNRLRTEHVVYVLPDNHELLHDFERRKLDDPSPYLLAIWQPGETSSSFVPPKKKCSSDGSKLCKIKNCSYCWTIREQNSNIFRGTILVFADHETSLNPIVFRRELCKGLEKRALYCGSTVTSIFKLLDTRRIELCFWTGFLCLRAFDRKQRDPKELVRRLHTPPDERGPNGFHIVVVDEKEESPRVGLMVMPGFWIGGSVIQNRVYVSGVKVLE

SEQ ID NO: 45234 - protein, 341 aa, Burkholderia fungorum LB400
MSASVDESGASEVEEEIAEERDLDERQGGADEAGDAREGASEVAPDADDFRALLQAELTADTIQHYLNRISVKPLLTVEEEQKYSRLAKAGEFEARQVMIERNLRLVVSIAKGYLNRGVPLLDLIEEGNLGLMHAIEKFDPTRGFRFSTYATWWIRQSIERAIMNQARTVRLPVHVIRELNQVLRAKRHLEKNSMNSGEAAERRDASIDDIAYLTGKTTDEVTDILALNEHTASLDAPLDLDPASSLLDLLSDDQSQSPDAEVQHRELETLTRAWLARLSDKHRHVIERRFGLNHIEPATLEELADEMGLTRERVRQIQQEALVRLKRFFASNGVRKDAVL

SEQ ID NO: 45235 - protein, 475 aa, Salmonella enterica subsp. enterica serovar Typhi Ty2
MMSTEIKTQVVVLGAGPAGYSAAFRCADLGLETVIVERYNTLGGVCLNVGCIPSKALLHVAKVIEEAKALAEHGIVFGEPKTDIDKIRTWKEKVITQLTGGLAGMAKGRKVKVVNGLGKFTGANTLEVEGENGKTVINFDNAIIAAGSRPIQLPFIPHEDPRVWDSTDALELKEVPKRMLVMGGGIIGLEMGTVYHALGSEIDVVEMFDQVIPAADKDIVKVFTKRISKKFNLMLETKVTAVEAKEDGIYVSMEGKKAPAEAQRYDAVLVAIGRVPNGKNLDAGKAGVEVDDRGFIRVDKQLRTNVPHIFAIGDIVGQPMLAHKGVHEGHVAAEVIAGKKHYFDPKVIPSIAYTEPEVAWVGLTEKEAKEKGISYETATFPWAASGRAIASDCADGMTKLIFDKESHRVIGGAIVGTNGGELLGEIGLAIEMGCDAEDIALTIHAHPTLHESVGLAAEIFEGSITDLPNPKAKKK

SEQ ID NO: 45236 - protein, 267 aa, Oryza sativa
MDEGGGAGAAAAAAGNAAGAAVHHNARSAEDVFRDFRARRAGIVKALTTDVEKFYRQCDPEKENLCLYGLPNETWDVTLPAEEVPPELPEPALGINFARDGMIEKDWLSLVAVHSDAWLLSVAFYFGARFGFDKEARRRLFTMINGLPTVYEVVTGIAKKQTKVSNGSSKSNKSNPKPSKQSNSNSKPAKPPQPKDEEDSGPEGTEDEDQAYMCGACGETYANGEFWICCDVCEKWFHGKCVRITPAKAEHIKQYKCPGCSSKRSRE

SEQ ID NO: 45237 - protein, 366 aa, Zea mays
MGLDVGEIGMGLDLGLDLRLFAARSAGGMAKGAAPAGIQSCIRSLEVERRKIEVFRRELPLCLRLLADVIDELKEEAAKRGEYDDGATVVDDGDKRKWMSTAQLWVDSDAKSDESDKEQQSEITSPPEPKLLGGGAPTPIRAAGSAVAVPPPLPPPLFRREDSSASSGLSSLVSSPATKARAVPISPPVVAASGTTASARFCGTTMPPCGSEVINMHSQAQQQASRKARRCWSPELHRRFVAALHELGGPQVATPKQIREVMQVDGLTNDEVKSHLQKYRLHNRRSSPGAAAAPVSQSIMLVDGVWAAQEQSSSQSGSRQGPLQFSRPGVAVGGGDDSSSSDDEDDNKSEDGYSREAAFAEGRMRV

SEQ ID NO: 45238 - protein, 419 aa, Methanosarcina barkeri str. fusaro
MKEVTVGSRSKLLEGVKQHLCTCAAGLKLTPDMEAFLEMPMRELYVSLPVHMDDGSIKVFKGFRVQYNEALGPTKGGVRFHPEDTMETTRALAALMTWKCALHKLPLGGAKGGVICNPKELSHREIERLSRAYIRGIYQIIGPDRDIPAPDIYTNPQVMAWMMDEYSKLAGRNVFGSITGKPTSLGGSAGRYDATARGGLYTIREAAERIGISLKASRVAVHGFGNVGYHAAYLANKLYGCKVVAVSDSKGAIFSPYGLDPEDVSGHKHSTGSVLDYPEAENLTNKELLELDVEILIPASLENIITEENAGNIKARILAEMANGPTTVEGEAILNSKGIHIIPDILCNGGGVIVSYFEMVQNQSSTQWEEEEVQNRLERKMKEAYFSVYDFASKNNVEMRQAAYTLAVGRVVEAMQLRG

SEQ ID NO: 45239 - protein, 442 aa, Arabidopsis thaliana
MADICYEDETSACESRPLWSSRKWRIGVQRFRMSPSEMNPTASTTEEEDKSEGIYNKRNKQEEYDFMNCASSSPSQSSPEEESVSLEDSDVSISDGNSSVNDVAVIPSKKTVKETDLRPRYGVASVCGRRRDMEDAVALHPSFVRKQTEFSRTRWHYFGVYDGHGCSHVAARCKERLHELVQEEALSDKKEEWKKMMERSFTRMDKEVVRWGETVMSANCRCELQTPDCDAVGSTAVVSVITPEKIIVANCGGSRAVLCRNGKAVPLSTDHKPDRPDELDRIQEAGGRVIYWDGARVLGVLAMSRAIGDNYLKPYVTSEPEVTVTDRTEEDEFLILATDGLWDVVTNEAACTMVRMCLNRKSGRGRRRGETQTPGRRSEEEGKEEEEKVVGSRKNGKRGEITDKACTEASVLLTKLALAKHSSDNVSVVVIDLRRRRKRHVA

SEQ ID NO: 45240 - protein, 614 aa, Desulfitobacterium hafniense DCB-2
MQSIFAKAAAITRGCYSRNGSTVKKKSSFLKRILILMITTIALYSFLITIFFWFTTNDMFRELQTRELKPSAEAIADLVLKYQQGTMSKDDLEEHFNLNKGIWNFVVHVYDGQGNLIIKNEEILTTLFRGKNAEIGLNLNPVLKEYFSSVLSGDSVVANKGPFLIVGQPIAHNDSIVGMVFLGKPQIEIFTALSGLNRSIWISALGVLLLLSFPLYRAARYIAHPLKQMRDVAISMANGNLKEQANEKYGGEIGELAHSLNYLSARLSETISALELERNRLKQTIDGLAEGIVAIDNEGNFTHINPSIQRIFGKNPGEGRMSLIPSQELWEDFDAVLAQGYTIVRSLQWKQMLLRVTICPLEDETHHIAGVVGLFRDITESERLEQTRREYVANVSHELRTPVSALRALSETLADGMVSDEETKNRYYNHMLHETMRLTRLINDLLTLSRLQSHTEQVHTEAFLINEVTGSVAERYKPLAQKKGLRFDYSPLVHDLKVMSNMDLVEQVLIILLDNAIKYTQSGGRISLGTVLDKDRVKVSVADTGMGIAPEDLPHIFERFYKADKAHSTQGTGLGLAIAFEISQRLGEEIYVESHLNEGSTFTFTLSCSGASAS

SEQ ID NO: 45241 - protein, 102 aa, Cryptococcus neoformans A/D
HLDEGQSLHWHGLRQLGTAFMDGVPGITQCPIPPGGSFTYNFTVSHQSGTYWWHSHYSNSMADGIWGPLIVHSPNEPLQRGRGYDEDRIVFITDWMHDNSEI

SEQ ID NO: 45242 - protein, 528 aa, Methanosarcina barkeri str. fusaro
MKLGLGRLKDALKNGSGTASVDGEKEQAENKDKAEKEEMQTIKSKENMPEISEEKEGNTMELKKTGMEVKKGLLSPADRTGAEKTGLIFFPAFDWAISPTHPEREERLLYTRDQIFEEGLMDLPEIAEYKPRLAEYRDIARVHFCVPDIKAQATTPHLIAAGSCLVLGDALMKAEVKNAFSLIRPPGHHAMTVSHGNRGFCNINNEAILVEYLRKTYGIRKIAIVDTDVHHGDGTQDIFYNDPDVLFISFHQDGRTLFPGSGFMSELGGPKALGRTINIPLPPGTPDEGILYVLDSLVLPILEDFKPELVLNSAGQDNHYTDPLANMRFSTQGYAKLNEKLAPDMAVLEGGYAIQSALPYVNTGIILAMAGLDYSCVREPDFKPGMFVQASRDRKTLEEIVATQLENWKNRDRLVEAEVAKHGDFYRRKKQIFYDTDMIQEFQEETIRMCPDCLGYKTIDSHAHGGAGNPRIFGVSIPIYACEKCQAEAREEYRKRLIHPEYDYVYLQDKKQDEYRAYNTRTKKEKVY

SEQ ID NO: 45243 - protein, 69 aa, Populus alba
FKADLPGIKKDEVKVEIEDDRVLQISGERSVEKEDRNDTWHRVERSSGKFLRRFKLPENARTDQVKAGM

SEQ ID NO: 45244 - protein, 151 aa, Brassica napus
  misc_feature (30)..(31): Xaa can be any naturally occurring amino acid
  misc_feature (108)..(108): Xaa can be any naturally occurring amino acid
  unsure (1)..(151): unsure at all Xaa locations
MTKKGLKSPSYGGGGSARNLELVGKSSEDXXSSTRLRLKPLRKPKTSQQKKKKKADKLHGKMPKKPPTAFFFFLEDFRKLYQEENPEVKSMREIGKTCGEKWKTMTYXEKVKYYDIATEKREEFHRAMTEYTKRVESGEFDESETESDFSE

SEQ ID NO: 45245 - protein, 106 aa, Sorghum arundinaceum
VETQQLLLQIAGHKDILEGDPYLKQGLRLRNPYITTLNVFQAYTLKRIRDPSFKVTPQPPLSKEFADENKPAGLVKLNPASEYPPGLEDTLILTMKGIAAGMQNTG

SEQ ID NO: 45246 - protein, 589 aa, Candida albicans SC5314
MLELNSITIPRNFTEFQLTALKIYYQLKILFLATYCTQGSLGLNGSVCLARDIFVGYVVYTQLLKLYRVLRGYGIIDSIRRLYLYVSSIVSSQIFSLPFIKSKIDKELQATIGKVEEEIMKNDPQLLQFPELPEQGIDADNVSLELDKLQNLKHSDWINGRVSGAVYHGGENLLSLQVEAYKKYSVANQLHPDVFPGVRKMEAEVVHMVLDIFNAPSDGCGSTTSGGTESLLLAGLSAREYGKKYRGITEPEVIAPVTIHAGIEKACFYFGMKLHKVDLDPVTFQVDVKKVERLINSNTVLICGSAPNYPHGIIDDIESLSKLAVKYNIPLHVDACLGSFIVSFLEKSKVHGDRKLPIFDFRLPGVTSISCDTHKYGFAPKGSSIIMYRSPKLRECQYYIASDWTGGMYGSPTLAGSRPGALVVGCWATLINIGKQGYTKFCYDIVSASMKVKRAIETDPILSKHLQIIGDPIGSVISFQLAPQQSGNLSIYEISDLLTKKGWHFATLQNPSALHFAFTRLTVPVVDELIADLVEATKEAVAIAEEHKKNGVTKAPGDTAALYGIAGSVHTAGLADRLIVAFLDTLYKI

SEQ ID NO: 45247 - protein, 491 aa, Oryza sativa
MDPCKFRPSSSFDTKTTTTNAGAPVWNDNEALTVGPRGPILLEDYHLIEKVAHFARERIPERVVHARGASAKGFFECTHDVTDITCADFLRSPGAQTPVIVRFSTVIHERGSPETIRDPRGFAVKFYTREGNWDLLGNNFPVFFIRDGIKFPDVIHAFKPNPRSHVQEYWRVFDFLSHHPESLHTFFFLFDDVGIPTDYRHMDGFGVNTYTFVTRDAKARYVKFHWKPTCGVSCLMDDEATLVGGKNHSHATQDLYDSIAAGNFPEWKLFVQVIDPEEEERFDFDPLDDTKTWPEDEVPLRPVGRLVLNRNVDNFFNENEQLAFGPGLVVPGIYYSDDKMLQCRVFAYADTQRYRLGPNYLMLPVNAPKCAHHNNHYDGAMNFMHRDEEVDYYPSRHAPLRHAPPTPITPRPVVGRRQKATIHKQNDFKQPGERYRSWAPDRQERFIAVRRRVAHPKVSPELRAIWVNYLSQCDESLGVKIANRLNVKPSM

SEQ ID NO: 45248 - protein, 489 aa, ASPERGILLUS NIDULANS FGSC A4
MSTVVEEATRIARQFEYSPEQVQRGVKEYIREVEEGLSEEGTTLSQIPTFVTSVPNGTEKGLYLAVDLGGTNFRVCSIDLHGNHTFSLTQSKIMIPREMMTSGSAKELFLFLARQIESFLRIHHNEHFEAHLKRKIAGTAREEDLFDLGFTFSFPVRQLGINKGTLIRWTKGFDIPDAVGQDVCALLQNAIEELNLPVRVAALVNDTVGTLMARSYTSPGETGTFLGAIFGTGTNGAYVEKLNKITKMAKIEHSDYDKSTGEMIINAEWGSFDNHLSVLPTTEYDRQLDADSNNPGIQMFEKRVSGMFLGEILRLVLLDLHKSQGLFKPASGSDVFIPESSSLYRQWGIDTSLLSIVEADKSKDFEQVKSALKDHLKVERASENDCKAVQTVVHAIGKRAARLAAVPIAATLISTGKLKEELVDIGVDGSLVEFYPNFEGYMREAMREVPEVGDAGDKKVRIGISKDGSGVGAALIALVASKEGTKPPL

SEQ ID NO: 45249 - protein, 201 aa, Thermosynechococcus elongatus BP-1
MSNPRENIIWHQATVTRARREQLNGHKSCVLWFTGLSGAGKSTLAHAVEERLHQLGYRTFVLDGDNVRHGLCSDLGFTESDRKENIRRIGEVAKLMMEAGLIVMTAFISPFRADREAVRNRMPHGDFLEIYCQASLEVCEARDVKGLYKRARAGEIKNYTGIDSPYEPPLKPELIVNTECLTLEESVGAVLRMLQERGVVQ

SEQ ID NO: 45250 - protein, 602 aa, Escherichia coli
MQTFQADLAIVGAGGAGLRAAIAAAQANPNAKIALISKVYPMRSHTVAAEGGSAAVAQDHDSFEYHFHDTVAGGDWLCEQDVVDYFVHHCPTEMTQLELWGCPWSRRPDGSVNVRRFGGMKIERTWFAADKTGFHMLHTLFQTSLQFPQIQRFDEHFVLDILVDDGHVRGLVAMNMMEGTLVQIRANAVVMATGGAGRVYRYNTNGGIVTGDGMGMALSHGVPLRDMEFVQYHPTGLPGSGILMTEGCRGEGGILVNKNGYRYLQDYGMGPETPLGEPKNKYMELGPRDKVSQAFWHEWRKGNTISTPRGDVVYLDLRHLGEKKLHERLPFICELAKAYVGVDPVKEPIPVRPTAHYTMGGIETDQNCETRIKGLFAVGECSSVGPHGANRLGSNSLAELVVFGRLAGEQATERAATAGNGNEAAIEAQAAGVEQRLKDLVNQDGGENWAKIRDEMGLAMEEGCGIYRTPELMQKTIDKLAELQERFKRVRITDTSSVFNTDLLYTIELGHGLNVAECMAHSAMARKESRGAHQRLDEGCTERDDVNFLKHTLAFRDADGTTRLEYSDVKITTLPPAKRVYGGEADAADKAEAANKKEKANG

SEQ ID NO: 45251 - protein, 409 aa, Leptosphaeria maculans
MSPSKTTPPSPTALVYGATGVTGWGLCKNLLEQQADSASTPTFSRVIGVCKQPAQDLGLFLEDKRFELVDGVDLLQGEDSVVEVLKEVKGIENVTHVFYVANRNSPSDGPDERISFNVKMIQSAVKAAEQLSSNMQVLIMQTSINVYGIFASLMGGTLTCPSPLVESADRTPSPYREMDVHYAQCDELKRLSKGKSWSWFEVRPDAVIGYVPRRHENNFTVSLGLFLATYAHVHGAGAPVRFPGTPESWKCKFSMVSQDQLARFEIHLATHAEGLQSGEAFNVSNGDVLTWSKLWPEAAARFGLRGVGPEGAGEEEGKGEAEGGAKGATGWSWPLGDETTMKKWEEENQVQKGWGGNLSEVCFVNTMRPTVDRILSLDKAKKIGFEARDDTIAAFDKAWALFKKARILP

SEQ ID NO: 45252 - protein, 1263 aa, Leptosphaeria maculans
MAEPESEKPSSAQGGGLPSSDHPLNPILQRQIELPEIKINYFSLFRYATVKEYALLLISAFFAAVSGAMFPLLILFIGNLVQVLKDFNLGTIPQEQLSEQIRDIALYIVYLFLGQLVSVFIFTNGCLLVGEAITNAIREKYVRSLFRQNIAFFDTYGSGKITSQLTSSTATIQDAISHKIGLFVSACSCFVASYAIGFVKHWKLTFILTSTVVAITGVMIIMSGFMAKFGANSSGALAEASAKLEETFSGIRVVKALGLEKRLSDELDPQLLNIEFWGKRVRHVMGWMLAIMYGLIFLNYGLAIWQGYRFMQGGTEDVGAIITVLMCLNIGAFLFGNVGPHLQAMSLGAAAAQDIFAVIERESVTDGGAPPGSFEVEGNIEFRNVSHVYPSRPDTHVLQDFSMIFPAGKVTAIVGASGSGKSTIVSILERFYEPVSGQVFLDGHDITHLNVQWLRQQFGLVGQEPVLFNGSIFKNVAYGLKGTQYGQESREVTMKLVTEACRIANAHDFITALPHGYDQEVGIRGASLSGGQRQRIAIARAIVSGPKILLLDEATSALDVQSEEAVQLGLNMASSGRTTIVVAHSLSTIKLADNIIVMEKGRVAQQGTHAELEAQEGLYQTFVRRQQLKQATLEPPHARITPAVDTPASPQHRLSEKTGSIYGQGESEAADKSPSTKYSFVQLVKFVARFNKEDWRLMVTGIASAVISGAVWPAHSVFFAKAIVALSSPSPASLARGPNFWAAMYVMLAFVQIASQGVQGSAFAICAERLILRARRVAFKYLLRQDVEFFDDPLHSSGIMTSFVSSDVNALAGLSGVFLGTLFSATATVLGGLILSLAVGWKLTLVTMGTIPIIIVAGYVRLKLVGTLEKISRKVHEESAGRVCEEINAVRTVAASCLEDEMCEDYVRSLKSKEKTYLRATLWSSGWYALSEAVPLGCMSLGFWYGATLVMRTEYTTEQFFIVVTAVIFGASSAGLVFAFAPDFGKAGVSAERLQELVDRQPEVDTWSEEGDHIETTNGKVDVSNVVFYYNQRSKTPVLNSISLGAAPGQSIGLCGGSGSGKSTVASLLERFYNPSSGTVSLDEKDVRTININSYRAQFALVNQEPLLFSCSIRENLLYGSLGKDLTDSEIEEACKMAQVYDFVCSLPEGLDTSFGSNAVMLSGGQRQRLSIARAILRKPRVLILDEATSALDSTSERAVIEALTKTAEGRTTIMVAHRLSTIQGCDKIFYLRAGAVAEEGTHEELMAKRGSYYDSVNLQSLG

SEQ ID NO: 45253 - protein, 1085 aa, Emericella nidulans
MDGDELIASVYRKIEREKALIAAASNMRQSTDNPLVQQRVDANIRDGRKNIAYLEEKMKELQLRQMERESGSPTDKRLPPNPEDGPAPPPKDPLGYGDPTQHPQPGAGSMPSGAPFKDPRPFAPVPKARPNYTKLDLIKYDTPYLGPKIQLMLSQLEFKLSVEKQYKAGIEKMVRLYQDEGDRKSRTDAEGRRIESNQKIQLLKQALKRYEDLHVDIESTDTPDDESLSAPNLRKPLTGLLTMRIQAVQDVDHATSSRFSRGPETFVIVKVEDTIKARTKATRSDRWQDETFNLDIDKANEVELTVYDKAGDRPTPIGMLWLRISDIAEEMRRKKIETEINASGWVSADKMGPGIGPGQTTPAAPVGSSQYGASAGYSNPGPEGQTGATGGPLMIDAWFALEPVGRIHISMSFAKHSKDRRPFDIGLNRQGAVRQRKEEVHEKQGHKFVTQQFYNIMRCALCGDFLKYAAGMQCSDCKYTCHRKCYPKVVTKCISKANYETDPDEEKINHRIPHRFEGFSNISANWCCHCGYLLPFGRKNAKRCSECGLTCHAHCTHLVPDFCGMSMEAANQILETLIRHKNHNKSPSVSSGLSGKTLRPGGSQDAGHAYPKPVESPSSYGQRPPSAEAVSAAATSYIPPPQSPTSQRQPLPPRTSSSSPAAAAAAVATGRMPDAGRPVQPPAHAHYDPAAYASYQQGAMQQGYPPAQAMQKVNAPAQYGMHAPPPPQQQQQQMQAMQQQVAAKEDIPQQPKVRIGLDHFNFLAVLGKGNFGKVMLAETKATKKLYAIKVLKKEFIIENDEVESTKSEKRVFLIANKERHPFLLNLHACFQTETRVYFVMEYISGGDLMLHIQRGQFGLKRAQFYAAEVLLALKYFHENGVIYRDLKLDNILLTLDGHIKIGDYGLCKENMWYGSTTSTFCGTPEFMAPEILLDKKYGRAVDWWAFGVLIYQMLLQQSPFRGEDEDEIYDAILADEPLYPIHMPRDSVSILQKLLTREPELRLGSGPTDAQEVMSHAFFRNINWDDIYHKRVPPPFMPTISSATDTSNFDQEFTSVTPVLTPVQSVLSQAMQEEFRGFSYTADFA

SEQ ID NO: 45254 - protein, 451 aa, Thermoanaerobacter tengcongensis MB4
MNYDVIVVGGGPGGYTAAIRLSELGKKVALIEEDSLGGTCLNRGCIPTKVYAHAAELVTRIKEAKDFGITAEYTLDIAKLRQKKERVVKRLVGGVGYLMNLHHIDVINGKGTFIDKNTVEVNGAKYTAENFIIATGSKVFLPPIEGIDLEGVMTSDKALELEKIPEKIVIIGAGIIGLEFANIYASLGSKVIMIEMLPQLLPMLDRDVVGVMEKALKKQKIELHLNSKVEKIERGLRVIYTENGNQESVECDAVLVAVGRVPNVNGVDALNLEMNGRGIKVDSHMRTSIENIYAIGDVTGGIQLAHVASYQGIVAAHNIAGEEKEADLTAVPNCLYTNPEVAWVGLNESQAREKYGEVKIGTFPYTALGRAMTMGESDGFVKIIAEGKYGRVVGMEIIGAGATEIIHEGVLAIKEEFTLEELADSIHAHPTLSESIKEAAEDALGMPINKG

SEQ ID NO: 45255 - protein, 220 aa, Salmonella enterica subsp. enterica serovar Typhi Ty2
MKDIDTLISNNALWSKMLVEEDPGFFEKLAQAQKPRFLWIGCSDSRVPAERLTGLEPGELFVHRNVANLVIHTDLNCLSVVQYAVDALEVEHIIICGHSGCGGIKAAVENPELGLINNWLLHIRDIWLKHSSLLGKMPEEQRLDALYELNVMEQVYNLGHSTIMQSAWKRGQNVTIHGWAYSINDGLLRDLDVTATNRETLENGYHKGISALSLKYIPHQ

SEQ ID NO: 45256 - protein, 366 aa, Oryza sativa
MESCVPPGFRFHPTDEELVGYYLRKKVASQKIDLDVIRDIDLYRIEPWDLQEHCGIGYDEQSEWYFFSYKDRKYPTGTRTNRATMAGFWKATGRDKAVHDKSRLIGMRKTLVFYKGRAPNGQKTDWIMHEYRLETDENAPPQEEGWVVCRAFKKRTAYPARSMVETWDYSLHERNIMSAAAAAAFADPSAAYAQMRRQHRSGRFKQEAELDGAATALLHYSSHLAELPQLESPSAAAAPLQPNPSQLATAGEDDDCKGDNGGRRAKKARAAGDKVATTTDWRALDKFVASQLSPGECGSMEATAEAAAAAVAGVSSPLDHGDDDMAALLFLNSDERDEVDRWTGLLGSGAGASGVDGDLGICVFDK

SEQ ID NO: 45257 - protein, 211 aa, Populus alba
AQAAAALENKKQVCVNVEKVPAAGVDGVDAVGRKVAVKKPAQKKVTVKPKPEEVVVISPDSEEVVKQEKPVKKKKEGEGSKKNKPTLTSVLTARSKAACGIANKLKEQIIDIDAADVNNDLAGVEYVEDIYKFYKLVENESRPNNYMDMQPEINEKMRAILVDWLVDVHQKFQLSPETFYLTINIIDRFLSVKTVPRRELQLVGIGATLMA

SEQ ID NO: 45258 - protein, 255 aa, Prunus persica
MGRGRVQLKRIENKINRQVTFSKRRSGLLKKAQEISVLCDAEVALIVFSTKGKLFEYSTDSCMERILERYERYSYSEKQLLANDHESTGSWTLEHAKLKARVEVLQRNCSHFMGEDLQSLSLKELQNLEQQLDSALKHIRSRKNQVMYESISELQKKDKALQEQNNLLAKKVKEKEKALAPQAESWEQQVQNQGLDCSSTLLPEALQSLNFGSGSNYQGIRNDGSGGDHEDENETPTANRPNTLLPPWMLRHLNE

SEQ ID NO: 45259 - protein, 601 aa, GIBBERELLA ZEAE PH-1
MHFSTSSLIFLPLLIQTLITSVSATFKTKKFDLTITWEDYAPDGFSRKMLLVNGQSPGPVLEIDQDDMVVVKVHNKSPEDLTVHYHGTPWSDGVPGVTQHPIKPGSSFTYKFHASQHGSFWYHSHFRGQIEDGLYGAIIIHPRHDEPSPFHLISKDEHTVNKIKEAVEKVKPIVISDFVHLTSQEKWDMTLAAGIEDSCYDSILFNGKGRVECLDKEVVEANLNEIQKAYLGLVPGGAEFTDKACLPASALNFLAGGMGNESALLPGTFSGCKETDGQLETIEISNYFGQWESWLAFDIVGAINFVSGVFSIDGHDMWVYAMDGSYIEPQKVQAIPVANGDRYSIVIKIANTGDYKMRFNANSAPQLITGHAVLSIKGYSAAEGNIEPWINIVGLPASKEVAVFNQAVAFPYPPSPISPTADVTFNLSMAIKGASYLWALNETTLMPKEIDEGKPTLFNPQPYINNNVTISTKLGQWVDLVFVAALFPQPPHPIHKHGSKMYMLGAGTGHFRWNSVEEAIKEIPDQFNLVNPPRRDAFLSAPAEKEPSWVVVRYHAADAGPWLLHCHINNHMLGGMMMVIQDGVDAWPEVPEEYAEGGNGE

SEQ ID NO: 45260 - protein, 1413 aa, ASPERGILLUS NIDULANS FGSC A4
MADLKPPFTEEAARAKVKIAQNLWNAQDPVRVSQAYTPGCIWRNRTSFFSGTEAIVDFLTAKWKRERNYRLRKELFSFTDNRIAVQFWYEFQDANDSMRWKRCYGLEDWTFDRESGKMCKRMMSGNDILLGPDGNGEGRCDYRLLTQRWDHPTYHPYNRNRRLQQLDLNHFCRARISLAMEETSPFPDSKTMRSPLTDASNRINNCHTPTTERRLMREEHALTSPVPMSIVDSPLSPRNNAENNGPPPVGDSRACSKRNSAVSAASIVSAKGKRKTHVGPWQLGRTLGSGATGRVRLAKHAVTGQTAAVKIVSKKCAAISQSDSIAAMDRNAGTFIGAGGRQMPSGIEREVVIMKLIEHPNVISLYDVWENRGELYLVLEYVEGGELFDYVSNHGPLPEEEAVRLFRQIIAGLGYCHRFNICHRDLKPENILLDGEHNIKLADFGMAALQPAGHWLNTSCGSPHYAAPEIIYGRKYRGDKADLWSCGIILFALLTGFLPFDGEDLHATLQLVRKGDYMIPPHVSAEAADLIQRILQKKPDDRISMKDIWKHPLLKKYEKFHQAICNHYLGPPPPLSPQDCGPPVVRQDIDVDLLRNLQTLWHDVKPERLIEKLISLEPTQERLFYHALVKFRNEQLENYEGQPLRYSTSDYHHISRGQARLSKHLRSRSQNGSQRRSRAPSVKETGKRRPSTRELKPSASVETYDPYRSPFNRVPDKSPQYAHVTIHREAPETSPKPAEVEVDSSNPFLDDEQEIECQQSPPFTLVRKRKQNFNSVKSFQSKTSLISSRRALNSASTPRSVSYKRNVTFHHNRNRSQSSASAKAKRAHCNRQPSEASLISGFDDDPFSDSRSSSLLPAQPAVVRGAGIAVKNSVQRRVQHSDFVWRDEARKVSHELSQICEEAFNGSSLSTGCTDTTCVSPETPATSVSLASPGVSNHQMDSSSSTVCLAATPPADSPKTSHVRRELEETRRRLIEHSMKDGSKEIPQCLAPVIDHLDRLIEQEKTRRPGKVSTKEDYSSMSDLFCGSPVEPTQLSVLSEELNTGRRSDDTPSSKKDRQVSGSTAASSQISRGKRSIRMVPHSSYQSISNTEPRAVHRPAAALIDRPENDRGNALASRVGSNHRHNRTPCELDPIDEHPASPRRSAVRSTDHKKWSWFRKSQNIEEDFVKAPTVVKPLHPSSATVIVHEVHPARNTAENQPKLGKPPSDSQKVSFWSFIKRKKGKNADPESTATNPVLESRRDDERQRAHPGPKLSENKTATKPRRSIRSSGISNNWFARVFQFKPATRVVALNASKIKGRKEIYKMLRDWKQYGMEDIYLDKPNSIIYGRVGESNFLHLRPVDFSADFYTVIEDGRQANLSVVRFRQERGAASSFNRVVDTLCMVMKQRGLLVEDPARAKRMAQVLDAFPNA

SEQ ID NO: 45261 - protein, 546 aa, Staphylococcus aureus subsp. aureus MRSA252
MLKEIDWRKSVVYQIYPKSFNDTTGNGIGDINGIIEKLDYIKLLGVDYIWLTPVYESPMNDNGYDISNYLEINEDFGTMDDFERLINVAHEKGIKVMLDIVINHTSTEHEWFKAARKSKDNPYRDYYFFKASEDGPPTNWHSKFGGNAWKYDSETDEYYLHLFDVSQADLNWDNPEVRQSLYRIVNHWIDFGVDGFRFDVINLISKGEFKDSDKIGKEFYTDGPRVHEFLHELNRQTFGNTDMMTVGEMSSTTIENCIKYTQPERQELNSVFNFHHLKVDYVDGEKWTNAKLDFHKLKEILMQWQRGIYDGGGWNAIFWCNHDQPRVVSRFGDDTSEEMRIQSAKMLAIALHMLQGTPYIYQGEEIGMTDPHFTSIAQYRDVESINAYHQLLSEGHAEADVLAILGQKSRDNSRTPMQWSDDVNAGFTAGKPWIDISENYHQVNVRQALQNKDSIFYTYQKLIQLRHTHDIITYGDIVPRFMDHDHLFVYERHYKNQQWLVIANFSASAVDLPEGLACEGRVVIQTGTVENNTISGFGAIVIETNA

SEQ ID NO: 45262 - protein, 388 aa, Arabidopsis thaliana
MQIFVKTLTGKTITLEVESSDTIDNVKAKIQDKEGIPPDQQRLIFAGKQLEDGRTLADYNIQKESTLHLVLRLRGGMQIFVKTLTGKTITLEVESSDTIDNVKAKIQDKEGIPPDQQRLIFAGKQLEDGRTLADYNIQKESTLHLVLRLRGGMQIFVKTLTGKTITLEVESSDTIDNVKAKIQDKEGIPPDQQRLIFAGKQLEDGRTLADYNIQKESTLHLVLRLRGGMQIFVKTLTGKTITLEVESSDTIDNVKAKIQDKEGIPPDQQRLIFAGKQLEDGRTLADYNIQKESTLHLVLRLRGGMQIFVKTLTGKTITLEVESSDTIDNVKAKIQDKEVFLRTSSVSSSLESSLRMDVLWPTTTSRRSLLFTWSCVFVVVSKSRLCYA

SEQ ID NO: 45263 - protein, 289 aa, Capsella rubella
MMLEKDDLGLSLGLNYPKKQMNLNSNPSVSVTPSSSSFGLLRRSSLNESFTSSVPNSDSSQKETRTFIRGIDVNRPPSTAEYGEEDAGVSSPNSTVSSSTGKRSEREEDTDPQGSRGGISDDEDGDNSRKKLRLSKDQSAILEETFKDHSTLNPKQKQALAKQLGLRARQVEVWFQNRRARTKLKQTEVDCEFLRRCCENLTEENRRLQKEVTELRALKLSPQFYMHMSPPTTLTMCPSCEHVSAPPPQQPPQAATSAQHHRGSLPVNAWAQGTRISHGLTFDALRPRS

SEQ ID NO: 45264 - protein, 445 aa, Bacteroides fragilis NCTC 9343
MNIEKIMSSLEAKHPGESEYLQAVKEVLLSIEDIYNQHPEFEKAKIIERLVEPDRIFTFRVTWVDDKGEVQTNLGYRVQFNNAIGPYKGGIRFHASVNLSILKFLGFEQTFKNALTTLPMGGGKGGSDFSPRGKSDAEIMRFCQAFMLELWRHLGPDMDVPAGDIGVGGREVGYMFGMYKKLTREFTGTFTGKGLEFGGSLIRPEATGFGGLYFVNQMLQTKGIDIKGKTVAISGFGNVAWGAATKATELGAKVVTISGPDGYIYDPNGISGEKIDYMLELRASGNDIVAPYADEFPGSTFVAGKRPWEVKADIALPCATQNELNGEDAKNLIDNNVLCVGEISNMGCTPEAIDLFIEHKTMYAPGKAVNAGGVATSGLEMSQNAMHLSWSAAEVDEKLHSIMHGIHAQCVKYGTEPDGYINYVKGANIAGFMKVAHAMMGQGII

SEQ ID NO: 45265 - protein, 272 aa, Oryza sativa (japonica cultivar-group)
MGRRACCAKEGMKRGAWTSKEDDVLASYIKSHGEGKWREVPQRAGLRRCGKSCRLRWLNYLRPNIKRGNIDDDEEELIVRLHTLLGNRWSLIAGRLPGRTDNEIKNYWNSTLSRKIGTAATAAAGSRGGSTPDTARATDAASSSSVVQPGQQQQPASRADTDTATAAAAAAATTTTVWAPKAVRCTRGFFFHDRETAPLAAAAPAPAGELGDGDDVDCDYYCSGSSSAATTTSSSSLPAVVEPCFSAGDDWMDDVRALASFLDTDDAWNLCA

SEQ ID NO: 45266 - protein, 316 aa, Burkholderia fungorum LB400
MAASMSATPEVQRPDILALGEAMIEFNQSVKDEPNYLQGFGGDTSNFCIAAARQGARTGFVSAVGADHFGRLLVDLWEREQVDTSLVRVDPHASTGVYFVSHGPEGHAFDYLRAGSAASRYAPQDLPLEAIAAARVIHLSGISLAISLSACDAALAAIAHARANGVRVSFDTNLRLKLWPLARARAVMLEAIRQTDICLPSWDDVTELTGLTGRDEIVDFLLSHGPGVVALKLGKQGSYIATPNERRVVPGQLVDAVDATGAGDCFGGAFIARIVAGDDPFAAARYANVAAALSTQGYGAVAPIPSRETVEQLLAD

SEQ ID NO: 45267 - protein, 473 aa, Magnaporthe grisea 70-15
MASAMRLSSAFRATARAPAFTARRTAFNGMRCYSAKTQTLKERFAELLPEKIEEIKSLRKEHGSKVIDKVTLDQVYGGARGIKCLVWEGSVLDSEEGIRFRGKTIPECQELLPKAPGGKEPLPEGLFWLLLTGEVPSEAQVRALSAEWAARSDLPKFVEELIDRCPNDLHPMAQFSMAITALEQTSSFAKAYAKGINKKEYWGYTFEDSMDLIAKLPTIAARIYQNVFKGGKVAPVQKDKDYSFNFANQLGFGNNSDFVELLRLYLTIHTDHEGGNVSAHTTHLVGSALSSPFLSLAAGMNGLAGPLHGLANQEVLNWLTEMKKSVGDDLSDKSITDYLWSTLNSGRVVPGYGHAVLRKTDPRYTAQRVFAQEKMPNDPMFKLVSQVYKIAPGVLTEHGKTKNPFPNVDAHSGVLLQYYGLTEANYYTVLFGVSRAIGVLPQLIIDRAVGAPIERPKSFSTEKWIEIAKKTAA

SEQ ID NO: 45268 - protein, 394 aa, Burkholderia fungorum LB400
MQRDVVVVSGVRTAIGTFGGSLKDIPPTDLGARVVREALARASVSGDEVGHVVFGNVVHTEPKDMYLARVAAINGGVAQHVPALTVNRLCGSGLQAIVSAAQSVLLGDADIAIGGGAENMSRAPYSMPAARFGQRMGDARLVDMMVGALNDPFQSIHMGVTAENVARKYDISRETQDALALESHRRAANAITSGYFNEQILPITIPSKKGDIVFDTDEHARMSASAEDFSRLKPVFAKENGTVTAGNASGINDAAAAVVLMERGIAEQRGIKPLARLVSYAHAGVDPAYMGIGPVPATRKALERAGLTIADLDVIEANEAFAAQACAVSKELGFDPAKVNPNGSGISLGHPIGATGALITVKALYELQRVGGRYALVTMCIGGGQGIAAIFERI

SEQ ID NO: 45269 - protein, 143 aa, Triticum aestivum
MGKQKIVLKLPLDDKRKRRKAFKAAVGMNGVTSATMEGDKITVVGDGVDPITLTTILRRSLGYAELLSVSSGDDKKKGDGYGYGSAGGMMYGGGGYVAKGKRARQRRKARWGLRGITGIRRLLPPTTHPTRALPQIPRKASHQ

SEQ ID NO: 45270 - protein, 84 aa, Oryza sativa
MSCCGGNCGCGSGCQCGGGCGGCKMFPDVEATATTKTFVLAAPSNKASSGGMEMAVETGENGGCGCNTCKCGTSCSGCSCCSCN

SEQ ID NO: 45271 - protein, 406 aa, Nocardia farcinica IFM 10152
MPEAVIVAAARSPIGRAGKGSLKEMRPDDLTVQMVRAALAQVPALDPAQVEDLLLGCGQPAGESGFNMARTVAVLAGLDTVPGTTVNRYCSSSLQTTRMALHAIKAGEGEVFISAGVETVSRLGKGSADGWPDTQNPVFADAVARTAERASGGAADWADPRAQGLLPDVYIAMGQTAENVAQFTGITRAEQDAFGVRSQNLAEKAIADGFWATDITPVTLPDGTVVSADDGPRAGVTLEAVSQLKPVFRPDGTVTAGNCCALNDGAAALVIMSDTKARDLGITPLARIVSTGVSALSPEIMGLGPIEASKQALGRAGLTIDDIDLVEINEAFAVQVLGSARELGIPEDKLNVNGGAIAVGHPFGMTGARITSTLINSLRFHDKQFGLETMCVGGGQGMAMVLERLS

SEQ ID NO: 45272 - protein, 323 aa, Enterococcus faecium
MEKIIDITVFGCEPDEMEVFQKITYELGVTATLIKDSISESNAKLADGCRCVSVSHKAELSEPILLALKNAGVKYISTRSIGFNHIDIQAAGLLGMVVGTVEYSPGSVADYTVMLMLMLMRGTKSILRETQRQNYCLNDLRGKELRDMTVGVLGTGRIGQAVMERLKGFGCKVLAYDRNQKAGADYVSFHELLKKSDIVTLHIPLAEDTRHMIGCEELEMMKQEALLINTGRGALVDTAALVEALKGQKIGGAALDVLEGEEGIFYHDCTQRTIEHPFLSVLQGMPNVIVTPHTAYHTERVLVDTVRNTIRNCLNFERSLGNV

SEQ ID NO: 45273 - protein, 366 aa, Triticum turgidum subsp. durum
MADHAASEEEPPILLDRAARATRGKRITKLVEEEVELDEAFWGQEALKEDEEDDNYQEEQDAGDVFDSDFDEDEPQPDDDPEKEVSERLPIKKRLFFPGKTMKKMKAKKKKKKNKVIKLEDDEGIDDKNPDKTTSSKQSDVPDEWESEKTIRKSTRTSVIVRQAEREAIRAEKQATAKPIKKRKEGEEKRMTQEEMLLEAAETEIMNMRNLERVLAREEEVKKKAVVQKAVYEGPTLRFHSRDGESRLEFINGASFGSELCTTSTPYPEKSVCVVTGLPAKYRDPKTGLPYATMAAFKIIRESFLKEEPDKKRPNMSNMGELFESVAGEHSTPKKKRIESRSPISGDLRHGGRFRRIPALDVMDED

SEQ ID NO: 45274 - protein, 521 aa, Oryza sativa
MALPFPVPRGAHWAVTSTAHVLVGFTGEMARVEQPRAPAPYNAAFLRKKLTLATKMHTTKSSDSHLDIAGTVVTHSHGAAVAAGKQKAAATAAAGRPGARNRQALGDIGNVLNAHVVDGKIQLPEGINRPITRSFGAQLLKKAQENAVAANKIVVQNPARKEPAPKPAKKVVPRPENAAKASTGAGVNENKKPSESEGAGSSSGGSALKYSRKKVVNTLTSVLTARSKHACGITEKPKEVVEDIDKLDGDNQLAVVEYIEDIYNFYRTAQICSETDSVVLAQLERRPTDYMSSQVEVNPKMRAILADWIIDVHYKFELMPETLYLTMYVIDRYLSLQPVLRRELQLVGVAAMLIASKYEEMWAPEVQDLIHVCDNAYSRQHILAMEKNILNRLQWNITVPTPYVFLLRFIKAAGGDKELENMVFFFSEMALKEYGMASLCPSLVAASAVYAAQCTLKRSPLWTSTLKHHTGFTESQLRECAKVLVNAHAAAPESKLKTAYRKYASEQLGRVSLRPPAVCLA

SEQ ID NO: 45275 - protein, 754 aa, Corynebacterium efficiens YS-314
MTSFFSSTIAGVPRIGAHRELKFALEGFWSGTVSGRELGQTATTLTNDYCDQLAAAGLDSIPTAGRSYYDAMLDTTALLGVFPERFQNLDDHPNDGLPAHIDRYFATARGTAELPASAMTKWFDTNYHYLVPELSADTRFILDDTALLTDIHDQLTRGHDVRPVLIGPLTYLSLSRTTDGSDPLDHLETLFEVFERLLAKLPTPWVQLDEPSLVTDVAPEVLERVRAGYARLATRGGVFVNTYFGAGDQALDTLAGLGLGAIGVDLVSDGVTALEAWKGEELLVAGIVDGRNVWRTDLCAALGTLRRLQARGPVAVSTSCSLLHVPYALTAETGLNPEVREWLAFGEEKVREVVALADALAGEINESLFDAAAAALADRRHSVLTAARDADITDADRSRSPFEVRAAAQDEALDLPPLPTTTIGSFPQTREIRSARARYRAGHLTPEQYEDAMRAEIAQVIRAQEDLGLDVLVHGEPERNDMVQYFAELLDGFLTTTNGWVQSYGSRCVRPPILFGTVTRPEPMTVRWFAHAQSLTNRPVKGMLTGPVTILAWSFVRDDQPLAVTADQIALALREEITDLVDAGAKIIQVDEPAIRELLPLRRAEQDAYTRWAVGAFRLSTSTAPDHVQIHTHMCYSEFNELIRSIIDLDADVTTIEAARSDMQVLAALKSSGFHLGVGPGVWDIHSPRVPELAEVSQLLSSALESVDPRRLWVNPDCGLKTRGWEETTASLKVLVAAAEQARTDLLQRASTSA

SEQ ID NO: 45276 - protein, 559 aa, Alcaligenes sp.
MYLNITGMTCDSCATHVKDALEKVPGVLSALVSYPKGSAQLATDPGTSPEALTAAVAGLGYKATPADAPSTSARGRLLGKALGWLGGGDKAGGDGDGLHVAVIGSGAAMAAALKAVEQGANVTLIERGTIGGTCVNVGCVPSKIMIRAAHIAHLRRESPFDGGIAATVPAIDRSKLLAQQQARVDELRHAKYEGILDDNPAITVLHGEARFKDDQSLAVRLNDGGERVVAFDRCLVATGASPAVPPIPGLKESPYWTSTEALVSDTIPERLAVIGSSVVALELAQAFARLGSKVTILARSTLFFREDPAIGEAVTAAFRAEGIKVLEYTQASQVAHVDGEFVLTTGYGEIRADQLLVATGRAPNTRSLALEAAGVAANAQGAIVIDKGMRTSTPHIYAAGDCTDQPQFVYVAAAAGTRAAINMTGGDAALDLTAMPAVVFTDPQVATVGYSEAEAHHDGIETDSRTLTLDNVPRALANFDTRGFIKLVIEEGSGRLIGVQAVAPEAGELIQTAVLAIRNRMTVQELADQLFPYLTMVEGLKLAAQTFSKDVKQLSCCAG

SEQ ID NO: 45277 - protein, 349 aa, Klebsiella pneumoniae subsp. ozaenae
MDTTFKAAAVQAEPVWMDAAATADKTVTLVAKAAAAGAQLVAFPELWIPGYPGFMLTHNQTETLPFIIKYRKQAIAADGPEIEKIRCAAQEHNIALSFGYSERAGRTLYMSQMLIDADGITKIRRRKLKPTRFERELFGEGDGSDLQVAQTSVGRVGALNCAENLQSLNKFALAAEGEQIHISAWPFTLGSPVLVGDSIGAINQVYAAETGTFVLMSTQVVGPTGIAAFEIEDRYNPNQYLGGGYARIYGPDMQLKSKSLSPTEEGIVYAEIDLSMLEAAKYSLDPTGHYSRPDVFSVSINRQRQPAVSEVIDSNGDEDPRAACEPDEGDREVVISTAIGVLPRYCGHS

SEQ ID NO: 45278 - protein, 525 aa, Arabidopsis thaliana
MAPTIFVDHCILTTTFVASLFAFLLLYVLGRRSKTIHGSVNVRNGTLTVKSGTDVDIIIVGAGVAGAALAHTLGKEGRRVHVIERDLTEPDRIVGELLQPGGYLKLIELGLEDCVKDIDAQRVLGYALFKDGKHTKLSYPLDQFDSDVAGRSFHNGRFVQRMREKASLLPNVRMKQGTVTSLVEENGIIKGVQYKTKDGQELKSFAPLTIVCDGCFSNLRRSLCKPKVEVPSNFVGLVLENCELPFPNHGHVVLGDPSPILFYPISSSEVRCLVDVPGSKLPSVASGEMAHHLKTMVAPQVPPQIRDAFISAVEKGNIRTMPNRSMPADPIHTPGALLLGDAFNMRHPLTGGGMTVALSDIVILRDLLNPLVDLTNKESLSKYIESFYTLRKPVASTINTLAGALYKVFLASPDDARSEMRRACFDYLSLGGVCSSGPVALLSGLNPRPMSLVLHFFAVAIFGVGRLLVPLPSVKRLWLGARLISSASGIIFPIIKAEGVRQMFFPRTIPAIYRAPPTPSSSSPQ

SEQ ID NO: 45279 - protein, 561 aa, Ralstonia metallidurans CH34
MTHLKITGMTCDSCAAHVKEALEKVPGVQSALVSYPKGTAQLAIVPGTSPDALTAAVAGLGYKATLADAPLADNRVGLLDKVRGWMAAAEKHSGNEPPVQVAVIGSGGAAMAAALKAVEQGAQVTLIERGTIGGTCVNVGCVPSKIMIRAAHIAHLRRESPFDGGIAATVPTIDRSKLLAQQQARVDELRHAKYEGILGGNPAITVVHGEARFKDDQSLTVRLNEGGERVVMFDRCLVAAGASPAVPPIPGLKESPYWTSTEALASDTIPERLAVIGSSVVALELAQAFARLGSKVTVLARNTLFFREDPAIGEAVTAAFRAEGIEVLEHTQASQVAHMDGEFVLTTTHGELRADKLLVATGRTPNTRSLALDAAGVTVNAQGAIVIDQGMRTSNPNIYAAGDCTDQPQFVYVAAAAGTRAAINMTGGDAALDLTAMPAVVFTDPQVATVGYSEAEAHHDGIETDSRTLTLDNVPRALANFDTRGFIKLVIEEGSHRLIGVQAVAPEAGELIQTAALAIRNRMTVQELADQLFPYLTMVEGLKLAAQTFNKDVKQLSCCAG

SEQ ID NO: 45280 - protein, 138 aa, Haemophilus influenzae Rd KW20
MAFTRIEKRKVKMAYSEKVIDHYENPRNVGSLDKKDSNVGTGMVGAPACGDVMQLQIKVDDNGIIEDAKFKTYGCGSAIASSSLITEWVKGKSLEEAGAIKNSQIAEELELPPVKVHCSILAEDAIKAAIADYKAKQG

SEQ ID NO: 45281 - protein, 491 aa, Arabidopsis thaliana; identical to SEQ ID NO: 1159

SEQ ID NO: 45282 - protein, 74 aa, Glycine max
  misc_feature (22)..(22): Xaa can be any naturally occurring amino acid
  unsure (1)..(74): unsure at all Xaa locations
GLQCKGGHVSGYAAADAVLALXFVDAFWGVVLFGEFRSSSRSTYILLGSVMVMFIVAGAGQMASSGRRISPGKQ

SEQ ID NO: 45283 - protein, 464 aa, Arabidopsis thaliana
MQIFVKTLTGKTITLEVESSDTIDNVKAKIQDKEGIPPDQQRLIFAGKQLEDGRTLADYNIQKESTLHLVLRLRGGMQIFVKTLTGKTITLEVESSDTIDNVKAKIQDKEGIPPDQQRLIFAGKQLEDGRTLADYNIQKESTLHLVLRLRGGMQIFVKTLTGKTITLEVESSDTIDNVKAKIQDKEGIPPDQQRLIFAGKQLEDGRTLADYNIQKESTLHLVLRLRGGMQIFVKTLTGKTITLEVESSDTIDNVKAKIQDKEGIPPDQQRLIFAGKQLEDGRTLADYNIQKESTLHLVLRLRGGMQIFVKTLTGKTITLEVESSDTIDNVKAKIQDKEGIPPDQQRLIFAGKQLEDGRTLADYNIQKESTLHLVLRLRGGMQIFVKTLTGKTITLEVESSDTIDNVKAKIQDKEVFLRTSSVSSSLESSLRMDVLWPTTTSRRSLLFTWSCVFVVVSKSRLCYA

SEQ ID NO: 45284 - protein, 647 aa, Neurospora crassa
MEAASARYATRDRWAEMGRPAPSQLQRFITAACSPDNYEPNLALNLEIADLINSKKGSAPREAAVAIVNYINNRNPNVSLLALNLLDICVKNCGYPFHLQISTKEFLNELVRRFPERPPIRPTRVQLKILEAIEEWRCTICETSRYKEDLGFIRDMHRLLSYKGYTFPEVRREDAAVLNPSDNLKSVEEMEEEEREAQSAKLQELIRRGTPEDLQEANRLMKVMAGYDTRSKVDYRAKAAEDVGKIQQKARLLEERLEAFQPGDKIVDGDVFSELAAALSSAQPKIQKMCEEESDDHEAVAKLLEINDSIHRTVERYRLLKKGDIEGAKALASGAPVASTSNGSGSGAGKSAAQELSLIDFDAEPSGGDSTSQSAPQGGNSLDNDLLGLSLGETSSYGQGGGIALGFGANTNIPGPALLSSTTQNSTARGPSPQPGPSSFNNFNSFASPVASQSSTPKPPAYTASAFSAPAASSTASNDPFAALASLSSSSTPAPAPAPAATGNDDDEWSFSSALPPEATPAQPKEHRAVVSNTALKVDMVAVRSLSNGPSPAISMQFAFSNNTAQPITEVHFQLAVTKGYELQLQPQTGRTLTPKQSRGITQSVNVWYTADKTRKVESVKLRWRVSYKVGAEAKAEMGEIPEFSVA

SEQ ID NO: 45285 - protein, 323 aa, Campylobacter upsaliensis RM3195
MAKNNLIGGSIWDEYSQKVQDRMNHPKFMGEFNEEDAKNRDAKLIVADFGAESCGDAVRLFWLVDEKTDTIIDARFKSFGCGTAIASSDTMAELCIGKKVDEAVKITNLDVEFAMRDEPNTSAVPPQKMHCSVMAYDVIKQAAATYKGISPEDFEDQIIVCECARVSLGTIKEVIKLNDLHTVEEITQYTKAGAFCKSCIKPGGHEKRDYYLVDILAETRAEMDREKLKNAMKSDVAFDEMTMVGQLKAVEAVLDAEIRPMLQGDGGDMEVIDLQKAEGGAIDIYIRYLGACGGCSSGTGATLYAIESILQEELSPNIRVMPV

SEQ ID NO: 45286 - protein, 492 aa, Candida albicans
MPQVTKTNNENEFRLTRSKVQHQESISTIKNTTISNSQHKQQTQQQISSPPQVSVTSSEGVSHVNTRQYLGDVSNQYITNAKPTNKRKPLGGDNAPLQKQQHRPSRPIPIASDNNNNGSTSSSSNSSNNNNNDANRLASLAVPSRLPQKRQATESSTNLVEKLRVPQPEVGERSQSYHKKSRLIDYEWQDLDEEDNDDQLMVSEYVNEIFSYYYELETRMLPDPQYLFKQTLLKPRMRSILVDWLVEMHLKFKLLPESLFLAVNVMDRFMSVEVVQIDKLQLLATAALFTAAKNEEVFSPSVKNYAYFTDGSYTPEEVVQAEKYMLTILNFDLNYPNPMNFLRRISKADDYDVQSRTLGKYLLEITIVDYKFIGMRPSLCCASAMYLARLILGKLPVWNGNLIHYSGGYRISDMRECIELMFQYLIAPIEHDEFFKKYAMRKFMRASTLCRNWAKKFQASGRDLFDERLSTHRLTLEDDDEEEEIVVAEAEE

SEQ ID NO: 45287 - protein, 310 aa, Oryza sativa (japonica cultivar-group)
MGRPPCCVKAEVKKGPWTPEEDLMLVAYVQEHGPGNWRAVPTNTGLMRCSKSCRLRWTNYLRPGIKRGNFTDQEEKLIVHLQALLGNRWAAIASYLPERTDNDIKNYWNTHLKKKLKKMSATGGGGDDGEGGGAGEVKTRAAAPKGQWERRLQTDIHTARQALRDALSLDPSPPAKPLDSSSGATAPPSSQAATSYASSAENIARLLEGWMRPGGGGGKTTTTPSSGSRSSAASVLSGEASHSGGATAPTPDGSTVTSKTKDEETAGAPPPPPPPAFSMLESWLLDDGMGHGEVGLMDVVVPLGDPSEFF

SEQ ID NO: 45288 - protein, 547 aa, GIBBERELLA ZEAE PH-1
MASSYALPTSSLPHAHQTHMHSHTRSTSQSSLNNLRRQSTFSNGNLPSVPDEDHGHEASHDHGDGNYIAHSHNPSVHKHGHRRSRMSNTSASIAREKLPPAPLNTLEGWTEEKTPGGRSILSPGPASANMTYSPPDQSHDHPHDHHDHHHDNSHDHDHSHSHDHSHSHSHSHSHDHSHSHDHHGHSHSHGDDKGKRSLFTRMIIPYTTGFPILNAILIEKDSRRIFYFMALNFSFMAVQAFYGYVTDSLGLLSDSIHMFFDCVALMVGLLAAVLSKWPRSQRFPYGFGKIETLSGFANGILLMLLSVEIAFEAFERLWEGTQTKRLGELFIVSTMGLLVNLVGMMAFGHHHHGHDHGHDHGSDGGGCHGHDNENMHGIYLHILADTLGSVSVIVSTILTSFWGWAGWDPLASCFIAILIFLSSKPLVYSSAKRLLLSIPEDTEYNLRNSLGGILNQRGVVGYSSPKFWRDDHSASPTGGKLLGVVHVVAARGAPLEDVRDRVREYLLREGADVVVQVEREGDNSCWCSRRGVPAPPATPTLASMKAS

SEQ ID NO: 45289 - protein, 360 aa, Glomerella cingulata
MATEAAVVSNPNTLAKYLKLDQKGSIMAEYIWIDADGETRSKSRTLKEKEYTPEDLPMWNFDGSSTGQAPGDNSDVYLKPVAVFPDPFRGSPNILVLSECWNADGTPNKYNYRHECAKLMEAHAAHEPWFGLEQEYTLLDLSNRPFGWPANGFPAPQGPYYCGVGTGKVVQRDIVDAHYKACLYSGVKISGTNAEVMPAQWEFQVGPCVGIEMGDHLWLARFLLARIAEEFGAKVSVDPKPIPGDWNGAGLHSNFSTKEMRVEGGMKHIEAAIKKLEGRHKEHIAVYGEGNEKRLTGRHETGAIDQFSYGVANRGASIRIPREYTAKGYGYFEDRRPASNADPYRITGILMETIYGSVDN

SEQ ID NO: 45290 - protein, 112 aa, Schizosaccharomyces pombe
DPQNMNGGKWAYQSKHKGSNLDELWLYMVLAAIGETLDPTGKEVTGVVCNMRKGFYRIAVWTRNCNDKDVLEKIGLRFKEVLGISDKETIEYSAHEDSSKAGSMRAKTRMSL

SEQ ID NO: 45291 - protein, 380 aa, Chlamydomonas reinhardtii
MAFALRGVTAKASGRTAGARSSGRTLTVRVQAYGMAAEYIWADGNEGKPEKGMIFNEMRSKTKCFEAPLGLDASEYPDWSFDGSSTGQAEGNNSDCILRPVRVVTDPIRGAPHVLVMCEVFAPDGKPHSTNTRAKLREIIDDKVTAEDCWYGFEQEYTMLAKTSGHIYGWPAGGFPAPQGPFYCGVGAESAFGRPLAEAHMEACMKAGLVISGINAEVMPGQWEYQIGPVGPLALGDEVMLSRWLLHRLGEDFGIVSTFNPKPVRTGDWNGTGAHTNFSTKGMRVPGGMKVIEEAVEKLSKTHIEHITQYGIGNEARLTGKHETCDINTFKHGVADRGSSIRIPLPVMLKGYGYLEDRRPAANVDPYTVARLLIKTVLKG

SEQ ID NO: 45292 - protein, 228 aa, Pisum sativum
MVVEETPKSIITDDQITTNPNRVIEDDNNLEEGEILDEDDSSATSKPVVHQPHLLENSWTFWFDTPAAKSKQAAWGSSMRPIYTFSTVEEFWSIYNNIHHPGKLAVGADFYCFKHKIEPKWEDPICANGGKWTANYPKGKSDTSWLYTLLAMIGEQFDHGDEICGAVVNVRGRAEKISIWTKNASNEAAQVSIGKQWKEFLDYNETMGFIFHDDARKLDRNAKNKYVV

SEQ ID NO: 45293 - protein, 228 aa, Pisum sativum
MVVEETPKSIITDDQITTNPNRVIEDDNNLEEGEILDEDDSSATSKPVVHQPHLLENSWTFLFDTPAAKSKQDDWGSSMRPIYTFSTVEEFWSIYNNIHHPGKLAVRADFYCFKHKIEPKWEDPICANGGKWTANYPKGKSDTSWLYTLLAMIGEQFDHGDEICGAVVKVRGRAEKISIWTKNASNEAAQVSIGKQWKEFLDYNETMGFIFHDDARKLDRNAKNKYVV

SEQ ID NO: 45294 - protein, 223 aa, Triticum aestivum
RPTRPATVNERENVGCGLSSEDKSESPDNSEGSSEPNGRQTHGVRRSGRSSNASKRKVEESSEDEVNGSITLEKRKKEAPKRKKGAPKRKKEVPEGNQTGGGALWDIFRREDVSKLQEYLIKHSEEFRHYNYEPVKQVIHPIHDQCFYLTNEHKRKLKEEYGVEPWTFEQKLGDAVFIPAGCPHQVRNLKSCIKVALDFVSPENVKECIKLTEEFRLLPTGIG

SEQ ID NO: 45295 - protein, 202 aa, Pyrococcus furiosus DSM 3638
MADEYLVPLDQYLAAGVHIGTQQKTKDMKKFIYRVRQDGLYVLDVRKTDERLKVAGKFLAKFEPQSILAVSVRLYGQKPVKKFGEVTGARAIPGRFLPGTMTNPAVKNFFEPDVLIVTDPRADHQAMREAVEIGIPIVALVDTENLLSYVDLAIPTNNKGRKALALIYWILAREILYNRGEIQSREDFKIPVEEFEMKIVRR

SEQ ID NO: 45296 - protein, 607 aa, ASPERGILLUS NIDULANS FGSC A4
MSPNTAQDDLSVGDVFSPQADMCHSKIEEECNTVSQQTGFRMSARSPERRPGLFTKSDTNPLTAKGDRRKKKKKQAQIDAGPALSTVRGFTPRGSGDEDSDFSTTSSRATSTQPRPLAGSNGASPMLQPVSGGGISALRLQLESMDLSGNSSRRKAADGLCSATPSNASVYSDSDETEILTSYEVPLDHDYVSADAVAEEKKQDEQSQNDMSTQDVRNQLCRKMTTDDFEPLLCLGKGSFGTVLLVRHALTGKLYAQKQFKKASITVHKKLVEQTKTERAILESVNRHPFVVKLFYAFQDHERLYLVLEYAQGGELFTHLAMERMFDEDAAAFYMAEMVLALEHLHQNVGVIYRDLKPENCLLDREGHLLLTDFGLSKIAVGDDDRCNSSLGTIEYMAPEVIQGKPYGKACDWWSLGALGYDLLTGSPPFKANNHAKLQEKILKQKLVLPYYLGPDAKDLLTRLLRKEPSKRLGYHMPKDLQTIKSHRFFRKIDWRALESRSLTPPIVPVVTDPALAENFSTDFTALPLSPVEGPSFFSEHYAAQHRGSGVRSDSHSGMSTGMGVPTSHDGAEHDSNPFGGFSFVAPSSLLDHAVGGSGASPMTAGY

SEQ ID NO: 45297 - protein, 333 aa, Novosphingobium aromaticivorans DSM 12444
MTRVPVLVTGGAGYIGSHAVLALKDAGWAVSVIDNLTTGFRFAVPEGVPFYEGDIEDAGLLARIIAEQGIKAVMHFAGSIIVPESVENPLKYYHNNTAKSRALIEAAVKGGVPHFIFSSTAATYGIPEVSPVTEDSPRRPINPYGMSKLMTETMLADVAAAHPLNFCVLRYFNVAGADPQARTGQSTAGATHLIKVAVEAALGKRASVGVYGTDYATPDGTGVRDYIHVSDLAAAHVLALEALIAAPDESLTMNCGYGRGFSVLEVLDAVDRVTNRRIAREMQGRRAGDPDSLISDNRRIRSTLPWVPQYADLDTIVAHALAWERKLDGIRGQ

SEQ ID NO: 45298 - protein, 213 aa, Brassica rapa
MVRGKTQMKRIENATSRQVTFSKRRNGLLKKAFELSVLCDAEVSLIIFSPKAKLYEFASSNMQDTIDRYLRHTKDRVSTKPVSEENLQHLKHEAANMMKKIEQLEASKRKLLGEGIGSCSIEELQQIEQQLEKSVKCIRARKTQVFKVQIEQLKQKEKALAAENKKLTEKWGSHEIEVWSNKNQESGRGDEESSPSSEVETELFIGLPCSSRK

SEQ ID NO: 45299 - protein, 554 aa, Yersinia pestis KIM
MCSIFGVLELKTDPIELRKKALEMSRLMRHRGPDWSGVWANDKAILAHERLSIVDVNTGAQPLYNAAHTHILAVNGEIYNHQALRQQYSDRYAFQTGSDCEVILALYQEKGPAFLDDLQGMFAFVLYDTEKDAYLIGRDHLGIIPLYMGHDEHGNMFVASEMKALVPVCRTIKEFPAGSYLWSQDGEIREYYHRDWFDYDHVKDNVTDKIQLANALEDAVKSHLMSDVPYGVLLSGGLDSSVISAITKKFAARRVEDNERSEAWWPQLHSFAVGLIGSPDLRAAQEVANHLGTVHHEIHFTVQEGLDAIRDVIYHIETYDVTTIRASTPMYLMSRKIKAMGIKMVLSGEGSDEVFGGYLYFHKAPNAKELHEETVRKLLALHMYDCARANKAMSAWGVEARVPFLDKNFLDVAMRINPQDKMCGNGKMEKHILRECFESYLPHSVAWRQKEQFSDGVGYSWIDTLKEKAAEQVTDQQMETAHFRFPYNTPGSKEGYLYREIFEELFPLPSAAECVPGGPSVACSSAKAIEWDESFKNMDDPSGRAVGVHQDAYK

SEQ ID NO: 45300 - protein, 338 aa, Xylella fastidiosa Ann-1
MSVALSIDLSKKKTILCFGEALIDMLAQPPVKKGMPRAFLQCAGGAPANVAVAVARLGGAVQFVGMLGSDMFGDFLFDSFAEAGVVTDGIVRTNTAKTALAFVALDAHGERSFSFYRPPAADLLFRAEHFQDASFSDALIFHACSNSMTDADIAEVTFEGMRRAQAAGAIVSFDLNFRPMLWPNGENPASRLWKGLSLADVVKLSSEELDYLANTLAADANAVIQQLWQGRAQLLLVTDAAGPVHWYTRTAGGQVPTFRVQVQDSNAAGDAFVGGMLYTFAQQFDDAAALIDFCHDPESIASTLRFAAAVGALAVTRQGAFTAMPMLSEVLSLIQEQS

SEQ ID NO: 45301 - protein, 458 aa, Burkholderia pseudomallei K96243
MTQQQRTFDSIVEREKGLRRGLSSAQMAMIAIGGAIGTGLFLGSGFAIGLAGPGVLVSYAIGALIALLLMGALAEMTVAHPTSGSFGAYAEHYVGPLAGFLVRYAYWSAVVFAVGTEVSAIAVFMKYWYPGVPGWYWVVGFSAVLIAVNMTSVTLYGVVEYVFSMLKIAAIVAFIALGAYFVAAAPVSSGIGFANYSAHGGFFPKGFSGVWVAVIVAIFSYMSIETVAIAAGEARDPQRAVSRAFRSTVFRLVLFYLLTLALMLAIVPWTQAGTDESPFVKVMAATHVPYAAGVINFVVLVAALSAMNSQLYVTTRMMFSLSRARLAPAMFGRVGANGVPLAALAVSSSGVAVAAVLVALYPQTAFTLLMAIAMFGALFTWLMIFVTHLRFRARYRGPTPVFRMWLHPAGSLTGAALVGAVLVTTAFTREFRMTMMVGVAFIVLLTLAYRWHYRARHA

SEQ ID NO: 45302 - protein, 198 aa, Thermoanaerobacter tengcongensis MB4
MLRLLKKALQVGEATVEYPFKPVEVAQGFRGKPAYDFSRCIGCGACATACPSNAITMDCDLDRGIKSWNINYGRCIFCGRCEEVCPTGAIVLSTEFELAVIKKEDMYCRAEFQLCRCIFCGEYFETFREIEYVREILEQTGLTKKSLESWVQLLKVCPKCRRHKVARIAALDNWHVDLNGRREEKWNQKLSYKNLKQS

SEQ ID NO: 45303 - protein, 388 aa, Synechococcus sp. WH 8103
TTAFHSPTSRRRKTLQEANLLEGPLMLIKSIRGFSSNRAMTWLACAPLALMGLGIFTLSAKAEELPDLNAAFLANNLWLLVATILVIFMNAGFAMVEAGMCRQKNAVNILAKNLFVFALAVTAYWFVGYSFMYGDAAIDGWLYFGGLFFDPTVTAETISDAGLVPTVDFLFQAAFAGTAATIVSGLVAERIKFGEFVVFALILTAFIYPVAGSWEWNGGWLNSVGNAEFIDFAGSSIVHSVGAWAGLVGAALLGPRIGKYVGGKVQAIPGHNMSIATLGALILWIGWYGFNPGSQLAMDQWVPYVAVTTTLGAAGGAIGATVISTITSKKPDLTMIINGILAGLVSVTAGCGNLTLTGSWVAGLVGGIIVVFSVSALDSAGIDDPVGA

SEQ ID NO: 45304 - protein, 255 aa, Bordetella bronchiseptica RB50
MTQRLSGRIAIVTGAGSGIGEATARLMAREGAVVVVADKAIEAAERVAQAIVAEGGRAQARQADVGEAQSVRALVDAVAARWERIDVLVNNAGYGIAATVVDTDEADWSALMRVNVDGVFLGCKYVIPIMQRQGAGVIVNTASAGALVGLRQRAAYCASKGAVAALTRAMALDHATEGIRINCVAPGTIESPYFREIYARSDDPEALRASLAARQPMNRLGQPEEVARAIVFLASDDASFATGSTLVLDGGLTAA

SEQ ID NO: 45305 - protein, 471 aa, Streptomyces coelicolor A3(2)
MAQPATEPAKGSSSTPSPEHTEDAVTSVHPVDEKLHPSRLVPAALQHIAAMYAGVVTPPLIIGQACGLDIEGRTRLIAASLLIAGVATLLQTLGVKGFVGNRLPFVNAASSAGIAPILAIVETNAKGSQLPAVYGAVMVAGVFCLAVGPFFGRLLRFFPPLVTGVVITLIGVTLMPVPVGWAQGGDKTAADFGSMRNLALAAFTLAVILVIQRFGKGFVKQVALLFGLLIGTLAAIPFGMADFGALRSAPVAALPTPFAFGAPEFQPAAILSLCIVMLVLMTESSAGMLALGEICDRRADARVITRGLRTDGLATLVGPVFGGFPTSAFAQNVGVVSLTRVRSRYVVAVAGATLLVLGAFPVLGAVVSLVPMPVLGGAGIVLFGSIAVSGIRTLSEAGLDDSSNIILVAVALGAGIIPLAAPTFYAEFPAWAQTVLGSGISAGAIVAVALNLFFHHLGTRSRGTVPALKSS

SEQ ID NO: 45306 - protein, 427 aa, Saccharomyces cerevisiae
MHHNSQSLSSGHIRSPEDENVAPIGNLKHRTGSLSHISSAHPRVALSDVTNIVATNSSNNSISKPKVAPIKERLDSAAIIEEERLDANSVAQRKEADHNDLLTDREQEEPVEDDGESEEDEEEDQEPLLLQHYASDTLVWEHAFRTYYRTTLDPNDDDVYDVVMVAELSNEIFEYMRKLEDLYKPNPYYMDKQPELRWSFRSTLIDWIVQVHEKFQLLPETLYLCINIIDRYLCKEVVPVNKFQLVGAASLFIAAKYEEINCPTIKDFVYMSENCYSRNDLLDAERTILNGLEFELGWPGPMSFLRRISKADDYEHDTRTLAKYLLESTIMDHRLVSAQPSWLAAGAYFLSKIILGQNQWSLAHVYYSNYTQEQILPLATIILENCRYASKRHNAIWRKYSSRRYLHSSQIVAKWIALAEHRVERSN

SEQ ID NO: 45307 - protein, 187 aa, Saccharum hybrid cultivar
MASLRSVLAVSLAVALFAVAPASFALDEKELHLSLYLNQTYSGNGLNEAVVVEPGLPGEFGNIAVQDWPVTNGEGSDATVVGRAQGIQFKPSERNDQAWYTTLTIVFEGTSLKGSTLQMMGYIPQDGQWSIFGGTGQLTLARGVVNHKVVRQTNGGRMYKINIHAFYTPLGASTNCGINLWRLDFDA

SEQ ID NO: 45308 - protein, 462 aa, Streptomyces coelicolor A3(2)
MADHPVDEKLPPLKMATTGLQHVAAMYAGVVAPPLIVGAAIGLSATELTFLTGACLFTAGLATFLQTLGIWKIGARLPFVNGVTFAGVAPMTAVVASTDDKSDALPIIFGAVIVAGLLGFVAAPFFSKAIRFFPPVVTGTVITLIGISLLPVAFGWAQGPSPTADDFGSATNLGLAGITLAIVLFLRRFTRGFVKQIAVLLGLVAGTLVAIPFGVTDFGPVADADVVGFPTPFHFGAPQFQIAAIISMCVVMVVSMTESTADMLALGEIVDRPADEKTIAAGLRADTLGSALSPVFNGFMCSAFAQNIGLVAMTKIRSRYVVAVGGGFLVLMGLCPMAASLIAVVPRPVLGGAGVVLFGSVAASGIQTLVRASLDKDNNVLIVAVSLAVGIIPIAAPEFYHSFPENARIILDSGISTGCVAAVLLNLVFNHIGGRGRDAEDVTHPMEAGDEITESSREAAMK

SEQ ID NO: 45309 - protein, 572 aa, Saccharomyces cerevisiae
MCGIFAAFKHEDIHNFKPKALQLSKKIRHRGPDWSGNAVMNSTIFVHERLAIVGLDSGAQPITSADGEYMLGVNGEIYNHIQLREMCSDYKFQTFSDCEPIIPLYLEHDIDAPKYLDGMFAFCLYDSKKDRIVAARDPIGVVTLYMGRSSQSPETVYFASELKCLTDVCDSIISFPPGHVYDSETDKITRYFTPDWLDEKRIPSTPVDYHAIRHSLEKAVRKRLMAEVPYGVLLSGGLDSSLIAAIAARETEKANADANEDNNVDEKQLAGIDDQGHLHTSGWSRLHSFAIGLPNAPDLQAARKVAKFIGSIHHEHTFTLQEGLDALDDVIYHLETYDVTTIRASTPMFLLSRKIKAQGVKMVLSGEGSDEIFGGYLYFAQAPSAAEFHTESVQRVKNLHLADCLRANKSTMAWGLEARVPFLDKDFLQLCMNIDPNEKMIKPKEGRIEKYILRKAFDTTDEPDVKPYLPEEILWRQKEQFSDGVGYSWIDGLRDTAERAISDAMFANPKADWGDDIPTTKEAYWYRLKFDAWFPQKTAADTVMRWIPKADWGCAEDPSSRYAKIHEKHVSA

SEQ ID NO: 45310 - protein, 227 aa, Pisum sativum
MVVEETPKSIITDDQITTNPNRVIEDDNNLEEGEILDEDDSSATSKPVVHQPHLLENSWTFWFDTPAAKSKQPDWGSMRPIYTFSTVEEFWSIYNNIHHPGKLAVGADFYCFKHKIEPKWEDPICANGGKWTANYPKGKSDTSWLYTLLAMIGEQFDHGDEICGAVVNVRGRAEKISIWTKNASNEAAQVSIGKQWKEFLDYNETMGFIFHDDARKLDRNAKNKYVV

SEQ ID NO: 45311 - protein, 359 aa, Oryza sativa (japonica cultivar-group)
MEAVVGVKYRPVVFPNGGAAAAAAGKSKATPASATAAVYRECLKNHAASLGGHAVDGCGEFMPSPAADAADPASLKCAACGCHRNFHRRLPEAPPSPPLLALPPPPPPPPPPPPPPQPQQHLPRTAAVAVAPQLLLHGSHQRREQSPETDRVRGPGHHHDDDAAADDDDSEDSEMSDYDDDRSASPLQAPPPVLSPGYLPSATHMLLSLGSASAPAVAASRPHAAAAAMGPPPPPGAATSASRKRFRTKFSPEQKQRMQALSERLGWRLQKRDEAVVDECCREIGVGKGVFKVWMHNNKHNFLGGHSARRSAAAAAAAPLAPPPVLTDFSINGSSTHAAAADHAAATASGGGGGSPQST

SEQ ID NO: 45312 - protein, 530 aa, Rubrobacter xylanophilus DSM 9941
MTERRGHLWWQRGVVYHIYPRSFADASGDGVGDLEGIASRLDYLEWLGVDAIWLSPFYPSPMADFGYDISDHCAVDPLFGTLADFDELVAETHRRGMRLIVDYVPNHTSDEHPWFLESRASRESPRRDWYIWADPKPDGSPPNNWRSVFGGSAWEWDERTGQYYYHAFHRKQPDLNWRNPAVREAMHGVMRFWLERGVDGFRVDALRHLVKDEKLRDNPPNPAYEEGRPSYEAHLPVYTTDRPEVHRMISGMRRVLDGCGGERVMIGELYLPFDRLVLYYGEGGRGVHLPTNMHLITTPWSAPSLAALISEYEAALPPHGWPNWVLSNHDNPRVATRVGPERARAAAVLLLTLRGTPTVYYGDEIGMVDGKIPPERLRDPAGSQNPRLSRDPARTPMQWDASPNAGFCPPDAEPWLPLSPDRRHRNVAAQRESRGSLLCLYRRLLRLRRSEPALSVGSYEPLEAGGSLLAYARSHAGRRLLVALNLGEAPEPLPPVLRGRVLLSTSPGQEGGDLRPPARLGPGEALVVAP

SEQ ID NO: 45313 - protein, 305 aa, Glycine max
MEAQEFFQNTFCPQFPSDSNITPSNANPSAATTDHFLVEDFFDFSNDDDATFDSLPTDVDSPTVTPVDTTTNSNFPASADAHFPGDLSVPYDDLAELEWLSKFADESFSSEDLQKLQLITGVRAQNDAASSETRDPNPVMFNPQVSVRGKARSKRTRGPPCNWTSRLVVLSPNTKSSSSSHSGAEGGSEGRKCLHCATDKTPQWRTGPMGPKTLCNACGVRYKSGRLVPEYRPAASPTFVLTKHSNSHRKVLELRRQKEMVKVQHQQHQFLQLQHQQNMMFDVPSSNGEDFLIHQHVGPNFTHLI

SEQ ID NO: 45314 - protein, 446 aa, Listeria innocua Clip11262
MTEFTYDVVIIGSGASGTTVAFEAQAAGLKVAIVEERSWGGTCVLRGCDPKKVLVGAAEARNLSTRLRGKGIKEAATISWTDLMAFKETFVEDVPESRLESFQEAGIETFFGPASFQNENTLQVGNDILSAKKIVIATGATPNTLKVEGQEHIQTSDDFLSLEKLPDSVVFIGGGYISFEFASIALAAGRDVHIIHHNSEPLKKFDPDFVAALVATLKEEGIHFHFDTDITKINKNGEKLHIEGKNGFSLETDLIIGATGRTPNIAHLALDKANIDYTKKGITVNEKLQTPNHPHIYACGDVAATKGAPLTPVVSMEAALVAKNILGGNEKIDYPAIPSVVFTSPKLASIGISMEEANANPEKYQIKNHDTTNWYTYRRTNEKIALAKIIEDRETGQIKGAHFLSEEADYMINYIAILMKANLTLADLQSVIFAYPSPASDLTALN

SEQ ID NO: 45315 - protein, 166 aa, Colwellia psychrerythraea 34H
MTIERTILAGGCFWGMQDLIRKLPGVTSTRVGYTGGDVINATYRNHGNHAEGIEISFNTDVVSFRSILELFFQIHDPTTKNQQGNDLGASYRSAIYYCSTEQNTIAMQTIIDVDASGLWPGPVVTELVPVGDFWEAEIEHQDYLQNTPNGYTCHFPRSDWVLPSVK

SEQ ID NO: 45316 - protein, 233 aa, Zea mays
MAPRTSEKTMAPAAAAATGLALSVGGGGGAGGPHYRGVRKRPWGRYAAEIRDPAKKSRVWLGTYDTAEDAARAYDAAAREYRGAKAKTNFPYPSCVPLSAAGCRSSNSSTVESFSSDAQAPMQAMPLPPSLELDLFHRAAAAATGTGAAAVRFPFGSIPVTHPYYFFGQAAAAAAEAGCRVLKLAPAVTVAQSDSDCSSVVDLSPSPPAAVSARKPAAFDLDLNCSPPTEAEA

SEQ ID NO: 45317 - protein, 209 aa, Oryza sativa
TGNRPLWPGNKPYFTTSRRSPRDFARRRRRRSPSREKLVAGVPLHPSSPAMAITLSNVNSEAGLQKLDEYLLTRSYISGYQASKDDMTVFTSLPSAPAASYVNVTRWYDHISALLRSSGVTAEGEGVKVESTACSVSPTADQKAPAADEEDDDDVDLFGEETEEEKKAAEERAAAVKASGKKKESGKSSVLLDVKPWDDETDMAKLRKL

SEQ ID NO: 45318 - protein, 422 aa, uncultured archaeon GZfos11A10
MTTTTQSKKVYEEARKLIPGGVSSPVRAIKPYPFYTASAEGSVITDIDGNRYIDYVMGYGPLILGHAHPAIKDAVAGQLERGWLYGTPIEAELKLASKIAAIYPSIEMMRFVSSGTEATMSALRLARGYTGRNKFLKIEGGFHGAQDAALVKAGSGATTHGTPDSLGVPPDFTKHTLQVPYNDIETMTEAIESNREDLAAVIIEPVLGNIGPILPAPGYLESVRKITEENDVLLILDEIITGFRLAMGGAQECFEIVPDMTTLGKIVGGGFPFGVFGGKKEIMELISPSGGVYQAGTFSGNPVSVTAGLAVLDVLEGEDVHRRLELAGNELRAALQDLVADRKLSYSVAGIASMFKVFFGDAPHNYQEALSCDKEGYLRFFHRMLKSGVFLPPSQFETNFISIAHTGGDLDATIAAYEENLR

SEQ ID NO: 45319 - protein, 137 aa, Pyrococcus furiosus DSM 3638
MSEEQVNIKKKEKWGIAHIYSSFNNTIIHITDITGAETISRWSGGMVVKADRDEPSPYAAMLAARRAAEEALEKGIVGVHIRVRAPGGSKSKTPGPGAQAAIRALARAGLKIGRVEDVTPIPHDGTRPKGGRRGRRV

SEQ ID NO: 45320 - protein, 365 aa, Pseudomonas syringae pv. tomato str. DC3000
MGALLKQEKFLLLAIIAMFVAYPLEHVLLGNGQVVALVSGLALVGFIVCASMRVAHHAEMLAEKVGDPYGTMILTLSAVLVEVVILAIMMSNEPSPTLVRDTIYSAVMLDINGILGLAALMGGIKHGEQSYNDDSARTYSVMILTAMGVSMVVPEFIPKGDWKIYSAFTIGAMILLYTLFLRMQVGPHSYFFSYSYPEKKKRQGSDQTEEHAEPVNLTRSIATLITGVVVIGALAEVMSKTVDLGLEGTGAPPVMTAILVAAISAAPEILTALRAALANRMQSVVNIALGASLSTVILTVPVMEAMALYSGQPFQMAMTPVQTVMIFITLLVSAINLNDGETNAIEGMTHFVLFATFIMLSCLGL

SEQ ID NO: 45321 - protein, 142 aa, Methanosarcina barkeri str. fusaro
MAQKAVEKSEEEWKKVLTPEQYHVLRQKGTERPFSGNLYYNKEKGVYTCAACGQELFSSDTKFESGTGWPSFYDVISSDRVRLKEDTSYFMNRIEVVCSRCGSHLGHVFEDGPAPTGKRYCINSVSLNFKTEEEGKQGEERM

SEQ ID NO: 45322 - protein, 228 aa, Novosphingobium aromaticivorans DSM 12444
MPRLILIRHGQSQWNLENRFTGWWDVDVTEKGAAEAFAAGKLLKDKGVLPTLAFTSLQTRAIKTLHLALEAAGRLWVQEDKDWRLNERHYGGLTGLDKAETAAKHGDEQVKVWRRSFDVPPPPLEAGSEFDLASDPRYDGIAVPATESLKDTIARVLPCWEEKIAPALRAGETVIVSAHGNSLRALVKHLSGISDEDITGLEIPTGQPIVYELDNDLAQVERYYLSER

SEQ ID NO: 45323 - protein, 214 aa, Methanosarcina barkeri str. fusaro
MLKAIIFDVDGVLIDSMNFQAEAWVKTFKEIGINITRKDIYELEGSNNKRLIKSIFEKSGKELEPWYFEKLPEKKREVLEFDRIKPYEGIQDCIKALKRHFKLALVSGSHTDTVNKVVNKYFSKCFDVIITGSDLEHGKPDPDPYLKALEKLDLTKNECMVIENAPLGITAAKRAGLYCVAVTGMLEPEKIEHADLVLENHAALFKYLKNLIPK

SEQ ID NO: 45324 - protein, 129 aa, Zea mays
QRVMQNNAAVFRTQETLEEGCELISKTWESFHDVKLSDRSLIWNSDLIETLELENLLINACITMYSAEARKESRGAHAREDFTTRDDEKWMKHSLGYWENEKVRLAYRPVHMKTLDDEVESFPPKARVY

SEQ ID NO: 45325 - protein, 383 aa, Sorghum bicolor
MGRAPCCDKVGLKRGRWTAEEDQILANYIAEHGEGSWRSLPKNAGLLRCGKSCRLRWINYLRADVKRGNISKEEEDIIIKLHATLGNRWSLIASHFPGRTDNEIKNYWNSHLSRQIHTYRRKYTAAPDTTVIIDMSKLHSAEKRRGGRTPGWSPKSSSANTTTNTTSSKTNKSKETDPGPGLKSACDAKGASSPPTAATTTSAASSPRHSDGARSAVVDPDPNQPNSSSGSTAEGPCSGEDATGPWELDPIDLGDLWEAESEIDALMSMDAPLEGFDAVVGEAQAQVDDLFDMDMDWDGFAAHLWGGPEQNDHIAELQQAAEPQATAAACTPNEHEPQVAAAAAACTPDEHEPQAAAAAAAATCTPDEHGLEAFETWLLSDSF

SEQ ID NO: 45326 - protein, 277 aa, Solibacter usitatus Ellin6076
MTILSIGEILWDVYPDSKRLGGAPFNFAVHAHRLGHRVLFLSAVGDDESGAAAREKAEMLGLDTEFIQVARGKTTGQVTVRLDSAGQPDYTIHRPAAYDFLKFDDAQLARISLLQPDWLYFGTLYQMHTGGHRELRRLVEALPATRRFYDVNLRRASYTPELVRDSFALAHAVKINHDEAALFPDFGGAWAAAVTAGERGSEIRIGEDRARCPAYPVKVADAVGAGDAFAAAFVHGIGQGWSAARTGDFANRLGALVASRVGAVPKWSMTELEGLKA

SEQ ID NO: 45327 - protein, 268 aa, Vibrio metschnikovii
MDRYQHLFQRLAAHNQGAFVPFVTIGDPNPQQSLRIMQTLVEAGADALELGIPFSDPLADGPTIQGAISALDSGTKPIRCFEADQAPIRAQDIPIYLLMYANLVYARGIDNFYQRCQQAGVDSVLIADVPTNESAEFGPAAKKYAIHPIFIAPPTASDETLQSVAELGSGYTYLLSRSGVTGAETKANMPVHALLERLNQFSAPPRRLGFGISEPEQVKQAIESGAAGAISGSAVVKIIEHHLAKPEAMLAELKTFVSAMKSATKHDK

SEQ ID NO: 45328 - protein, 476 aa, Agrobacterium tumefaciens str. C58
MDIWTRDFAMQTFVENFENSDRLRQRARNIIPGGAHTYAKGDDQYPVLSPGFIERGYGCHVWDVDGNEYIEYGMGNRAVGLGHAYADVVEAARAELYRGCNFTRPSKIEVDCASTFLDTVQTAEMVKFCKNGSDATSAAIRLARAVTGRDLIARCSDHPFFSTDDWFIGTTEMNAGIPEAIQNLVLGFSYNDLASARSLFDRFKGRIAAFILEPSRGDPPRDQFLHKLQKLCHENGALFILDEMITGFRWDAGGAQKTYDIVPDLSCFGKALGNGFSISALAGKREFMERGGIDQTDAPRVFLLSTTHGAETHAMAAAIATMKVYTHEPVVPHLVRQGNSLRAAISQIAIAHGLDSYFGIQGHSACLSYFTLDQTGKPSQAFRSLFLQETIRRGLLAPSLVVSYTHEDEDIAKTLDAIDGALVVYRKALEYGVDKFLTGRPSDVVFRRFNGNAQHQAGHGLVMADMPGLSESIRKP

SEQ ID NO: 45329 - protein, 218 aa, Zea mays
  misc_feature (159)..(159): Xaa can be any naturally occurring amino acid
  unsure (1)..(218): unsure at all Xaa locations
SARVSLYKLPEGKGWMTQLLSVACVSLAAKMEETAVPQCLDLQVGDARFVFEAKTIQRMELLVLTTLNWRMQAVTPFSYVDYFLNRLSGGNAALRNCLFQSAELILCAARGTSCIGFRPSEIAAAVAAAVVGEVDVAGIENACAHVDKERVLRCQEAIXSMAFPVPVPQSPVGVLDAGYLSYKSEDDAAAAATAASHGASGSSSSSPVTSKRRKLTSR

SEQ ID NO: 45330 - protein, 426 aa, Salmonella enterica subsp. enterica serovar Typhi Ty2
MSKSENLYSAARELIPGGVNSPVRAFTGVGGTPLFIEKADGAYLYDVDGKAYIDYVGSWGPMVLGHNHPAIRNAVIEAAERGLSFGAPTEMEVKMAELVTNLVPTMDMVRMVNSGTEATMSAIRLARGFTGRDKIIKFEGCYHGHADCLLVKAGSGALTLGQPNSPGVPADFAKHTLTCTYNDLTSVRAAFEQYPQEIACIIVEPVAGNMNCVPPLPEFLPGLRALCDEFGALLIIDEVMTGFRVALAGAQDYYGVVPDLTCLGKIIGGGMPVGAFGGRRDVMDALAPTGPVYQAGTLSGNPIAMAAGFACLNEVAQPGIHETLDELTTRLAEGLLEAAEEANIPLVVNHVGGMFGIFFTDAESVTCYQDVMACDVERFKRFFHLMLEEGVYLAPSAFEAGFMSVAHSMDDINNTIDAARRVFAKL

SEQ ID NO: 45331 - protein, 512 aa, Arabidopsis thaliana
MDHSSNRFGNNGVESILPNYKLGKTLGIGSFGKVKIAEHVVTGHKVAIKILNRRKIKNMEMEEKVRREIKILRLFMHPHIIRQYEVIETTSDIYVVMEYVKSGELFDYIVEKGRLQEDEARNFFQQIISGVEYCHRNMVVHRDLKPENLLLDSRCNIKIADFGLSNVMRDGHFLKTSCGSPNYAAPEVISGKLYAGPEVDVWSCGVILYALLCGTLPFDDENIPNLFKKIKGGIYTLPSHLSSEARDLIPRMLIVDPVKRITIPEIRQHRWFQTHLPRYLAVSPPDTVEQTKKINEEIVQEVVNMGFDRNQVLESLRNRTQNDATVTYYLLLDNRFRVPSGYLESEFQETTDSGSNPMRTPEAGASPVGHWIPAHVDHYGLGARSQVPVDRKWALGLQSHAHPREIMNEVLKALQELNVCWKKIGHYNMKCRWVPGLADGQNTMVNNQLHFRDESSIIEDDCAMTSPTVIKFELQLYKAREEKYLLDIQRVNGPQFLFLDLCAAFLTELRVI

SEQ ID NO: 45332 - protein, 663 aa, Neurospora crassa
MTSTATTLKGQPLDKGALESMLRRRMFFAPSFDIYGGVAGLYDYGPPGCALQANIIDIWRKHFVLEEDMLEVDCTALTPHDVLKTSGHVDKFADWMCKDPKNGDILRADHFVEDVLEARLKGDKEARGQKVEDKEEDPKRKKKKAKGTEAVKLEDAVVKEYEEILAQIDNYNGEQLGELIKKYDLKNPATGVQPEPPVAFNLMFQTAIGPSGNLAGYMRPETAQGQFLNFAKLLEYNAGNMPFASASIGKSYRNEIAPRGGLLRVREFLMAEIEHFVDPAGHKKHERFHEVADIELALLDRNVQLSGQTTVTKMTIGEAVKQKIVDNETLGYFLARIHLFLKKIGVDQSKIRFRQHMGNEMAHYACDCWDAELLTSSGWVECVGCADRSAYDLTVHAKKTGAPLVVRETLETPEIVEKWEPEINSKKFGPTFRKDAKTVEAAILALPQEELAKLAEELKTNGKIVVDVPGVGDGKVEVSKDLVAIEWKKHTINIREYTPNVIEPSFGIGRILYSLLEHNYWVREGDEARGVISFPPAVAPVKVLIVPISSKAEFAPHVRRLSQKLRSVGISSRVDDSSASIGRRYARNDELGTPFGLTIDFQTLQDGTFTLRERDSTRQVRAEEEKIVDAIKALVEGSKTWQDVESELPIFEGQELEIRPAEN

SEQ ID NO: 45333 - protein, 726 aa, Arabidopsis thaliana
  misc_feature (719)..(719): Xaa can be any naturally occurring amino acid
  unsure (1)..(726): unsure at all Xaa locations
MTEIDRSRAFAKDVKRIVVKVGTAVVTGKGGRLALGRLGAICEQLAELNSDGFEVILVSSGAVGLGRQRLRYRQLVNSSFADLQKPQMELDGKACAGVGQSSLMAYYETMFDQLDVTVAQMLVTDSSFRDKDFRKQLSETVKAMLRMRVIPVFNENDAISTRRAPYKDSTGIFWDNDSLAALLSLELKADLLILLSDVEGLYTGPPSDSTSKLIHTFIKEKHQDEITFGEKSKLGRGGMTAKVKAAVNAAYGGVPVIITSGYAAENISKVLRGLRVGTLFHQDAHLWAPVVDTTSRDMAVAARESSRKLQALSSEDRKQILHDIANALEVNEKTIKAENDLDVAAAQEAGYEESLVARLVMKPGKISSLAASVRQLAEMEDPIGRVLKKTQVADDLILEKTSSPIGVLLIVFESRPDALVQIASLAIRSGNGLLLKGGKEARRSNAILHKVITDAIPETVGGKLIGLVTSREEIPDLLKLDDVIDLVIPRGSNKLVSQIKNSTKIPVLGHADGICHVYVDKSGKLDMAKRIVSDAKLDYPAACNAMETLLVHKDLEQNGFLDDLIYVLQTKGVTLYGGPRASAKLNIPETKSFHQEYSSKACTVEIVEDVYGAIDHIHQHGSAHTDCIVTEDSEVAEIFLRQVDSAAVFHNASTRFSDGFRFGLGAEVGISTSRIHARGPVGVEGLLTTRWIMRGKGQVVDGDNGIVYTHKDLPVLQRXEAVENGI

SEQ ID NO: 45334 - protein, 472 aa, Pseudomonas putida KT2440
MPVGNHSAHGQATEGGPLKRELGERHIRLMALGACIGVGLFLGSAKAIEMAGPAIMLSYIIGGLAILVIMRALGEMAVHNPVAGSFSRYAQDYLGPLAGFLTGWNYWFLWLVTCVAEITAVAIYMGIWFPDVPRWIWALAALGSMGAVNLVAVKAFGEFEFWFALIKIVTIIAMVLGGIGIIAFGFGNDGVAVGISNLWSNGGFMPNGVTGVLMSLQMVMFAYLGVEMIGLTAGEARNPQKTIPQAIGSVFWRILLFYVGALFVILSIYPWNEIGSQGSPFVMTFERLGIKTAAGIINFVVITAALSSCNGGIFSTGRMLYSLAQNGQAPAAFARTSKNGVPRNALLLSIGALLLGVLANYLVPEKVFVWVTSIATFGAIWTWVMILLAQLKFRAGLTTAERKALKYRMWLWPLSSYLALAFLVLVVGLMAYFEDTRVALYIGPAFLVLLTVLYYTFRLAPKDAQGVTSTAS

SEQ ID NO: 45335 - protein, 165 aa, Arabidopsis thaliana
MNREKLMKMANTVRTGGKGTVRRKKKAVHKTTTTDDKRLQSTLKRVGVNSIPAIEEVNIFKDDVVIQFINPKVQASIAANTWVVSGTPQTKKLQDILPQIISQLGPDNLDNLKKLAEQFQKQAPGAGDVPVTIQEEDDDDDVPDLVVGETFETPATEEAPKAAAS

SEQ ID NO: 45336 - protein, 605 aa, Geobacter metallireducens GS-15
MQTIVDLLEESCRRFPDKTALRCKNGGRWQDVSYRDFRIASDRIATGLVNSGFRAGDHAALLAPSSPRWMMVYLGILKAGGVVVPVDKELKSLELRHILSDSGARVLFTERSSLETVLAMGEDVPALDLIVTLDGGNGNRGGDEDETSGEQPDDSLQLHHEKSPMMGTLARQFNELLDAEASGDASGQGAGLTGSAGAGIAADQVKILPYEKLRGTTAISPKGPSPLDTAIILYTSGTTGRSKGAMLSHANITSNILATSAHFNLDERVHTLSFLPINHVFEQVCGILLPLSLGGTVSFVESLKKLGDNLAEVKPTFLLGVPAVYRMILDRITRNIESKILSRLLYSFSLTRPLIKAKIRKTLGKGTIFVSGGAALDPDVAAGLVRLGVTICQGYGITETSPVISAECPGAMRLGTAGRVLAGVEVRITDPNDEMVGEILVKGPNVMQGYYRDDPATAEVLVDGWYRTGDLGFLDGDGFLSIRGRVKNLIVTANGRNVYPEEVENEILKSPYIAEVVVHGRRVGAVAEEIHAMVYPDGDALDDYRRSQGKNSLSGEEVAALVRAEVQAACEKLAPYKRVKRITIRTDEFPKTTTRKIKRFAVQAA

SEQ ID NO: 45337 - protein, 216 aa, Arabidopsis thaliana
MSASRFIKCVTVGDGAVGKTCLLISYTSNTFPTDYVPTVFDNFSANVIVDGNTINLGLWDTAGKLLPWIFLSFEFPPLPERQEDYNRLRPLSYRGADVFLLAFSLVSKASYENVSKKWVPELRHYAPGVPIILVGTKLDLRDDKQFFAEHPGAVPISTAQGEELKKLIGAPAYIECSAKTQQNVKAVFDAAIKVVLQPPKNKKKKKRKSQKGCSIL

SEQ ID NO: 45338 - protein, 546 aa, Synechococcus elongatus PCC 7942
MTKFIFVTGGVVSSIGKGIVAASLGRLLKSRGYSVSILKLDPYINVDPGTMSPYQHGEVFVTADGAETDLDLGHYERFTDTPMSRLNSVTTGSIYQAVINKERRGDYNGGTVQVIPHITAEIRDRIHRVAQDTHPDVVITEIGGTVGDIESLPFLEAIRQFRKDVGRRDLAYIHVTLVPWIPSAGEMKTKPTQHSVKELRSIGIQPDILVCRCDRPLQAGMKEKMSEFCNVSPEAVITSQDASSIYEVPLMLEREGLAEQVLDILQLEQRQPDLTQWQRWVHQLQNPSRRVEVVIVGKYVRLNDAYLSVSESLRHAAASADADLQLRWVDAEDLENGDPATYLDGVDGIVVPGGFGARGVDGKVAAIQFARDHQIPFLGLCLGMQAAVIDWARNVAGLDGANSAEFDPETPHPVIALLPEQQDVVDLGGTMRLGLCPCKIQSGSLAQRLYGEDIIYERHRHRYEFNNAYRSLFLESGYCVSGTSPDSHLVEIVERPDHPFFIACQFHPEFVSRPNHPHPLFQGLIKAALGSDLTLVDPAPLPAETV

SEQ ID NO: 45339 - protein, 524 aa, Colwellia psychrerythraea 34H
MKLSLSLSQKPPVTSVYTANQVLKNEANVARSQGIAMYELMHSAGAAVFTQLSLSWPNAKHLLILCGKGNNGGDGFVVAKLAHQAKIKVSVLLTCDVSQLKGDALSAYQAMIFAGVSLIVEDRVNKHAESLAIINDFSGEVIVDALFGIGFTGQLTPRLQEFVTSINHQKAKVISIDVPSGLCATTGEVQGESIEGQAIIADITLTFIVYKQGLLTGQAANFVGELFLAPLAMNNAFTKQVQTNNHYAQYKLPLNQPKRLPSSHKGDSGLLLTIGGSDTMPGAIRLASESALRCGAGLVAVSCHKNNQMFIMNGRPELMLAPETSALLEASTQLYKAKAYLVGPGLGQSDQAKQLFELISKTSQTQNKTTVIDADALILLSETKQQCNHWVLTPHPKEAAALLQCDVASIEADRFSAVRAIAKQYGGICLLKGAGTLISDGERVVINNSGNSGMASGGMGDVLSGIISALVMQSDNNFYSTCLAAYIHGAAADIIANKNGQRGLLASDLFIPLQQLLNGKVPNH

SEQ ID NO: 45340 - protein, 150 aa, Pyrococcus furiosus
MNTLKMQRRIAAEILKCGENRIWIDPERIDDVASAIPREDIKRLIKEGVIKKKPIKGQSRYRAKIRHEQKKKGRHRGPGSRKGKKTARMGKKELWIKTIRALRKELRKLKAQKKIDRKTYRMLYIRAKGGQFKNKHQLYLFLEEHGLLKK

SEQ ID NO: 45341 - protein, 416 aa, ASPERGILLUS NIDULANS FGSC A4
MTVLNVSPVPPDEIFALNRAYIDDDFPQKVNLGVGVYRTNEGQPWPLPVVEEAEKQLAAENSVFRHEYTAIEGDRAFLPLARDLMFGFDGQATSDAKQEAAKARIGTVQTVAGTGANHLGALFLATHMKPRNVWLSNPSWANHLTIWELAGVPRKTYPYYSAATRSFDFDGMISTLESEAQEGDVILLHACAHNPTGLDPNKEQWKAIIDLCERKRIFPFFDSAYQGFASGSVDEDAWAVRYVLNEKPQMEMCVAQSFSKNFGLYGQRVGAFHYVLNEGAEDLRDTVVNNLCHLIRGEYSMGPTAGCNIVKKVLTSPELTAKWHQDLKVMSSRIISMREALYNELVRLKTPGTWKHIVEQNGMFSYTGLTPSQVYALKDKFHIYLLKSGRASISGLSPKNVNYVARAIDEVVRNVN

SEQ ID NO: 45342 - protein, 512 aa, Frankia sp. EAN1pec
MTTDARTSDSRVTSSHVTATRSAEAERTDLVPRPRVGLLPAGQPVLDVVVPVYNEENDLAPCVRRLHAHLRGAFPYPFRITVADNASTDTTLAIARALTEELPEVSVIHLEAKGRGRALRAAWGASTAPVLAYMDVDLSTDLAALLPLVAPLISGHSDLAIGTRLAPSSRVVRGPKREVISRCYNLLLRGTLAARFTDAQCGFKAIRADVAASLLPLVQDTGWFFDTEMLVIAERCGLRIHEVPVDWVDDPDSRVDVLATAMADLKGVARLARALGTGALPVAQLRHEFGRAPLTWTGAAGAGGTARPTATTTGAGVQGGMPEATGPGAAEAAATGSVAPGSAVTGVPAGLTGQLLRFAGVGIASTLAYLVLFVLLRTATGAQAANLIALLVTAVANTAANRRLTFGVTGRGDAGRHHLQGLFVFAIGLLLTSGSLAALHAASDSPGRFPEVSVLVLANLASTVVRFLLMRAWVFHPSRLRRPAGGATPSADGGLGRPGDVPGRSGHGAHRL

SEQ ID NO: 45343 - protein, 454 aa, Neurospora crassa
MSNLPSEPEFEQAYKELAYTLENSSLFQKHPEYRTALTVASIPERVIQFRVVWEDDNGNVQVNRGYRVQFNSALGPYKGGLRLHPSVNLSILKFLGFEQIFKNALTGLSMGGGKGGADFDPKGKSDAEIRRFCCAFMAELHKHIGADTDVPAGDIGVGGREIGYMFGAYRKAANRFEGVLTGKGLSWGGSLIRPEATGYGLVYYVGHMLEYSGAGSYAGKRVALSGSGNVAQYAALKLIELGATVVSLSDSKGALVATGESGITVEDINAVMAIKEARQSLTSFQHAGHLKWIEGARPWLHVGKVDIALPCATQNEVSKEEAEGLLAAGCKFVAEGSNMGCTLEAIEVFENNRKEKKGEAVWYAPGKAANCGGVAVSGLEMAQNSQRLNWTQAEVDEKLKDIMKNAFFNGLNTAKTYVEAAEGELPSLVAGSNIAGFVKVAQAMHDQGDWWSKN

SEQ ID NO: 45344 - protein, 1086 aa, Cryptococcus neoformans var. grubii
MASNDPKAKVILQSIATEKRNIEGARAVIRAFEASSKNETVIQQAQNEIRTATMSIKFLEDELAKLQVDGSGASSGTPGRGEPSGRAGAGVPGRQGPQGIATTSPGGRGMAGDRERPLPPPPPGAEQDNAKKPETKNYSQLDLLRYDAPLTGAKITRMLNQLQFKLQVEEQYRTGIEKMAQAYRAEGDKRLKSETDAKKSESEGKIQLLRKAKKRYESLAKFGGAVEDDEDLMSDGKRKEALRKPISGKLVISLRSARDLNHRTLPRRSSKTYSETTVIIKVEGNERAVSHPSRNDKWHEDFHIPVEKANEVEITIYDTVAPGDSAPIGMLWLRVSDLVEALRRQKVGIEGQGAGWVTAATAATMGPRSSGNAPDSVTLHSAGTLRGRPDAEGKGPDGIDGWWSVEPAGAISLRMDFVKDTVAGARRPYEALGRQGAVRMRKGDVYEMNGHKFVQRQFYQPIMCALCQEFLLTGEGYQCEDCRYACHKKCYPKVVTKCISKSNADGEGDEEKINHRIPHRFTSYTNMSANWCCHCGYMLPFGRKNAVKCSECALTCHQTCSHLVPDFCGMTMEMANLLLKNLRDIKTTQHRKPVPSTSTSSSVSTLPSYHSQEARSHPVQSAAPQQPALSPHPPAGTLPSADQRPIQPQAQNQQTGAYDNLRPAGGRAMPQLPPVAVPSSKISFEGERPQEPHAQIHPVMPSAQPQPQTLPPSAQSVQPPVKPHYVPQPPVQQQVTQRLPPQQPVMTRKRKVGLDDFNFLAVLGKGNFGKVMLAEEKTSSNLYAIKVLKKEFIIENDEVESTQSEKRVFLAAAQERHPFLLGLHSCFQTETRVYFVMEYISGGDLMLHIQKKQFTLRQAKFYACEVLLALQYFHSKGIIYRDLKLDNILLTLDGHVKVADYGLCKEEMWFGKTTSTFCGTPEFMAPEILLEQRYGRAVDWWAFGVLTYEMLLGQSPFRGEDEDEIFDAILEDEPLYPITMPRDAVSLLQRLLTRDPTRRLGAGEGDAEEIKQHLFFRDVNFDDVYHKRIPPPYFPVIGNATDTSNFDQEFTREQPTLTPVHTQLSEADQKEFAGFSWIAPWAAAQA

SEQ ID NO: 45345 - protein, 267 aa, Nostoc sp. PCC 7120
MENFVTPPAFGEKIRERWTLAGRKALITGATKGIGLAIAQEFLALGAEVVIVARNAEAIEQQMKAWHSAGKVHGVAADVSTSEGRQMMLDYVSKTFGELDILVNNVGTNIRKKATDYTEEEFAAIFQINLTSIFELSRLFYPLLKTSKNSSIVNIGSVAGLISVRTGAPYGMTKAALVQLTRSLAVEWADDGIRVNAIAPWFIQTPLTEPLLNNPETLSAVLSRTPMKRVGQPEEVASLTAFLCMPTASYITGQCIAVDGGFLAFGF

SEQ ID NO: 45346 - protein, 572 aa, Neurospora crassa
MSDIEKGSAGSHDKETRVDAATLPAYEAGSVAEAQQEDFMTRNGLNLASFKPRRFHTGDGTEIERTMKSRHLHMIAIGGSIGAGFFVGSGKALHNGGPASLLIDFAIIGVMMFNVVYALGELAVMFPVTGGFYTYSTRFIDPSWGFAMGWNYVFQWAIVLPLELTVCGFTVGYWNQDITVWITIFLVAIIIINVFGTLGYAEEEFWASAFKLGATIVFLIICLVMVLGGGPKGSRYDHYTGAALWYSPGAFANGFRGFCSCFVTAAFAFSGTELVGLAAAEAKNPVKSLPGAIKQVFWRITLFYILGLFFVGLLIPYDDENLLGANPFINVNASPFVLVGKYANLTGFDSFMNVVILVSVLSLGVSCVYGGSRTLTALAQQGYAPKIFTYVDRSNRPLFSVLLIIAFGPLAYVNLAAAGPTVFDWLLSLSGLAALFTWGSICLSHIRFRKAWALKGHSVEEIPFRAAGGVWGSWLGLVLVVLVLIAQFYVAICPPGGGFNTVEGFFVQYLALPVVIVFWIGGFIWKRTSWLRVDQIDVDTGRREHDWESINAYQAELAAMPAWKRWFHKLFV

SEQ ID NO: 45347 - protein, 183 aa, Citrus unshiu
MRDGSLKGLFCTAPKSIRSVRRNSGSFNVTAFTEEQEALVVKSWNAMKKNSGELALKFFLRIFEIAPSAKKLFTFLKDSDIPVEQNPKLKPHATTVFVMTCESAVQLRKAGKVTVRESNLKDLGATHFKYGVADEHFEVTKYALLEPIKEPVPEMWSPELKNAWAEAYDQLAAAIKIEMKPPS

SEQ ID NO: 45348 - protein, 161 aa, Marchantia polymorpha
DSATHSVTFFAKIFEIAPGAKALFSFLKDSDIPFDKNPKLKAHALTVFRLTGDSACMLGEKGAIDALHPKLKELGKKHVGYGVIAAHFDVVKAALLSTIESLLPEDWPAEKKVATCGAWSQAYDELAGVMINEMQAIRDAEKAPAAEEAPEAPAAESKALP

SEQ ID NO: 45349 - protein, 610 aa, Arabidopsis thaliana
MDKKTIVWFRRDLRIEDNPALAAAAHEGSVFPVFIWCPEEEGQFYPGRASRWWMKQSLAHLSQSLKALGSDLTLIKTHNTISAILDCIRVTGATKVVFNHLYDPVSLVRDHTVKEKLVERGISVSSYNGDLLYEPWEIYCEKGKPFTSFNSYWKKCLDMSIESVMLPPPWRLMPITAAAEAIWACSIEELGLENEAEKPSNALLTRAWSPGWSNADKLLNEFIEKQLIDYAKNSKKVVGNSTSLLSPYLHFGEISVRHVFQCARMKQIIWARDKNSEGEESADLFLRGIGLREYSRYICFNFPFTHEQSLLSHLRFFPWDADVDKFKAWRQGRTGYPLVDAGMRELWATGWMHNRIRVIVSSFAVKFLLLPWKWGMKYFWDTLLDADLECDILGWQYISGSIPDGHELDRLDNPALQGAKYDPEGEYIRQWLPELARLPTEWIHHPWDAPLTVLKASGVELGTNYAKPIVDIDTARELLAKAISRTREAQIMIGAAPDEIVADSFEALGANTIKEPGLCPSVSSNDQQVPSAVRYNGSKRVKPEEEEERDMKKSRGFDERELFSTAESSSSSSVFFVSQSCSLASEGKNLEGIQDSSDQITTSLGKNGCK

SEQ ID NO: 45350 - protein, 156 aa, Lycopersicon esculentum
MGFTDKQEALVRDSWEFMKQDIPQLSLRFFSLILEIAPVAKNMFSFLKDSDELPENNPKLRAHAVKVFKMTCESAIQLREKGEVVVGETTLKYLGSIHLQKRVADPHFEVVKEALLRTVKEATGNKWKDEMKEAWSEAYDQLASAIKAEMHAEAAA

SEQ ID NO: 45351 - protein, 116 aa, Stictocardia tiliifolia
VKYDITTVMQAKPLLKEALQAAVGLPVDRNIPLIGFIGRLEEQKGSDILYAAIPKFISMNVQIVILGTGKKKFEQQIEQLEVMYPNKARGVAKFNVPLAHMITAGADFMLIPSRFE

SEQ ID NO: 45352 - protein, 374 aa, Listeria innocua Clip11262
MSDKTQNTKPVAELNVEQVKEALIEEGKKKGILTYAKIAARLAPFTLDSDQMDEYLEHVGEAGIEVSDDADDEDPDETELVKEETESFDLTDMSVPPGVKINDPVRMYLKEIGRVDLLTADEEIALAKRIEAGDIEAKGRLAEANLRLVVSIAKRYVGRGMLFLDLIQEGNMGLMKAVEKFDFNKGFKFSTYATWWIRQAITRAIADQARTIRIPVHMVETINKLIRVQRSLLQDLGRDPSPEEIGEEMDLPTEKVREILKIAQEPVSLETPIGEEDDSHLGDFIEDQDATSPSDHAAYELLKEQLEDVLDTLTDREENVLRLRFGLDDGRTRTLEEVGRVFGVTRERIRQIEAKALRKLRHPSRSKQLKDFLE

SEQ ID NO: 45353 - protein, 115 aa, Stictocardia beraviensis
VKYDITTVMQAKPLLKEALQAAVGLPVDRNIPLIGFIGRLEEQKGSDILYAAIPEFISMNVQIVILGTGKKKFEQQIEQLEVMYPDKARGVAKFNVPLAHMITAGADFMLIPSRF

SEQ ID NO: 45354 - protein, 1316 aa, Schizosaccharomyces pombe 972h-
MVMQERNSNEDNKVNHGIDNIYVLELDLDGSVLFASTNFSQITGSLELTGKPAALLSSDQEIFNAAIEQLLDDDSHSVKIHTVISKLPSLEENVFVQDEEMELQSKSVELDCVGVLIRDPLTSRPSHTLWVLQPLKPTRITRQEIGQQLTETLGFGAQLLAQHLEKLQTVPSTDSLPPFETVLCRVCDHEIQNWYFEHHTELCLLIHHAEARAQEANDLLNEQRNALQSLLDSLDDQIEPDVSYLGVPLAAVLPSSITSSAKSNSRSSLSQKIRNYISNMLFDAISYTDSCLAIHLPFIPESTTREDNQPFSEIRLLSPASEVFNAKTLSWCLPHIDDPGLQLMFENTDALVKKKLDAINRLSNIIYYSERVRCEIEDQVQTIIEQSIQVDGYDEPLSTTTPTLIEPIQETLMTQSPIIECEPFNTVKPSVSPEEVHDISQFNHRNDPPITAASVDSSNSFSVHRSSTNHSSTNSGSPNLSRRNNLAIPIASRRKSVSAVNTLYGVGSSYTSESFPFSKLTVPVERNSFRETESPKPFLSRQIGISTLSSNISSGKGTPSIQDYEIIKPISKGTFGTVYLSRKNTTGEIYAIKVLRKVDMISKNQVANVKAERAVLMAQEESAFVAKLYYAFQSRDYLYLVMEFMNGGDCASLLKSLYTIPESWAKIYIAEVALGLEHLHRLGIIHRDIKPDNILMSITGHLKLADFGLSQLGLTTRQLRLQKGKNNILSPPSFQSPTALGDPGDNIASSPLILPTSVSAFSYDEKSQKQKTELATFTTYKEDDTTTTTRTSIDSISSKYLESPVDSQKVNRTPNLQSVPFFRQPDAPKRFVGTPDYLAPETLRGSTQDDMVDWWALGCVLFEFLFGYPPFHAETPEKVFENILANNIAWPDLEMYPCSEEALDLINGFLQPNPERRLGFSDINEIKEHPFFNGINWDDIFSHEAPFIPAPETPLDTAYFDSRGAGAAESNMSSSVNSGEEVSKDNNVSQERGSQFLRSSHGRSRERSTSARRSRRFSEANSEFDEFGPFSYKNLSVLERANRNAIEKIRSEIAGKLHISPPDPHIGYTPGSDMPSAKLYDQQLTLSPSLMTNQGSNFSSTDSTPRKSINSSDVESRSKTDGPKSMHDLIKQLHMRKHSSHTNQSTGSSESDDLFNLDLPISNLETSYPFKIEEGQASPLSSPLSKTPPFFSSSVPLKALICVSKLNLFSELIKLLKSYKFQVSIVTDEDKMLRTLMADEKFSIIFLQLDLTRVSGVSILKIVRSSNCANRNTPAIALTPTRIDINAAIPRMFDGRLYLPINAFLLRGYIARLCNK

SEQ ID NO: 45355 - protein, 352 aa, Hordeum vulgare
MANEEALMFALQLASSVVLPMTLRTCIELGLLETLVGAGGKTLTPEEVAAKLPSKAESNPDAASMVDRLLRVLATYKVVSRLVDECADGSLSRRYGAEPVCKWLTPNEDGVSMAPFCLLAQNKLFMEAWCHMKDAVLEGGSAFTKAFRASWFDYAGTDDHFNHLFNEAMKDHSVIITKKPLELYTGFDGIDTLVDLAGGVGAVIHAITKKYPSIKGINFDLPHVISDAQPYPGVEHVGGDMFEMVPSGDAIPMKWILPCFSDDECAVLLKNCYDALPAHGKVINVECILPVNPDATNNAQGLICVDASLLAYSPGGKERNLRDFEKLAKAAGFTGVKASYIFANFWAMEYTK

SEQ ID NO: 45356 - protein, 475 aa, Salmonella enterica subsp. enterica serovar Typhi Ty2
MKKTTLAMSALALSLGLALSPLSATAAETSSSAMTAQQMPSLAPMLEKVMPSVVSINVEGSTTVNTPRMPRNFQQFFGDDSPFCQDGSPFQNSPFCQGGGNGGNGGQQQKFMALGSGVIIDAAKGYVVTNNHVVDNASVIKVQLSDGRKFDAKVVGKDPRSDIALIQIQNPKNLTAIKLADSDALRVGDYTVAIGNPFGLGETVTSGIVSALGRSGLNVENYENFIQTDAAINRGNSGGALVNLNGELIGINTAILAPDGGNIGIGFAIPSNMVKNLTSQMVEYGQVKRGELGIMGTELSSELAKAMKVDAQRGAFVSQVMPNSSAAKAGIKAGDVITSLNGKPISSFAALRAQVGTMPVGSKISLGLLREGKAITVNLELQQSSQSQVDSSTIFSGIEGAEMSNKGQDKGVVVSSVKANSPAAQIGLKKGDVIIGANQQPVKNIAELRKILDSKPSVLALNIQRGDSSIYLLMQ

SEQ ID NO: 45357 - protein, 140 aa, Ipomoea arachnosperma
TQEWNPATDKYLGVKYDISTVMQAKPLLKEALQAAVGLPVDRDIPLIGFIGRLEEQKGSDILYAAIPKFIAMNVQIVILGTGKKKFEEQIEQLEVMYPDKARGVAKFNVPLAHMITAGADFMLIPSRFEPCGLIQLHAMR

SEQ ID NO: 45358 - protein, 132 aa, Rubus idaeus
MARTKETARKSTGGKAPRKQLATKAARKSAPTTGGVKKPHRYRPGTVALREIRKYQKSTELLIRKLPFQRLVREIAQDFKTDLRFQSHAVLALQEAAEAYLVGLFEDTNLCAIHAKRVTIMPKDIQLARRIR

SEQ ID NO: 45359 - protein, 334 aa, Thermoanaerobacter tengcongensis MB4
MLAFLPKFLYNIMGLLIKFYGGRVVKGRLILIVDDDRFTRRILRDILEKEGYSIIEARDGEEAFRLYKEMLPDMVILDVVLPGMSGFDLLKILRKEEENLMLPILVLTAKGDFEEKIKGLELGADDYLVKPVNEKELVIKVNNLFQRIEHNRMANPLTGLRGNIDIKEEIKRRIKSKELFAVLYIDLDNFKSYNDYYGFLRGDEVIKLTAKILSDAVELVGNDKDFLGHIGGDDFVIITTPEKAEEMCKYIISRFDSEIKFLYDKKDRERGYIETTSRRGEKLKFPFVSVSIAIVTNEFRDFRSDLEISEVAAELKKKLKQMKGSCYLKDRRRG

SEQ ID NO: 45360 - protein, 719 aa, Bradyrhizobium japonicum
MATKAKTLQAKDKEKDDKAADAPEKDSQDAPSPLLDLSDAAVKKMIKQAKKRGFVTFDQLNEVLPSDQTSPEQIEDIMSMLSDMGINVTEADDSEGEEDKDEGGEDETDNELVEVTQKAVTEVKKSEPGERTDDPVRMYLREMGTVELLSREGEIAIAKRIEAGREAMIAGLCESPLSFQAIIIWRDELNEGKIFLRDIIDLEATYAGPEAKGGMNTAMIGGPTGENGEATAEGGEAVAVTGAAPAHVAPPAAPPAPTPFRAAPAAGNGAEAEKDPGEAAAEADMDEDDEFENQMSLAAIEAELKPKVVEIFDKIAESYKKLRKLQEQDIQNQLESTSHGPSLSPHQERKYRKLKDEIIVEVKSLRLNQARIDSLVEQLYDINKRLVSHEGRLMRLADSHGVAREDFLRNYTGSELDPRWLNRVSKLSAKGWKNFVHHEKDRIKDLRHEVHQLAALTGLEIVEFRKIVHSVQKGEREARQAKKEMVEANLRLVISIAKKYTNRGLQFLDLIQEGNIGLMKAVDKFEYRRGYKFSTYATWWIRQAITRSIADQARTIRIPVHMIETINKIVRTSRQMLNEIGREPTPEELAEKLGMPLEKVRKVLKIAKEPLSLETPVGDEEDSHLGDFIEDKNAILPIDAAIQSNLRETTTRVLASLTPREERVLRMRFGIGMNTDHTLEEVGQQFSVTRERIRQIEAKALRKLKHPSRSRKLRSFLDN

SEQ ID NO: 45361 - protein, 628 aa, Vibrio vulnificus YJ016
MRLPTPLSHNNKRISALTHWRITVQTIITDIAVIGAGGAGLRTAIAAAEANPDLEVALISKVYPMRSHTVAAEGGSAAVIKDEDSLDNHFNDTVGGGDWLCEQDVVEYFVENATREMIQMEQWGCPWSRKENGEVNVRRFGGMKVERTWFAADKTGFHMLHTLFQTSMKYSNIKRFDEYFVVDLLVDEGEVQGLIAIHMAEGELVTIKAKSVVLATGGAGRVYHCNTNGGIVTGDGMAMAYRHGVPLRDMEFVQYHPTGLPGTGILMTEGCRGEGGIIVNKNGYRYLQDYGMGPETPVGQPKNKYMELGPRDKVSQAFWHEQQKGNTIKHPLGDVVHLDLRHLGEEYLQERLPFICELAKAYVNVDPAKEPIPIRPTVHYTMGGIETDKQCETRIKGLFAVGECASVGLHGANRLGSNSLAEFVVFGRVAGEQAVKRAAEFKGWNEASIAAQVKAVEERIAALMNQEGDENWADIRTEMGHTMEAGCGIYRQEDLMQATIDKITELKARYKRISIKDKGKVFNTDLLYAIEVGYGLEVAEAMVHSAILRKESRGAHQRLDDGCTDRDDVNFLKHSLAFFQEDQAPNISYSDVTITKSQPKARLYGEAAEKAAAEEAAKAAEKNAEEQA

SEQ ID NO: 45362 - protein, 475 aa, Zea mays
MLAVSPSPVRCADAEECGGGGASKEMEETAVGPVSDSDLDFDFTVDDIDFGDFFLRLDDGDDALPGLEVDPAEIVFADFEAIATAGGDGGVTDQEVPSVLPFADAAHIGAVDPCCGVLGEDNDAACADVEEGKGECDHADEVAAAGNNNSDSGEAGCGGAFAGEKSPSSTASSSQEAESRRKVSKKHSQGKKKAKVDWTPELHRRFVQAVEELGIDKAVPSRILEIMGIDSLTRHNIASHLQKYRSHRKHMLAREVEAATWTTHRRPMYAAPSGAVKRPDSNAWTVPTIGFPPPAGTPPRPVQHFGRPLHVWGHPSPTPAVESPRVPMWPRHLAPRAPPPPPWAPPPPADPASFWHHAYMRGPAAHMPDQVAVTPCVAVPMAAARFPAPHVRGSLPWPPPMYRPLVPPALAGKSQQDALFQLQIQPSSESIDAAIGDVLTKPWLPLPLGLKPPSVDSVMGELQRQGVANVPQACG

SEQ ID NO: 45363 - protein, 310 aa, Zygosaccharomyces rouxii
MVTLQNSTSTLKLNTGQTIPQVGLGTWRSKENEGYKAVIEALKAGYRHIDGAAVYGNEGEVGKAIQDSGVPRNEIFLTTKLWCTQQRNPQEALDQSLQRLGLDYVDLYLIHWPVPLRTENIKDGNLFQFAEKPDGSKDVDLEWNFIKTWELMQKLLESGKTKAIGVSNFSVNNLKDLLAAPTTKVTPAVNQVELHPLLPQEDLIKFGKENGIVIEAYSPLGGENAPILSDPTVQEIAKANGVEAGHVVISWAVQKGLVTLPKSVTPSRIVGNLKVLTLSDSDVAKVDGLLKAKGERRTCYQDFSPFPIFQ

SEQ ID NO: 45364 - protein, 534 aa, Streptococcus pyogenes MGAS8232
MTKYIFVTGGVVSSIGKGIVAASLGRLLKNRGLKVTIQKFDPYINIDPGTMSPYQHGEVYVTDDGAETDLDLGHYERFIDINLNKYSNVTTGKIYSEVLRKERKGEYLGATVQVIPHITDALKEKIKRAASTTDSDVIITEVGGTVGDIESLPFLEALRQMKADVGSENVMYIHTTLLPYLKAAGEMKTKPTQHSVKELRGLGIQPNMLVIRTEEPVEQGIKNKLAQFCDVNSEAVIESRDVEHLYQIPLNLQAQSMDQIVCDHLKLNAPQADMTEWSAMVDKVMNLRKTTKIALVGKYVELPDAYLSVVEALKHSGYANDTAIDLKWVNANDVTVENAADLLGDADGIIVPGGFGQRGTEGKIQAIRYARENDVPMLGICLGMQLTCVEFARHVLNMEGANSFELEPSTKYPIIDIMRDQIDIEDMGGTLRLGLYPCKLKPGSKAAMAYNNQEVVQRRHRHRYEFNNKFRSEFEAAGFVFSGVSPDNRLVEIVELKEKKFFVAAQYHPELQSRPNRPEELYTAFVTAAIKNSN

SEQ ID NO: 45365 - protein, 190 aa, Brassica napus
  misc_feature (158)..(158): Xaa can be any naturally occurring amino acid
  misc_feature (181)..(181): Xaa can be any naturally occurring amino acid
  unsure (1)..(190): unsure at all Xaa locations
MAPYFPINSFSFSAPTFRSLPPHALTSKRRISIKASSSGLSSPPLLSLSRSNLKGRAFASDGSTQESPSVVCFGEMLIDFVPTTSGLSLAQAPAFKKAPGGAPANVAVGIARLGSSSGFIGKVGEDEFGYMLANILKENNVNNEGMRFDPGARPALAXVTLTNEGEREFMFYRNPSADMLXERSELDLDL

SEQ ID NO: 45366 - protein, 1086 aa, Cryptococcus neoformans var. neoformans
MASNDPKAKVILQSIATEKRNIEGARAVIRAFEASSKNETVIQQAQNEIRTATMSIKFLEDELAKLQVGGSGGASGTPGRGEPSGGTGAGVPGKQGPQGVVASSPGGRGMAGDRERPLPPPPPGAEQDSAKKPETKNYSQLDLLRYDAPLTGAKITRMLNQLQFKLQVEEQYKTGIEKMAQAYRAEGDKRLKSETDAKKSESEGKIQLLRKAKKRYESLAKFGGAVEDDEDLMSDGKRKEALRKPISGKLVISLRSARDLNHRALPRRSSKTYSETTVVIKVEGNERAVSHPSRNDKWHEDFHIPVEKANEVEITIYDTVAPGDSAPIGMLWLRVSDLVEALRRQKVGIEGQGAGWVTAATAATMGPRSSGNAPDSVTLHSAGTLRGKPDAEGKGPDGIDGWWSVEPAGAISLRMDFVKDTVAGARRPYEALGRQGAVRMRKGDVYEMNGHKFVQRQFYQPIMCALCQEFLLTGEGYQCEDCRYACHKKCYPKVVTKCISKSNADGEGDEEKINHRIPHRFTPYTNMSANWCCHCGYMLPFGRKNAVKCSECALTCHQTCSHLVPDFCGMTMEMANLLLKNLRDIKTTQHRKPVPSTSTSSSVSTLPSYHSQESRSHPVQSAALQQPAPSSRPPAGALPSTDQRPIQPQVQNQQTGAYDNLRPAGGRAMPQLPPVAVPSNKISFEGDRLQEPHGQIPPVMPAAQPQPQTLPPSAQSVQSPVKPQYVPQPAVQQQVAQRLPPQQPLMARKRKVGLDDFNFLAVLGKGNFGKVMLAEEKTSSNLYAIKVLKKEFIIENDEVESTQSEKRVFLAAAQERHPFLLGLHSCFQTETRVYFVMEYISGGDLMLHIQKKQFTLRQAKFYACEVLLALQYFHSKGIIYRDLKLDNILLTLDGHVKVADYGLCKEEMWFGKTTSTFCGTPEFMAPEILLEQRYGRAVDWWAFGVLTYEMLLGQSPFRGEDEDEIFDAILEDEPLYPITMPRDAVSLLQRLLTRDPTRRLGAGEGDAEEIKQHLFFRDVNFDDVYHKRIPPPYFPVIGNATDTSNFDQEFTREQATLTPVHSQLSEADQKEFAGFSWIAPWAAAQT

SEQ ID NO: 45367 - protein, 385 aa, Anabaena variabilis ATCC 29413
MISAIAQKFSQFLAARNIRRFLKLHIWLGMVCGILLLFLVVHPVQSQEPDNQKSLVVATRAIPPFVFNDNGELSGFSIDLWRSIASQIGAESKFVEYPNVADLLSSVRNGKANAGIAAISITAERQQQFDFSLPMFSGGLQILVRNPKLSNSGTPNILSLFFSTTILQVLGLALFLIVIAAHVIWLSERHQKEGMISPSYFPGIFKACWWAAATLATQADEMPKGVIGRILAIIWMFIGVLFVTYFTAAATTSLTVQQLQADINSVSDLPGRVVATTTGSTAATYLKQQKISVLEVPKIEQAYDALETKKAEAVVFDSPVLLFYAANQGQGKVEVVGSVFREENYGIVLPNNSPYRKPINNALLKLKENGTYQSLYDKWFGVKNS

SEQ ID NO: 45368 - protein, 737 aa, Moraxella bovis
MGGDTSLIRLNLQTLNSNLVMIDYAQQPALSALVILAKYYGISASPADIMHQFSDNTKGDLNEIEWMLAAKKLELKVKIIKQPLTRLSMITLPALVWCDNKPDLDQNLNSHFILTKIDGVGSAAKYLIYDLIENRPIILDASEFSERYSGKLMLVTSRASILGSLAKFDFTWFIPAVIKYRYIFFEVIVISVVLQIFALITPLFFQVVMDKVLVHRGFSTLDVVAIALLVVSLFEVILSGLRTYIFAHTTSRIDVELGARLFRHLLALPLAYFESRRVGDTVARIRELEHIRNFLTGQALTSVLDLVFSFIFLFVMWYYSPTLTLVVLASLPIYAFWSAFISPILRTRLNDQFARNADNQSFLVESITAVGTVKAMAVEPQMTRRWDNQLAAYVVSSFRVAKLAMVGQQGVQLIQKMVIVATLWIGAKLVIEGKLSVGQLIAFNMLAGQVAAPVIRLAQLWQDFQQVGISVARLGDILNTPTEHSTSRLTLPDIKGDITFENVDFRYKIDGHLILQNLNLQINAGEILGIVGRSGSGKSTLTKLVQRLYVPENGRILVDGNDLALADPAWLRRQVGVVLQENVLLNRSIRDNIALTDTGMSLEFIIQAAKMSGAHDFIMELPEGYDTIVGEQGAGLSGGQRQRIAIARALITNPRILIFDEATSALDYESERAIMQNMQAICQGRTVLIIAHRLSTVKMAHRIIAMDKGKIVEQGTHQELLQKEDGYYRYLYDLQNG

SEQ ID NO: 45369 - protein, 210 aa, Shigella flexneri 2a str. 301
MSMITLWGRNNSTNVKKVLLTLEELELPYEQILAGREFGINHDADFLAMNPNGLVPLLRDDESDLILWESNAIVRYLAAQYGQKRLWIDSPARRAEAEKWMDWANQTLSNAHRGILMGLVRTPPEERDQAAIDASCKECDALFALLDAELAKVKWFSGDEFGVGDIAIAPFIYNLFNVGLTWTPRPNLQRWYQQLTERPAVRKVVMIPVS

SEQ ID NO: 45370 - protein, 330 aa, Geobacter metallireducens GS-15
MKILVTGGAGYIGSHVVKALGLEGHELLVYDNLSTGHEWAVMYGTLVKGDLEDRALLEKVFREFRPDAVMHFAASIQVEESVRRPLLYYGNNTAGTLNLLDVMVRTGVRCLVHSSTAAVYGIPDVVPVAETAPLAPINPYGSSKAMVEKILADLALAEDFRYVAIRYFNVAGADVACRLGQAYREATHLITRALKTAHGQYERLQIFGTDYQTPDGTCIRDYIHVDDLAAAHVLALDYLTEGGASEIVNCGYGHGFSVREVIEAVAHVTGTPFPVEETGRRPGDPPALVADSSKLRSLMKWEPQYDNLDFIIRTAWEWELALKRRESCAA

SEQ ID NO: 45371 - protein, 1914 aa, Neurospora crassa
MTDADPDADPDASTPMGLRSPPESDKAMNLDEASESELSDLDDDVADKLDQDHTFDLDLGSDPLPDPKTGQQQQQPEPSVSHEHEPATAATVESATQIKEEQEGEGKESTSHSQQPDTGAASATTPTSPSEDIGEILPDRYENNVPVFKPTLKQFQDFKLFMEKVDKYGMKSGIIKIIPPEEWRSALPPLDELVKQVRVREPIKQEIMGQNGTYRQSEHQPPARRGERRANAEKTKPAPRSRAAPPAANGTTSNKTPTNTNTGRGKRKGRVTRGSAKAATDETDDPPITPVSPPPEDEDKPLASIEEEDIKDEACEEEESIPRAGRMGFSRQGKPKMQSTSARRKYIRREGSAMIDEAAFKDWDYRMDVSDFTPERCEELERIYWKTLTYAPPLYGADLPGTLFAESTENWNLNKLPNLLDVLGTKVPGVNTAYLYLGMWKATFAWHLEDVDLYSINFLHFGAPKQWYSISQADARRFEAAMKNIWPTDAKACDQFLRHKSFLISPSHLKQHYGITVNKVVSYPGEFVVTYPYGYHSGYNLGYNCAEAVNFALDSWLPMGKIAKKCQCAQAQDSVWVDVYEIERKLRGESTEYEVTEDEDEDEDEDSDESDQDTGLPSPPSGLDHRGGKRVRTAGQKRKREANNRGTEGKAKRSRFRLKAPVEPPCCLCPNDIPGAEIMPTDDGRKAHRMCALYLPETYIETVDDQEIIANVAGIDKARLELKCLYCRSKKGACFQCSQKKCPRAYHATCAAAAGVFVEEGDVPVIGEDGTEYKEQAFEFSCRFHRVKRDRKTEGAILEDDPVVRKTAEGLKKNDICQIQYYQGNIFAGVVVENLHEEETLLLDVIPSGDRIQVEWKWLLVADPSEYRLPKASPNAIPMPTSKKAKQEINAKRPVEEIPRKGDEFSTGFVWAEFHTGEPDKNKEQVKIDLDKENQVWHYLGPTSTEARAQYTENPSRKQHNSKSNFLDTIPKPPPTYPVQVASAPRKSLSATYPTQQQQTFIASPASSSALASKQDKPYVYKPRKPVQPHTQFNVQYTSHMFMPAPPLPSPSYVPQQNHPFYQAQLRPNVPQTVHPSQVFSPQPMHYDGQRRMSQSTQPYPQQQMSPHHFAQHQMPQQMPQHQFQPQQQQQQFQHFQPPQQHYQQQPQQNYPQTPVPLPPQAFQFQQQTCAPLPQQVQPQQPQQQSPVPLPQQVQTALPEQQQQQQQVHHVQQTPVPVPQVPLQAQQSTQSSPQQQQQPQPQDEEAHQPLPPVDQTQPPSPPQPLPKPRPFKVYKACQFRKLKLPEKRPGAKKDLPDAFASRRFSFAGIDRIHDLPGIVWPPKNLISGRESQCRRGVWAPLSDEGIMPAPMTSSLLKCADDDQRVSQKYEFFQHHSPYKPAVTELDETTGKKKLVHADFTNDYAENFTNFMKNAREALTRKDISEPSSRPVTSQAHSRNASSASAQPNDSQFQQNSFTGQPTQHPRVQPQYTYNQHEAGFGESSSSSPFSSHSVPAPVLFGPAFEQQSGSHQDMRQQYQGPWQQQYQNQGSHNIWMGSPQMVGSPQPQMFSPSPTQQGHHHHMPQSQQQAQNQQPQPQQPAKPQFTKQSHSPIPLPPYVQKMNQAKPSPLSQPPQTNSRQGSQGASSQSQSQKRRQRKSAQQASEQTISPTQLSVDTGAGSTPQGQPPKAQQTSNNPWTNANNVHLQFPSALNASSQQPAPATATQRPSQNTSDHTPAEADAGAEQQESGGEEEAHDVEENSYFNEAQGFQTPPLQPQTLSSTDVSPDQNYFPLSAPPPTPLGGIAFGGVGVGGFNPGSAFNVATLSGGIAGLGALGTLGGLLGGLESGASGNGTWSGRARGLSRSGDNVFMGSTSAIEDGEEGELGCGMGGGGGGGGGGSRGGVHGGGNGGTALSRQDVLDKILSNLHRLGTE

SEQ ID NO: 45372 - protein, 122 aa, Glycine max
RVENMEGKGFTEEQEALVVKSWNEMKKNSQELGLKFFKKILEIAPAAQQLFSFLKDSTVPLEENPKLKPHAMAVFVMVTKLALLETIKEAVPEMWSPAMKNAWEEAHDQLAEAIKSEMKPSD

SEQ ID NO: 45373 - protein, 454 aa, Schizosaccharomyces pombe
MSNSLNDQTRPPDSSVVDSTSSNFPNASNDSVHDKPVKQDEQSNPNVREAIANSDGQESLAVKENKDTESSSSHFVPNGVSNSKKRKLVATDLDVDFDISSVRVTEKPSVLEEKSGVIQFRVVSNDDTADSMIMLTGLKNIFMKQLPKMPKEYITRLIYDRNHLSMTIVKDNLHVVGGITYRPFEQRGFAEIVFCAIASNEQVRGYGSHLMNHLKDYVRGTTTIQHFLTYADNYAIGYFKKQGFTKEITLDKSIWVGYIKDYEGGTLMQCTMIPKIKYLEANLILAIQKAAVVSKINRITRSNVVYPGLDVFKDGPAHIEPSQVPGLMEVGWCKEMEELSKKPRPKPFFAVLEMLFTEMQNHPSSWPFMQPVSKEDVPDYYEVIEHPMDLSTMEFRLRNNQYESVEEFIRDAKYIFDNCRSYNDSNTTYYKNADRLEKFFQKKLRETEYSHLAD

SEQ ID NO: 45374 - protein, 490 aa, Aspergillus niger
MVGIGPKRPPSRKGSMADVPQNLLQQIKDFEDQFTVDRSKLKQIVNHFVKELEKGLSVEGGNIPMNVTWVLGFPDGDEQGTFLALDMGGTNLRVCEITLTQEKGAFDITQSKYRMPEELKTGTAEELWEYIADCLQQFIESHHENEKISKLPLGFTFSYPATQDYIDHGVLQRWTKGFDIDGVEGHDVVPPLEAILQKRGLPIKVAALINDTTGTLIASSYTDSDMKIGCIFGTGVNAAYMENAGSIPKLAHMNLPADMPVAINCEYGAFDNEHIVLPLTKYDHIIDRDSPRPGQQAFEKMTAGLYLGEIFRLALMDLVENRPGLIFNGQDTTKLRKPYILDASFLAAIEEDPYENLEETEELMERELNIKATPAELEMIRRLAELIGTRAARLSACGVAAICTKKKIDSCHVGADGSVFTKYPHFKARGAKALREILDWAPEEQDKVTIMAAEDGSGVGAALIAALTLKRVKAGNLAGIRNMADMKTLL

SEQ ID NO: 45375 - protein, 561 aa, Oryza sativa
MELAMDFALRLRDAANHHLSRYEPLVLLAAPLLALLAARTLHAAAAAVADRGLRTVLLALAMTAIKLLPGVSAYINAEKRKVVDQLQSGGTSTKSTLRTELPTVGLSNQVINDLETLKARDVNWQGKCSGTVYIAGSESEGHFALINKAYSMFSHTNPLHQDVFKSVAQLEAEVVAMTAALLGIKEKSSGGQICGNMTSGGTESILLAVKTSRDYMRTKKGITKPEMIIAESAHSAYDKAAQYFNIKVRRVPVNKEFLADVKGFKRCINGNTIMMVGSAPGFPHGLIDPIEELGELASRYDICLHVDLCLGGFVLPFARKLGYPIPPFDFCVKGVTSISTDVHKYGLAPKGTSIVLYKNHEIRKISWLSLHNYYSLTDMIMLQNCTKMFKQVTEWTGGLYVSPTIAGSRPGGLIAGAWAAMTSLGLNGYMENTGHIMEVSKKIQRGIEDIPGLFVIGKPDMTVVAFGSDSVDIFEVNDIMSSKGWHLNALQRPNSLHICVTLQHTVIYEEFLKDLKDSVDTVKANPGPISGGRAPIYGAAGKMPDRGMVRELLVEFMDASC

SEQ ID NO: 45376 - protein, 379 aa, Streptococcus agalactiae NEM316
MKNEMLALILAGGQGTRLGKLTQSIAKPAVQFGGRYRIIDFALSNCANSGINNVGVITQYQPLELNTHIGNGSSWGLDGIDSGVTVLQPYSATEGNRWFQGTSHAIYQNIDYIDRINPEYVLILSGDHIYKMDYDDMLQTHKDNLASLTVAVLDVPLKEASRFGIMNTDSNDRIVEFEEKPEHPKSTKASMGIYIFDWKRLRTVLIDGEKNGIDMSDFGKNVIPAYLESGERVYTYNFDGYWKDVGTIESLWEANMEYIGEDNKLHSRDRSWKIYSKNLIAPPNFMTEDANVKDSLVVDGCFVAGNVEHSILSTNVQVKPNAIIKDSFVMSGATIGEGAKINRAIIGEDAVIGDGVVIDGSKEVEVIGYKEVVGVPNED

SEQ ID NO: 45377 - protein, 644 aa, Novosphingobium aromaticivorans DSM 12444
MTDTITTEQPVYVTDALIAEDIDQYLKVHEHKTMLRFITCGSVDDGKSTLIGRLLYDSKMIFEDQLAALENDSKKVGTQGQDIDFALLVDGLAAEREQGITIDVAYRFFNTEKRKFIVADCPGHEQYTRNMVTGASTADLAVILIDARKGVLVQTRRHSYLCHLIGIRNIVLAVNKMDLVDYDPVVFDAIVKDYTEFARSIGIESFTAMPISGFKGDNITTRSANTPWYNGPTLVDHLETVEVLSSLDADKPFRMPVQWVNRPNLDFRGFSGLVATGSVKPGDEIRVLPSGKTSKVTRVVTLDGDLDQAVAGQSVTLCLADEVDCSRGDVIALADNPPQAADQFEATLVWLNDEAMLPGRAYWLKLATQTVSATVQQPKYVVNVNTMEHLAAKTLELNAIGVAELATDKPLVFEPYADSRTLGGFVLIDKITNATVAAGMLHFSLRRAQNVHWQALDVSREAHAALKHQKPAVLWFTGLSGSGKSTIANLVEKRLHAVGKHTFLLDGDNVRHGLNKDLGFTEADRIENIRRVGEVAKLMTDAGLIVLTAFISPFRAEREMVRSLMADGEFIEVFIDTPLEVAESRDVKGLYKKARSGQLKNFTGIDSPYEAPQNPEIRVDTTEETPENAAERIVNQLLGWAPTI

SEQ ID NO: 45378 - protein, 377 aa, Streptococcus agalactiae NEM316
MKIDKYTAILGNTVSYPDMHSLTDNRPLASLPFDGKYRLIDFQLSSLANAGVRSIYGIFRGNNVRSVFDHIRSGREWGLGTLLSHYSLGFYDTDDDIRTVNGDYYDQILTYLRRSGSDQTIYMSCDMLCNIDLSQVIHLHNANGTQATVVYKKMPRSAIAEANQVLTIDESDHVVSLGKAVDNDDNQKMSAEIYVINTPWLIEKMEEEAQNNEPRKLRFLLRDLIVESNALAFEYTGYLSNISSIKSYYDANMDMLTPNKFYSLFFSNQKVYTKVKNEEATYFDKQSNVSNSQLASGSIIKGYLDHSIVSRNCLLENGTRVVNSIIFPKVKIGEGATIENTIIDKCVKVAPGVTLKGSLDKPLVIPKFSEINEDIIQ

SEQ ID NO: 45379 - protein, 693 aa, Neurospora crassa
MRILSRIALLSLTTAAAHAATVVYDFNVSWITANPDGLAERPVIGINNQWPPPRIDVQVGDRLIVNLHNSLGDEDTSLHFHGLFMNGSNHMDGPVMVTQCPIPPGASFTYNFTVDQPGTYWYHSHNKGQYPDGFRGPLVIHDPKAPFEYDEELVLTVSDWYHDRMSLLQPRFMSKYNPTGAEPVPKSALMNDTQNLTMPMVPDRTYLFRIANIGAFAGQYIWVEDHTITVVEMDGVYVHPTETNMVYVAAAQRCSFLLTAKKETSRNFPIIASMDTTLFDTIPPGLNTNVTSYLLYNPTAPLPLPTPLDSLTPLDDTLLFPQDNLTTLPSPDQTITLNVTMNNLASGANYAFFNDITYVPPRVPTLYTVLSSPNSSSSQDMDLTTNPSIYGTYTHPFILSHNSIVQIVLNNLDSGRHPFHLHGHQFQILHRSGADEGTWSPSSSSSSSTSSFSTSNGSNHTAPMRRDTLVVEPNGNAVIRFQADNPGVWLFHCHIEWHMISGLAVTFIEAPSVLQQTINLPADHLAACRDRQDPIPFEGNAAGRGGKDKNDLSQWLVLDGQPSPPKPIPAGFTGGGIAALTMSCFTGILGVAVVAWYGFSEPVGESNTAAAMVKTKSPAAAGESGSESGVYTDVDVDSAGKSASVVRVKRGTEAVESEALSFGSEEEAVNGVGMATSKKGDGVVVDVDAITRA

SEQ ID NO: 45380 - protein, 251 aa, Thermosynechococcus elongatus BP-1
MSVTLETHKEKILVVDDEASIRRILETRLSMIGYTVVTAADGEEALTKFRQEQPDLVVLDVMMPKLDGYGVCQELRKESDVPIIMLTALGDVADRITGLELGADDYVVKPFSPKELEARIRSVLRRIEKTSTSGIPSSGVIQVGNIRIDTNKRQVYKGDERIRLTGMEFMLLELLVGRSGEPFSRAEILEQVWGYTPERHVDTRVVDVHISRLRAKLEEDPSNPELILTARGTGYLFQRITEPGEASNKNQ

SEQ ID NO: 45381 - protein, 305 aa, Aspergillus fumigatus
MGHLLQHGRATVRRLSRRTSRSQRLQLRHHSKASPNPVPEKNSTSANASRSGATPSCTSPCSPNTSSPTNTPLAASTPARSSPRTFFQAIQAGPIGRLADSYARVQQRRPYATQVVSSIVVYLCGDLSAQLLFPSESPAQTSRVASEEKPADSAEDGEGKAASSGGYDPLRTMRHLTSKFLSILTKVSVQQAVFTPVFNTYFFSVHSLLAGASLEETFERLKVALPVSISNSVKLWPAVTAFSFVYVSPPFRSIFAGVIAVGWQTYLSWLNQKAAREVEAEMAESDRSSHVLVSGSISPSTTIKA

SEQ ID NO: 45382 - protein, 133 aa, Ipomoea polymorpha
EWNPATDKYLAVKYDITTVMQAKPLLKEALQAAVGLPVDRNVPLIGFIGRLEEQKGSDILYAAIPKFISMNVQIVILGTGKKKFEQQIEQLEVMYPDKARGVAKFNVPLAHMITAGADFMLIPSRFEPCGLIQ

SEQ ID NO: 45383 - protein, 140 aa, Ipomoea cairica
TQEWNPATDKYLAVKYDITTVMQAKPLVKEALQAAVGLPVDRNVPLIGFIGRLEEQKGSDILYAAISKFISMDVQIVILGTGKKKFEQQIEQLEVLYPDKARGVAKFNVPLAHMITAGADFMLIPSRFEPCGLIQLHAMR

SEQ ID NO: 45384 - protein, 873 aa, Solibacter usitatus Ellin6076
MFMAPLWILKFATLVSACLAAYGILTPLTAPGRRGHLRGRLLFQLLTRMGPASIKIGQILSTQGGLFSAGVIAGLSKLLDDVPPCGRRYVQKTIETDIGKPMSTIFESFDWQAVASASIAQVHRGVLASGQCVAVKVIRRGVPGELKISLGVFGFAVRLAHHLLPSLRQRNLPAHFAKIERLLLLQADLRNEANNQTRIRRNFEGHPFVRVPRPYAEYSGGNVLVMEFMDGLRGLEFAGVELAPPLLACRLQEAFYTMAYLHGVFHADLHPGNIMFTKCGEIILLDFGVVGILDENEKWGLCAFYYAATRGDWKLAVERFTRYFVIGADSIADTTGCGSALEKVLRKHFELQTNKWSTIGFAEEANLVLRDFGARFTTNFSNLVLAFVSGEGFVARVDPDIDIWNNARRFTDRASPYMSQEVRKRFDSSLAPFMPRSVDWRARAARSLVAPTHLDPYMLPSEYPIFVRRAQGCEVEDFDGNTYIDLACGFGPHLLGYGNPVLREALTAAVDVGVNAIGHAAEVELAEELTAAFPGADKVIFANSGTEAVLQALRLTRAFRKRRRIAKFEGHYHGHSDQGVVSSWFRFAGTESEPEPFIDLPGVDQRAVGDMLILQYGDPLSLRRLRTAADELACVICEPMPSTLGCYDREFLLQLRAICSESGVPLIFDEIVTGFRVAFGGIQTLLGIEPDVSCLGKIIGGGLPCAAVVGHREIIDLARGSNDPFIDSESKVFVGGTFSGNAYSCTAGLAILRYLRQRPEIYVRLDDQTRTLVAELKAAADSRHVAVQVSGTRSILTLTFDHQNASHFRGKQTGTNHRANLALSYYMRRHRVHLPELHTMLLNAALEDVHISTIIAAFDQSLAEMVEDGFFLS

SEQ ID NO: 45385 - protein, 56 aa, Zea mays
MSDGTATCIDIILAIILPPLGVFFKFGCGAEFWICLILTFFGYLPGIIYAVWVITM

SEQ ID NO: 45386 - protein, 469 aa, Photobacterium profundum SS9
MTKNKKPTHFDAIIIGSGPGGEGAAMGLTKAGLNVAVIERENSVGGGCTHWGTIPSKALRHAVSRIIEYNQNPLYCKNNSSLHSTFSQILGHAQDVVNKQTRMRQGFYDRNKCSLIFGEASFIDAHTVRVKNADNSTDLYSADKFVIATGSRPYHPEGVDFDHSRVYDSDSILQLEHDPRHIIIYGAGVIGSEYASIFRGLGVKVDLINTRHRLLEFLDNEISDSLSYHLWNSGAMIRNGETFEKIEGTDDSIILHLESGKKMRADCLLYANGRTGNTDKLNLNKVGLTPDSRGQLAVNQNYCTDVDHVYAVGDVIGYPSLASAAYDQGRFVAQAITTGEAQGSLIDHIPTGIYTIPEISSVGKTEQQLTADKVPYEVGRSQFKHLARAQIAGTEVGSLKILFHRETKEILGIHCFGERAAEIIHIGQAIMEQKGDGNTIDYFVNTTFNYPTMAEAYRVAALNGLNRLF

SEQ ID NO: 45387 - protein, 93 aa, Brassica napus
MPSTQALTVAARSLRSRILSRSGSTSAGASRWATPGHEERPKGFFMNRTPPPPGQSRKWEDWELPCYVTSFLTIVILGVGLNAKPDLSIETWA

SEQ ID NO: 45388 - protein, 357 aa, Triticum aestivum
MERYELLKDIGAGNFGVARLMRNKETKELVAMKYIPRGLKIDENVAREIINHRSLRHPNIIRFKEVVVTPTHLAIVMEYAAGGELFDRICNAGRFSEDEARYFFQQLICGVSYCHFMQICHRDLKLENTLLDGSPAPRLKICLFFLLQSSLLHSKPKSTVGTPAYIAPEVLSRREYDGKTADVWSCGVTLYVMLVGGYPFEDPDDPKNFRKTIGRIMSIQYKIPEYVHVSQDCKQLLASIFVANPAKRITMREIRNHPWFLKNLPRELTEAAQAMYYKRDNSAPTYSVQSVEEIMKIVEEAQKPPPSTTPVAGFGWAEEDEQEDGKKPEEEAEEEDEEDEYEKQLNEVRASGEFHIS

SEQ ID NO: 45389 - protein, 258 aa, Triticum aestivum
PYAYLGDLQHRGVQKSSLVPVRNSRDIVDPRVRHSTALAPTVMASSATSVAPFQGLKSTAGLPVSRRSNGASLGSVSNGGRIRCMQVWPIEGIKKFETLSYLPPLSTEALLKQVDYLIRSKWVPCLEFSKVGFIFREHNASPGYYDGRYWTMWKLPMFGCTDATQVINEVEEVKKEYPDAYVRIIGFDNMRQVQCVSFIAFKPPGCEESGKALNRLTHHGPQYKPICSFCQLLKLAFGVFPFPQFGPSLTWFPKKILW

SEQ ID NO: 45390 - protein, 546 aa, Vibrio vulnificus YJ016
MAAKDVKFGNDARVKMLEGVNILADAVKVTLGPKGRNVVLDKSFGAPTITKDGVSVAREIELEDKFQNMGAQMVKQVASQANDVAGDGTTTATVLAQAIVNEGLKAVAAGMNPMDLKRGIDKAVAAAVEELKALSKDCSTSTEIEQVGTISANSDSSVGKIIAEAMEKVGRDGVITVEEGQALHDELDVVEGMQFDRGYLSPYFINNQESGSVELESPFILLVDKKISNIRELLPALEAVAKASRPLLIIAEDVEGEALATLVVNNMRGIVKVAAVKAPGFGDRRKAMLQDIAILTGGTVISEEVGLELEKATLEDLGQAKRVSITKENTTIIDGVGEEAMIQGRVAQIRQQIEDATSDYDKEKLQERVAKLAGGVAVIKVGAATEVEMKEKKDRVEDALHATRAAVEEGIVAGGGVALIRAASKIVDLQGDNEEQNVGIRVALRAMEAPLRQITKNAGDEESVVANNVRAGEGSYGYNAATGVYGDMLEMGILDPTKVTRSALQFAASVAGLMITTEAMVTDLPQKDSGMPDMGGMGGMGGMGMM

SEQ ID NO: 45391 - protein, 96 aa, Vibrio vulnificus YJ016
MNIRPLHDRVIVERQEVESKSAGGIVLTGSAAEKSTRGVVLAVGKGRILENGTVQPLDVKVGDTVIFAESYGTKTEKIDGKEVLIMSENDIMAIVD

SEQ ID NO: 45392 - protein, 253 aa, Bacteroides thetaiotaomicron VPI-5482
MSIAAFNLFLGVMSLTALIVFIALYFVKAGYGIFRTASWGVAISNKLAWILMEAPVFLVMCWMWIHSERRFDPVILTFFVFFQIHYFQRAFVFPLLLTGKSKMPLAIMSMGILFNLLNGYMQGEWIFYLSPEGMYHSGWFTSAWFIAGSLLFFAGMLMNWHSDYIIRHLRKPGDTRHYLPQKGMYRYVTSANYLGEIIEWAGWAILTCSLSGLVFFWWTVANLVPRANAIWHRYREEFGSEVGERKRVFPFIY

SEQ ID NO: 45393 - protein, 191 aa, Triticum aestivum
  misc_feature (14)..(14): Xaa can be any naturally occurring amino acid
  misc_feature (52)..(52): Xaa can be any naturally occurring amino acid
  misc_feature (98)..(98): Xaa can be any naturally occurring amino acid
  misc_feature (160)..(160): Xaa can be any naturally occurring amino acid
  unsure (1)..(191): unsure at all Xaa locations
GNQAIRQIPLNDNXCAYQYEAGFPLGFALLCAASFFGYMLGMLQRRLLGSVXSTTDDPQAPPRPSIASIPPSYQKPLNPYIRHPFIPREETAKQETEXGFFTTACKLMGGAKSSVGEIFGFKNKRLSSPYHQQHQQQQRTAYPWPVQESYAITHDEPAPXLDTRAPTPQKNYCLMREEPEKTHYVRHGHPY

SEQ ID NO: 45394 - protein, 117 aa, Saccharomyces cerevisiae
MKSTFKSEYPFEKRKAESERIADRFKNRIPVICEKAEKSDIPEIDKRKYLVPADLTVGQFVYVIRKRIMLPPEKAIFIFVNDTLPPTAALMSAIYQEHKDKDGFLYVTYSGENTFGR

SEQ ID NO: 45395 - protein, 295 aa, Lycopersicon esculentum
MLAIFKNGVVDPPKELQSPASLQASIKAANPEETMKNSAREKMLAIFKNGVVDPPKELQSPASLQASIKAANPEETMKNFLSANQNNGFSIGFMNKAFWHILILQLHTILCQGCFCGMNDIYCIFLGNLSNLCALNKHYGLSKCANEAMLVSEAYRTLRDRGPYPAHQVLKELEGSFGFVIYDHKADTVFVALGGDEKVKLFWGIAFDGSVMISDNVDHIKASCIKSFAPFPSGCMYHSETGLKSYEHPSYKMKAMPRVDSEGSMCGAYFKVDVYSKVNSMPRVGSSANWATWGQ

SEQ ID NO: 45396 - protein, 248 aa, Arabidopsis thaliana
MKIQCDVCEKAPATVICCADEAALCPQCDIEIHAANKLASKHQRLHLNSLSTKFPRCDICQEKAAFIFCVEDRALLCRDCDESIHVANSRSANHQRFLATGIKVALTSTICSKEIEKNQPEPSNNQQKANQIPAKSTSQQQQQPSSATPLPWAVDDFFHFSDIESTDKKGQLDLGAGELDWFSDMGFFGDQINDKALPAAEVPELSVSHLGHVHSYKPMKSNVSHKKPRFETRYDDDDEEHFIVPDLG

SEQ ID NO: 45397 - protein, 638 aa, Ustilago maydis 521
MPLDIQDNAIAGHAEAQRDLYVADIKAHGGNDQDHPVAHLETGVRVKPDVSDDDFIAPSDEDLATLRRVPEKLPWTTYAIAFCELAERFSYYGCVQVFQNFIQQPRPSNSRAGAGGSSNQSGALGEGQQAATGLTTFNTFWVYCMPILGAYLADTRWGRFKTICIAVFIAMVGHVLLIVSSLPTVLDNQGGAMACFVLAIIIMGVGTGWFKSTISPLIAEQVNGSKQSVQTLKTGERVIVDPVLTISRIFMYFYLFINIGALGGQLGMSFSEKYVGFWLAYTLPTVVFALCIPVLAFGSKYYVKTPPSGSVLAECMRLWSYAAKGRWTLNPIQLAKNMRADDFWENVKPSKHSPETKPRWMTFDDAWVDEVRRGFKACTVFLWFPLYWLTYNQITNNLVSQAATMEVHGLPNEVVSNLDPFALIILIPLFDLFLYPALRKAGFNFTPLKKIALGFLTGALAMVWAAVVQHYIYKRSQCGKNASTCYDINGDGFADPGADGSEENAVYIPAPLNVWIQSGSYILIAISEILASITGLEYAFSKAPKSMRSLVMSMFLFTSAIAAALQQAFISLSEDPNLVWSYTVFGCLAFVGFIGFSISFRKLDSQEDALNQLDAGTVNATDSAITSEPGQSEKALAP

SEQ ID NO: 45398 - protein, 362 aa, Bacteroides fragilis NCTC 9343
MKPYLLLTPGPLTTSETVKETMMTDWCTWDEDYNLHIVESLRKELVGIATRNTEEYTSVLLQGSGTYCVEAVIGAAIGKNDKLLICSNGAYGDRMGNIAEYYHIDYELLAFDETEQVSVDYVDDYLSNNSDVTHVAFVHCETTTGILNPLKELAHVVKMPGKKLIVDAMSSFGGIPMDVSELGIDFLISSANKCIQGVPGFGFIIARRSELVRCKGVARSLSLDIYDQWETMEKGHGKWRFTSPTHVVRAFKQALTELIEEGGVEARHRRYCENHRVLVEGMRSLGFVTLLDDAIQSPIITSFLYPKTGFDFKAFYTALKSKGFVIYPGKISKADTFRIGNIGDVHPEDFARLVEVVRETEY

SEQ ID NO: 45399 - protein, 916 aa, Ustilago maydis 521
MQSSAYKPSTPDSRTRAKVRIEALNSPLRRSSSLGHTPTSSMLGFPIPTDLLLGLLLNKTLLASAALLVCTWLSSSHNESIHSRVSSSIDEPGSAASREPNTSSTSSWAIATFVFLIAAAVQAIWFKAWQWLPAVKRVDRRRLCTLAAINFAQLLVWLMALRKLDAVNVIIFTQYCEIWAVDLAKSLSGRSYGGYATLFALAVSFLSSISNAAAPATGAINYSSHMLEMYADVDLPDSLRRNRPAGLASPSQLRATSAAVDASTANLSVFGTLIGHAYLVMFALLTIERESALLSASRDTGGRRRAGIVATIVASAFTLPVSLLLRLLGFSTFPALSSLVPSASNSGGSAGFSHLPAYLAISFGFLILDPLVSTSIESHASTKDRVAHGWPIAVLAAFGIGFVGFGYKPRWSQLAVALLVGQALRSILKNSPDHISSRFTTSSTSKADNAHGSAVATRSSDVSAVQELVESFRSGVAACKGTVKIIMANPDSRKIFQFLLLNLAFMGVQLLWGVWTNSLGLISDAIHMFFDCAAIGMGLFASVMATWPTDSTFTYGYARVETLSGFANGIFLILISIFIVFEAVQRIIEPPVMNNNTQLLIVSSMGLGVNLFGMWATGGHHHHGHGHGHGHGHDHGHGHGHGHDHGHGHGHSHNMMGVYLHVMADTLGSVGVIISTLLIGQFGWTGFDPIASLFIAFMIVGSVIPLVLESGRILCLEVGEHRETEMIEALDELRTLHGVVSYHSPRFWPKDAETLVGLIRVQVVWPIAAVGEATAHPHDHSHHHNHDHSHTHNHDHDHGCDRGHGHGHSQRSDHASEPSNASATRSALTPEAIAKNVESLLKSRIHGLESVAVQLEKVGPDAASPNSVFASTPLSSSPSYSSAYDASPTTARSNTASATLSPITAHRPSHHHHHHH

SEQ ID NO: 45400 - protein, 248 aa, Rosa hybrid cultivar
MAYENKPNTVLDADAQRRLGRGKIEIKRIENTTNRQVTFCKRRNGLLKKAYELSVLCDAEVALIVFSNRGRLYEYSNNSVRETIERYKKACADSSNNGSVSEATTQYYQQEAAKLRAQITTLQNSNRGYMAEGLSNMSIKELKGVETKLEKAISRIRSKKNELLFAEIEYMQKRELDLHNNNQLLRAKIADNERHQQSINAIAGGHGSYEIMQPTQPFHEARNYFQVNALEPNIHQYSRHDQISLQLV

SEQ ID NO: 45401 - protein, 474 aa, Arabidopsis thaliana
MSATLTGSGTALGFSCSSKISKRVSSSPASNRCCIKMSVSVDEKKKSFSLQKSEEAFNAAKNLMPGGVNSPVRAFKSVGGQPVLIDSVKGSKMWDIDGNEYIDYVGSWGPAIIGHADDEVLAALAETMKKGTSFGAPCLLENVLAEMVISAVPSIEMVRFVNSGTEACMGVLRLARAFTNKEKFIKFEGCYHGHANAFLVKAGSGVATLGLPDSPGVPKAATSDTLTAPYNDLEAVEKLFAAHKGEISAVILEPVVGNSGFIPPTPEFINGLRQLTKDNGVLLIFDEVMTGFRLAYGGAQEYFGITPDLTTLGKIIGGGLPVGAYGGRRDIMEMVAPAGPMYQAGTLSGNPLAMTAGIHTLKRLKQAGTYEYLDKITKELTNGILEAGKKTGHPMCGGYISGMFGFFFAEGPVYNFADSKKSDTEKFGRFFRGMLEEGVYFAPSQFEAGFTSLAHTPEDIQLTIAAAERVLSRI

SEQ ID NO: 45402 - protein, 295 aa, Schizosaccharomyces pombe
MEGVILASSALFTVYIGAKWSAQEEEPEEKQLINKRLAVLFPIFGGVTLVLMYLALRYLSKEYIQLILQGYASLASIICFVRSFNPKTTFGKITATMSSIAIALFYFKTKHWMASNILAWALAANSISIMRIDSYNTGALLLGALFFYDIYFVFGTEVMVTVATGIDIPAKYVLPQFKNPTRLSMLGLGDIVMPGLMLALMYRFDLHYYINSTSQPKKHSTYFRNTFIAYGLGLGVTNFALYYFKAAQPALLYLSPACIVAPLLTAWYRDELKTLFSFRSETEDETDEQDKCKST

SEQ ID NO: 45403 - protein, 610 aa, Arabidopsis thaliana
MDKKTIVWFRRDLRIEDNPALAAAAHEGSVFPVFIWCPEEEGQFYPGRASRWWMKQSLAHLSQSLKALGSDLTLIKTHNTISAILDCIRVTGATKVVFNHLYDPVSLVRDHTVKEKLVERGISVQSYNGDLLYEPWEIYCEKGKPFTSFNSYWKKCLDMSIESVMLPPPWRLMPITAAAEAIWACSIEELGLENEAEKPSNALLTRAWSPGWSNADKLLNEFIEKQLIDYAKNSKKVVGNSTSLLSPYLHFGEISVRHVFQCARMKQIIWARDKNSEGEESADLFLRGIGLREYSRYICFNFPFTHEQSLLSHLRFFPWDADVDKFKAWRQGRTGYPLVDAGMRELWATGWMHNRIRVIVSSFAVKFLLLPWKWGMKYFWDTLLDADLECDILGWQYISGSIPDGHELDRLDNPALQGAKYDPEGEYIRQWLPELARLPTEWIHHPWDAPLTVLKASGVELGTNYAKPIVDIDTARELLAKAISRTREAQIMIGAAPDEIVADSFEALGANTIKEPGLCPSVSSNDQQVPSAVRYNGSKRVKPEEEEERDMKKSRGFDERELFSTAESSSSSSVFFVSQSCSLASEGKNLEGIQDSSDQITTSLGKNGCK

SEQ ID NO: 45404 - protein, 192 aa, Triticum aestivum
MDRYEVVRDIGSGNFGVAKLVRDVRTKEHFAVKFIERGHKIDEHVQREIMNHRSLKHPNIIRFKEVVLTPTHLAIVMEYASGGELFQRICNAGRFSEDEGRFFFQQLISGVSYCHSMQVCHRDLKLENTLLDGSVAPRLKICDFGYSKSSVLHSQPKSTVGTPAYIAPEVLSRREYDGKVADVWSCGVTLYV

SEQ ID NO: 45405 - protein, 610 aa, Arabidopsis thaliana
MDKKTIVWFRRDLRIEDNPALAAAAHEGSVFPVFIWCPEEEGQFYPGRASRWWMKQSLAHLSQSLKALGSDLTLIKTHNTISAILDCIRVTGATKVVFNHLYDPVSLVRDHTVKEKLVERGISVQSYNGDLLYEPWEIYCEKGKPFTSFNSYWKKCLDMSIESVMLPPPWRLMPITAAAEAIWACSIEELGLENEAEKPSNALLTRAWSPGWSNADKLLNEFIEKQLIDYAKNSKKVVGNSTSLLSPYLHFGEISVRHVFQCARMKQIIWARDKNSEGEESADLFLRGIGLREYSRYICFNFPFTHEQSLLSHLRFFPWDADVDKFKAWRQGRTGYPLVDAGMRELWATGWMHNRIRVIVSSFAMKFLLLPWKWGMKYFWDTLLDADLECDILGWQYISGSIPDGHELDRLDNPALQGAKYDPEGEYIRQWLPELARLPTEWIHHPWDAPLTVLKASGVELGTNYAKPIVDIDIARELLAKAISRTREAQIMIGAAPDEIVADSFEALGANTIKEPGLCPSVSSNDQQVPSAVRYNGSKRVKPEEEEERDMKKSRGFDERELFSTAESSSSSSVFFVSQSCSLASEGKNLEGIQDSSDQITTSLGKNGCK

SEQ ID NO: 45406 - protein, 447 aa, Bacteroides thetaiotaomicron VPI-5482
MKKEYLIYKLSEEMKEATRIDNELFPKFDVKRGLRNEDGTGVLVGLTKIGNVVGYERIPGGGLKPIPGKLFYRGYDVEDISHAIIKEKRFGFEEVAYLLLSGRLPDKEELASFRELINDNMALEQKTKMNIIELEGNNIMNILSRSVLEMYRFDPDADDTSRDNLMRQSIDLISKFPTIIAYAYNMLRHATFGRSLHIRHPQEKLSIAENFLYMLKKDYTELDARTLDLLLILQAEHGGGNNSTFTVRVTSSTGTDTYSAIAAGIGSLKGPLHGGANIQVADMFHHLQENIKDWKSVDEIDTYFTRMLNKEVYNKTGLIYGIGHAVYTISDPRALLLKELARDLAREKGKEEEFAFLELLEERAIATFGRVKNNGKTVSSNIDFYSGFVYEMIGLPQEIFTPLFAMARIVGWCAHRNEELNFEGKRIIRPAYKNVLDDLAYIPIKKR

SEQ ID NO: 45407 - protein, 465 aa, Corynebacterium efficiens YS-314
MNASPTVTDQLVQTRKFKGLRARHIHFIALGSAIGTGLFYGSAGAIQAAGPSVLLVYLLGGAVVYFMLRALGEMSVRHPVRGSFAVYTRAHLGGWAGYITGWMFAFEMLIVCLADLTAIGIYMKFWFPDTAQWVWVAATLLIVGGANLASVRWFGELEFVFTLIKVTAVIAMIVGGAAILAFGLGNSPEVSGISNLWEHGGFFPNGIEGMIAAFILVLFAFGGTEIIGVAGSEAEDPEKSIPKAVNTVPARILLFYVGAILVILALNPWQTITGEESPFVQIFSTLGVNWAAGLLNLVVITAALSAINADLFGAGRVLTGLAKENLAPKIMGRVAGNGVPIMTTVIMIIVLILGVVLNVILPERVFEIVASLATFATVYVWLMILLAQVASRRQMSAQEVAGLKFPVPFYPFGQYFAILFIAFTFGIMVWYDNYHLALGVGVGFLVVMTILYYATGRPKAIAPAQ

SEQ ID NO: 45408 - protein, 330 aa, Silicibacter pomeroyi DSS-3
MNMPVIMNSKPRVLVTRRWPAAVEAQLAERFDTQFNRTDTPLTSAEFRSALARFDAILPTVTDKLGAEALDVTAPQTRLLANYGVGYSHIDSDAVRAHGITVSNTPDVLSECTADIAMTLMLMVARRAGEGERELRAGQWTGWRPTHLVGSKVSGKVLGIVGFGRIGQAMAQRAHHGFGMKILVQNRSAVPQDVLDRYGATQVETLDAMLPQCDFVSLHCPGGAANRHLINSRRLDLMKPDAFLINTARGEVVDEHALAQALMFDCIGGAALDVFDGEPRIAPVLLDCDNLVMLPHLGSATRETREAMGMRVLDNLVDYFEGRDPRDKVL

SEQ ID NO: 45409 - protein, 473 aa, Solibacter usitatus Ellin6076
MLGAARLAEHLRGVNALLDKVLEHADLGGLVDRFGRIDLEFHERCFEHAERAQAGCVAALHGGDHFLLHLINEGHDVCYSRRLLLTMYIKKQRLLTPGPTPLYPPALHAMMASDMHHRTEDFRKVYRACLADLKEVMGTSNDVLMFAGSGTGAMDASVSNLFSKGDKVIVCVAGKFGERWADIVKAYGLDARVITVPYGQAVQAEQVEAALKAESGAKGVFVQASETSTGAAHDVEAMGRAVAKTDAIFVVDAITGLGTMPLDIDKWGLDVVIGGSQKAFMIPPGLAFMSISPKAWKLGESGNLPHYYFNLKKEKKSGDAGESSWTPATSLILALGEALKYVKQIGMGNLIANAQMLAHATRLAAGKLGLELFSAASPGSSVTAITAPKGLDSGVIVKEFRSRFGSIIANGQGSMKGQIFRIAHLGYFDFADLFAMLAGLEIILNANGHPVQYGAGVAAAQEVYAQATVPALK

SEQ ID NO: 45410 - protein, 308 aa, Lycopersicon esculentum
MGLSDCSSVDSCNISTSSEDNNGCGLNLKATELRLGLPGSQSPERGEETCPVISTKVDEKLLFPLHPSKDTAFSVSQKTVVSGNKRGFSDAMDGFSEGKFLSNSGVKAGDTKETSRVQPPKMKDANTQSTVPERPSAVNDASNRAGSGAPATKAQVVGWPPIRSFRKNTLASASKNNEEVDGKAGSPALFIKVSMDGAPYLRKVDLRTCSAYQELSSALEKMFSCFTIGQYGSHGAPGKDMLSESKLKDLLHGSEYVLTYEDKDGDWMLVGDVPWEMFIDTCKRLRIMKGSDAIGLAPRAMEKCRSRN

SEQ ID NO: 45411 - protein, 879 aa, Silicibacter pomeroyi DSS-3
MPAAAETAPSADATVYAAEVHARLRLAWLRVLRRRAPVVARAIEGGAEFWDAAAYAEHLQAATIWFHLQQIMDENLAIREARQAERSGAARDVPGSFARALADADPDARREMRRLLAEAKLSVGPTITAHPTEAKRVSVMEIHRRIYRHLVQFESRRWSPQEETRLEQRLEMEIDLLWLTGELRMERPSLAAEIDWGLQFYRTSLIAAVPRLYERYRSAVEAEFGPGFPGTACLKFHSWIGGDRDGNPNVTAQVTRLALERSRDMMRGVYVTALDEIVQRLSLSDRLVPVPPAERAALERIVTRRADDPAACAQRNPNELFRQAAAAIAQSVEGSRYAHVADFIADLETLDRGLQAIDAGLLADLLVRPLIWQVNVFGFRAHTLDIRQNSEVVTRALHDLWQVTGEAPEPLSPAWSARLRAELGKPDLPYVNRARLGPEAAELMALLELMREIRTGADPQAIGPFILSMTRSADDLLAVYLLARYAGFGAERLPLKVVPLFETIEDLRAAPAILRDVLEVPVAARSLRDGSGQIEIMLGYSDSNKDGGFLCSTWSLDRAQRAITRALARSGLKPVFFHGRGGSVSRGGAPTERAIAAQPRGTLNGTLRLTEQGEVVTAKYANTGTAAAQLELLASSVLRHSAQPAFEAVDPEAEDVMETLSSLSQTRYQTLLQHPAFLDYFNQASPVNELALLRIGSRPARRFGAQSLADLRAIPWVFAWSQNRHMISSWYGFGSAVEDFCTVRGERGRAQLRRLFERVPLFRLIVDEVEKSLVLARLDIAEGYAALVSDRAGAEAIFARIGAEHGCSRQAIEMLTGQGNGVRFPNFLGRVARNDATLRAAHAAQIGLLGALRADPGQDRRIRLMQTMNCISAGLGWTG

SEQ ID NO: 45412 - protein, 359 aa, Bacteroides thetaiotaomicron VPI-5482
MAQVIKTKKQKKMAQLNFGGTVENVVIRDEFPLEKAREVLKNETIAVIGYGVQGPGQALNLRDNGFNVIVGQRQGKTYDKAVADGWVPGETLFGIEEACEKGTIIMCLLSDAAVMSVWPTIKPYLTAGKALYFSHGFAITWSDRTGVVPPADIDVIMVAPKGSGTSLRTMFLEGRGLNSSYAIYQDATGNAMDRTIALGIGIGSGYLFETTFIREATSDLTGERGSLMGAIQGLLLAQYEVLRENGHTPSEAFNETVEELTQSLMPLFAKNGMDWMYANCSTTAQRGALDWMGPFHDAIKPVVEKLYHSVKTGNEAQISIDSNSKPDYREKLEEELKALRESEMWQTAVTVRKLRPENN

SEQ ID NO: 45413 - protein, 256 aa, Australopyrum velutinum
ELDNIMRLTGITGIVNGMDVSEWDPTKDKFLPVNYDVTTALEGKALNKEALQAEVGLPVDRKVPLVAFIGRLEEQKGPDVLIAAIPEIVKDEDVQIVLLGTGKKKYERLLKSVEEKFPGKVRAVVRFNAPLAHQMMAGADVLAVTSRFEPCGLIQLQGMRYGTPCACASTGGLVDTIVEGKTGFHMGRLSVDCNVVEPADVKKVATTLKRAVKVVGTPAYHEMVKNCMIQDLSWKGPAKNWEDVLLELGVEGSEPG

SEQ ID NO: 45414 - protein, 257 aa, Eremopyrum bonaepartis
CELDNIMRLTGITGIVNGMDVSEWDPTKDKFLTVNYDVTTALEGKALNKEALQAEVGLPVDKKVPLVAFIGRLEEQKGPDVMIAAIPEIVKDEDVQIVLLGTGKKKFERLLKSIEEKFPSKVRAVVRFNAPLAHQMMAGADVLAVTSRFEPCGLIQLQGMRYGTPCACASTGGLVDTIVEGKTGFHMGRLSVDCNVVEPADVKKVVTTLKRAVKVVGTPAYQEMVKNCMIQDLSWKGPAKNWEDVLLELGVEGSEPG

SEQ ID NO: 45415 - protein, 257 aa, Eremopyrum distans
  misc_feature (247)..(247): Xaa can be any naturally occurring amino acid
  misc_feature (249)..(249): Xaa can be any naturally occurring amino acid
  unsure (1)..(257): unsure at all Xaa locations
CELDNIMRLTGITGIVNGMDVSEWDPTKDKFLTVNYDVTTALEGKALNKEALQAEVGLPVDRKVPLVAFIGRLEEQKGPDVMIAAIPEIVKDEDVQIVLLGTGKKKFERLLKSIEEKFPSKVRAVVRFNAPLAHQMMAGADVLAVTSRFEPCGLIQLQGMRYGTPCACASTGGLVDTIVEGKTGFHMGRLSVDCNVVEPADVKKVVTTLKRAVKVVGTPAYQEMVKNCMIQDLSWKGPAKNWEDVLXEXGVEGSEPG

SEQ ID NO: 45416 - protein, 285 aa, Arabidopsis thaliana
MAKDVEGSDGFQTRDYEDPPPTPFFDAEELTKWSLYRAVIAEFVATLLFLYVTVLTVIGYKIQSDTKAGGVDCGGVGILGIAWAFGGMIFILVYCTAGISGGHINPAVTFGLFLARKVSLIRAVLYMVAQCLGAICGVGFVKAFQSSHYVNYGGGANFLADGYNTGTGLAAEIIGTFVLVYTVFSATDPKRNARDSHVPVLAPLPIGFAVFMVHLATIPITGTGINPARSFGAAVIFNKSKPWDDHWIFWVGPFIGATIAAFYHQFVLRASGSKSLGSFRSAANV

SEQ ID NO: 45417 - protein, 342 aa, Brassica napus
  misc_feature (93)..(93): Xaa can be any naturally occurring amino acid
  misc_feature (117)..(117): Xaa can be any naturally occurring amino acid
  misc_feature (200)..(200): Xaa can be any naturally occurring amino acid
  unsure (1)..(342): unsure at all Xaa locations
MAGGKIKIGINGFGRIGRLVARVVLQRDDVELVAVNDPFITTEYMTYMFKYDSVHGQWKHHELKVKDEKTLLFGEKPVTVFGIRNPEDIPWGXELELDFVVESTGVFTDKDKAAAHXLKGGAKKVVISAPSKDAPMFVVGVNEHDYKSDLDIVSNASCTTNCLAPLAKVINDRFGIVEGLMTTVHSITATHKTADGPSMXDWRGGRAASFNIIPSSTGAAKAVGKVLPQLNGKLTGMSFRVPTVDVSVVDLTVRLEKAATYDEIKKAIKEESEGKLKGILGYTEDDVVSTDFVGDSRSSIFDAKAGIALSDNFVKLVSWYANEWGSSTRVVDLIVPMSNRWL

SEQ ID NO: 45418 - protein, 399 aa, Bordetella bronchiseptica RB50
MSKQIQDAYIVAATRLPVGKRNGAYATTRPDDMLAAVLRAVLAQVPALLPERIDDVITGCAMPEAEQGMNVSRIGLLLAGLPQSVAGVTVNRFCASGLQAVADAANRIRLGMADVMIGAGTESMSAMPQIMGNKVAMNPAVFAHEENLGMAFGMGLTGEKVAEQWKVSREDQDAFSLSSHQKACAAIAAGHFKAEITPYQVRTHLAGGRDGAVRVAERWIEQDEGPRPDSTAEALARLRPVFAARGSVTAGNSSQMSDGAAAVVLVSERVLREYGLQPLARFVDFAVAGVPPEIMGIGPRMAIPKVLARSGIAQQDLDWIELNEAFAAQSLAVMRDLELDPAKVNPLGGAIALGHPLGATGAIRTATIVHGLRRTGGKYGMVTMCIGTGMGAAGIFEAL

SEQ ID NO: 45419 - protein, 257 aa, Eremopyrum orientale
CELDNIMRLTGITGIVNGMDVSEWDPTKDKFLSVNYDITTALEGKALNKEALQAEVGLPVDRKVPLVAFIGRLEEQKGPDVMIAAIPEILKDEDVQIVLLGTGKKKFERLLKSIEEKFPSKVRAVVRFNAPLAHQMMAGADVLAVTSRFEPCGLIQLQGMRYGTPCACASTGGLVDTIVEGKTGFHMGRLSVDCNVVEPADVKKVVTTLKRAVKVVGTPAYQEMVKNCMIQDLSWKGPAKNWEDVLLELGVEGSEPG

SEQ ID NO: 45420 - protein, 257 aa, Secale strictum subsp. anatolicum
CELDNIMRLTGITGIVNGMDVSEWDPTKDKFLSVNYDVTTALEGKALNKEALQAEVGLPVDRKVPLVAFIGRLEEQKGPDVMIAAIPEIVKEEDVQIVLLGTGKKKFEKLLKSIEEKFPSKVRAVVRFNAPLAHQMMAGADVLAVTSRFEPCGLIQLQGMRYGTPCACASTGGLVDTIVEGKTGFHMGRLSVDCNVVEPADVKKVVTTLKRAVKVVGTPAYHEMVKNCMIQDLSWKGPAKNWEDVLLELGVEGSEPG

SEQ ID NO: 45421 - protein, 389 aa, Pseudomonas aeruginosa UCBPP-PA14
MTEPAVLPAIAALREEMVTLRRHIHAHPELGFEERRTAALVAECLEAWGYQVSRGVGRTGVVGTLCRGEGPALGLRADMDALPIQEATGLPYASQVDGVMHACGHDGHTAMLLAAARHLVESPHWRGTLQLIFQPAEEGLGGARAMLDDGLLERFPCDAIFAMHNVPGYPVGHLGFHPGPFMASADTVVIRVIGSGGHGAVPQRTVDPVVVCSAIVLALQSIVSRNVDPQDTAIVSVGAIHAGTVSNVIPASAEMILSVRALTAETRALLERRIGELARGQAASFGARAEVDYRHCHPVLVNHPGQTAFAREVARDWLGEECLIDGLRPFTASEDFAFILERCPGSYLVIGNGQGESGCQLHNPGYDFNDDCLAVGASYWVRLAERFLA

SEQ ID NO: 45422 - protein, 370 aa, Oryza sativa
MWAASPAFRRRLFLLRSLSPSPCAALPGNAACSSPSPSTSIRVNAMSASGPVYEADAEAVVRRITPPLDRARHKGQAGKIAVIGGCREYTGAPYFAAISALKVGADLSHVFCTRDAATVIKSYSPELIVHPILEESYSVSDGERESVSSRILTEVAKWMERFDCIVVGPGLGRDSFLLDCVSNIMRHARQANIPTVVDGDGLFLITNNLSLVEGNLLAILTPNVYEYKRLVQKVLNCEVNEENASEQLTALCQKIGGITIMRKGKADIISDGKTVTQVSTFGSPRRCGGQGDILSGSVAVFASWARHFLLTNEYPTEKSVNPMMLGCIAGSLLLRKAASHAFEKNKRSTVTTDIIELLGKSLEDICPAGH

SEQ ID NO: 45423 - protein, 212 aa, Saccharum officinarum
HEGQPLESEPNEPLRVNVLFKHVQKMLTGDSAVIAETGDSWFNCQKLKLPEGCGYEFQMQYGSIGWSVGALLGYAQGANNKRVIACIGDGSFQVTAQDVSTMLRCEQNSIIFLINNGGYTIEVEIHDGPYNVIKNWNYTGLVDAIHNGEGKCWTSKVKCEEELTAAIETALGEKKDCLCFIEVIAHKDDTSKELLEWGSRVSAANSRPPNPQ

SEQ ID NO: 45424 - protein, 322 aa, Streptococcus agalactiae NEM316
MVTLSKEQHLDMFLKMQRIRDVDMKFNKLVRRGFVQGMTHFSVGEEAASVGAIQDLTDSDIIFSNHRGHGQTIAKGIDIGGMFAELAGKATGTSKGRGGSMHLANLEKGNYGTNGIVGGGYALAVGAALTQQYEGTDNIVIAFSGDSATNEGSFHESVNLAAVWNLPVIFFIINNRYGISTDITYSTKIPHLYMRADAYGIPGHYVEDGNDLMAVYEKMHEVINYVRSGNGPAIVEVESYRWFGHSTADAGVYRTKEEVDSWKAKDPVKRYRAYLIENEIATEEELAAIEAQVIKEVEEGVKFAEESPFPDMSVAFEDVFVD

SEQ ID NO: 45425 - protein, 217 aa, Pyrococcus furiosus DSM 3638
MSEVLTVKLKEMLKPVNGFHMNSSLTCLRILQAVLELKKEEDTIIISKGHSAPAFYVLLWKMGLISDEELMSFAEIDGLPSHVTRGLPFIEVSSGSLGQGLSVANGIALAKKMDNKKGRIFVILGDGELDEGQIWEAAMTAAHHNLDNVVAIIDRNYHQLTGHTEDILAKEPLAEKWKAFGWEVREVENNVEKLKETIIELEKINDRPKVIIARWNW

SEQ ID NO: 45426 - protein, 359 aa, Kluyveromyces lactis NRRL Y-1140
MSAKVLLTGASGFIALHVLDQLLAAGYEVVGTVRSEEKAEPIKKELAKEHPNGKYQFEVVVDIAAPNAFDAVFQKHTDLKYVLHTASPFSFGLTKSNEENYLIPATHGTKSVLESIQKYGKNVEHVIVTSSYAAIMRLDHAGDPNFIHDETSWNPITWEEARENSVTAYIASKKYAEKLAWDFVKDNNSTFNLTTVNPPYVFGPQKFTFGLAKSSLNTSADIVNQALKTTPEYEGPFNQPAGLACDVRDVAKLHVLPLGKKEFNGQRLFPVSDTGYGIEEYEKGKFNFEKILRILNEKLPELKGKISPGGIKDNEAELAKLDYYRNKTTTDLTKLTFYKFEDTVYDATKQILDYEASQK

SEQ ID NO: 45427 - protein, 486 aa, Kineococcus radiotolerans SRS30216
MNGSHQRHTPEGGEHVPSGAAGGVVSTWARGEDGARGHDAAPTQPQAWDWNRAGYDRPGHPQDQSPGPQHGQRDPWATPGGPTPPGGGGDDHGRGGGGGRGPRRSPGWFGVAGAAIASALAASALTGALVGGFDDTAGTAATTSTSSGSTRVQGVSETTVNWQAVVSAVAPSVVAVTVQGASGSAEGSGIVYDTAGHVVTNNHVVAGLGSGATITVTLDDGRQYEATIRGTDPATDLAVIQLTDPPADLVAATFADSDDVVAGQAVMALGNPLGLSGSATTGIVSALDRPVLTSAEEQAPSQSPFGQQPTTGETAATNAIQTDAAINPGNSGGALLDSSGKVIGVNSSIASLSSASSSSQSGSIGLGFAIPSNEVRMIADQLVESGTAQHAWLGVSLAEQPASVTVGDVTREGAQVAAVTDGAPAAGAGVRAGDVVTAVDGRTVDGYESLTATIRGKAVGSTVELTVVRDGAEQTLRVTLAARAEG

SEQ ID NO: 45428 - protein, 242 aa, Oryza sativa
MVPRVERGGGGFHLPNSEREDSLFIRALISVVSGDTTVPTLLPEPTMATVVAGAATCARCGVDGCIGVDCEVVVLAAAAGSSCSDEEDEGECTTGAVASGGVTGGVGKRRPRRRSGGEGSRYRGVRRRPWGKWAAEIRDPRRAVCKWLGTFDTAEDAARAYDVAALEFRGQRAKLNFPASTAAQQPRPLLHHNLRENCGSNASSPVHAPEHARTAAAAKDQEIWDGLREIMMLDDGSFWSMP

SEQ ID NO: 45429 - protein, 359 aa, Kluyveromyces lactis NRRL Y-1140
MSAKVLLTGASGFIALHVLDQLLAAGYEVVGTVRSEEKAEPIKKELAKEHPNGKYQFEVVVDIAAPNAFDAVFQKHTDLKYVLHTASPFSFGLTKSNEENYLIPATHGTKSVLESIQKYGKNVEHVVVTSSFAAIVHRHRSGDPTFINDETTWNPVIWEDAREDAATSYVASKKYAEKLAWDFVKDNNSTFNLTTVNPPYVFGPQKFTFGLARASLNTSADFVNKALKTTPEYEGPFNQPAGVACDVRDVAKLHVLPLGKKEFNGQRLFPVSDTGYGIEEYEKGKFNFEKILRILNEKLPELKGKISPGGIKDNEAELSKLTYYRNKITTDSTKLTFYKLEDTIYDAAKQILDYEASQK

SEQ ID NO: 45430 - protein, 523 aa, Glycine max
MEAPWATTSSSIVFVIVILALTSWAWRMLNWLWIRPKRLERLLREQGLQGNPYRILVGDLKEIVKLQMEARSKPMNLSHDIVPRVFAHLHQSVLKHGKNSFIWFGPKPRVTLTDPELIKDVLNKISDFRKPEANPLAKLLATGLVNYDGEKWNKHRRLINPAFSLEKLKIMLPIFFKSCNDLIIKWEGMLSYDGSCEMDVWPFLQNLASDVIARTAFGSSFEEGKRIFQLQKELAELTMKVIMKVYIPGWRFVPTATNRRMKEIDRYIKASLTDMIKKREKAPKTGEATRDDLLGILLESNHKEIQEHRNNENVGMNLNDVIEECKLFYFAGQETTSVLLVWTMVLLSRYPDWQSRAREEVLQVFGKQAPNFDGLSHLKIVTMILYEVLRLYPPGIGLTRSVHRDMKLGNLTLPAGVQVSLPIIMVHHDRELWGDDAKEFNPERFSEGVSKATNGRVSFFPFGWGPRICIGQNFSLLEAKMALSMILQHFSFELSPAYTHAPFTVITLQPQYGAHVILRKVEM

SEQ ID NO: 45431 - protein, 610 aa, Arabidopsis thaliana
MDKKTIVWFRRDLRIEDNPALAAAAHEGSVFPVFIWCPEEEGQFYPGRASRWWMKQSLAHLSQSLKALGSDLTLIKTHNTVSAILDCIRVTGATKVVFNHLYDPVSLVRDHTVKEKLVERGISVQSYNGDLLYEPWEIYCEKGKPFTSFNSYWKKCLDMSIESVMLPPPWRLMPITAAAEAIWACSIEELGLENEAEKPSNALLTRAWSPGWSNADKLLNEFIEKQLIDYAKNSKKVVGNSTSLLSPYLHFGEISVRHVFQCARMKQIIWARDKNSEGEESADLFLRGIGLREYSRYICFNFPFTHEQSLLSHLRFFPWDADVEKFKAWRQGRTGYPLVDAGMRELWATGWMHNRIRVIVSSFAVKFLLLPWKWGMKYFWDTLLDADLECDILGWQYISGSIPDGHELDRLDNPALQGAKYDPEGEYIRQWLPELARLPTEWIHHPWDAPLTVLKASGVELGTNYAKPIVDIDTARELLGKAISRTREAQIMIGASPDEIVADSLEALEANTIKEPGLCPSVSSNDQQVPSAVRYNGSKRLKPEEEEERDMKKSRGFDERELFSTAESSSSSSVFFVSQSCSLASEGKNLEGIQDSSDQITTSLGKNGYK

SEQ ID NO: 45432 - protein, 462 aa, Listeria monocytogenes
MFKTNVEQNNVPVFGSFESGQDLPEKRMNKESVDPRIAYQLVKDQLIDEGSARQNLATFCQTYMEPEAEQIMAETMEKNAIDKSEYPQTAKLESSCVNMLADLWNVDESEHYMGTSTVGSSEACMLGGMAMKFRWRSAALKNGLDIHAKKPNLVISSGYQVCWEKFCVYWDIELREVPMSEEHLSINTDIIMDYVDEYTIGIVGILGITYTGKFDDIMTLNDLVEDYNNTHDNEVVIHVDGASGAMFTPFVEPGLEWDFRLPNVVSINTSGHKYGLVYPGVGWILWRDKEYLPEELVFDVSYLGGHMPTMAINFSRSASQIIGQYYNFLRFGYEGYRQIHMRTRDGALQLSQAVAETGLFEIYNDGANLPIVCYKLKDDANVAWTLYDLADRLQMKGWQVPAYPLPKEMGNTIIQRYVCRGDLGQNMVTAFKNDLSESIEELNNAHILYHDVNTSKTHGFTH

SEQ ID NO: 45433 - protein, 436 aa, Solibacter usitatus Ellin6076
MDNETLTITDNRTQQTYTVPIYRGTVRAMDLRQIKKDADDFGLMTYDPAFMNTASCQSAITYLDGEKGILRYRGYPIEQLAEQCSFLEVAYLLLNGELPTAEQLEYWQCKVMRHTMTHENVKKFMDGFHYDAHPMGILISTVAALSTFYPEAKNVGDAKCRHKQIVRLIGKMPTLAAYAYRHRLGLPYIAPDPELGYTKNYMNMLWKRTEPKYAANPVLARALEVLFILHADHEQNCSTSTMRAVGSSNADPFVTTSAAIAALSGPLHGGANEEVLRMLDEIGKPENIPGFIEQVKEGKRKLMGFGHRVYKNYDPRARIIKQVAEEVFEVTGRNPKIDIALELEKIALSDDYFIKRKLYPNVDFYSGIIYQAMGFTPDQFTVLFGIPRTVGWLAQWQEMQQDPDKKIARPRQVYTGEDERDFVPIADRGARAMTAV

SEQ ID NO: 45434 - protein, 489 aa, Haloferax volcanii
MGWKDAAEPVLSRMPAVARPEGHVPFRRKLGWTGGILVLYFFLTNVTLFGLDAATANDLFGQFRSILAGQQGSVLQLGIGPIVTASIVLQLLGGADLLGLDTDNNPRDQVLYQGLQKLLVGVMICLTGLPMVFAGNFLPADQAVATSLGIGTVGVKGLIFAQIAVGGVLILFMDEIVSKWGVGSGVGLFIIAGVSQQLVGGLFSWQGLGGTSGFFATWIGIITGAIELPASPTDLLSTVFLGQGQLLALITTLLIFGIVVYAESVRVEIPLSHARVKGARGRFPVKLIYASVLPMILVRALQANIQFLGRFLNSSWVGMPAWLGQYTSGQVTGGLLYYLAPIQSRSDWMWFLGLTSADPLDIAIRVLIDLIFMIVGGAVFAIFWVETTGMGPKSTAQQIQNSGMQIPGFRRNPQVIERVMERYIPQVTVIGGALVGLLAVMANMLGTIGAVSGTGLLLTVSITYKLYEEIAEEQLMEMHPMMRNMFGSE

SEQ ID NO: 45435 - protein, 137 aa, Clostridium perfringens
KDYRVFTILGDGELEEGQVWEAAMSAAHYRLDHLTAFVDFNGLQIDGDIKEVMSPCPIDKKFEAFGWNVIVINGHDYGEIINAIQKAKSTKGAPTCIVCNTVKGKGVSFMENEAAWHGTAPTKEQCEQAIKEIGGDN

SEQ ID NO: 45436 - protein, 464 aa, Listeria monocytogenes
MLYSKENKESYLEPVFGSSAEDRDIPKYTLGKEPLEPRIAYRLVKDELLDEGSARQNLATFCQTYMEDEATKLMSETLEKNAIDKSEYPRTPELENRCVNIIADLWHAPKDQKFMGTSTIGSSDACMLGGMAMKFAWRKRAEKLGLDIYAKKPNLVISSGYQVCWEKFCVYWDIDMRVVPMDKEHMQLNTDQVLDYVDEYTIGVVGILGITYTGRYDDIYALNEKLEEYNSKTDYKVYIHVDAASGGFFTPFVEPDIIWDFRLKNVISINTSGHKYGLVYPGIGWVLWKDESYLPEELIFKVSYLGGEMPTMQINFSRSASHIIGQYYNFLRYGFEGYRTIHQKTSDVAQYLAHAVEQTGYFDIFNDGSHLPIVCYKLKTTANVNWTLYDLADRLQMRGWQVPAYPLPKSLENIIIQRYVCRADLGFNMAEEFIQDFQASIQELNNAHILFHDTQQSGVHGFTH

SEQ ID NO: 45437 - protein, 294 aa, Fusobacterium nucleatum subsp. vincentii ATCC 49256
MEKIYGVIDVTSGYANGKTKNPKYQDLHSSGHAETVHVRYDASKVNLSTLLKYYFKIIDPTSVNKQGNDRGSQYRTGIYYVNQNDKSVIQDEIKEQQKKYSQKIVVEVLPLKEYYLAEEYHQDYLKKNPNGYCHIDLSKADDIIVDEKKYPKLSEKELKMKLNSKQYEVTQNGDTERAFQNDYWDFFDKGIYVDITTGEPLFSSTDKYASQCGWPSFVKPIVPEVVTYHKDTSFNMIRTEVRSRSGKAHLGHVFDDGPRDRGGKRYCINSAAIQFIPYAEMEAKGYGYLLPLVK

SEQ ID NO: 45438 - protein, 455 aa, Pseudomonas aeruginosa PAO1
MPDAPASAAERLERLPLSPYHRLVFVIIALAFFFDSMDLAMMTFLLGSIKAEFGLDSAQAGLLASSSFFGMVIGAALSGMLADRFGRKPVFQASIVLWGLASYLCSTAGDLDSLTFYRVLLGIGMGMEFPIAQSLLSEMIPASRRGKYIALMDGFWPLGFVAAGCLSYFLLPLTGWRSIFLVLALPAVFVLAIRFLIPESPRWLEQAGRREQADRVLRDIEARVMRSLGLTELPPPLRQPQRERSRPGFFSAFAELWSPAYRRRTLTVWGLWFFALLGFYGLTSWLSALLQQSGFAVTQSVYYTVLISLAGIPGFLCAAWLVESWGRKPSCVLMLLGGGAMAYAYGQTAVFGGSLALLIGFGLAMQFFLFGMWAVLYTYTPELYPTSARATGSGFASAVGRIGSLLGPLVTGLVLPLTGQGGVFTLGALCFGVAALVVWAFGIETRGRTLEELAG

SEQ ID NO: 45439 - protein, 372 aa, Thermoanaerobacter tengcongensis MB4
MGRKRETHREGKSMSNNEELAREAINELINKGKKTGMLTYNEIMDSLEDIDLNPDQIEKVYDTFEDMGIEIVGDEPRQEEISEEDLNLDDLSLPEGVSIDDPVRMYLKEIGKIPLLTPEEEIELAKRIEQGDEEAKKRLIEANLRLVVSIAKRYVGRGMLFLDLIQEGNLGLLKAVEKFDYRKGYKFSTYATWWIRQAITRAIADQARTIRIPVHMVETINKLIRVQRQLLQELGREPTPEELAKEMGMPEEKVREILKIAQEPVSLETPIGEEEDSHLGDFIPDEDAPAPAEAAAYTMLKEQLMDVLDTLTPREEKVLRLRFGLDDGRARTLEEVGKEFNVTRERIRQIEAKALRKLRHPSRSKKLKDFLD

SEQ ID NO: 45440 - protein, 257 aa, Secale cereale
CELDNIMRLTGITGIVNGMDVSEWDPTKDKFLAVNYDVTTALEGKALNKEALQAEVGLPVDRKVPLVAFIGRLEEQKGPDVMIAAIPEIVKEEDVQIVLLGTGKKKFEKLLKSIEEKFPSKVRAVVRFNAPLAHQMMAGADVLAVTSRFESCGLIQLQGMRYGTPCACASTGGLVDTIVEGKTGFHMGRLSVDCNVVEPADVKKVVTTLKRAVKVVGTPAYHEMVKNCMIQDLSWKGPAKNWEDVLLELGVEGSEPG

SEQ ID NO: 45441 - protein, 564 aa, Pseudomonas aeruginosa PAO1
MTETAKRPLYVPHAGPSLLEMPLLNKGSAFSTQERIDFNLQGLLPHNIETIEEQTERAYSQYNLCNTDLDRHIFLRSIQDNNETLFFRLLEEHLEEMMPIIYTPTVGQACQEFSKIYRTHRGLFISYPDRERIDDILRSATKNNVKIVVVTDSERILGLGDQGIGGMGIPIGKLSLYTACGGISPAYTLPVVLDVGTNNPDLLNDPMYMGWRHERVSGAQYEEFVDLFIQAIKRRWPNVLLQFEDFAQTNAMPLLERYKDELCCFNDDIQGTAAVAVGTLLAACKAKGEKLSEQTVTFVGAGSAGCGIAEQIIAAMQLEGLDEAQARRRIFMVDRWGLLTDDMSNLLDFQHRLAQKRADLGAWGGQQGDDLALLEVIRNARPTVLIGVSGQRGLFSEEVIRELHSHCKQPLVMPLSNPTSRVEATPQEILNWTDGQALVATGSPFQPVQVGDKRIPIAQCNNAYIFPGIGLGVIAARANRVTEGMLMAAANALANCSPIVTQGEGAVLPALGDIREVSKRIAVAVAKQAQAEGKALHTSDEVLNDAIEANFWFPRYRAYRRTSF

SEQ ID NO: 45442 - protein, 257 aa, Elymus californicus
CELDNIMRLTGITGIVNGMDVSEWEPIKDKFLAVNYDATTALEGKALNKEALQAEVGLPVDRKVPLVAFIGMLEEQKGPDVMIAAIPEIVEEEDVQIVLLGTGKKKFERLLKSVEERLPGKVRAVVRFNAPLAHQMMAGADVLAVTSRFEPWGLIQLQGMRYGTPCACASTGGLVDTIVEGKTGFHMGRLSVDCNVVEPADVKMVATTLKRAVKVVGTPAYQEMVKNCMIQDLSWKGPAKNWEDVLLELGVAGSEPG

SEQ ID NO: 45443 - protein, 143 aa, Brassica napus
VDPRVRLAIVILAFRDVLSYAFTEGEEVSAAVSDLCPLLALTLVLNGIQPVLSGVAVGCGWQTFVAKVNVGCYYIIGIPLGALFGFYFKFDAKGIWTGMICGTLIQTVILAWITFRTDWTKEVEESAKRLDKWSNKKPEVVPE

SEQ ID NO: 45444 - protein, 241 aa, Thermosynechococcus elongatus BP-1
MATPNGRVFPNLAALTTAAKQFVLEQARGAIAQRGRFTIALAGGNTPKPLYESLVGADTPWLQWHVFWSDERYVPLDHPDSNAGMAFRAWLHHVPIPRNQIHPMPTADADPQTAADRYGQLLRQTFGTPEGEFPSFDLILLGMGPDGHTASLFPQTTALTVSDRLITVGNKDGQPRLTFTVPLINHARQILFLVSGANKRTALRHIFSGTGDPSLYPARLITGNALWFLDEAAAEGVVENP

SEQ ID NO: 45445 - protein, 585 aa, Streptococcus agalactiae NEM316
MAFDVIMPKLGVDMQEGEILEWKKNEGDTVNEGDVLLEIMSDKTNMEIEAEDTGVLLKIVHQAGDVVPVTEVIAYIGEEGEEVGTSSPSADATITAEDGQSVSGPAAPSQETVAAATPKEELAADEYDIVVVGGGPAGYYAAIRGAQLGGKIAIVEKTEFGGTCLNVGCIPTKTYLKNAEILDGLKVAAGRGINLASTNYAIDMDKTVAFKNSVVKTLTGGVRGLLKANKVEIFNGLGQVNPDKSVVIGDKVIKGRNVVLATGSKVSRINIPGIESPLVLTSDDILDLREIPKSLAVMGGGVVGIELGLVWASYGVDVTVIEMADRIIPAMDKEVSLELQKILAKKGMKIKTSVGVSEIVEANNQLTLKLNNGEEVVADKALLSIGRVPQMNGLENLEPELEMERGRIKVNAYQETSIPGIYAPGDVNGTRMLAHAAYRMGEVAAENALGGNKRKAHLDFTPAAVYTHPEVAMVGMTEEQAREQYGDILVGKNSFTGNGRAIASNEAHGFVKVIAEPKYKEILGVHIIGPAAAELINEASTIMENELTVYDVAQSIHGHPTFSEVMYEAFLDVLGEAIHNPPKRK

SEQ ID NO: 45446 - protein, 396 aa, Arabidopsis thaliana
MVTFPKINVIQDQNRIKHVIQDPNRVKPVPWVTVQYDPIGSNRVTYIIEPGFIGTIVKSQHLALITGTIEIVIPNFSNSEIVLSNLSIGIKMQIFVKTLTGKTITLEVESSDTIDNVKAKIQDKEGIPPDQQRLIFAGKQLEDGRTLADYNIQKESTLHLVLRLRGGMQIFVKTLTGKTITLEVESSDTIDNVKAKIQDKEGIPPDQQRLIFAGKQLEDGRTLADYNIQKESTLHLVLRLRGGMQIFVKTLTGKTITLEVESSDTIDNVKAKIQDKEGIPPDQQRLIFAGKQLEDGRTLADYNIQKESTLHLVLRLRGGMQIFVKTLTGKTITLEVESSDTIDNVKAKIQDKEGIPPDQQRLIFAGKQLEDGRTLADYNIQKESTLHLVLRLRGGF

SEQ ID NO: 45447 - protein, 771 aa, Bordetella parapertussis 12822
MRKAGIVMTIIHNLGFPRIGAQRELKRAVEAYWAGRQTAEALHETGRALRAAHWQRQADAGVAFVPVGDFAWYDHILEWTTLLGAVPARFGHPEGKPVDLDTLFRMGRGRAPSGKPAAACEMTKWFDTNYHYIVPELTPGQTFRVAREDLFEQVKEAQALGHRVKPVIPGPLTWLWLGKGDAFAQGAGDIGKLQLLDALLPVYGEVLERLAGLGVEWVQIDEPALVLDLPQAWRDAYQAVYAKLAASPVKLLLATYFDGLKDNLATALALPVAGLHVDLVRAPDQLSDVASGLRPGQVLSAGVINGRNIWRTDLDAALAMLAPVREQLQERLWLAPSCSLLHVPVDLAGETELDAELLGWLSFAVQKLDELCLLGKALGGDADPAVQQGLAAQRAALQARRQSPRIHNPAVAQRMAGQAGVSRERAPFGQRIARQQSELRLPAFPTTTIGSFPQTAEIRALRRDWKSGALTDSAYENAIRKEIEEVIRFQEKVGLDVLVHGEPERNDMVEYFGELLAGFAFTKNGWVQSYGSRCVKPPIIFGDVARPAPMTVGWSAYAQSLTDKPVKGMLTGPVTILQWSFVRDDQPREATCRQLALALRDEVVDLEAAGIRVIQIDEPAIREGLPLRRADWRAYLDWAVDCFRLSTAGVGEATQIHTHMCYSEFNDIIESIAAMDADVITIETSRSNMELLKAFEDFHYPNDIGPGVYDIHSPNVPEVDWMVELMRKAAARLPKERLWVNPDCGLKTRAWPETEAALIGMVQAARTLRAA

SEQ ID NO: 45448 - protein, 334 aa, Zea mays
MEEEEVFVTVRRTEHVDVTSRAVVVAAGRAAVAGPRTVRVFCDDYDATDSSGDEAEEEEEKKAARRRVKRYVQEIRLQRAVPRKSDGAGAGAEPRFRGVRRRPWGKYAAEIRDPWRRVRVWLGTFDTAEEAAKVYDSAAIQLRGADATTNFEHAAVPVPVPDEVAGRLPQPPPAPASKNASSSATSSYDSGEESHAAAASPTSVLRTFPPSSAAADATCKKPAPAAETDESTGVGGSRSSVYAYPFFANDDCFGGDFPPLYTDFDLLADFPEPTLDFLADIPEEKLPLPEPFPAASPDECPSDAEAASPARWQQVDDFFQDITDLFQIDPLPVV

SEQ ID NO: 45449 - protein, 569 aa, Arabidopsis thaliana
MDGIGKFDNLLFNNSLKPRKEERGNEKNKKEEDKTDYHALSDSLHLSRNSESWVWFFSLRVSQSLNLSLQKRLLLVLSKSKSSFWPSMVAMFQEDNGTSSVASSPLQVFSTMSLNRPTLLASSSPFHCLKDLKPEERGLYLIHLLLTCANHVASGSLQNANAALEQLSHLASPDGDTMQRIAAYFTEALANRILKSWPGLYKALNATQTRTNNVSEEIHVRRLFFEMFPILKVSYLLTNRAILEAMEGEKMVHVIDLDASEPAQWLALLQAFNSRPEGPPHLRITGVHHQKEVLEQMAHRLIEEAEKLDIPFQFNPVVSRLDCLNVEQLRVKTGEALAVSSVLQLHTFLASDDDLMRKNCALRFQNNPSGVDLQRVLMMSHGSAAEARENDMSNNNGYSPSGDSASSLPLPSSGRTDSFLNAIWGLSPKVMVVTEQDSDHNGSTLMERLLESLYTYAALFDCLETKVPRTSQDRIKVEKMLFGEEIKNIISCEGFERRERHEKLEKWSQRIDLAGFGNVPLSYYAMLQARRLLQGCGFDGYRIKEESGCAVICWQDRPLYSVSAWRCRK

SEQ ID NO: 45450 - protein, 631 aa, Bradyrhizobium sp. BTAi1
MAVHEPVLGRTRESATISTDDRPTLHLVTCGSVDDGKSTLVGRLLYDSKMLLDDQLDALASDSKLAGTAGPALDFALLVDGLQAEREQGITIDVAYRFFATQRRRFVIADTPGHVQYTRNMATGASHADLAVVLIDARKGVISQTRRHTHILALLGVRHVVLAVNKMDLIGFDADRFMAISADFRSMAKRLGIADVQCIPVAARDGDNIFRASPRMPWYAGPSVMAHLESIDVTDGIDDRPFRFPVQWVNRPNADFRGYSGRVVSGTVRCGDAVVVHPSGRRSRISGIVTADGRLQQAVAGESVTLLLADEVDASRGDVLASGAPPIVADRIASHLIWLDDAAMQAGRRYLLKSGTSSTGAVISALKHRVCIDSMAQESAQTLEANEIGYADLTLDRPLVCDAYRDSRELGSFILIDPVNRRTVAAGLIDAPLRHATDVRWHTLDIDKSVRAGLKQQKPCVLWFTGLSGAGKSTIANLVDRRLCELGRHSALLDGDNLRHGINQDLGFAPEARVENIRRVSEIAALFVDAGLITLVSLISPFRADRDAARRRFADGEFIEVHVATPLATCEARDPKGLYKRARAGELSNFTGIDQPYEAPDRPEIAIDGATLSASDAADLIVSYLREQHYF

SEQ ID NO: 45451 - protein, 133 aa, Glycine max
MAHPTSSGQSHDLKKEDCKETRSLVVCFGEMLIDFVPTVGGVSLAEAPAFKKAPGGAPANVAVGISRLGGSSAFIGKVGADEFGYMLGNILKQNNVETSGMRFDSNARTALAFVTLKTGGEREFLLFRNPSAD

SEQ ID NO: 45452 - protein, 805 aa, Populus tremuloides
MTERALTRVHSIREHVDETLKAHRNEIVALLTRIESKGKGILQHHQIVAEFEAIPEDNRKTLAGGAFAEVLRSTQEAIVVPPWIALALRPRPGVWEYIRLNVQALVVEDLRVAEYLHFKEELVDGGCNGNFVLELDFDPFNASFPRPTLSKDIGNGVEFLNRHLSAKWFHDKESLHPLLAFLKVHCHKGKNMMLNDRIQNLDSLQYVLRKAEEYLSSLKPETPYSQFEHKFQEIGLERGWGNTAERVLQMIQLLLDLLEAPDPCTLENFLGRIPMVFNVVIMSPHGYFAQDNVLGYPDTGGQVVYILDQVRALENEMLLRIKQQGLDIIPRILIITRLLPDAVGTTCGQRLEKVYGSEHCDILRVPFRDEKGMVRKRISRFEVWPYLETYTEDVAAEIAKELQGKPDLIIGNYSDGNVVASLLAHKLGVTECTIAHALEKTKYPDSDIYWKKFDEKYHFSCQFTADLFAMNHTDFIITSTFQEIAGSKDTVGQYESHTAFTLPGLYRVVHGIDVFDPKFNIVSPGADESIYFPYTEQKLRLTSFHEEIEELLYSPVENDEHLCVLKDRNKPILFTMARLDRVKNLTGLVEWYGKNTKLREVLNLDVVGGDRRKESKDIEEQAEMKKMYSHIEKYNLNGQFRWISSQMNRVRNGELYRYICDTKGAFVQPALYEAFGLTVVEAMTCGLPTFATCNGGPAEIIVHGKSGFHIDPYHGVQAAELLVDFFEKCKADPTYWDKISQGGLQRIQEKYTWKIYSQRLLTLTGVYGFWKHVSNLDRLESRRYMEMFYALKYRKLAESVPLTKE

SEQ ID NO: 45453 - protein, 530 aa, Kluyveromyces lactis NRRL Y-1140
MTVTIDDKTLEEHYSKFLNRHVDRRVILQFWDDYLPKDVKPHPNPYVLAAGMPNEGLFPVESVHVNVVERPFQHLEYPFKSEKIHVGAAGEIGVNEAEYVKSRVDDGSMVDIWRYDPSHGDNIPIAQALQYSDTKGFPQLIDFSKKLVSYLNKPAYDNWDVMLANGSSDSLSKVFTTLTDEDVTVLMEEFTFTPTISNVTANGGIPIPLKVDITDDASQQGINVEYMDQLLENWSTGEYSHLSKPRLLYTIVTGQNPTGMTQCKEKRQKIYDLCEKHDIIIVEDDPYGYLKFLPFDKSDPLKNQYNDGTITFDKYCKEILAPSYLTIDTSGRVIRLETFSKVFAPGMRLSFIVANKFILDKLLKYADISVRSPCGLAQAMTINIIDKWAENFNGDKVRAWLSWVMKVAGEYTHRRNVLFQALEATPAYKEELFELIEPSAGMFISIKINFDKFGEISDKLKAMNFLNYKLLEEGCIVILGYRMAVDKKFSYDRSNFLRITFAMAPDEEHLQTAAERLGKGVERFFKEYHN

SEQ ID NO: 45454 - protein, 450 aa, Ipomoea batatas
LTVEAPILERRRANPKNVAAIILGGGAGTQLFPLTNRAATPAVPLGGCYRLIDIPMSNCINSGVNKIFVLTQFNSASLNRHISRTYFGNGVSFGDGFVEVLAATQTQGETGMKWFQGTADAVRQFTWVFEDAKNKDIDNIVILSGDQLYRMDYMDLVQNHIERNSDITLSCATVGDSRASDFGLVKIDRRGRVVQFCEKPKGTDLKAMQVDTTLLGLPPQDARLNPYIASMGVYVFKTDVLLRLLRWRYPTSNDFGSEILPAAVMEHNVQAYIFRDYWEDIGTIKSFYDANLALTEEFPKFEFYDPKTPFYTSPRFLPPTKIDNCKIKDAIISHGCFLRECSVEHSIIGERSRLDCGVELKDTLMMGADTYETESEIASLLADGKVPIGVGENTKIRNAIIDKNVRIGKDVVIMNKDGVQDSDRPDEGFYIRSGITIIMEKATIPDGTVI

SEQ ID NO: 45455 - protein, 374 aa, Exiguobacterium sp. 255-15
MNPIPITVLSGYLGAGKTTVLNHLLNNRQGRKLAIIVNDMSEVNIDAVLIEQGGFSRTEESFVTLSNGCICCTLRDDLLLEVRRLVDQGDIDGIVIESSGISEPIPVAQTFTYLDEDSRIDLTETTKINAMVTVIDGYRFLKDFESGESLIERQQAVDETDVREVVDLLVDQVEFADIILLNKIDRLTESEKHDVTSYLKALNPIAKLIETTHGQVDPAEILDVDLFDFEQAAASAGWIRELNAEEHVPETEEYGISSFVYKRDVPFHPERLMALIEAWPEEIVRAKGFVYLATRPEIALLFHQAGYASNMEYAGRFESVADRRTELVLIGIGFDQVTLEAEFDTCLVQEDETDWVSLSDPIPGRELYDLNFSK

SEQ ID NO: 45456 - protein, 248 aa, Pyrococcus furiosus DSM 3638
MFKDGSLIPYLTAGDPDKQSTLNFLLALDEYAGAIELGIPFSDPIADGKTIQESHYRALKNGFKLREAFWIVKEFRRHSSTPIVLMTYYNPIYRAGVRNFLAEAKASGVDGILVVDLPVFHAKEFTEIAREEGIKTVFLAAPNTPDERLKVIDDMTTGFVYLVSLYGTTGAREEIPKTAYDLLRRAKRICRNKVAVGFGVSKREHVVSLLKEGANGVVVGSALVKIIGEKGREATEFLKKKVEELLGI

SEQ ID NO: 45457 - protein, 375 aa, Pseudomonas putida KT2440
MAEAKVLSGAGLRGQVAGQTALSTVGQAGAGLTYRGYDVRDLAAGAEFEEVAYLLLYGELPTQAELADYKRKLKGLRDLPQALKEVLERIPRDAHPMDVMRTGCSVLGTLEPELTFEAQRDKTDRLLALFPAVMCYWYRFTHHGVRIDCTTDEDTLGGHFLHLLHGKKPSELHVKVMNVSLILYAEHEFNASTFTARVCASTLSDLYSCVTAAIGSLRGPLHGGANEAAMELIERFQSPQEATAELLRMLERKDKIMGFGHAIYKESDPRNEVIKGWSKQLADEVGDKVLYPVSEAIDKTMWEQKRLFPNADFYHASAYHFMGIPTKLFTPIFVCSRLTGWAAHVFEQRANNRIIRPSAEYVGVEQRQFVPIEQR

SEQ ID NO: 45458 - protein, 789 aa, Cucurbita maxima
MYLSRPTGVARFAASSSSSSSASLFPGVDVDTTTKTGALHFEETKERIKKLFDKVELSVSAYDTAWVAMVPSPNSLNQPLFPECINWVLDSQHADGSWGLLHNDQLLMKANLLSTLACVLTLKRWNIGHDHMSKALDFIKSNIASATDENQRSPVGFDIIFPGMIEYAKDLNLNLPLAPTNVDALVRKKELELRSCRSNSEGGKAYLAYVSEGIGKLQDWDMVMQYQRKNGSLFNSPSTTAAAFMHRNDDGCFDYLRSLLQKFDGSVPTIYPLDIYARLHMVDSLQKFGIARHFKEEIRSVLDETYRCWMQGEENIFLDASTCAMAFRMLRVEGYDVSSDQLTQFSEDIFPNCLGGYLKDFGASLELYKASQIITHPDESVLENINSWTSRFLKHGLSSDSVWSDRTDSVVKQEAVNALEFPYNATLERLISKRAMESYSGDIVRISKSPYACLNFGHQDFLELAVEDFNTLQRIHLKELEELQRWVVENKLDELKFFRLHLGYCYFAAAATLTDPELHDARIAWAQNGVLTTVVDDFYDGGGSEEELDNLIELVEKWDPDGEVGYCSKDVEIVFLALHSTVCEIGRRALVWQGRSVMRNVIDGWLALLKVMRKEAEWSTNKVVPSMGEYMEQAHVSFALGPIILPMLFFVGPKLSEEMIGSCEYQKLYKLMSTAGRLKNDIRSYDRECKEGKLNILSLWMIDGGGNVTKEEAIEAIKGDFERAIRELLGLVLQENTTIPRACKDLFWKLMSIVNLFYMEDDGYTSNRLMNTVKAMFEQPMDLDALLNK

SEQ ID NO: 45459 - protein, 360 aa, Sandersonia aurantiaca
RRLSLLLLLSSSALLLLLAAASEDPVIRQVVSDDQQQLLSAEAHFSSFLSRYGKSYADEAEHAYRFSVFKSNLRRARRHQRLDPTAVHGVTRFADLTPSEFRRTYLGLRRRPRTAGSTHDAPILPTNELPADFDWRDHGAVTPVKNQGSCGSCWSFSAAGALEGANYLSTGNLVSLSEQQLVDCDHECDSSEPDSCDQGCNGGLMTTAFEYILKSGGLEREADYPYTGTDRGTCKFNKAKISAVASNFSVVSIDEDQIAANLVKHGPLAVGINAVFMQTYVGGVSCPYICGKHLDHGVLLVGYGSAGFAPIRFKEKPYWIIKNSWGENWGENGYYKICRGRNVCGVDSMVSSVSAFHTSH

SEQ ID NO: 45460 - protein, 533 aa, Schizosaccharomyces pombe
MKRFFSKLFSKSPTSGRVPSPDSDYSEEEQRLLAEENGYFQDSNEYVEPNIPAVYGSMIPVAQQLQQHHVHTPGESFADNASGYPVIKHELSELLRLGSPTVIAYLLQSSEQFSTVFTLGHLGKEYLAASSLSTMTAAISAFSIFQGVISSLDTLATQAFGANKPYNVAIYLQRCLLILAVLHIPVALIWLNLEHILIFLHQDPMVAHLCGRYMRVFILAAPGYAVFEALKRYLQAQGIFTPITYVLCFAAPLNILLNYLLVWHPTIGFGFLGAPVAVATTFWFQSICLILYICFSSTPIPWPGFSRQALKNLSPMLHFSFHGMLMIVTEWAAYEMTSLGAGYLGTAPLASQSILLTSTSLLFQIPFAFAVASSTRVGHLIGSGRANLARLCSRVAYSLALCISIFDGSLIFCFRDVWGSLFTSDPEVLAVVKDIFPILSLFIVTDGLNAVGGGLLRGTGKQYIGGLISIGSSYLFALPVTVFVVVYFNTGLKGIWCGMILSSVTAITCQFTVLFNTDWHRVLQEARHRLTHV

SEQ ID NO: 45461 - protein, 258 aa, Triticum aestivum
SQLDKKQIPIAQPFSPNPLVVVSPHRLRQQSSPRQETQIFVKTLTGKTITLEVESSDTIDNVKAKIQDKEGIPPDQQRLIFAGKQLEDGRTLADYNIQKESTLYLVLRLRGGMQILVKTLTGKTITLEVESSDTMDNVKAKIQDKEGIPPDQQRLIFAGKQLEDGRTLADYNIQKESTLHLVLRLRGGMQIFVKTLTGKTITLEVESSDTIDNVKAKIQDKEGIPPDQQRLIFAGKQLEDGRTLADYNIQKESTLHLG

SEQ ID NO: 45462 - protein, 183 aa, Juglans regia
MAMKRMRSEDIVGDKDSLDDMAKCLMLLSHGGGLTTDTKPKTCPHPVDVFECKTCNRQFSSFQALGGHRASHKRPRLMGEEHKVDRTKLQSSGNKPKMHECSLCGQKFSMGQALGGHMRRHRANEGLSSIMNPLDHAKVPMLMKRSNSTRVVCSLDLNLTPLENDLKLLFGKMAPKVDLRLMI

SEQ ID NO: 45463 - protein, 489 aa, Bordetella bronchiseptica RB50
MTQLTQPLSRAELLRDACYIDGKWVGAGNGPSIPVDNPSTGKTIISVPKLGRKEAEQAIDAAEAALPAWSARTGKERAAILLKWAQLMMENQQDLAVIMTSEQGKPVAEAAGEIAYAASFLEWFAEEAKRIDGDILQSPKGGQRLMVLKQPIGVTAAITPWNFPAAMITRKVGPALAAGCTMVVKPAQQTPLTALALAVLAEQAGVPAGVFQVVTGSSREIGAALCESEVVRKLSFTGSTEVGRTLMEQCAPTIKKLSLELGGNAPFIVFDDADLDRAIDGILASKYRNAGQTCVCANRIYVQAGVYEEVAKRLVEKVNAMKVGDGFEQGVTQGPLIDTAAVAKVQEHIADATAHGAKVIAGGQPHALGGSFFQPTVVRDVTQSMRFAVEETFGPVAPLFKFESEDEVIGMANNTIFGLAAYFYTRDYARIWRVSEALEYGIVGINTGIISNEVGPFGGVKQSGLGREGSKYGIEDYLELKYLCVDLGA

SEQ ID NO: 45464 - protein, 487 aa, Yersinia pestis KIM
MSTHLVWFRNDLRVTDNLALHAACQDPQASVIAVFIATPVQWAAHGMAPRQAAFLRQNLQHLQAALAARGIPLHYHQCDDFQASNTWLVDFCQQQQVDSLFYSQQYELNERLRDDALAVQLSERAITCQSFHDSVLLAPGTVLTGNNEMYKVFTPFRRAFIQRLLMSDNHCVPAPKARHAPPVLLSPLPFDYPQQSVDSQLFPAGEDAALQRLRRFCREQVQDYRQYRDLPAVPGTSCLSPYLVLGVLSPRQCFNRLWAESPEMLENADSGAFTWLNELIWREFYRHLLVAYPRLCQHHPFIGWTDGLVWNRSESQLKAWQQGQTGYPIVDAAMRQMNETGWMHNRLRMISASFLVKDLLIDWRQGERYFMSQLVDGDLAANNGGWQWAASTGTDAAPYFRIFNPTTQGERFDKDGVFIRRWLPELAAVPDSDIHQPWRWAERQQQHLDYPVPLVDHKQARLATLAAFEAAKRDSTRIPNRKEPSCY

SEQ ID NO: 45465 - protein, 825 aa, Hordeum vulgare subsp. vulgare
MAFSPRSPWSRSKKPDIYSTVVVHDDEDDAHGGGAARAEDDDDDDPSALPPLLQRLPKDFGGASFDDDDDPYSSDLDDASLSATVVIKRGAPASTSSSSRSPFLDLRRSSPRAAEADPYSTFVVHGTARSGGASSPRESVSGTFIRHSGGPPSPRESVSGTFIRHTRGSSSPRESYSGTFIHHTSGASSPRDPASGAGAGFGSSFMTPSTGQAEEDRQPSLLMQQQQSRRQASMSSVPDSVTREDPSTKYELLHELGKGSYGAVYKARDLRTQELVAVKIISLTEGEEGYEDIRGEIEMLQQCSHPNVVRYFGSYQGEEYLWIVMEYCGGGSVADLIGITEEPLDEPQIAYICRETLKGLAYLHTIFKVHRDIKGGNILLTEQGEVKLGDFGVAAQLTRTMSKRNTFIGTPHWMAPEVIQESRYDGKVDVWALGVSAIEMAEGMPPRSTVHPMRVIFMISSEPAPMLEDKEKWSLLFHDFIAKCLTKDARLRPAAIEMLKHKFIEKCNTGASKMLAKIKEAKIIRETAVQNQLPDSDDAMDATVRINEDYGETVPTNSQSTHETKNDGSGGDFGTMIVHPEDGDEAVESSIFPRAEFIPGLGSINSFTHDPKRAELISKFWAENTADSDATKGRDLDGLPDTQEPKAMPRSIGTFKHHKGVEGTVLRHDNTASPGVASTMTKLSSSPSRKAFSVQDKLWSIYAAGNTVPIPFLKAIDISPLALVSDSVAGNGPAGSSTTDALEAVRELFSGDGQAKKGRKGQNEVPLPPGVHDRLTTSPTLMNLAQALAYHKTCYEDMPLQDSQATEEQQTIQNLCDTLRTILRL

SEQ ID NO: 45466 - protein, 425 aa, Mesorhizobium loti MAFF303099
MNYQRFFEEAIDQLHAERRYRVFADLERIAGKFPRAIWRSNGRAEEITVWCSNDYLGMGQHPDVIAAFQNAAGKMGSGAGGTRNISGTSNPLVELEHELADLHGKDAALVFTSGFVSNEASISTIARLLPNCLIISDELNHASMIEGVRRSGAEKKIFRHNDVAHLESLLQAAGRERAKLIVFESVYSMDGDIAPIREIVELAERYNAMTYIDEVHAVGMYGPRGGGITEREGLADRIDIIEGTLAKAFGTLGGYITGTSAVIDAVRSYAPGFIFTTALPPAIAAAATTSIRHLKRSQAERDAQQQQAARTKQILSAAGLPVMESPTHIVPVLVGDPELCKMASDRLLGVHGIYIQPINYPTVPRGTERLRITPTPFHSDALIAGLQDALVETWDALGIPYGAAGRPAVAKSDRIVPLIMAKAGG

SEQ ID NO: 45467 - protein, 1820 aa, Anabaena variabilis ATCC 29413
MNRQHKHHRCNPVNFLSKQNLLPFLLGIVILLVVVMLWLRLQAEEEIKIQQLIKQQAIATQTELVTQLKTRILALKRIGKHWEMHGSIPQAQWELEARAYLEDYGGYQAIKLVDPSWQVLRSVSVAKNKAAENLEIMPKFPQCKGATAQPSHETTLTHTVNLNQGDRVFFACVPLWMGDKFGGAVLGIFQVKQFFESVLHIAPGYKIRVFDGQELIYGQDRQSSTLPSWQQSVNINFDGMTWQLQIYPTPELLKDLYSPLPTVVLVAGIFNAGAVTLLIYFAQATKLSNHQIGRINQELADRIEKQTQVEIALRASENRLRELLETVRVIPWEVDLKTQHFTYVGPQAETLLAYPIAQWYEENFWDNHLHPHDRDWAVRFCQEAANKGQNHELEYRMLAADGRVVWLRDVVNVVEVDGTPVMLRGFMFDITDLKRVEETLRLRERALAASSNGIVISDAKLPNYPVIYVNSAFEQITGYKATEIVGRNCRFLQGNDTTQPAIEELRSALKAGKNCKVILRNYRKDGSLFWNQLSVSPIYNDNGQLSHFIGIQTDISDRQQAEASLRRQALTFENIYDGVIITNLQGQILDWNPAAERMFGYSKDHICGQSISILHKVEEDAALNSAIIAEITKQGRWSGEINFVRQDGSQGICETTIVALQDDQGQTVATISVNRDITERKHAELLLRRSEERFQAFMNHSPTPAWITDIDGTIVYLSETYRRTFQLPTQELIGTNIFDIYPPELIQTFRETIQIVARTHQVMETVESVPCSDGTVRDFLVYKFPISSKPDECLIGGIAIDITERKQAEAALRKSEERWQLVIEGNQDAIWDWNIITNETFRSARWAELIKEQNYQPIADHADCISRIHPDDYERVMAVRQDCLSRKIPNYVVEYRLRCNDDSYKWVLVHATGQWDERGNPVRMVGSIKDITERIEAQEALQRQLHRTLLLEKITQKIRQSLDSKEIFETAATQIGQALAVDRCLIHSYISHHDPHIPLVAEYNNVLDYCSMQKWEFTTTGNRHILQMMSQDKAIASANVYTDPLLQTAVPSCCEIGVKSMLAVRTSYQGEPNGAICLHQCKYFRQWTPEEIELLEAVAAQLGIALAQAQLLEQETRQREELTIKNFALEQAKRAAEAANRAKSEFLAMMSHEIRTPMNAVIGMTGLLLDTELTSQQRDFVETVLTSGDALLSIINDILDFSKIESGKLELEEQPFEVRTCVEQVIDLLAAKAAQKDIELAYLIHPQVPMQIAGDLTRLRQILTNLLNNAIKFTPEGEVVVSVRSQPSPNQKTKNCCEIIFTIKDTGIGIAPETMDLLFQPFVQADASMTRKYGGTGLGLVISKRLGEMMGGYLWVESRGCVGGNPPPGWQRKNSISSASVATGSTFYFSMTVPVVAHADLETSITSPVQLSGKRLLIVDDNPTNRQILRLQAEPWQMETYTAPSGAEALALIDQGMAFDIAILDVQMPEMDGLTLARQIRQRPSYQHLPLVILTSWGQPDTDLSDIEFAACLNKPIKQSQLFDVLAASLGNQPIRASVVPDRSAQVNSCLAQQIPLRILLAEDIVVNQKVALLILKKLGYRADVVANGLEVLEALQRQSYDVVLMDVNMPEMDGLKASQIICQTWSPRSRPYIIAMTANAMRGDREACLAAGMDHYISKPLQLEELAKALGKCHPSTSSTEKALEKTSSQNQTFTDISDLKFATIDTKILQALRDMLGGDKVAFAELINCYLTESPKLIENLNVAINTEDTQGIWKTAHKFKSSSGSVGAVFLAQLCKLLEAKGRNNNLEGCIELGSQLCQEYELVKTALYREVNKETP

SEQ ID NO: 45468 - protein, 398 aa, Pseudomonas syringae pv. phaseolicola 1448A
MSLFSAVEMAPRDPILGINEAFNADTCTTKVNLGVGVYCDEEGRIPLLRAVAEAEKIRVAQHAPRGYLPIDGIAAYDQAVQKLLLGADSPLIASGRLLTTQSVGGTGALKIGADFLKQLLPNAVVAISDPSWENHRALFETAGFPVQNYRYYDAATHDVNRAGMLEDLQNLPNNSIVVLHACCHNPTGVDLSLDGWKKVLEVVKAKGHVPFLDMAYQGFGQGIQEDALAVRLFAESGLTFFASSSFSKSLSLYGERVGALSIITESKEETARVLSQVKRVIRTNYSNPPTHGAIISAAVLNDPALRALWEEELGEMRVRIQGMRKAMVERLADNPTGQDFSFVGRQCGMFSYSGLTAAQAQRLRSEFGIYALDTGRICVAALNQKNIDAVCDAIKKVL

SEQ ID NO: 45469 - protein, 319 aa, Bacillus anthracis str. A2012
MYEMIPVTILTGFLGSGKTTLLNRILTENHGQKLAVIVNEIGKIGIDNQLIMNVEEEIMEMTNGCLCCTVREDLLVALKQLLDVKAEGKMDFDGLVIETTGLANPGPIIQTFFLDPVIQSAYQINGVVTVVDSYHIHKHFEKGLEAKEQIAFADVILVNKLDLIEESEKENLLHELQGINPTAKLIQSTNCDVDIPSLLKIQTFKTKDTLQIYPHKEHNHLEGVKSFVLREERPLDLQKLNEWMSAVVQELGEYLYRYKGILSIDGVDKRIVFQGVHTLFAASYDREWQEGEERVSEVVFIGKDINKEWFQEHFEECVK

SEQ ID NO: 45470 - protein, 108 aa, Capsicum annuum
QNPTEAELQDMINEVDADGNGTIDFPEFLNLMARKMKDTDSEEELKEAFRVFDKDQNGFISAAELRHVMTNLGEKLTDEEVDEMIREADVDGDGQINYDEFVKVMMAK

SEQ ID NO: 45471 - protein, 712 aa, Neurospora crassa
MATIALPPPFDNYRSTSTIGSMTTTITIEQPPSHPTPVPNKHIPVCPPGTASRDDADTPPPSPWPVTNGADEHSPPRSFLYPPHRFHHVDSGHLSLYEIDAADVAAALDHLSRQPLPDPAHVFPWYHGLHPRNQVQQHFFTSPRTWRAQKKTPSCLRGITLVKADGDLNFSRLKGAIAPYEFLHSSSAEFIDVDPEHGFSVRNFQIQAAKAAMTSDIIVYGDNEAAVRKLGWDIASAQHKWRYKHELQCHWVPEYNTFICLSPFDEFEQNHREIVAVDSTGNLTGNVLDFVNQERLEMYLMTQASEIAPNVWMGPTPDPIIEEDNGYHIQLECSDMGRANTCAAFLQALAEDGLGDVPEPVHFDFPSSGSFLVPDYSHEDADALLDTCKWLWHLSHGTRPEKSSDTGRDKSWPPLSPRKILIHCADGYTESTVLAIAYYSYSTGLPIPEAWLKLHTIMKRNFFAYPSDVNFLATIAPRLLQESPMGTDRSLAQVTELVRNEPKWWTGFDGSLPSRILDYMYLGNLTHANNPDLLRAMGIGQILSVGEMAMWRDGELQEWGEENTCIVRRVQDNGIDPLTDEFERCLEFIDRGRRLGTATLVHCRVGVSRSATICIAEVMRSMGMSFPRAYCFVRARRLNVIIQPHLRFAYELLKWEEFLRSNQETKDHGNYTLTADGKDDNESSSEGQGIMRELEWGEIAREVALMNKPYSR

SEQ ID NO: 45472 - protein, 208 aa, Arabidopsis thaliana
MSTVGNSTNIFWQESPIGKTERQKLLNQKGCVVWITGLSGSGKSTLACSLSRELNNRGKLSYILDGDNLRHGLNKDLGFKAEDRVENIRRVGEVAKLFADAGLICIASLISPYRKDRDACREMIQNSSFIEVFMNMSLQLCEARDPKGLYKLARAGKIKGFTGIDDPYESPLNCEIELKEKEGECPSPVAMAEEVISYLEDKGFLQNE

SEQ ID NO: 45473 - protein, 758 aa, Thermosynechococcus elongatus BP-1
MTIQTATLGYPRIGKNRELKKALEAFWSNQLDAEALLKTAQDIELQNWQKQLEVGIDRIGIGDLSLYDSVLDWSIRFGIIPERYRSFTGLEQYFAMARGKDGIPALEMTKWFDTNYHYLVPEISEAFQPTDFSDFLETVRRAQTLLGDRAVPIVLGPLTLLRLSRLETNLEQAVSYLRDRYLILLRELKNLGVVEVQIHEPALVLEEADSFKSFYQSTFDTLRQANLPLHLVTYFDDLGAAWPWVMELPVTCISLDFTRGHNLALLKEYGFPADKQLGVGIIDGRNIWKIRPESVLSTLETIQSITANIRLHPSSSLQFVPYDAKREVKLPEPLRDVLSFAEQKLDEVVLLARVLNSNDGTNREILMKNPELTAIQAQWKAFEQFSPVNPTVQARLRNLSVRDLERPLPYEQRRTLQPTLPPLPTTTIGSFPQTAEVRQLRVKLKRHEITQAEYEAAIDEEIAKCVRLQEEVGLDVLVHGEFERSDMVEFFGQQLSGFAFTEHGWVQSYGSRCVRPPIIYGDIARPQPMTVREFKVAQSLTDKIVKAMLTGPVTMINWSFTRTDIPRSEQAMQIALALRDEVADLEAAGAKMIQIDEPALREGLPLKAERWNEYLSWAVDAFRLAAGVAKPETQIHTHMCYSEFGDIIEHIERLDADVLSIENSRSNNETLFQITDAGYRHQVGVGVYDVHSPAVPSVEQLVQQLRTSVANLAPEQIWVNPDCGLKTRHWEEVIPSLKNMVEATKTIRQEVMQSKNNA

SEQ ID NO: 45474 - protein, 493 aa, Kluyveromyces lactis NRRL Y-1140
MLRFNSTRSFSSSALLKTVTKKHDLVVIGGGPGGYVAAIKAAQLGYDVACVEKRGRLGGTCLNVGCIPSKALLNNSHLYHQMKTDAKQRGIDINGEININVAQFQKAKDTVVKQLTGGIEMLFKKNGVTYYKGLGAFETDKSVKVLPVEGLEGSVTEDHLLESDRIIVATGSEVTPFPGITIDEERIVSSTGALSLKEIPKKLAIIGGGIIGLEMGSVYSRLGSKVTVIEFQPQIGATMDGEVAQTTQKILKKQGLDFKLSTKVLSASRNGDVVDIEVEGAKNGKKESLQADVLLVAVGRRPYVAGLNAEKIGLEVDKRGRLVIDEQLSTKFPHVKVIGDVTFGPMLAHKAEEEGIAAAEYFKVGHGHVNYGNIPAVMYSHPEVAWVGKTEEQLKEAGIQYKIGKFPFIANSRAKTNMDTEGFVKILIDAESERLLGAHIIGPNAGEMIAEAGLALEYGASAEDIARVCHAHPTLSEAFKEANLAAYAKPINF

SEQ ID NO: 45475 - protein, 481 aa, Papaver somniferum
SLVAVVITTFLYLIFRDSSPKGLPPGPKPWPIVGNLLQLGEKPHSQFAQLAETYGDLFSLKLGSETVVVASTPLAASEILKTHDRVLSGRYVFQSFRVKEHVENSIVWSECNETWKKLRKVCRTDLFTQKMIESQAEVRESKAMEMVEYLKKNVGNEVKIAEVVFGTLVNIFGNLIFSQNIFKLGDESSGSVEMKEHLWRMLELGNSTNPADYFPFLGKFDLFGQSKDVADCLQGIYSVWGAMLKESKIAKQHNNSKKNDFVEILLDSGLDDQQINALLMEIFGAGTETSASTIEWALSELTKNPQVTANMRLELLSVVGKRPVKESDIPNMPYLQAFVKETLRLHPATPLLLPRRALETCKVLNYTIPKECQIMVNAWGIGRDPKRWTDPLKFSPERFLNSSIDFKGNDFELIPFGAGRRICPGVPLATQFISLIVSSLVQNFDWGLPKGMDPSQLIMEEKFGLTLQKEPPLYIVPKTRD

SEQ ID NO: 45476 - protein, 217 aa, Thermus thermophilus HB27
MLKSVLKAVLFDLDGTLADTDPLHLLAWREVLAPYGLKVDPAFYRERISGRLNPEIVRDLLGLEGKEAERLIAAKEARFRALAQGLRPTPGLPEFLERIREKGLLWGVVTNAPKENARHVLEALGLRPPLLVLAEEVGRGKPDPLPYQLALRRLGVAPEEALAFEDSPSGVRSAVGAGIPTYGLLTGHEAEALIREGASGVIRNFTEFAWPEYTSEK

SEQ ID NO: 45477 - protein, 144 aa, uncultured archaeon GZfos12E2
MVNLAKQKRIAAKVMKVGLGRVWIDPEATGDVAEAITREDIRGLVEEGLIKKKQKKGVSKGRAREVAIKKVLGRRKGHGSRKGAKGARRGKKKVWITKIRALRRQLKELRDEGNIDKTTYRRLYLKAKGGEFKSIAHLNEFIKA

SEQ ID NO: 45478 - protein, 339 aa, Neisseria meningitidis serogroup C
MKKILVTGGTGFIGSHTVVSLLKSGHQVVILDNLCNSSINILPRLKTITGQEIPFYQGDIRDREILRRIFAENRIDSVIHFAGLKAVGESVAEPMKYYDNNVSGSLVLAEEMARAGVFKIVFSSSATVYGDPGKVPYTEDMQPGDTTSPYGTSKSMVERILSDIQKADPRWSVILLRYFNPIGAHESGLIGEQPNGIPNNLLPYICQVAAGKLPQLAVFGGDYPTPDGTGMRDYIHVMDLAEGHVAAMQAKSNVAGTHLLNLGSGRASSVLEIIRAFEAASGLTIPYEVKPRRAGDLACFYADPSYAKAQIGWQTQRDLTQMMEDSWRWVSNNPNGYDD

SEQ ID NO: 45479 - protein, 596 aa, Brucella melitensis biovar Abortus
IDFRGPAFRSVLGYTFSHWRSQPLRLSAMIIGMLLATPPDVLTPLYSGRLVDSLSLGSNAWDAAIHALIALLSLGALALVSRAGHVFMSLTDFTLKIMSDMAASAFRKLQRFSTDWHANAFAGSTVRKVTRGMWALDLLNDTLIIALLPSLLMLVGSVVLLAWFWPLMGLMVAIGSVLYIACTIVISLGFVAPAATLANSWDTRMGGALADSMSCNAVVKAFGAEAREDERLAMVVNKWRTHTAHMAAGLHAGSRFIQGTNLLVMRGVIIAFALYLWTRGQATAGDITFRSHRLFFMLQGYLRDVGMHIRNLQRSVNHMEELVDIEAQLRIADKPGAPAIRIGNGEITFNHVTFHYGRHEAALYRDFSVRIEAGERVGLAGSGSGKTTFVKLIQRLYDVNGGAILIDGQNIADVTQASLRSQIAIVQQEPILFHRTLAENIAYARPGASQAEIEEAARLASAHDFISRLPKGYRTLVGERGVKLTGGERQRVAIARAFLADAPILILDEATSSLDSESEVLIQHAMERLMVGRTTLVIAHRLSTVRALDRLLVFDKGRIVEEGNHDALIRKSDGIYRRLFERQALELTKGFGRHIC

SEQ ID NO: 45480 - protein, 432 aa, Nicotiana sylvestris
MAQILAPSGEWQMRMTKSSTDANPLTSKMWSSVVLKIIKELAVKSSAKFRFFALESDSGTVNQSEQLLNLDVTPYTDKIIAEYIWIGGSGIDMRSKSRTISKPVKHASELPKWNYDGSSTGQAPGEDSEVILYPQAIFKDPFRGGNNILVICDAYTPAGEPIPSNKRHKAAQIFSDSKVVSEVPWFEIEQEYTLLQQNVKWPLGWPVGGYPGTQGPYYLCAGADKSFGLDISDAHYKACLYAGINISGTNGEVMPGQWEFQVGPSVGIEAGDHIWCARYILERITGQAGVVLSLDPKPIEGDWNGAGCHTNYSTLSMREDGGFEVIKKANLNLSLRHKEHINAYGEGILEKLTGNHETASIDKFSWGVAFRGASIRVGADTEKQGKGYLEDRRPASNMDPYVVTGLLAETTILWEPTNEAEALAAQKLALKV

SEQ ID NO: 45481 - protein, 428 aa, SYNECHOCOCCUS SP. WH 8102
MNTSRSQAIFGAAQGLMPGGVSSPVRAFKSVGGQPIVFDRVKGPYAWDVDGNKYIDYIGSWGPAICGHAHPEVISALQEAIEKGTSFGAPCALENTLAEMVIDAVPSVEMVRFVNSGTEACMAVLRLMRAFTGRDKVIKFEGCYHGHADMFLVKAGSGVATLGLPDSPGVPRSTTANTLTAPYNDLEAVKALFAENPDAIAGVILEPIVGNAGFIQPEPGFLEGLRELTKEHGALLVFDEVMTGFRISYGGAQAHFGVTPDLTTMGKVIGGGLPVGAYGGRADIMGMVAPAGPMYQAGTLSGNPLAMTAGIKTLELLKQPGSYEKLTATTEKLIAGIKEAATAAGLPFTGGSVSAMFGFFLCEGPVRNFEDAKATDSERFGKLHRAMLERGVYLAPSAFEAGFTSLAHSEADIEATVNAFRESFAEVA

SEQ ID NO: 45482 - protein, 717 aa, Lycopersicon esculentum
METVDSTRAFVKNVKRLIVKVGTAVVTRADGRLALGRLGALCEQLQELNSQGYEVILVTSGAVGVGRQRLRYRKLLNSSFLDLQKPQTELDGKACAAVGQNGLMALYDSLFSQLDVTSAQLLVTDNDFRDPDFRRQLNDTVNSLLSLKVIPIFNENDAISTRRAPYEDSSGIFWDNDSLAALLALELKADLLVLLSDVDGLYSGPPRDPDSKLIYTYIKEIHERVITFGDKSRVGRGGMTAKVKAAMYAAYAGIPVVITSGFATDNIIKVLHGERIGTLFHCDANKWASIGETDAREMAVAARACSRRLQALSSQERSKILQDIADALEANEKAILAENEADVVAAQQAGYEKSLISRLALNPGKISSLANSVRVLSNMDEPLGHTLKRTEIADGFILEKSSSPLGVVLIIFESRPDALVQIASLAVRSGNGLMLKGGKEAKRSNAILHKVITSAIPVSVGERLIGLVTSREEIPELLKLDDVIDLVIPRGSNKLVSQIKASTKIPVLGHADGICHVYVDKSADMDMAKRITVDAKIDYPAACNAMETLLVHKDLAQNGGLNDLIVELQTKGVSLYGGPKASSLLMIPEARTFRHEYSSLACTVEVVEDVYAAIDHIHQHGSAHTDSIITEDQEVAEVFLRQVDSAAVFHNASTRFSDGFRFGLGAEVGISTGRIHARGPVGVEGLLTTKWLARGSGQIVDGDKSIVYSHKDLTQQG

SEQ ID NO: 45483 - protein, 244 aa, Lactococcus lactis subsp. cremoris
ALDGVDNMIGVHVMTTIKTGVIAYHNKETQTGRSNFTITIKGNGGHASMPQLSNDAIVAASYFVTELQTVISRRIDPFDMGTVTIGSFDGAGSFNAIQDKVLLKGDVRMMKETTRKVIRDQVKQIAKGVGVTFGVEVIVDYDDNYPVLFNSENLTHFVVDSLKDQNISEVNNIVDLGPQNPSEDFSYYGQVVPSTFFYIGAQPEDGGNYPHHSPLFKMNEKSILIAAKAVATVTINYLFFNKKM

SEQ ID NO: 45484 - protein, 110 aa, Sandersonia aurantiaca
MATLGAPRDVPAGGENSADVEELARFAVAEHNKKENALLEFGRVVKAKEQVVAGTLHHLTVEAIDAGNKKLYEAKVWVKPWLNFKELQEFRHAGDSPSVTPADLGAKRGD

SEQ ID NO: 45485 - protein, 239 aa, Bacillus subtilis
MKRVLLILVTGLFMSLCGITSSVSAQTGGSFFEPFNSYNSGLWQKADGYSNGDMFNSTWRADNVSMTSSGEMRLALTSPSYNKFDCGENRSVQTYGYGLYEVRMKPAKNTGIVSSFFTYTGPTEGTPWDEIDIEFLGKDTTKVQFNYYTNGAENHEKLADLGFDAANAYHTYAFDWQPNSIKWYVDWQLKHTATTQIPTAPGKIMMNLWNGTGVSDWLGSYNGVNPLYAHYDWVRYTKK

SEQ ID NO: 45486 - protein, 403 aa, Yersinia pseudotuberculosis IP 32953
MSLPCNKHPFYQQLEQQLDTTRTEGLYKNERVITSAQQANIAVADGSRVINFCANNYLGLANHPKLIAAAKAGMDSHGFGMASVRFICGTQDIHKELEHKLASFLGMEDAILYSSCFDANGGLFETLLGPEDAIISDALNHASIIDGVRLCKAKRYRYANNDMTELEAQLKQAKAEGARHIMIATDGVFSMDGVIANLKRVCDLADEYQALVMVDDSHAVGVIGANGRGTHEYCEVMDRVDIITGTLGKALGGASGGYTAGRKELVEWLRQRSRPYLFSNSLAPAIVAASIEVLSLLEEGGALRDRLWANARLFREKMSAAGFTLAGADHAIIPVMLGEAKLAQDFANALLKEGIYVTGFFFPVVPKGQARIRTQMSAGHTTEQVERAIEAFVRIGKQLNVIA

SEQ ID NO: 45487 - protein, 341 aa, Yersinia pseudotuberculosis IP 32953
MKALSKLKAEEGIWMTDVPQPELGHNDIMIKIRKTAICGTDVHIYNWDEWSQKTIPVPMVVGHEYVGEVVAIGQEVKGFNIGDRVSGEGHITCGHCRNCRGGRTHLCRNTVGVGVNRPGSFAEYLVIPAFNAFKIPDNISDELAAIFDPFGNAVHTALSFDLVGEDVLVSGAGPIGIMAAAVCKHVGARHVVITDVNEYRLDLARKMGVTRAVNVSKENLNDVMTELGMTEGFDVGLEMSGAPPAFRSLLNSMNHGGRIAMLGIPPSDMSIDWNQVIFKGLFIKGIYGREMFETWYKMAALIQSGLDLTPIITHRFPIDEFQQGFDAMRSGKSGKVVLSWD

SEQ ID NO: 45488 - protein, 202 aa, Zea mays
MNILNRFGLGSGGQRSTDPSPIAQGPDDDSPAPGNHFAQFAAGCFWGVELAFQRLPGVTQTEVGYTQGITHNPSYEDVCSETTGHAEVVRVQYDPKDCTFESLLDLFWSRHDPTTLNRQGNDVGTRYRSGIYFYTPEQEKLARESLERHQQKMERKIMTEILPAKKFYRAEEQQQQYLSKSGRYGMGQSCAKGCTDPIRCYG

SEQ ID NO: 45489 - protein, 138 aa, Streptococcus agalactiae NEM316
MEQTFFMIKPDGVKRGFIGEVISRIERRGFSIDRLEVRHADADILKRHYAELTDRPFFPTLVDYMTSGPVIIEVISGEEVISTWRTMMGSTNPKDALPGTIRGDFAQAPSPNQATCNIVHGSDSPESATREIAIWFNN

SEQ ID NO: 45490 - protein, 137 aa, Glycine max
  misc_feature (28)..(28): Xaa can be any naturally occurring amino acid
  misc_feature (101)..(101): Xaa can be any naturally occurring amino acid
  misc_feature (110)..(110): Xaa can be any naturally occurring amino acid
  misc_feature (121)..(121): Xaa can be any naturally occurring amino acid
  unsure (1)..(137): unsure at all Xaa locations
GSRIKPSISMFLTSCNIKSTGHKMGISXKGSDQILERYLYLHNVPNNEDFDPDTRLKNHALHKYDSVPAIQLTFASGTHTRVLYLDKTTVTTSMNIDPDCXKRSRSDTGXILKCTPRRASXDEQHSYLPQPILYSQK

SEQ ID NO: 45491 - protein, 591 aa, Oryza sativa
MCGILAVLGVADVSLAKRSRIIELSRRLRHRGPDWSGIHCYQDCYLAHQRLAIVDPTSGDQPLYNEDKSVVVTVNGEIYNHEELKANLKSHKFQTASDCEVIAHLYEEYGEEFVDMLDGMFAFVLLDTRDKSFIAARDAIGICPLYMGWGLDGSVWFSSEMKALSDDCERFISFPPGHLYSSKTGGLRRWYNPPWFSESIPSTPYNPLLLRQSFEKAIIKRLMTDVPFGVLLSGGLDSSLVASVVSRHLAEAKVAAQWGNKLHTFCIGLKGSPDLRAAKEVADYLGTVHHELHFTVQEGIDALEEVIYHVETYDVTTIRASTPMFLMSRKIKSLGVKMVLSGEGSDEIFGGYLYFHKAPNKKEFHEETCRKIKALHLYDCLRANKSTSAWGVEARVPFLDKNFINVAMDIDPEWKMIKRDLGRIEKWVLRNAFDDEEKPYLPKHILYRQKEQFSDGVGYSWIDGLKDHANEHVSDSMMMNASFVYPENTPVTKEAYYYRTIFEKFFPKNAARLTVPGGPSVACSTAKAVEWDAAWSKNLDPSGRAALGVHDAAYEDTLQKSPASANPVLDNGFGPALGESMVKTVASATAV

SEQ ID NO: 45492 - protein, 231 aa, Mesorhizobium loti MAFF303099
MSRLHTENHLISRIGWLRAAVLGANDGIVSTASLIVGVAAANAAASNVLVAGIAGLVAGAMSMAAGEYVSVSSQSDTERADLDRERRELATQPSFERQELADIYVKRGVEPKLALQVADQLMAKDALGAHARDELGISEMTTARPIQAALASAAAFSVGAAMPLAMVLVSPAAWLAATVSVASLLFLAVLGAIGAKAGGANVLRATVRVTFWGALAMALTASIGAVVGTAI

SEQ ID NO: 45493 - protein, 144 aa, Streptococcus agalactiae NEM316
MKETQEELRQRIGHTAYQVTQNSATEHAFTGKYDDFFEEGIYVDIVSGEVLFSSLDKFQSGCGWPAFSKPIENRMVTNHQDHSHGMHRIEVRSRQADSHLGHVFNDGPVDAGGLRYCINSAALDFIPYDQMAKRGYGDYLSLFD

SEQ ID NO: 45494 - protein, 214 aa, Bradyrhizobium sp. BTAi1
MVSFPQRLLDGYRAFTTQRLPTEQSRYLELSERGQSPDVMVIGCCDSRVSPEVIFDVGPGELFVLRNIANLVPIYQPDANAHGVSAALEYAVTVLKVKHIVILGHAQCGGIRAFVDKAAPLSPGDFIGRWMSMFIKPGEVVEQRNHESFQDFVTRIEKAAVFRSLENLMTFPFVRSRVEAGDLQLHGAYFGVAEGSLFVLDTATKEFKSARSGE

SEQ ID NO: 45495 - protein, 464 aa, Bacillus anthracis str. 'Ames Ancestor'
MDKNLKKDLKIRHITMISIGGVIGAGLFVGSGAVVHSAGPGSIVSYALAGLLVVFVMRMLGEMAAINPTSGSFATYAREAIGPWAGYTIGWLYWFFWVIVIAIEATAGAGIIQYWIPEIPLWLLSLILTILLTLTNVFSVKSFGEFEYWFSFIKVISIVLFLCLGLAVILGFVPGTEAPGTSNLVGQGGFMPNGISSVLLGITVVIFSFMGSEIVAVAAGESAEPVKAVKTATNSVIWRILVFFIGSIAVVVTLLPWNSANILKSPFVAVLEHIGIPAAAQIMNFIVLTAVLSCLNSGLYTNSRMLFSMAERGDAPKAFLKLNSSGVPVRAVLFGTFFAYIGVVFSYISPDKVFLFLVNASGGIALLVYLVIAISHLKIRKKMGRVEQQNLKVKMWFFPYVTYVTIAAIIAVLIAMLAIESLRSQALLTMLVTVLIIISYFIFNRNKNSTVLNTKSKNEESVRF

SEQ ID NO: 45496 - protein, 254 aa, Brassica rapa subsp. pekinensis
MGRGRVEMKRIENKINRQVTFSKRRAGLLKKAHEISILCDAEVSLIVFSHKGKLFEYSSESCMEKVLERYERYSYAEKQLKAPDSHVNAQTNWSMEYSRLKAKIELLERNQRHYLGEDLESISIKELQNLEQQLDTSLKHIRSRKNQLMHESLNHLQRKEKEILEENSMLTKQIKERESILRTHQNQSEQQNRSHHVAPQPQPQLNPYMISHQASPFLSMGGMYQGEDPTAVRRNRLDLTLEPIYNCNLGYFAA

SEQ ID NO: 45497 - protein, 442 aa, Zea mays
  misc_feature (8)..(8): Xaa can be any naturally occurring amino acid
  unsure (1)..(442): unsure at all Xaa locations
PASAQRPXCISGWNAPVYGALSAFLKDEAGKITKGPGGYMSGRGKVEITDVVEAASLAASGQPFEVVYYPRASTPEFVVKAASVQNAMRNQWCPGMRFKMAFETEDSSRISWFMGTIASAQVADPIRWPNSPWRLLQVSWDEPDLLQNVKCVNPWLVEIVSSIPPIHLGTFSPPRKKLRVPQHPDFPFDGQLLNPIFHGNPLGPSNGGGALRCFSDIAPAGIQGARHAQFGLPLTDRQLNKLHLGLFQGGGFKRRLDAITPPCPISRGFVIGSAPVDESVSCVLTIGTPRAAERSDDRKKPHLMLFGKPILTEQQMSSRGSRETLSPEATGNSSDGSVQKTGNVSDGSGSSICIGSSSRGREASRLGFEFEAGHCKVFVESEDVGRTIDLSVFGSYEELYGQLADMFGIERAEVMSHLCYRDAAGAVKRTGDEPFCDFMKVA

SEQ ID NO: 45498 - protein, 455 aa, Xanthomonas campestris pv. vesicatoria str. 85-10
MDPSVLKALQRLDAAHHLHPFNDNAALAHKGTRILTRGEGVYVWDADGNQFLDAFGGLWCVNVGYGREELAQAAARQMEQLAYYNSFFQCTTEPTIRLAAKLAALAPGDLNHAFFANSGSEANDTILRLVRHFWAVQGQPQKRIFIGRHDGYHGTTMAGASLGGMKGMHRQGGLPIADIHHIAPPYHFGDGGQMDPEDYGLLAARRLEDKILELGPEHVAAFIGEPIMGAIGVYIPPRSYWPEIERICRRYDVLLVADEVICGFGRTGEWFGAEYFGFQPDVMTLAKGITSGYIPLAAAMFNDRVAGVLKTQGGELAHGGTYAGHPVCAAVALENLRLLQDEGIVETARTQVAPYLAQRWAALGEHRLVGEARIAGLVGALELVPDKQRRGAYFPGRGRVGAMCRDFALRRGLILRATYDAMLLSPPLIITREQVDELFDKAWAALDDTAHALGR

SEQ ID NO: 45499 - protein, 485 aa, Kluyveromyces lactis NRRL Y-1140
MVRLGPKKPPARKGSMADVPANLMEQIHGLETLFTVSSEKMRSIVKHFISELDKGLSKKGGNIPMIPGWVVEYPTGKETGDFLALDLGGTNLRVVLVKLGGNHDFDTTQNKYRLPDHLRTGTSEQLWSFIAKCLKEFVDEWYPDGVSEPLPLGFTFSYPASQKKINSGVLQRWTKGFDIEGVEGHDVVPMLQEQIEKLNIPINVVALINDTTGTLVASLYTDPQTKMGIIIGTGVNGAYYDVVSGIEKLEGLLPEDIGPDSPMAINCEYGSFDNEHLVLPRTKYDVIIDEESPRPGQQAFEKMTSGYYLGEIMRLVLLDLYDSGFIFKDQDISKLKEAYVMDTSYPSKIEDDPFENLEDTDDLFKTNLNIETTVVERKLIRKLAELVGTRAARLTVCGVSAICDKRGYKTAHIAADGSVFNRYPGYKEKAAQALKDIYNWDVEKMEDHPIQLVAAEDGSGVGAAIIACLTQKRLAAGKSVGIKGE

SEQ ID NO: 45500 - protein, 229 aa, Arabidopsis thaliana
MEEEYIRIISITTIRIISWGLIFILVRRIFSSYSFDFSTRIVSTLHATIAVTLATLSIQDWSCPVCPIASTSSLRQMETLAFSLSYMIYDLICSHFDQVLSIDNAVHHSVCILGFVAGLFYQKCGSEMVAAIWITEISSPFLHLREILKEIGCRDTDLNLAADVFFATIFSVARMVGGPYLVYVTIPADNPILIKVMGLGLQLVSAFYKLLKMMRYKFIKRSMSTKKST

SEQ ID NO: 45501 - protein, 436 aa, Escherichia coli
MESLNQFVNSLAPKLSHWRRDFHHYAESGWVEFRTATLVAEELHQLGYSLALGREVVNESSRMGLPDEFTLQREFERARQQGALAQWIAAFEGGFTGIVATLDTGRPGPVMAFRVDMDALDLSEEQDVSHRPYRDGFASCNAGMMHACGHDGHTAIGLGLAHTLKQFESGLHGVIKLIFQPAEEGTRGARAMVDAGVVDDVDYFTAVHIGTGVPAGTVVCGSDNFMATTKFDAHFTGTAAHAGAKPEDGHNALLAAAQATLALHAIAPHSEGASRVNVGVMQAGSGRNVVPASALLKVETRGASDVINQYVFDRAQQAIQGAATMYGVGVETRLMGAATASSPSPQWVAWLQSQAAQVAGVNQAIERVEAPAGSEDATLMMARVQQHQGQASYVVFGTQLAAGHHNEKFDFDEQVLAIAVETLARTALNFPWTRGI

SEQ ID NO: 45502 - protein, 420 aa, Solanum demissum
MGNCVGSSARVEATLSSTTPSAYEASRFPDRKSNSSVPSSLSIPSYGRKSSSESLPTPRSESEILFSPNVKSFSFNELKNATRNFRPDSLLGEGGFGCVFKGWIDAQTLTASKPGSGIVIAVKKLKPEGFQGHKEWLTEVNYLGQLRHPNLVKLIGYCIDGDNHLLVYEFMPKGSLENHLFRRGPQPLNWATRIKVAIGAARGLAFLHDAKEQVIYRDFKASNILLDAEFNSKLSDFGLAKAGPTGDRTHVSTQVMGTQGYAAPEYVATGRLTAKSDVYSFGVVLLELLSGRRAVDNTKVGIEQNLVDWAKPYLGDKRKLFRIMDTKLEGQYPQKGAYTAANLAWQCLSNEPKLRPKMSEVLTALEELQSPKGVSKLSHTEHRAIPSPVAVSPMRHHRSPLHMTPSASPFQAYQKSPRGR

SEQ ID NO: 45503 - protein, 284 aa, Coxiella burnetii RSA 493
MDKRSSLPPIVRHITCDQMTEPAFQGEYTDLKETGRYLCRQCGIALFRSQDKFHSGCGWPSFDATIAGTIKRLPDPDGQRIEIRCERCGAHLGHVFEGEALTPKNTRYCVNSLSLDFVTDSQIRDTEEAIFAGGCFWGVEYYFKRLPGVVKTEVGYTGGHKNNPTYKEVCSRTTGHVEAIRVLYDPQQINYEKILHYFFEIHDPTQTDGQGPDLGDQYHSVIFYYDNQQKRMAEMAIKVLTEKGYRIATRLAPVSIFWRAEDYHQDYYQKTGKQPYCHHYVKRF

SEQ ID NO: 45504 - protein, 213 aa, Medicago truncatula
MKNTLLAFFFLFTFLSSQPLLGAAEASNEQVVDTLGKKLRADANYYIIPVPIYKCGPYGKCRSSGSSLALASIGKTCPLDVVVVDRYQALPLTFIPVNPKKGVIRVSTDLNIKFSSRATCLHHSMVWKLDRFNVSKRQWFITIGGVAGNPGWETINNWFKIEKYGDAYKLVFCPSVVQSFKHMCKDVGVFVDENGNKRLALSDVPLKVKFQQA

SEQ ID NO: 45505 - protein, 603 aa, Xylella fastidiosa Ann-1
MTVIEIKVPDIGDYSKVPVIEVLVTVGDHVVKNQGILTLESDKATLEVPSMNNGIVKELKVNVGDLLSQGDVILLLETEDTTAPPSPSNAATSDTTSPPPPSPQPAASKATAPDQQHSDIKCRMVVLGAGPGGYTAAFRAADLGLDTVLVERYPNLGGVCLNVGCIPSKALLHAAAVIDEAAHASTFGIDFGKPKITLDTLREYKQNVVNKLTAGLAGMAKQRKVRTVTGIAHFVSPNTLDITAADGSTQRLHFQQCIIATGSHPVKLPNFPWDDPRIMDSTDALELAEVPKKLLVVGGGIIGLEMATVYNALGSHVTIVEFMDQIIPGTDKDLVKPLADRMKKQGIEIHLNTKASHVKADKKGITVSFEAPTQGTQPTLKTSTYDRVLVAVGRTPTGNNIGAEKAGVNVTERGFIPVDRQMRSNVPHIFAIGDIVGNPMLAHKATHEGKLAAEVAAAETESGKHREWVARVIPSVAYTNPEIAWIGMTETEAKAKSLNIGVAKFPWAASGRAIGIGRTEGFTKLIFDEDTHRIIGGAIVGVHAGDLLAEIGLAIEMGTEAEDISHTIHAHPTLSESIAMSAEVYDGTITDLYLPKKPATSAK

SEQ ID NO: 45506 - protein, 213 aa, Methanosarcina barkeri str. fusaro
MAEKSILEAVKKVLEESPKRNFSESVDLAINLKNLDMNLPKNRVDEEVILPHGLGKELKIGVFAKGDVGLRAKAAGAAYVISDVELDELASDKTRARTLANECDLFIAETQFMPTIGKNLGIVLGPRGKMPIPLLPNKDIGELIQSKQNAIRLRSKDKLTFHVPVGRRTMSPDDLAENVEIIVSRLERVLDKGRHNLRTVYVTTTMGKSERVV

SEQ ID NO: 45507 - protein, 336 aa, Legionella pneumophila subsp. pneumophila str. Philadelphia 1
MSYEELSNTMEQMLHEGKGILAADESNSTIGKRFASINTENTEENRRDYRLLLATTPDLEQYINGVILFEETFTQTDEHGTPIPELFANKGIIPGIKVDKGLVDLANTEHEKVTQGLDGLTERLLHFKKLGAKFAKWRNVYSISEYTPSLTAIKTGAENLGRYAAACQSVGIVPIVEPEVLMDGNHSIEHCAEVCEMVLHELFHTLFIHQVELEHIILKPSMVTCGKEVAPFSDPEEVADYTISVFRNNVPASVPTINFLSGGQTPQQATANLNAINQIGHQPWLLSFSFGRALQEDCLKEWCGNKANIAKAQEALIKRARLNSMACLGEYQNDME

SEQ ID NO: 45508 - protein, 355 aa, Arabidopsis thaliana
MVRASSSKKGGSKGGDKDDAESKQRKRLKTLALDNQLLSDSPAKSHSSLKPSKQVLKHHGTDIIRKSQRKNRFLFSFPGLLAPISAATIGDLDRLSTKNPVLYLNFPQGRMKLFGTILYPKNRYLTLQFSRGGKNVLCDDYFDNMIVFSESWWIGTKEENPEEARLDFPKELAQAENTEFDFQGGAGGAASVKTMATPETGSQPTETDSPEVDMEDVLSEDGEFLDDKIQVTPPVQLTPPIQVTPVRQSQRNSGKKFNFAETSPEASSGESEGNTSDEDEKPLLEPESSTRGREESQDGNGVTASASKLPTELPAKKEKPKSKDSKLVQATLSNLFKKAEEKTAGTSKAKSSSKA

SEQ ID NO: 45509 - protein, 106 aa, Triticum aestivum
MAPSSTTASAAADERDRKRKRGAGGEAGTEADAERAPKWRTRREHEIYSTRLLDALRLVRAGAGVAPSPSPARQVREAADRALAVAARGRSRWSRAILASRRAHRV

SEQ ID NO: 45510 - protein, 158 aa, Petroselinum crispum
MDFRLMGFNHPLLNTLSPHCDEDNQDSSNKNKSEQARSYVRDAKAMATTPADVKEYPNSYVFVVDMPGLKSGDIKVQVEEDNVLVVSGERKREEEKEGVKYVRMERKVGKFMRKFVLPENADLENINAVCQDGVLSVTVQKLPPPEPKKPKTIEVKIA

SEQ ID NO: 45511 - protein, 304 aa, Arabidopsis thaliana
SLLGSILSNLLLVLGTSLFCGGIANIRREQRFDRKQADVNFFLLLLGFLCHLLPLLVGYLKNGEASAAVLSDMQLSISRGFSIVMLISYIAYLVFQLWTHRQLFDAQEQEDEYDDDVEQETAVISFWSGFAWLVGMTLVIALLSEYVVATIEEASDKWNLSVSFISIILLPIVGNAAEHAGAVIFAFKNKLDISLGVALGSATQIGLFVVPLTIIVAWILGINMDLNFGPLETGCLAVSIIITAFTLQDGSSHYMKGLVLLLCYFIIAICFFVDKLPQKQNAIHLGHQAMNNVVTATGGGVFSS

SEQ ID NO: 45512 - protein, 339 aa, Pseudomonas aeruginosa PAO1
MSTVDPVEQLLANGLKNLWYPICPVGFIEDKPVSLRRLGYKLAVWRDTDGTLHALEDHCPHRGAPLSRGVNLGDRLQCPYHGVEVRCDGVTARVPGSPGCKLEGSQATRFFHITEAAGAVWLYNSAGNVEEAPPLVLPEQLTDPEFSHFLCYTEWRGDYRYVLDNVMDPMHGTYLHKQSHSMSEGESQARFVTRDTDTGFIFEKDGQRGVNFDWTEWADTGMHWMRLEIPYPKTGGPGGNFHIVGSYTPIARDLCAVFHWRCRPLTGWQRDTWRFLYRNRLEARHWAVLEQDREMLEFMEPDANQRENLYQHDLGLVRLRRHLKNLAKAQLELIEARQL

SEQ ID NO: 45513 - protein, 1040 aa, Prosthecochloris aestuarii DSM 271
MTNSSTSATAEFRTLVVLEALKERRPEHEVAAAFNISRQELSEWKEQFLSKADSLFRPELTENKPEKCPDDIDWQKVFHAISHPTIILDENQIILSANPATAKAFGLDTPDLIGRKCTELFHATWCTPDRCPMQEVKMTRNPAEGIMISETLGRYFLVSCTPVLNTTGDVEKIIHIATDITQQIKAEQTLQRSDSILSTLQFVTTELQNSHRFEETINRVLSMLGTVLEVNRAYIVECQAVDTKTPFTNLRYLWQDPYALSKKQKPLFQEPLSDRGERASLLKTLEKNLVLQRITNDTSGAERAILQAAHITSILAIPINIEKKWWGFIGFDDCRNDRSWTRTEIEALRSAAETLGAAIIHQRTTLKLKESEARNGAMLNALPDMLFVLDKEGVCLDFHARNNNEPHPPAKQFIGKSLKEIFPEAHSSALQHLIHEVSESGAPKIHEYQMKRSGKTSHYEIRVVPLGTDKTLNIVRNMTDQKETENKLLRTNRKLENASRKAKKLAEQAQEASKAKSEFLANISHEIRTPMNGVIGMTGLLLETDLTPQQHRYAGTIASSAQSLLDLINDILDVSKIEAGKLTLEILDFDLQELMDDFAASFAIQAEQKNLEFLCSIEPGIPTRLTGDPGRLRQILMNIAGNAVKFTSKGEIAIYVTLDSDCDDQVVLRFCIRDTGIGIAKEKIDTLFEKFTQIDASATRQYGGTGLGLSIAKDLVELMQGSIGVESTVNQGSLFWFTAKLNRQTHATLQAQESKNRSLFGQKALIVDDNATNREILSKRLLSWGMRPEESDNGQDALDMLIRASTSTDAFTIAVIDMQMPEMDGVMLGKAIREHEALMSLQMIMMTSLGNNGESSLAEKAGFSAWLQKPVQIKKLKNALIALSATQEPEADEQPSQKKPNNLLNRFAECKARILLVEDNIVNQQVAMLMLKKFGLHVDGVANGKEALSALMSLPYDVVLMDIQMPVMDGLEATRRIRNGECGTSAIPIIAMTAHAKQSDRELCLATGMNDYVSKPVNQQALADTLEKWLPKHSDTQNAT

SEQ ID NO: 45514 - protein, 500 aa, Streptococcus agalactiae NEM316
MNKRVKIVATLGPAVEFRGGKKFGESGYWGESLDVEASAEKIAQLIKEGANVFRFNFSHGDHAEQGARMATVRKAEEIAGQKVGFLLDTKGPEIRTELFEDGSDFHSYTTGTKLRVATKQGIKSTPEVIALNVAGGLDIFDDVEVGKQILVDDGKLGLTVFAKDKDTREFEVVVENDGLIGKQKGVNIPYTKIPFPALAERDNADIRFGLEQGLNFIAISFVRTAKDVNEVRAICEETGNGHVKLFAKIENQQGIDNIDEIIEAADGIMIARGDMGIEVPFEMVPVYQKMIITKVNAAGKAVITATNMLETMTDKPRATRSEVSDVFNAVIDGTDATMLSGESANGKYPVESVRTMATIDKNAQTLLNEYGRLDSSAFPRNNKTDVIASAVKDATHSMDIKLVVTITETGNTARAISKFRPDADILAVTFDEKVQRSLMINWGVIPVLADKPASTDDMFEVAERVALEAGLVESGDNIVIVAGVPVGTGGTNTMRVRTVK

SEQ ID NO: 45515 - protein, 511 aa, Liquidambar styraciflua
MDSSLHEALQPLPMTLFFIIPLLLLLGLVSRLRQRLPYPPGPKGLPVIGNMLMMDQLTHRGLAKLAKQYGGLFHLKMGFLHMVAVSTPDMARQVLQVQDNIFSNRPATIAISYLTYDRADMAFAHYGPFWRQMRKLCVMKLFSRKRAESWESVRDEVDSAVRVVASNIGSTVNIGELVFALTKNITYRAAFGTISHEDQDEFVAILQEFSQLFGAFNIADFIPWLKWVPQGINVRLNKARGALDGFIDKIIDDHIQKGSKNSEEVDTDMVDDLLAFYGEEAKVSESDDLQNSIKLTKDNIKAIMDVMFGGTETVASAIEWAMTELMKSPEDLKKVQQELAVVVGLDRRVEEKDFEKLTYLKCVLKEVLRLHPPIPLLLHETAEDAEVGGYYIPAKSRVMINACAIGRDKNSWADPDTFRPSRFLKDGVPDFKGNNFEFIPFGSGRRSCPGMQLGLYALETTVAHLLHCFTWELPDGMKPSELEMNDVFGLTAPRAIRLTAVPSPRLLCPLY

SEQ ID NO: 45516 - protein, 395 aa, Triticum aestivum
  misc_feature (174)..(174): Xaa can be any naturally occurring amino acid
  unsure (1)..(395): unsure at all Xaa locations
WKGGSAGEILLLGIRYTVHNRARDFRKTRVFTFPPPVHPPESNGIFLPPLHYYSRCREGADSSAVYCVSFSSSVFFLSHPRLRRAPATKLSSGHEMPAVGLGVWRMDSAAVRGLIHSALRAGYRHFDCAADYKNEAEVGDALAEAFKTGLVKREDLFITTKLWNSDHGHVVEAXCKDSLKKLRLDYLDLYLIHFPVATKHTGVGTTGSALGDDGVLDIDTTITLETTWHAMEDLVSMGLVRSIGISNYDIFLTRDCLAYAKIKPAVNQIETHPYFQRDSLVKFCQKHGISVTAHTPLGGSTANTEWFGSVSCLDDPVIKSLAEKYGKTPAQLVLRWGLQRNTVVIPKTSKVERLEENFAVFDFDISVEDMEKIKALDRNYRTNQPAKFWGSNLYA

SEQ ID NO: 45517 - protein, 183 aa, Escherichia coli O157:H7 EDL933
MQDSILTTVVKDIDGEVTTLEKYAGNVLLIVNVASKCGLTPQYEQLENIQKAWADRGFVVLGFPCNQFLEQEPGSDEEIKTYCTTTWGVTFPMFSKIEVNGEGRHPLYQKLISAAPTAVAPEESGFYARMVSKGRAPLYPDDILWNFEKFLVGRDGLVIQRFSPDMTPEDPIVMESIKLALAK

SEQ ID NO: 45518 - protein, 968 aa, Eleocharis vivipara
MATKNVEKLASIDAHLRLLAPKKVSEDDKLVEYDALLLDRFLDILQALHGEDLKETVQECYELAAEYEKNLDQAKLDELGNVLMSLDAGDSIVLAKSFSHMLNLANLAEEVQIAYRRRIKKLKKGDFGDENSATTESDLDETLMRLVSDLNKSPAEIFEALKNQTVDLVLTAHPTQSVRRSLLQKHARVRDCLAQLNEKDITPDDKQEIDEALQGAIQAAFRTDEIRRAPPTPQDEMRAGMSYFHETIWKGVPKFLRRVDTALKDIGINERVPYNAPLIQFSSWMGGDRDGNPRVTPEVTRDVCLLARLMAANMYYSQIEDLMFELSMWRCSEELRQRVELLHSSIKKDNKHYIEFWKKVPPNEPYRVILGDVRNKLYNTRERARHLLSQGQSDINEEATFTNLEEFLEPLELCYRSLCACGDRVIAEGSLLDFLRQVFTFGLSLVRLDIRQESERHTDVLDAITTYLGIGSYREWSEEKRQEWLISELTGKRPLIPHDFPQTEEVKDVLDALHVISEFPSENFGPYIISMATSTSDVLAVELLQRECHVKKPLRVVPLFERLADLKAAPAVMTRLFSMDWYRNRINGKQEVMIGYSNSGKDAGRLSADWKLYKFQAELAKIAKQFGVKLTLFHGRGGTIGRGGGPSHLAILSQPPNTINGSLRVTIQGEVIEQSFGEEHLCFRTLQRFTAATLEHGMHPPVSPKPEWAALMDEMAIIATEEYRSYVFKEPRFVEYFRLATPELEFGRMNIGSRPSKRKPSGGIVSLRAIPWIFSWTQTRFHLPVWLGFGTAFKHVIEKDVRNFQILREMYNEWPFFRVTLDLVEMVFAKGDPKIAAMYDKLLVSEELLPFGEKLRANYEETKNLLLQVAGHKDLLEGDPYLKQRLRLRDAYITTLNLLQAYTLKRIRDPNYNVKFRPHLSKEIMESKTDKPADELVKLNPASEYAPGLEDTLILTMKGIAAGFQNTG

SEQ ID NO: 45519 - protein, 408 aa, Triticum aestivum
MQATTAAAAAQLLTDTRRGPRCSRARLGATRLSWPGRFAVEAFAGRCQSSATTVTHRFSAISQATSPRRKARRQCSDDQSALQAGCSKVNRDQHGYDVNWFEEISQEVSKKLRAFYQFCRPHTIFGTIIGITSVSLLPMKSIDDFTATVLKGYLEALAAALCMNIYVVGLNQLYDIQIDKINKPGLPLAAGEFSVATGVFLVVTFLIMSFSIGIHSGSVPLMYALVVSFLLGSAYSIEAPLLRWKRHALLAASCILFVRAILVQLAFFAHMQQHVLKRPLAATKSLVFATLFMCCFSAVIALFKDIPDVDGDRDFGIQSLSVRLGPQRVYQLCISILLTAYLAATVVGASSTHLLQKIITVSGHGLLALTLWQRARHLEVENQARVTSFYMFIWKLFYAEYFLIPFVQ

SEQ ID NO: 45520 - protein, 434 aa, Lactobacillus plantarum WCFS1
MQTLKPFESIWNFVLLLLVSYPILGAFAWFIGVLCYQLIYRHRHKDDIEFKQLTPAEQPFITIMIPAHNEEVMIEHTINYLMNNLNYEKYEVLVTDDGSTDETPAILERLQNVYDNLRVVTIKKNQGKAHAFNVGVGFARGEFILSNDADSIPEPDALWKYMSYFMGEEHANTAAVTANMDVQNRSTIIAKSQTVEFSSIVGVIKRSQVSALGNMYAYSGANTMYRRDALIDVGLFRQDRATEDISIAWDHQLNGWTTVFSPDILFYMNVPENLDALYHQRKRWAKGGTEVLLTNFKRVVSHPGKYLKQWAFITDQTLSIIWSLFFFVSTLIFLISLVTFFFTGNYERVYHMFCMAFIFVTFEMFAGVLQLLSALIVDDRGRKFKYLIFMPLYMLIYWQVNALALVTTLIPAVKTILGYGSGTWVSPVRKHHTE

SEQ ID NO: 45521 - protein, 259 aa, Bacillus anthracis str. 'Ames Ancestor'
MTRNKVEICGVDTAKLPVLKNDEMRKLFREMQSGEISAREKLVNGNLRLVLSVIQRFNNRGEYVDDLFQVGCIGLMKSIDNFDLGQNVKFSTYAVPMIIGEIRRYLRDNNPIRVSRSLRDIAYKALQVREKLIAENSKEPTAMDIAKVLEVTHEEIVFALDAIQDPVSLFEPIYNDGGDPIFVMDQLSDEKQKDEQWVEELALKEGMKRLNDREKMIIRKRFFQGKTQMEVAEEIGISQAQVSRLEKSAIKQMNKTIQG

SEQ ID NO: 45522 - protein, 600 aa, Halobacterium sp. NRC-1
MVINLTSHAAHADVTEACLAAGRHVFSEKPLAMDAARAADLVAAAERHDLGLGCAPITPGCDAQRHARALAADGRLGGVQFAAATANVGRVDEWHDRPASFLDVGPLYDGAVYPLALLVAWFGRVTEVRTADAVAAWPPAQRDGDDAPDGLPHVEATLSFSDGPVVSLRASFYVDHRSREFYGLELHGDDGTLYLRDTGALGAPRDAVTVRGGDREPTVAPQPQPRCSRAYAAGPERLADRVAGGCGSSARASARRGAHVVAVCNAIERAATDGGPVAVPEPGVSLARPEQRRPAPVAAAPSGFQPGGRALRLPPVGFGCSRYRDGTYVTPAMGAAVDAGYRLFDTAELYGNEWRLGDLVAAPGGPDRESVFLVGKPWRTNHGPGDLREACTGSLDELGVAAFDCYALHWPGAWAHRGALTRLSERPVEEQERLTMPTAADGTPARAPHGLVETWRRMEALHDDGLARSLGVCNVTLPQLAGLTDAARVRPALVQVECHPYRPRDALVSWCHRHGVRVVAHSPLSAPGLLDEPVVHAVADEHGVSPATAVLAWHCTRGVVPIPSTTTREHVVANLAAPRHSLTDDQRDRMAGLADPTFQR

SEQ ID NO: 45523 - protein, 304 aa, Solanum demissum
MAFFPTNFMLQTPHHEDEHQPSTSLNPILPSCSPQDFHGIASFLGKRSMSFSGMDGNNACEENHGEDDLSDDGSQAGEKKRRLNMEQVKTLEKNFELGNKLEPERKMQLARALGLQPRQIAIWFQNRRARWKTKQLEKDYEVLKRQFDAIKAENDALQTQNQKLHAEIMSLKNREQPTESINLNKETEGSCSNRSENSSEIKLDISRTPAIDSPLSNHHPNISSRPFFPPSMIRSNNNNNGVVVSHQLFHINSSSSRQDLKLMDQNTTTTNNNSSVKEESLSNMFCGIDDQTSFWPWLEQQHFN

SEQ ID NO: 45524 - protein, 450 aa, Xanthomonas campestris pv. vesicatoria str. 85-10
MPHHLPSDAADALQAPTQLDAFWMPFTANRQFKSRPRLLASAQGMHYRDVHGRQILDGTAGLWCCNAGHGRERIVAAIREQAGTLDFAPTFQMGSPLPFVLAQRLAAIAPPGLGHVFFTNSGSEAVDSAMKIVLAYHRLRGEGQRTRFIGREKAYHGVGFGGMSIGGLPNNRKWFGPLLSGTDHLRHTLDLQRNAYARGLPAHGAELADDLERLITLHDASTIAAVFVEPVSGSAGVILPPEGYLQRLRAICDRHGIVLVFDEVITGFGRVGNAFAAQRFGVTPDIITAAKGLTSGTVPMGAVLVADAIFDAFMHGPQNAIELFHGYTYSGHPLACAAAIATLDTYAEEELFTRAITLGLQWEDALHGLRGSPHVIDIRNIGLIGAIELAPRDGAPGARGYEVFERCFHEGGLLVRVTGDVIALSPPLIVTPEQIGQMVETLGKMLRQVD

SEQ ID NO: 45525 - protein, 480 aa, Photorhabdus luminescens subsp. laumondii TTO1
MSRRLRRTKIVTTLGPATDRDNNLEKIIAAGANVVRLNFSHGTAEDHLQRASKVREIAARLGCHVAILGDLQGPKIRVSTFKEGKIFLNIGDKFLLDANLGKGEGDKEKVGIDYKGLPTDVVPGDILLLDDGRVQLKVLDVQGMKVFTEVTVGGPLSNNKGINKLGGGLSAEALTEKDKEDIITAARIGVDYLAVSFPRTGEDLNYARRLARDAGCETQIVAKVERAEAVSSDKTIDEIILASDVVMVARGDLGVEIGDPELVGVQKKLIRRARQLNRVVITATQMMESMITNPMPTRAEVMDVANAVLDGTDAVMLSAETAAGQYPAETVAAMARVCLGAEKMPGLNVSKHRLDTIFDSIEEAIAMSTMYAANHLNGVKAIIAMTESGRTTRIMSRISSGLPIFSMSRHEKTLNQTALYRGVTPVYCSSHTDGITAANEAVNRLRDKGYLVSGDLVLVTQGDQMGTIGSTNTCRILEVE

SEQ ID NO: 45526 - protein, 603 aa, Solanum demissum
MDAVSIRVPYKNLKQEVELTNVDESRFTQLEIRSDSSSPRASNGEMNDSHLPLPPPPVRNSLLTLILSCTVAAGVQFGWALQLSLLTPYIQTLGIEHAFSSFIWLCGPITGLVVQPCVGIWSDKCHSKYGRRRPFIFIGAVMISIAVIIIGFSADIGYLLGDTKEHCSTFKGTRSRAAIVFVVGFWMLDLANNTVQGPARALLADLSGPDQRNTANAVFCSWMAVGNILGFSAGASGGWHRWFPFLTNRACCEPCGNLKAAFLVAVVFLTLCTLVTLYFANEVPLSPKQYKRLSDSAPLLDSPQNTGFDLSQSKRELQSVNSVANNESEMGRVADNSPKNEEQRPDKDQGDSFADSPGAVLVNLLTSLRHLPPAMHSVLIVMALTWLSWFPFFLFDTDWMGREVYHGDPKGEADEVNAYNQGVREGAFGLLLNSVVLGVSSFLIEPMCKWIGSRLVWAVSNFIVFVCMACTAIISVVSISAHTEGVQHVIGATRSTQIAALVVFSLLGIPLAVTYSVPFSITAELTADAGGGQGLAIGVLNLAIVVPQMVVSLGAGPWDALFGGGNIPAFVLASLAALAAGIFAMLRLPNLSSNFKSTGFHFG

SEQ ID NO: 45527 - protein, 159 aa, Exiguobacterium sp. 255-15
MNTSLYEIEVQDATGQTVSLNDYAGEVLVIVNTASKCGLVKQLGDLQQLHDKYADQGVKVLGFPCDQFNNQEFADQQETMQFCQRNYGVTFPMFQKIDVNGPAEHRLYTYLKQQQGGLLSSNIKWNFTKFLVDREGRVVKRFAPVDSIQTIEKTLARYV

SEQ ID NO: 45528 - protein, 137 aa, Streptomyces coelicolor
MTQRSLVLLKPDAVRRGLTGEIISRIERKAGWQITALELRTLDTETLEQHYGEHKGKPFYEPLVEFMASGPVVAMVVEGERVIEGVRALAGPTDPIAAAPGSIRGDYGVIVRENLIHASDSEESAERELKIFFPGRV

SEQ ID NO: 45529 - protein, 631 aa, Solanum tuberosum
MESLVDGISSLPNVHNSFAAVECNTSLASKISHPPLMKQSENKESSISYPIAMDLGSNTAHTQTGSVTGSKHFEANEDTVNQLAEGCSGEQVLALETESSIKDLHYVSKNSTSNDDLNAAAAKGLPSESGITYCPSPQNSFYSATQYTEAKQSFSNTEVSECASSTVDKSGESGDVSNSCDLVESRKTSFYRGSTGSDVSDESSSSSFNSTTVYKPHKANDTRWDAIQVIRAREGTLGFNHFRLLKRLGCGDIGSVFLAELIGTRCFFAMKVMDKAALESRKKLVRAQTEREILQSLDHPFLPTLYSHFETDKFSCLVMEFCPGGDLHALRQKQPGKFFPEHAARFYVAEVLLALEYLHMLGIIYRDLKPENVLVREDGHIMLSDFDLSLRCAVSPTLVRSSNSSLESKSSSYCVQPACIEPSCVIQPACIQPSCFTPRFLSKTKKEKKSKQKTETYNQVNRPLPELLAEPTSARSMSFVGTHEYLAPEIIKGEGHGSAVDWWTFGIFLYELLFGQTPFKGAGNRATLFNVVGQPLKFPETPSVSFAARDLIRGLLVKEPQHRLAYRRGATEIKQHPFFQNVNWALIRCTSPPDVPKPSSMTYNMPRTPPAGKTPGVDVKPSGNYFEIDFF

SEQ ID NO: 45530 - protein, 57 aa, Solanum tuberosum
MYQSKLAGTATSYDRHLFLCYKSHETWPARLEASDSDLLPKSFSAALKARKDDIKIK

SEQ ID NO: 45531 - protein, 151 aa, Brassica napus
MAGLMRLDGKITIITGGASGIGAEAARLFTEHGAKVVIVDIQEELGQNVAVSIGQDKACFYRCDITDETQVENAVKFTVEKHGKLDVLFSNAGVMEQPVSILDLDLKQFDRTIAVNVRGAAAFIKHAARAMVEKGTRGSIVCTTSIAAEIG

SEQ ID NO: 45532 - protein, 578 aa, Prosthecochloris aestuarii DSM 271
MPAVSIRRFECMKPFDIVVVGGGGAGLYAAMEAMKTNPALNIAVLSKIYPNRSHTSAAQGGANAALGNKAKDDTVEMHVFDTIKGSDYLADQDAAEVLCSEAPKIIRELDNIGTPWSRMDDNTIAQRPFGGAGRPRCCYCADKTGHTILQTLYEQCLRKGVFFFNEYFVLSLSTEGSKSKGLLAMNIRTGKVEAFPARAVIFATGGYSKMYWNRSSNAAGNSGDGQAVAYRAGIPLKDMEFVQFHPTGLRKSGLLVTEGARGEGGYLINNKGERFMNNYAPEKMELGPRDLVSRSIETEILQGRGFESPAGQYMHLDLTHLGADLIKSRLPQIREMSMYFEGVDPIEEPIPIRPTAHYSMGGIDTDIYGRTPMDGVYAAGEAACVSVHGANRLGGNSLLEILVFGRIAGHAAAEEARSFDPGEISSREVEDMELELREYMKPSGHYERYGALREELGQTLAINVGIFREASKIEKGIADVAALKERFSHVRVFDTSDVFNTNLIQVLELKNMLDLAETVAAGAYAREESRGSHTRTDFPKRDDEKWHKHTMYTYENGKPVLGEKPVTMGKYELQERTY

SEQ ID NO: 45533 - protein, 392 aa, Anabaena variabilis ATCC 29413
MLTLIKDLATKLAPRLIEIRRHIHSHPELSGQEYQTAAFVAGVLSSSGLRVQEGVGKTGVVGELQVTEKNHSFLAIRTDMDALPIQERTGLEYASRADGVMHACGHDIHTTVGLGAAMVLSQMTEELGGNVRFLFQPAEEIAQGASWMVADGAIKDVSAILGIHVFPSIPAGSIGVRYGALTAAADDLEIVIIGESGHGARPHEAIDAIWIASQVITSLQQAISRTQNPLRPVVLTIGKITGGRAPNVIADKVQLLGTVRSLHPETRAQLPNWIERIVANVCHSYGASYQVNYRQGVPGVYNDYGLTQLFQSAGEEAWTSDRVQVLPEPSLGAEDFSVYLEHVPGSMFRLGVGYPERIINHPLHHPEFEVDESAIVTGVVTMAYAAYKYLRG

SEQ ID NO: 45534 - protein, 193 aa, Brassica napus
  misc_feature (21)..(21): Xaa can be any naturally occurring amino acid
  unsure (1)..(193): unsure at all Xaa locations
PVDPASGQSSSYSPLEGGASXNEEASDEDEDPEISKWESIIWLSVLTAWVSLLSGYLVDAIEGASVSWNIPIAFISVILLPIVGNAAEHAGAIMFAMKDKLDLSLGVAIGSSIQISMFAVPFCVVIGWMMGEQMDLNFQLFETAMLFITVIVVAFFIQEGTSNYFKGLMLILCYLIVAASFFVHEDPQQDGGI

SEQ ID NO: 45535 - protein, 586 aa, Nicotiana tabacum
MPMVDDPLYPIPVLIDDLKTDEKQLRLNSIRRLSTIARALGEEKTRKELIPFLSENNDDDEVLLAMAEELGVFIPYVGGVEHAHVLLPPLETLCTVEETCVRDKPVESLCRIGSQMRESGLVDWFVPLVKRLAAGEWFTARVSACGLFHIAYSSAPEMLKAELRSIYSQLCQDDMPMVRRSATTNLGKFAATVESTYFKSDITSIFDDLTQDDQDSVRLLAVEGCAALGKLLEPQDCVAHILPVIVNFSQDKSWRVRYMVANQLYELCEAVGPEPTRTDLVPAYVRLLRDNEAEVRIAAAGKVTKFCRILSPELAIQHILPCVKELSSDSSQYVRSALASVIMGMAPVLGKDATIEHLLPIFLSLLKDEFPDVRLNIISKLDQVNQVIGIDLLSQSLLPAIVELAEDRHWRVRLAIIEYIPLLASQLGIGFFDDKLGALCMQWLQDKVYSIRDAAANNLKRLAEEFGPEWAMQHIIPQVLDMTTSPHYLYRMTILRAISLLAPVMGSEITCSKLLPVVITATKDRVPNIKFNVAKVLQSLIPIVDHSVVEKTIRPSLVELAEDPDVDVRFYANQALQSIDNAMMSG

SEQ ID NO: 45536 - protein, 228 aa, Petunia x hybrida
MGRGKIEIKRIENNTNRQVTFCKRRNGLLKKAYELSVLCDAEIALIVFSTRGRVYEYANNNIKGTIERYKKATAETSNACTTQELNAQFYQQESKKLRQQIQLLQNTNRHLVGEGLSALNVRELKQLENRLERGITRIRSKKHEMILAETENLQKREIQLEQENTFLRSKIAENERLQELSMMPATGQEYNAFQQYFARNMLQLNMMEGGVPSYDPLPAHDKKSLQLE

SEQ ID NO: 45537 - protein, 402 aa, Neurospora crassa
MAARNCTKALRPLARQLATPAVQRRTFVAAASAVRASVAVKAVAAPARQQVRGVKTMDFAGHKEEVHERADWPAEKLLDYFKNDTLALIGYGSQGHGQGLNLRDNGLNVIVGVRKNGKSWEDAIQDGWVPGKNLFDVDEAISRGTIVMNLLSDAAQSETWPHIKPQITKGKTLYFSHGFSPVFKDLTKVEVPTDVDVILVAPKGSGRTVRSLFREGRGINSSFAVYQDVTGKAKEKAVALGVAVGSGYLYETTFEKEVYSDLYGERGCLMGGIHGMFLAQYEVLRERGHSPSEAFNETVEEATQSLYPLIGAHGMDWMFDACSTTARRGAIDWTPKFKDALKPVFNNLYDSVKNGDETKRSLEYNSQPDYRERYEAELDEIRNLEIWRAGKAVRSLRPENQK

SEQ ID NO: 45538 - protein, 267 aa, Pseudomonas putida KT2440
MSVPSFGLGTFRLTGQTVIDSVKSALAVGYRVIDTAQIYKNEAEVGQAIAESGVPRSELFITTKIWVDNYAADKLIPSLRDSLQKLRTDYVDLLLIHWPAPGNGVELPEYMKALADAKQQGLARQIGVSNFNIELTRQAIAVVGKGEIATNQIELSPYLQNSKLTAFLKEQGITVTSYMTLAYGKVLKDPVLAQIAAKHKATVAQVALAWALQLGYAVIPSSTKRENLASNLLARGLTLDTDDMARIAKLERNGREVSPDGLAPTWD

SEQ ID NO: 45539 - protein, 228 aa, Arabidopsis thaliana
  misc_feature (16)..(16): Xaa can be any naturally occurring amino acid
  unsure (1)..(228): unsure at all Xaa locations
MLKLWRWYQRCLTVHXSGFIWGFGDVSGQYITHSTAKRRLLRLTETNKDVDANAEFKVNWKRDAEFKVNWKRVAITSMFGFGFVGPVGYFWYEGLDKFIKLKLRYVPKSTRFVAAKVAIDGLIFGPIDLLVFFTYMGFATGKNTAEVKEGLKRDFLPALALEGGAWPLLQIANFRYVPVQYQLLYVNIFCLVDSAFLSWVEQQKDAAWKQWFTSSFQPLKERGGQGGV

SEQ ID NO: 45540 - protein, 296 aa, Streptomyces turgidiscabies
MKVVVDETTCLGTGQCAMIAPEVFEQRANGVTVALETEPHQSRRAAVREAALACPVAAIRLSEGSEPSTVASTAFGYDDLPGLIARMTGDERHAFSSSSTKDVLWVLYDRVLNVSPDRTDDDERDRFFNSKGAGPMAQYAVLTAKGFLRPEQLDNWGTWDSSLGYVPDRVTVPGVDLSSGSLGHGVPIAVGVALTWRIQGRCGPSVFVLIGDGEFDEGSNHEAMVLAGRMGLDQVVVVVVDNGTASHGWPGGIEKRFAREGWATDVVDGKNHDEIFTALTRKHTGKPLVVVATVTR

SEQ ID NO: 45541 - protein, 147 aa, Solanum demissum
MGKDLSNDQISSMKETFTLFDTDGDGKISPSELGILMRSLGGNPTQAQLKSIIAEEKLTSPFDFNRFLELMSKHLKPEPFDRQLRDAFKVLDKDGTGYVVVSDLKHILTSIGEKLEPSEFDEWIREVDAGSDGKIRYEDFIARMVAK

SEQ ID NO: 45542 - protein, 470 aa, Solanum demissum
MEAEDDQENNGSCEKGLSSSNFKVKINLKLKKNKDESCGDEDVREEKNLLLIKQKKDHICCECGKEFSSGKALGGHMSSAHVQANQRLEESWKKKKYSIKRSRFDDYDDDEEVVLEEEEEIGDVVVSCEICHKNFPSKKSLFGHMRCHPDREWRGMKPPSKKISKNKGFQATFEDVNEGFEDRFASLRDEEEEEGGGIHFNVVELPPLKDWGAKDRRGRSPLKRSVSSTIMDDDKELHDAVQQLISLVNGDVNNNNNNNNNRSEVMMSSSNSVGSAPKEAVFCDLKDKSKKKGVVDDTKEKNHEETKKRKREKELVKLESGQDLVHIPVLKKSVEVKYKCNECGRMFATHQALGGHRSSHNKFKISIENTIDGMKGRNQEENNSQDHGHQDVQLGNQEINNYGKIIINDNNNNVHKCKFCDKIFPTGQALGGHQRSHLTNNQEESSSQNASKVLDFDLNELPHLDDDTLL

SEQ ID NO: 45543 - protein, 368 aa, Glycine max
RARKMEMYQIWSRRIALAAFAFALLFQSASADDVVVLSEDNFEKEVGQDRGALVEFYAPWCGHCKKLAPEYEKLGSSFKKAKSVLIGKVDCDEHKSLCSKYGVSGYPTIQWFPKGSLEPKKYEGPRTADSLAEFVNTEGGTNVKIATAPSNVVVLTSENFNEVVLDETKDVLVEFYAPWCGHCKSLAPTYEKVATAFKLEEDVVIANLDADKYKDLAEKYDVSGFPTLKFFPKGNKAGEEYGGGRDLDDFVAFINEKSGTSRDVKGQLTSQAGIVESLDVLVKEFVAASDEEKKFVFTRMEEEVEKLKGSASRHGKIYLKAAKNYLEKGSDYAKNEIQRLQRILDKSISPAKADELTLKKNILSTYAA

SEQ ID NO: 45544 - protein, 450 aa, Methanosarcina barkeri str. fusaro
MENKYDIIIIGTGTAGRTFAGKVAHSGLKIAIVDSREYGGTCPIRGCDPKEVLTNITKVIDSSNRLMGKGVRIDAPLKLDWTSLIKFKKTFTEGYSSKTEKHLVGMGIDTYHGRAHFENQNTVVVGMDKLKGEHIFLATGAKPRTLNIPGEEYIITSEKLMETKKLPEKIIFIGGGYISMEFAHIARRTGAEVTILQRSEKVLRAFDSDMVDLLMKASKAAGIKILTNKPVISVEKDNNGLILKVQSQSETEPEIQIFRADMVVQGAGRVADIEDLRLENARIKTEKGAIVVDKHMRTSNSRIYAGGDCALEGMQLTPVAALQGEVAAINVLEGDSAEADYTGIPSAVFTIPVLASVGISVAKDDDKYKVIFQDRSNWYTTRKKGMEFAASKVIIDEANDRIMGAHILGPNAEEAINIFASVMRLGLKASDIKKLIFTYPTTCSDIPYML

SEQ ID NO: 45545 - protein, 471 aa, Arabidopsis thaliana
MAMSDLPNDLVEEIISRVPVKSIRAVSSTCKNWNTLSNDHSFTRKLFGKTITTKENECLVVMMMDSKVYLMSVNLHRIHKENDDNNIKSSIMHKAKLISLNDDDILNNTYIIFHCNGLLLLLGFTDDGIKLVVTNPHLGQTRWIKPRKANYQFCDKYAIGYEKKKNNSLRTNKMLLFHKESFCFRIYWFEIYNFNSASWNVFYFTRDWELPYSQGVSLKGNTYWFAREINIRGERIDDPPDFLICFDFTTERFGPRLHLPFHSHSDDTVILSSVREEQLAVLIKRFDLWRMEIWVTTKIEPKEVSWNKLFLAVDMIPLITAFQFCNVSFFIDEKKNVVVVLGKDVLNTRNIANIIGNDGYFKQVDLGESTNKYCYPLVCSYVPSSVQIKQATRVMHHHHIVLRAVVRAVRDSDRERKLNNGREHKISRRTRIHERILFRMLKLDEEAIGIRSRSVPRDRYQQGFASSPCRA

SEQ ID NO: 45546 - protein, 199 aa, Brassica napus
MSGSRFVKCVTVGDGAVGKTCLLISYTSNTFPTDYVPTVFDNFSANVVVNGATVNLGLWDTAGQEDYNRLRPLSYRGADVFILAFSLISKASYENVSKKWIPELKHYAPGVPIILVGSKLDLRDDKQFFVDHPGAVPITTAQGEELRKLIDAPTYIECSSKSQENVKAVFDAVIRVVLQPPKQKKKKSKTQKACSIPVI

SEQ ID NO: 45547 - protein, 760 aa, Candida albicans SC5314
MIMNMTTDYRDPLLDLFGTESNSGNETSSPSDIPVINRSGTFNQQQFSPLLTQQSLYNTPNSGSTPNIFDPNYTQMQEEQTSPSSNKLQPEDPPRKKRNTRSQTKIHQQSEGDEYNSNDYKDSIDLDKPPVVEPSPPFFVESDTTPEFVIPTPTSEQQQQQHHELIAQDYQRSNNSNQFGNLTHYEPNLPPLPPLSESILPQTNTFHPLVLPHDPRHAITAGPANNSQQQQQRQQQDSSIPSDGISSKIQQLHAPSLSNNQSASQRKKKESSGPKTRPAFVMKIWSMVNDPANHEYIRWNDDGKTFQVFHREDFMKVILPKYFKHNNFASFVRQLNMYGWHKVQDVANGTLNQNSDKNGQDEIWQFENPNFIKDREDLLDKIVRNKSSSNQDDVSGVSFNGINNSANLSLILQELETIKMNQYVISEDLRRVRQDNKMLWQENYLNRERNQVQGRTLDKILKFLSVVYGNNANKILNGHGFADFSDSNNIMTQYRPSPMGSPLLSRPQTQPPPSNSRFARDNNQTAQPTYESPLSTSDTNNNNNNTFEYQQAVNRPRLMLTNRAHSRRPSMSRTKSTPEGSIEEIIRSYSNDKAAESNVNRMYEQLVGHQPGATTNNNNHSSSTAISAPSPRHSFLQELNLPGTPRNLDDLEKHINKEGQSIQQVQDWIDKLAQEQHEKQQQQQGNDDDDDFDVNEFLKDATTTPSSNVPNGGHYNNGNISFVGSPIAMTPGSNVSSNINDSDGNEKKSKKRSIEEVSDH

SEQ ID NO: 45548 - protein, 178 aa, Mycoplasma gallisepticum R
MKDKGLALRFLISLERKEMVKKIYLAGGCFWGVEEYFKRTKRIIDSSVGYANYKPEFRNPTYKEVCSGLTGGVETVEITYDDQIISLEEIIDHFLKVVDPTTLNYQKNDRGTQYRSGFYFVNDDDETVIKSKLAQAQGRYSKPIVTEVLKLQNFSKAEDYHQDYLEKNPGGYCHIKFE

SEQ ID NO: 45549 - protein, 184 aa, Synechococcus elongatus PCC 6301
MLKLYGSARTRASLVAWYLEELGQPYESVAVDMAAGEHRQPTFLSLNPFGKVPALVDDAFTLWESGAILLYLAEKFGELQTPQDRAIAAQWVLFANATLGPGLFVEANRAKEAPRLLGSLNTLLSQREYLVSDRLSVSDVAVGSYLAYVPMFFPDFDLSPYPAVQDYIRRLTQRPAYQQSIGRR

SEQ ID NO: 45550 - protein, 451 aa, Photobacterium profundum SS9
MAKHFDYICIGGGSGGIASANRAAMHGAKVALIEAKALGGTCVNVGCVPKKVMWHGAQIAEAIHLYSKDYGFDVDVKSFNWSTLVKNREAYIGRIHQAYDNVLGKNKIEVINGFAKFVNDKTIEVNGEQLTADHILIAVGGEPTIPNIPGAEHGIDSNGFFGLNEQPKRTAVIGAGYIAVEIAGVLSALGTDTHLFVRKESPLRSFDPLIVETLVEVMNAEGPTLHTHSVPKEIIKEADGSTTLHFENGESHNTDLLIWAIGRNPTTDKINLASTGVETNSRGYIKVDEYQQTNVAGIYCVGDIMEGGVELTPVAVKAGRQLSERLFNGKTEAKMDYKLIPTVVFSHPPIGTIGLTEPEAIAQYGEDNVKVYTSGFTAMYTAVTSHRQPCKMKLVCAGPEETVVGLHGIGFTVDEMIQGFGIAIKMGATKADFDSVVAIHPTGSEEFVTMR

SEQ ID NO: 45551 - protein, 470 aa, Vibrio vulnificus CMCP6
MKKTKIVCTIGPKTESVEKLTELVNSGMNVMRLNFSHGDYVEHGTRIANFRQVMENTGKQLAILLDTKGPEIRTIKLENGDDVDLVAGQEFTFTTDTSVVGNKDIVAVTYPGFAADLSAGNTILVDDGLIEMEVIATTATEVKCKVLNNGALGENKGVNLPGVSVNLPALSEKDKNDLKFGCEQGVDFVAASFIRKASDVKEIREVLAANGGANIQIISKIENQEGVDNFDEILELSDGIMVARGDLGVEIPAEEVIFAQKMMIEKCNRARKVVITATQMLDSMIKNPRPTRAEAGDVANAIMDGTDAVMLSGETAKGKYPVEAVTIMAQIANRTDSVLKAELGSRLDSPRLRITEAVCKGAVDTAEKLAAPLIIVATEGGKSARSVRKYFPTANILALTTNKKTAAQLVLTKGVTPVVVDSIDNTDAFYVTGKELALESGLGSKGDIVVMVSGALVASGTTNTASVHVL

SEQ ID NO: 45552 - protein, 140 aa, Ralstonia solanacearum
MSQLRRYDPFAIEPAGDIFQGLLRSFRGGMDSALPFKVDVTESDTAYSVVAEIPGAKKEDIDVTVDRGTVMISAKVERQSEKKEGERVIRSERYSGSMQRMFTLEAGVDENKVEATYESGLLRVTLPKKEVSPQQRITIR

SEQ ID NO: 45553 - protein, 420 aa, Neisseria meningitidis Z2491 [sequence omitted]

SEQ ID NO: 45554 - protein, 369 aa, Neisseria meningitidis Z2491
MKYKRIVFKVGTSSITHSDGSLSRGKIQTITRQLAALHHAGHELVLVSSGAVAAGFGALGFKKRPVKIADKQASAAVGQGLLMEEYTANLSSDGIVSAQILLSRADFADKRRYQNAGGALSVLLQRRAVPIINENDTVSVEELKIGDNDTLSAQVAAMIQADLLVLLTDIDGLYTGNPNSNPDAVRLDKIEHINHEIIEMAGGSGSANGTGGMLTKIKAATIATESGVPVYICSSLKPDALAEAADNQADGSFFVPRAKGLRTQKQWLAFYSESRGGVYVDEGAEHALSEQGKSLLMSGIAGIEGHFSRMDTVTVYSKATKQPLGKGRVLFGSAAAEDLLKLRKAKGVFIHRDDWISITPEIRLLLTEF

SEQ ID NO: 45555 - protein, 429 aa, Saccharomyces cerevisiae
MSALRNIKFNEEEDGELPCLVTGEENNLQEILENVSYDGGNIVSDAKVERVNKQVENTSAGATDVHEKKRIPVSIITGYLGSGKSTLLEKIALKGADKKIAVILNEFGDSSEIEKAMTIKNGSNSYQEWLDLGNGCLCCSLKNIGVKAIEDMVERSPGKIDYILLETSGIADPAPIAKMFWQDEGLNSSVYIDGIITVLDCEHILKCLDDISIDAHWHGDKVGLEGNLTIAHFQLAMADRIIMNKYDTIEHSPEMVKQLKERVREINSIAPMFFTKYSDTPIQNLLDIHAYDSVRISDILDSGSGNGTIHDDRMGTIMLTFRPLKNEEEYNNKFIKQFLQPLLWKNFGAMTVLGGRRRDDGRDWEVQRTKGLILIEGENPIARVIQGVRDTYDVFPGKYDGSNKECKIVLIGKYLEKESIEELLRKTLE

SEQ ID NO: 45556 - protein, 601 aa, Vibrio vulnificus CMCP6
MANLDFHIVKRIRKQIAQGAERVALKHKVGAVWQGISWKQFGQQIDELSLALLAQGIEVQDKIAIFSNNMPQWTVADFAALQLRAVTVPIYPTNTAAQAAYILQNADVKVLFVGEQPQFDAAVKIFDECEQLNLIVAMSDDIDLGEHHFAIHWKAFIQQGQQEARAELERRLEQANFEDLLTLIYTSGTTGQPKGVMLDYANIAAQLEGHDRRLSLTENDVSLCFLPLSHVFERAWTFYVLYKGGTNCYLQDTMQVRDALSDIKPTVMCAVPRFYEKIFSAIHEKVSRAPLMRKIMFTWAVNMGAKMSVCHQEGRQPSLMLKKAHALADKLVLSKLRALLGGNINFMPCGGAKLDETIGRFFHAIGINVKLGYGMTETTATISCWDDKCFNPDSIGMSMPGAQVKIGENNEILVRGPMVMRGYYKLPEETEKTFDEHGFLKTGDAGHIDEHGNLFITDRIKELMKTSGGKYIAPQMIEGAIGKDHFIEQIAVIADTRKFVSALIVPCFDSLEEYAKELNIKYHDRVELIKHHQVVEMLEKRVNDLQKELAKFEQVKKFKLLPKAFSMDEGELTPTQKLRRKVINDKYQDEIEEMYSEKKEK

SEQ ID NO: 45557 - protein, 1579 aa, Saccharomyces cerevisiae
MSHSDYFNYKPYGDSTEKPSSSKMRQSSSSSSSRLRSESLGRNSNTTQARVASSPISPGLHSTQYFRSPNAVYSPGESPLNTVQLFNRLPGIPQGQFFHQNAISGSSSSSARSSRRPSNIGLPLPKNPQQSLPKLSTQPVPVHKKVEASKTESEIIKKPAPVNSNQDPLLTTPTLVISPELASLNTTNTSIMSTPQNITNQTSNKHIPTRSQPNGSTSSSTLQDIVTTNSSQRSVGHHGGSTTSLRTYKKQYVLNEQLYLRKMRNRANDDYYTRGIVASSNFEDDEENFSNKGEDDLELEMDDLLKVEGEDKDNDFNFGYNFITSSTKNNENVVSMSLNYLKGKLDWLRDVNNDQPCEIEDEEWHSILGSEDLLSKLLQNPMVNNRFEWQTMLSKVLKGDIVRNEKTKIANQGKGPGFNTQFSDDIWIELKAWMNGRTVEDQNKSLRIFRDSTDSVFQEIMAFKLEDNMSADEAAETIKSLVDKYYRVLNLWPNIKRMHAEKPITKTEAFRNRIDTLNSWLNFKFNFDTNIAYLKKWIVGNKELESTTEVDNTTVNLDDPAVFATNCKRFAEQIMKEKDIELIFQKKIFFPLAPWILKAKFFFLKYQKTWNELNLSYLDQDLEFLLMFPMRLVKDIILIRLSYAKKIQNPTLMMIDQMMDDFSTYIKLAVQMKFTVASYCNDWFFKVKIDPEFDHTVVEGLEYFFSILELRILYSGKNSFKTSKEPDLLLKYWEMFRNVGYYIDDAGELIAAEFTKLTLRLVHRLHAYLLRQQNTPPKLENEAAAEKWLVQIFEILGSMKRKLNRFTNILTKAFQNFVRYKIEDHNYLLKQLKETGHFLIYTGGYLEQNGTYLIGSPELLGCKDDDILRIIKNSDIGCDLVPKLEINNSLTIYNALDDNWNSNSSLGSDISNDGTPFYYIKNDLTTQPRSYNGNRVNREPDFENSRSTEEEFYELETRLNSLGYVLVLTPQEPLLWEGEMYNLSDNKTIKPEGLNLKVIPNSIDLMCQGSSYALEYQCDRFQQISGSSVSFLEKKSSSETVKNNLQRINKAYFRCTYSVLKNYTKIVTTFKKVSPVNDLLNNIFLFGRDFGLNFLRINVANNEKRSIIILLMMRLSIGWLKFLAEDCDPTDQRVFRWCVTSMEFAMHMVSGWNILALDECQFSSLKQKISECMSLLISHFDIIGARSIEVEKINQQARSNLDLEDVFDDDMMLQVNSEFRVQSIMELEERIKRNPHQTGKVIDDSDKGNKYLVSLASSISNVSMRWQKRNFIGGGTFGRVYSAVDLDNGEILAVKEINIQDSKSMQKIFPLIKEEMSVLEILNHPNIVSYYGVEVHRDKVNIFMEYCEGGSLAALLEHGRIEDEMVTQVYTLQLLEGLAYLHESGIVHRDVKPENILLDFNGVIKYVDFGAAKKIANNGTRLASMNKIENADGEHEDVTHVSDSKAVKNNENALLDMMGTPMYMAPESITGSTTKGKLGADDVWSLGCVVLEMITGRRPWANLDNEWAIMYHVAAGHTPQFPTKDEVSSAGMKFLERCLIQNPSKRASAVELLMDPWIVQIREIAFGDDSSSTDTEERE

SEQ ID NO: 45558 - protein, 131 aa, Saccharomyces cerevisiae
MSAKAEKKPASKAPAEKKPAAKKTSTSTDGKKRSKARKETYSSYIYKVLKQTHPDTGISQKSMSILNSFVNDIFERIATEASKLAAYNKKSTISAREIQTAVRLILPGELAKHAVSEGTRAVTKYSSSTQA

SEQ ID NO: 45559 - protein, 222 aa, Pinus resinosa
MGRGKIEIKRIENTTNRQVTFCKRRNGLLKKAYELSVLCDAEVALIVFSSRGRLYEFANHSVKRTIERYKKTCVDNNHGGAISESNSQYWQQEAGKLRQQIEILQNANRHLMGDGLTALNIKELKQLEVRLEKGISRVRSKKNEMLLEEIDIMQRREHILIQENEILRSKIAECQNSHNTNMLSAPEYDALPAFDSRNFLHANLIDAAHHYAHQEQTTLQLG

SEQ ID NO: 45560 - protein, 315 aa, Glycine max
MAKDIRFFDLNTGAKIPSVGLGTWQSDPGLVAEAVAAAIKVGYRHIDCAQIYGNEKEIGSLLKNLFEEGVVKREDLWITSKLWNTDHAPEDVPLALDRTLKDLQLDYVDLYLIHWPAPMKKGSAGFKPENLVQPNIPNTWKAMEALYDSGKARTIGVSNFSTKKLSDLLLIARVPPAVNQVECHPSWQQDKLQAFCNSKGVHLSGYSPLGSPGTTWLKSDVLKHQVINMIAEKLGKTPAQVALRWGLQMGHSVLPKSTNETRIKENFDVFGWSIPEDLLAKFSEIQQARLLRGTTFAHETYGAYRSLEELWDGEI

SEQ ID NO: 45561 - protein, 262 aa, Thermosynechococcus elongatus BP-1
MLSRPLRHPLWMPAPMHPLDSPQLITLDAVGTLFGLQESVGTVYGRFAAEVGVQVDPAALDVAFFKAFRAAPPCAFPELEASQRPEAEWRWWQGVAVETFRRTGVLDQFADFEAFFAPVFAYYATAEPWCLYEDVLPALQDWQAQNIPLMVVSNFDSRLYGVLEALGLAPFFQAVWISSEVGAAKPDRLIFERAVASYGASQVWHIGDSWEEDVRGAQGAGLQAIWLRRDRPLLPEPAINESVAVPQIADLTEVQVILRGTA

SEQ ID NO: 45562 - protein, 753 aa, Escherichia coli O157:H7 EDL933
  misc_feature (621)..(621): Xaa can be any naturally occurring amino acid
  unsure (1)..(753): unsure at all Xaa locations
MSQQNEKNPHQHQSPLHDSSEAKPGMDSLAPEDGSHRPAAEPTPPGAQPTASGSLKAPDTRNEKLNSLEDVRKGSENYALTTNQGVRIADDQNSLRAGSRGPTLLEDFILREKITHFDHERIPERIVHARGSAAHGYFQPYKSLSDITKADFLSDPNKITPVFVRFSTVQGGAGSADTVRDIRGFATKFYTEEGIFDLVGNNTPIFFIQDAHKFPDFVHAVKPEPHWAIPQGQSAHDTFWDYVSLQPETLHNVMWAMSDRGIPRSYRTMEGFGIHTFRLINAEGKATFVRFHWKPLAGKASLVWDEAQKLTGRDPDFHRRELWEAIEAGDFPEYELGFQLIPEEDEFKFDFDLLDPTKLIPEELVPVQRVGKMVLNRNPDNFFAENEQAAFHPGHIVPGLDFTNDPLLQGRLFSYTDTQISRLGGPNFHEIPINRPTCPYHNFQRDGMHRMGIDTNPANYEPNSINDNWPRETPPGPKRGGFESYQERVEGNKVRERSPSFGEYYSHPRLFWLSQTPFEQRHIVDGFSFELSKVVRPYIRERVVDQLAHIDLTLAQAVAKNLGIELTDDQLNITPPPDVNGLKKDPSLSLYAIPDGDVKGRVVAILLNDEVRSADLLAILXALKAKGVHAKLLYSRMGEVTADDGTVLPIAATFAGAPSLTVDAVIVPCGNIADIADNGDANYYLMEAYKHLKPIALAGDARKFKATIKVADQGEEGIVEADSADGSFMDELLTLMAAHRVWSRIPKIDKIPA

SEQ ID NO: 45563 - protein, 128 aa, Xenorhabdus nematophila
MAYSDKVIDHYENPRNVGSFDSEDPSVGSGMVGAPACGDVMRLQIKVNNEGIIEDARFKTYGCGSAIASSSLVTEWMKGKSLEQAEAIKNTQIADELELPPVKIHCSILAEDAIKAAIADYKSKRQAK

SEQ ID NO: 45564 - protein, 352 aa, Vitis vinifera
MKASLFRSAETALRRVSSPSASSHLLRRSYCVESKPERKVAVLGAAGGIGQPLALLMKLNPLVSSLSLYDIAGTPGVAADVSHINTRSQVAGYMGDDQLGQALEGADLVIIPAGVPRKPGMTRDDLFNINAGIVKSLCTAIAKYCPNALVNMISNPVNSTVPIAAEVFKKAGTYDEKKLFGVTTLDVVRAKTFYAGKAKVPVAEANVPVVGGHAGITILPLFSQATPKSNNLSDEDIVALTKRTQDGGTEVVEAKAGKGSATLSMAYAGAVFADACLKVLNGVPDVVECSFVQSTIVPDLPYFASKVKLGKNGVEEVLGLGPLSDYEKQGLESLKHELKASIEKGIKFATQS

SEQ ID NO: 45565 - protein, 410 aa, Streptococcus pyogenes MGAS10394
MTFKRVVVTGYGLTSPIGHDPETFWNNLKAGQIGIGPITKFDTTDYAVKNAAEIQDFPFDKYFVKKDLNRFDRYSLYALYAAKEAINHADLNIEMIDSDRFGVIVASGIGGIAEIEEQVIRLHEKGPKRVKPMTLPKALPNMAAGNVAMSLKAQGVCKSINTACASSNDAIGDAFRAIKFGTQDVMIVGGSEAAITKFAIAGFQSLTALSTTEDPSRSSIPFDKDRNGFIMGEGSGMLVLESLEHAQERGATILAEIVGYGNTCDAYHMTSPNPEGLGARKAIHLALQEAGIEASAINYVNAHGTSTPANEKGESQAIVAVLGKDVPVSSTKSFTGHLLGAAGAIEAIATIEAMRHNYVPMTAGTQALSEDIEANVIFGEGKETAINYAISNTFGFGGHNAVLAFKCWEE

SEQ ID NO: 45566 - protein, 197 aa, Brassica napus
MSASRFIKCVTVGDGAVGKTCLLISYTSNTFPTDYVPTVFDNFSANVVVNGATVNLGLWDTAGQEDYNRLRPLSYRGADVFILAFSLISKASYENVSKKWIPELKHYAPGVPVILVGSKLDLRDDKQFFVDHPGAVPITTAQGEELRKLIDAPTYIECSSKSQENVKAVFDAAIRVVLQPPKQKKKKSKAQKACSIQ

SEQ ID NO: 45567 - protein, 340 aa, Zea mays subsp. parviglumis
MGRAPCCEKVGLKRGRWTKEEDQILANYIAEHGEGSWRSLPKNAGLLRCGKSCRLRWINYLRADVKRGNISKEEEDVIIKLHATLGNRWSLIASHLPGRTDNEIKNYWNSHLSRQIHTYRRKYTAGPDTAPIAIAIDMSKLRSAETRRGGRTPGRSPKSASSSSMTKSKQPDPEPEPESGGASSPRHSDGARSAVVDPDPDPNQPNSSSSGSTGEGEDATGPWLLDPVELGDLWEAESEMDALMSIGGNAHDSATAEGFDAAQAQAQVDDLFDDMDWDNFAAHLWGEPEQQTDHSAQPQPQQAAEPQAAAAAAAAAEAVACDPDEHELEALETWLLSDSF

SEQ ID NO: 45568 - protein, 197 aa, Brassica napus
MSGFRFVKCVTVGDGAVGKTCLLISYTSNTFPTDYVPTVFDNFSANVVVNGATVNLGLWDTAGQEDYNRLRPLSYRGADVFILAFSLISKASYENVSKKWIPELKHYAPGVPIILVGSKLDLRDDKQFFVDHPGAVPITTAQGEELRKLIDAPTYIECSSKSQENVKAVFDAAIRVVLQPPKQKKKKSKAQKACSIQ

SEQ ID NO: 45569 - protein, 93 aa, Streptococcus gordonii
MLKPLGDRVVLKIEEKEEKVGGFVIAGNSHAATKTAAVVAVGQGVRTLTGELVAPSVKAGDKVLVESHAGVEVKDGEETYLLVSEANILAIVE

SEQ ID NO: 45570 - protein, 540 aa, Streptococcus gordonii
MAKDIKFSADARSAMVRGVDILADTVKVTLGPKGRNVVLEKSFGSPLITNDGVTIAKEIELEDHFENMGAKLVSEVASKTNDIAGDGTTTATVLTQAIVREGIKNVTAGANPIGIRRGIEAAVATAVSALKETAIPVSNKEAIAQVAAVSSRSEKVGEYISEAMEKVGNDGVITIEESKGMETELDVVEGMQFDRGYLSQYMVTDSEKMVADLDNPYILITDKKISNIQEILPLLESILKTNRPLLIIADDVDGEALPTLVLNKIRGTFNVVAVKAPGFGDRRKAMLEDIAILTGGTVITEDLGLDLKDATIEALGQASKVTVDKDSTVIVEGSGNPEAIANRVAVIKSQIESATSEFDKEKLQERLAKLSGGVAVIKVGAATETELKEMKLRIEDALNATRAAVEEGIVSGGGTAFVSVLDAVAGLELTGDEATGRNIVLRALEEPVRQIALNAGFEGSIVIDRLKNSEAGTGFNAATGEWVNMIEAGIIDPVKVTRSALQNAASVASLILTTEAVVANQPEPASPAPAMDPSMMGGMM

SEQ ID NO: 45571 - protein, 887 aa, Vibrio cholerae O1 biovar eltor str. N16961
MDVIFFQGRMTMNEKYAALKSNVSMLGRLLGQTIQAADGDVILAKVETIRKLSKSARAGNQADRELLIEEIKNLPNHQLTPVARAFNQFLNLTNIAEQYHTISRHCESHVNELDAIGSLFAKLAQKSVSKFDTAQAIRDLNIELVLTAHPTEITRRTMINKLVKINECLSKLELSDLSPKERHKTERRLEQLIAQSWHSDVIRQQRPTPLDEAKWGFAVVENSLWHAVPEFLRELDEQVKSYLGEGLPIDARPVHFSSWMGGDRDGNPFVTHTITREVLLLSRWKAADLYLTDINELVSELSMTKCNEAVRALAGEEHEPYRAILKPIRSLLQETIEILDAKLNGQKLAVKAPLQTADQLWEPLYACYQSLHECGMGVIADGSLLDTLRRIKAFGVHLVRLDVRQESSRHAEVISELTRHLGIGDYNQWSEQDKIAFLTTELNSKRPLLPRDWQPSPQVKEVLDTCKIIAAQSKDAFGAYVISMARTASDVLAVHLLLQEAGCPYRMDVCPLFETLDDLNNAESVIRQLMNIDLYRGFIQNHQMVMIGYSDSAKDAGVMAAGWAQYRAMEALVKVGEEAGIELTLFHGRGGTIGRGGAPAHAALLSQPPKSLKGGLRVTEQGEMIRFKLGLPEVAVNSFNMYASAILEANLLPPPEPKNEWRALMDILSEISCNAYRKVVRGEPDFVPYFRQATPELELGKLPLGSRPAKRNPTGGVESLRAIPWIFSWSQNRLILPAWLGAGEAIQIAINEGHQALLEEMCREWPFFSTRLGMLEMVYTKCSVSIACHYDERLVEPTLRPLGEKLRAQLQQDIKVVLNVENNENLMQSDPWGQESIRLRNIYIEPLNMLQAELLYRTRQSELPAPELEEALMVTIAGIAAGMRNTG

SEQ ID NO: 45572 - protein, 197 aa, Brassica napus
MSASRFIKCVTVGDGAVGKTCLLISYTSNTFPTDYVPTVFDNFSANVVVNGATVNLGLWDTAGQEDYNRLRPLSYRGADVFILAFSLISKASYENVSKKWIPELTHYAPGVPIVLVGTKLDLRDDKQFFVDHPGAVPITTSQGEELMKLIGAPSYIECSSKSQENVKGVFDAAIRVVLQPPKQKKKKSKAQKACSIL

SEQ ID NO: 45573 - protein, 466 aa, Myxococcus xanthus
MNESLRGTVLLVDDDPAVAKVLGALLTQAGLTTHAARDGQEALALLASKPVDVVVSDVRMPGMDGLQVLAEVARGWPDVPVILLTAHGTVPLAVEAMKAGAADFVLKPFDREEILFTVRKALLRAQGEEARQQVRPTGGFIGRSRAMADVQAVLAKAAAGTATVLLRGESGTGKELAAKAVHDASPRRDGPFVKLHCAALPDTLLESELFGYEKGAFTGAATRKPGRVELAHGGTLFLDEVGDISPAVQVKLLRVIQERELERLGGTQTVKVDVRFVAATHQPLEERVKEGRFREDLFYRLNVVPVWIPALRERPDDIEPLALHFLEVHAKTNGRPPFTLMTDGLAALRAQPWPGNVRQLQNFLERLVVLSDTQVIGGREVLQELARQPGLAPAPFAATPSVSALEAPTVPVTDSARTLESQRKEMERQAMADALKRAGDNRTLAARLLGISRRTLYNKLEEYGLL

SEQ ID NO: 45574 - protein, 315 aa, Arabidopsis thaliana
MANAITFFKLNTGAKFPSVGLGTWQASPGLVGDAVAAAVKIGYRHIDCAQIYGNEKEIGAVLKKLFEDRVVKREDLFITSKLWCTDHDPQDVPEALNRTLKDLQLEYVDLYLIHWPARIKKGSVGIKPENLLPVDIPSTWKAMEALYDSGKARAIGVSNFSTKKLADLLELARVPPAVNQVECHPSWRQTKLQEFCKSKGVHLSAYSPLGSPGTTWLKSDVLKNPILNMVAEKLGKSPAQVALRWGLQMGHSVLPKSTNEGRIKENFNVFDWSIPDYMFAKFAEIEQARLVTGSFLVHETLSPYKSIEELWDGEI

SEQ ID NO: 45575 - protein, 620 aa, Candida albicans SC5314
MSGKKKENSFSNTDNAELQANAPSTPQNDSDSSVIVQPNIHNDIENQPTAEQNGFKESDAGDGTKKEDHYLHGVQLILCFLSLFLCLFLFALDQTIVVTILTTVGTKFDAFSKVGWLSSGFLLTMAVFIQFFGKLSIIIGRKWAMVIAIILFEAGSLMCALANDMNVLIGGRVLAGIGGSGINSSVFVIGSEVVPITRRPLALSIFSITFAVASVVGPLIGGAFTSKVTWRWAFYINLPIGGFATLVFLYAFRPPRPKVNVKQQLKQFDYFGTFLLIAGSVILLLAITFGTSDFPWDSAAVISCFVLGPVLLIAFVVWNFGFSKNQVISTEIVKVPQIIASTLAISGIFSAFIMFMIYGAIYFQVVKDASPLSAGLHLLPTIIAVVLSSMLSGLLVQKFKFVKPYNVISGILGPIGCGLITLLEVDSNFSQQVGLLIILGVSAGLQMQPSFLSAQIKAPKTPSGMIMTTTFINFSRSILSAFGAVLADAVYTTSLKNIYSKAVKKVTNPVILQDLQKFSLSQLTSSTALLKTLHPETEHFVKTQIMNAIRNVFYMAIGFSAITFFAAFFVTNERLPKNVEKPEEQSNEKETKESDSSASDVSQPKETEEDEVRNEEPERI

SEQ ID NO: 45576 - protein, 331 aa, Edwardsiella tarda
MTIKVGINGFGRIGRFVFRAAQERNDIEVVGINDLIDVDYMAYMLKYDSTHGRFNGTVEVEGGNLIVNGKTVRVTAERNPEDLKWDEIGVDVVAEATGLFLTDETARKHITAGAKKVVLTGPSKDATPMFVNGVNFDTYAGQDIVSNASCTTNCLAPIAKVLNDKFGIESGLMTTVHATTATQKTVDGPSAKDWRGGRGASQNIIPSSTGAAKAVGVVLPEVNGKLTGMAFRVPTANVSVVDLTVNLVNGASYEDICKAMKEASEGELKGVLGYTEDAVVSQDFIGEVCTSVFDAKAGIALTDKFVKVVSWYDNEIGYSNKVLDLIAHISK

SEQ ID NO: 45577 - protein, 648 aa, Nicotiana tabacum
MVDLLGSNSQLKHFEGDNALCREIWRACSGSLLDVPKLGERVHYFPRLHMDQLEQSSNLEWIQGLQLSHLPRKILCRVLHIRLLVEHDTEEVYAETILLPNQEQNEPSTPEFCPLEPPRPQYQSFCKALTTSDIKSNWGLSVHRKDANKCFPPLDMMQEKPTQELIVNDLQGNEWRFKHVFQGQPRRHLLKHGWSTFVTSKKLLAGDLVVFLRDETGKLHVGIRRLSYQCNSVGSSTFSRQSMEGVLAVASHAFATRSLFSVYYKPCYNRSSQFIMSLSNYFEGGNHGPGVGTISRTQHTSLDSHVKRTSGMDQMSFPQGQHKTNLLLEEDQYMQDSEAISNSARPTMMALEIGQQSVESLNNIHHIEDSVLQPHTAVARENNERFIPNETVAIQAQDENFDELFKETDFPDFVNTSLDTITLDWDSDLRSTIQDFDEWLEETNPPGLQTCSEDHSRQTSSILEQPTSSQVMSISSTPSRIPYEGPGRGDEQVPWGSYQVARRCLPILNRVVSRYPDSLVNFKVTSSIFQSVCLEILAELVYFLDNLTVMNLSKDQFNVAGQHLWDLKLSGIELGWLEKRLAHIDGAFSMENLLQRRQVVTLRMGDTLATFRQLDEELGCINKELHQLSLKVGPNPPMRFHPVLEGLL

SEQ ID NO: 45578 - protein, 216 aa, Bacillus clausii KSM-K16
MMNEEIHDYVTSLLPKRSPLVLEMEQYAKDNNVPIMELVALEAMLLLLVAKQPKTILEIGTAIGYSAIRMAEALPQTQITTIERDDVRFHQAQAYIQRAGLQDRIHLIHGDATNGVDLVVHSTPFDVLFIDAAKGQYQTFFELYTPKLADSGLVISDNILFRGLVAKEDLSSQPKRLQKLAIKIKRYNEWLSNHPDFTTRILPIGDGMACSMKIRT

SEQ ID NO: 45579 - protein, 285 aa, Zea mays
MAKDVEGAEGFAARDYEDPPPTPFFDAEELTKWSLYRAVIAEFVATLLFLYVTVLTVIGYKISSDTKAGGDECGGVGILGISWAFGGMIFILVYCTAGISGGHINPAVTFGLFLARKVSLVRAVLYMVAQCLGAICGVGFVKAFQSSYYVRYGGGANSLADGYSTGTGLAAEIIGTFVLVYTVFSATDPKRNARDSHVPVLAPLPIGFAVFMVHLATIPITGTGINPARSFGAAVIYNESKPWDDHWIFWVGPFIGAAIAAFYHQFVLRASGSKSLGSFRSAANV

SEQ ID NO: 45580 - protein, 527 aa, Oryza sativa
MDKAYIAVFSIAILFLLVDYFRCRRRRGSGSNNGENKGMLQLPPSPPAIPFFGHLHLIDKPLHAALSRLAERHGPVFSLRLGSRNAVVVSSPECARECFTDNDVCFANRPQFPSQMPATFYGAGFGFANYGAHWRNLRRIATVHLLSAHRVRGMAGVVSGEIRPMVQRMYRAAAAAGVGVARVQLKRRLFELSLSVLMEAIAQTKTTRPEADDADTDMSVEAQEFKNVLDELNPLLGAANLWDYLPALRVFDVLGVKRKIATLANRRDAFVRRLIDAERQRMDNGVDGGDDGEKKSVISVLLSLQKTEPEVYKDIVIVNLCAALFAAGTETTAMTIEWAMSLLLNHPKILKKAKAEIDASVGNSRLINGDDMPHLSYLQCIINETLRLYPVAPLLIPHESSADCKVNGYHIPSGTMLLVNVIAIQRDPMVWKEPNEFKPERFENGESEGLFMIPFGMGRRKCPGETMALQTIGLVLGALIQCFDWDRVDGAEVDMTQGSGLTNPRAVPLEAMCKPREAMSDVFRELL

SEQ ID NO: 45581 - protein, 463 aa, Yarrowia lipolytica CLIB122
MLRAVSNHACLRQALSSTRTLRTGLQKHVHKTQFVSVRHVSTTKPTERAEVEKPIVQNGELVFPGALRTSFVNNMTFVDPTTQDSMPTYRVVGPDGVQIDKSYKIDLPVDTILKMYKDMVTVSIMDAIMFDAQRQGRLSFYMVSAGEEGMAVGSAAALKPQDHVYSQYREQGAYMYRGFTLDDFMNQLYGNKHDQGKGRNMPVHYGSRELNMHTISSPLATQLPHAAGTAYAQKMAGVDGVTLCYMGEGAASEGDFHAALNIAATRNCPVIYFCRNNGYAISTSAIEQYKGDGIASRAIGYGIETIRVDGNDIFAVHRATKKAREIALRDQKPVLIEGMSYRVSHHSTSDDSFAYRSRGEVESWQRKDNPIVRLRKWLELNKHWNEEEEQKFRTQARKDILTAFSKAEKVKKPEIVSAFTDCWEDIPPHLKEQQQELGEILDTYPEHFDLSAFEGGRGGLHDK

SEQ ID NO: 45582 - protein, 172 aa, Ashbya gossypii ATCC 10895
MSQFVRTVHSRVGREKQRYSALTGARLVAGCVALNEDKTKVIMIQSLAQGSNGNKWVLPKGGVELDEPDFRDSARRETWEEAGVVGEIVRYLGVIEDMRPPKNWSAGGAVHPPRSEFHFYEMRVQELADEYPEKHKRQRHWFTYSEAKTQLQLAKRPELLEALDRSAIVKYL

SEQ ID NO: 45583 - protein, 520 aa, Arabidopsis thaliana
MASVSAIGVLKVPPASTSNSTGKATEAVPTRTLSFSSSVTSSDDKISLKSTVSRLCKSVVRRNPIIVSPKAVSDSQNSQTCLDPDASSSVLGIILGGGAGTRLYPLTKKRAKPAVPLGANYRLIDIPVSNCLNSNISKIYVLTQFNSASLNRHLSRAYASNMGGYKNEGFVEVLAAQQSPENPNWFQGTADAVTDYLWLFEEHNVLEYLILAGDHLYRMDYEKFIQAHRETDADITVAALPMDEQRATAFGLMKIDEEGRIIEFSEKPKGEHLKAMKVDTTILGLDDQRAKEMPFIASMGIYVVSRDVMLDLLRNQFPGANDFGSEVIPGATSLGLRVQAYLYDGYWEDIGTIEAFYNANLGITKKPVPDFSFYDRSAPIYTQPRYLPPSKMLDADVTDSVIGEGCVIKNCKIHHSVVGLRSCISEGAIIEDSLLMGADYYETATEKSLLAAKGSVPIGIGKNSHIKRAIIDKNSRIGDNVKIINSDNVQEAARETDGYFIKSGIVTVIKDALIPTGTVI

SEQ ID NO: 45584 - protein, 240 aa, Halobacterium sp. NRC-1
MQAVVLAAGEGTRLRPLTEDKPKGMVEIAGKPILTHCFEQLVALGAEKIVAIVGYRKQNIISHYGDEFDGVPITYAHQREQNGLAHALLKAEEHVNEDFMLMLGDNIFRANLEDVVNRQQEERADAAFLVEEVDWDEASRYGVCDTNDYGEIQEVVEKPDDPPSNLVMTGFYTFSPAIFQACKLVQPSDRAEYELSDAIDLLIKSGRTIDAIPMEGWRIDVGYPEDRDEAEERIDAVSNE

SEQ ID NO: 45585 - protein, 384 aa, Xylella fastidiosa Ann-1
MTGIPPPSRFPEQPIPPWRRAVLKVGSSLLAADGGGLSPRFALDLAHFVSANITAGRQLVIVSSGAVAAGRALIPPLPESGGALAARQALAALGQAQLIALWQRFFDRPVAQVLLTHDDLRNRRRYLNARATLRELLHLGTLPVVNENDTVSVDELKLGDNDNLAAIVAALIDAQALFIATDIDGLYTTDPRHHPDAQPLHEVRTLTPEHLAMAGDSSSTGGTGGMRTKLEAALKAGAAGIDTYLFNGRSSDVVRGLAQHRLRGTRIHPTCTPIAARKYWLRHAPVEPGAILIDAGAAAALAQQGASLLPGGVLSAEGDFRRGDMIQIATRSPDHPSHPLARGLVQYSAADVRRIAGCHSRDIQTLLGYTYGDTIVHRDDLVLL

SEQ ID NO: 45586 - protein, 435 aa, Xylella fastidiosa Ann-1
MPHIRHLAQQCRDAARILATLSTDAKRRLLETMATALNTDAATILAANAADLDTARTQQVGTAMLDRLALDPQRLAAMADALRDIAALPDPVGQVTRDDRRPNGIHIQKIRVPLGVIAMIYEARPNVTADAAALCIKAGNGIILRGGSEAIRSNIAIATALQRALRLASLPETALILVQDMARHTMLELLQLSDLIDLVIPRGGEGLIRFVAEHARIPVIKHYKGVCHQFVDASADIEMAIRLLIDGKTTRPAACNALETLLVHTDIAPRFLPAAAAALRPYGVQLRGDHATCTLLPDVLLATDADYAAEYLDLILAIRIVPNLDAALEHIRRYGSDHTEVIVTADPAHADTFVQQLHSAVVMVNASSRFSDGGALGLGAEIGISTTRLHAYGPMGLDALTVERFVVRGQGQVRHCPLIHLHRDVSIANMPPITS

SEQ ID NO: 45587 - protein, 154 aa, Brassica napus
MDSSSSGTTSSTIQTSSGPEENLMEQRKRKRMLSNRESARRSRKKKQKLLDDLTAQVNQLRKENSEIVTSVSITTQHYLTVEAENSVLRAQLDELSHRLESLNDIIGFLDNTNGIWPNPLSGPESDDFLVSQLNMNMFHMMTQPLMASSDALLY

SEQ ID NO: 45588 - protein, 467 aa, Bradyrhizobium sp. BTAi1
MANYDLVVIGTGPGGYVCAIRAAQLGMKVAVVEKNATLGGTCLNVGCMPSKALLHASELFEEAGHSFAKMGIKVPAPEIDLPAMMNFKQQGIDGNVKGVEFLMKKNKIDVLQGKGKILGTGKVQVTGNDGTAQTVETKNIVIATGSDIARLKGIEIDEKRIVSSTGALSLDKIPSSLLVVGAGVIGLELGSVWRRLGAKVTVVEFLDRILPGMDLEIAKQFQRILEKQGFAFKLGAKVTGVDTSGATLAATIEPAAGGAAEKIEADVVLVAIGRVPYTDGLGLQEAGVVLDNRGRVQIDHHFATSVPGVYAIGDVVAGPMLAHKAEDEGVAVAEILAGQAGHVNYDVIPGVVYTTPEVASVGKTEDELKQAGVAYTVGKFPFTANGRSKVNQTTDGFVKILADAKTDRVLGAHIIGREAGELIHEAAVLMEFGGSAEDLARTCHAHPTRSEAVKEAALAVGKRAIHM

SEQ ID NO: 45589 - protein, 543 aa, Coxiella burnetii RSA 493
MPYPLPFPKTRESRPPGRPPVKRYPQIEGPLFIVSQSQQVFSDSKTWVDCIPRISPAEILCRFQQERTAPHFNLIHFISQHFEVPNPVERLLAFDPSHTMETYIQSLWPLLTYNADSAQPDYSSLIPLPHPYVIPGGRFREIYYWDSYFTAEGLACSDQLDLVINMAKNLAHLIETIGHIPNGNRIYYRSRSQPSFFGCLIEIIAQHQGVDAIKPFVRALEKEYRFWMAGEDRLTPQSPAHRRVVLLDDQCVLNRYWDNLSLPRPESYREDVLLYKQAAPLEKRHLYRNIRAACESGWDFSSRWMRDKERLTSIYTTELVPVDLNAILYHMEIKLADYFEHFSNRRKAEFFQRRAERRKQAIVQYCWDTDKQFYFDYCWTEKEKTASFTLAAAFPLFFKLASSFQAAAVTDKLIKDFFYPGGLVTTLDESAQQWDKPNGWAPLHWIAIKGLLNYGYETEAKIITERWLALNRQVFQRTGKMMEKYNVCDPHLKAGGGEYPLQDGFGWTNGIAVALNALFSQRWGEHLFTGFEIHQERRETHHY

SEQ ID NO: 45590 - protein, 530 aa, Glycine max
MVSACVTLKANTHLVKSRKDNTFRQDGGFLGERIKGGLNYSPWIINQLASTSSLRTQEKVNKAKPGVVSAVLTSSNIKESVAFQMPSFLRRKADPKNVVSVILGGGPGIQLFPLTKRAATPAVPVGGCYRLIDIPMSNCINSGLNKIFVLTQFNSASLNRHISRTYFGNGINFGDGCVEVLAATQTQGEAGNNWFQGTADAVRQFTWVFEDAKHTNIENVLILAGDHLYRMNYMDLVQSHVDRNADITVSCAAVGESRASDYGLVKADARGRIIQFSEKPNGADLKAMQVDTSVLGLPLHEAKRSPYIASMGVYVFKTDVLLRLLKWRYPTSNDFGSEIIPAAVRENNVQAYFFIDYWEDIGTIKSFYDANLALTEENPMFKFYDPKTPIYTSPRFLPPTKIDKCRIVDAIISHGCFLRECTVQHSIVGERSRLDYGVELQDTVMMGADYYQTESEIASLLAEGKVPIGIGRNTKIRNCIIDKNAKIGKDVIIMNKDGVQEADRPEDGFYIRSGITVILEKATIEDGTVI

SEQ ID NO: 45591 - protein, 430 aa, Staphylococcus epidermidis RP62A
MFERTVQPVLDVKDKPKPAQWAFLSLQHLFAMFGSTVLVPFLTHLPISAALLASGIGTLLYILITKAKIPAYLGSSFAFITPIITGLSTHSLGDMLVALFMSGLMYVIIGIFIKLSGTHWLMHLLPPVVVGPVIMVIGLSLAPTAVNMAMFENSAEMKGYNLSYLIVALITLAVTIIVQGFFKGFLSLIPVLIGIIVGYIVSIFMGIVKFAPIAQAKWIDFPHIYLPFKDYTPSFHLGLILVMIPVVFVTVSEHIGHQMVINKIVGRNFFENPGLDKSIIGDGVSTMFASMIGGPPSTTYGENIGVLAITKIYSIYVIGGAAVIAIILAFIGKFTALISSIPTPVMGGVSILLFGIIAASGLRMLVESQVDFSSNRNLVIASVVLVVGIGNLLINLKGIGINLQIEGMALSALSGIILNLILPKEKNQIN

SEQ ID NO: 45592 - protein, 459 aa, Xanthomonas campestris pv. vesicatoria str. 85-10
MMAARRSVSALLAAIATMSVPASAADRAAEPNTQVPAGSTHYVADGFPDRIVATPAQDAATGFAVAWRTDASVDRPWLELVVAGDSPDVGTPRRIRASTLTLASENGSSHHHRADVDGLQPDTMYAYRLQGQGTWGAWNHFRTAATATTPLTLLYFGDTQNKNLSLVSRVIRQAWRSAPDARLALFAGDLVSGKDGQDDNEWAEWFEAGRWLLEGTAVAPAPGNHEYHEEGEDTPQATRVLGSHWPVTFALPRNGPSATARTSYWFDYQGVRVAVLDGTSALDLGTGPAQAQWLDKVLADNPHPWSIVLIHQPFFSPRADRENEKLVAQVLPVIRRHKVDLVLQGHDHTYGRRGDAAGQATPVFVVSVAGPKQYRLSDMARTTMRPVGEDTQLYQVLRLDSQHLVYESRTATGRLYDAFELQRDSDGSKRLIEREAGRIAPRNCPRSATLKGRADRCWE

SEQ ID NO: 45593 - protein, 345 aa, Acholeplasma laidlawii
DQNGKVVNEKMEPKLPKETLLKMYKTAVLGRNADIKALQYQRQGRMLTYAPNMGQEAAQIGMAAAMEPQDWNSPMYRELNTLLYRGDKLENVFLYWYGNERGSIKPEGVKILPTNIIIGSQSNIAAGLAMASKIRKTNEVTAFTIGDGGTAHGEFYEGLNFAASFKAPVVAVIQNNQWAISTPVRKASNSETLAQKGVAFGIPYIQVDGNDMLAMYVASKEAMDRARKGDGPTLIEAFTYRMGPHTTSDDPCSIYRTKEEENEWAKKDQIARFKTYLINKGYWSEEEDKKLEEEVLAEINDTFKKVESYGANVELIEIFEHTYAEMTPQLKEQYEEHKKYLEGVK

SEQ ID NO: 45594 - protein, 815 aa, Arabidopsis thaliana
MDLASNLGGKIDKSDVLTAVEKYEQYHVFHGGNEEERKANYTDMVNKYYDLATSFYEYGWGESFHFAQRWKGESLRESIKRHEHFLALQLGIQPGQKVLDVGCGIGGPLREIARFSNSVVTGLNNNEYQITRGKELNRLAGVDKTCNFVKADFMKMPFPENSFDAVYAIEATCHAPDAYGCYKEIYRVLKPGQCFAAYEWCMTDAFDPDNAEHQKIKGEIEIGDGLPDIRLTTKCLEALKQAGFEVIWEKDLAKDSPVPWYLPLDKNHFSLSSFRLTAVGRFITKNMVKILEYIRLAPQGSQRVSNFLEQAAEGLVDGGRILNLFLDKCFSGERFSRQCISSWPGSQSKRMRDGDGHRISAAKVLVENGVEDVLILEATDRIGGRIHKQNFGDVPVELGAGWIAGVGGKESNPVWELASRFNLRTCFSDYTNARFNIYDRSGKIFPTGIASDSYKKAVDSAILKLKSLEAQCSGQVAEEAPSSPKTPIELAIDFILHDFEMAEVEPISTYVDFGEREFLVADERGYECLLYKMAEEFLVTSHGNILDYRLKLNQVVREVQQSRNGVVVKTEDGSVYEANYVIVSASIGVLQSDLLSFQPLLPRWKTEAIQKCDVMVYTKIFLKFPQCFWPCGPGQEFFIYAHEQRGYFTFWQHMENAYPGSNILVVTLTNEQSKRVEAQSDQETMKEAMSVLRDMFGATIPYATDILVPRWWNNRFQRGSYSNYPMISDNQLLQNIKAPVGRIFFTGEHTSEKFSGYVHGGYLAGIDTSKSLLEEMKQSLLLQPLLAFTESLTLTHQKPNNSQIYTNVKFISGTS

SEQ ID NO: 45595 - protein, 676 aa, Methanosarcina acetivorans
MDMLIYLAPICALIGLIFAGISYKNVQNEGAGNDLIKKITASIHGGAMVYLNRQYRAIAVFVVFLAIIIALILPNGALTAACFVFGAVLSATAGYAGMLTATIANGRTTNAATRGIGPAFRVSFASGTVMGMSVVGLGLFGLSLSFIILESVYTDLDLLTIVNIVAGFSLGASSIALFARVGGGIFTKAADVGADLVGKVEAGIPEDDPRNPAVIADNVGDNVGDIAGMGADLYESYVGSILATMLLAASTAATTFPNIPVENVILVPLIISAIGILASIVGTFFVRTNKTESSAIHMAFNMGLIAAIILTVIASYFVTSMLLGEYGLNVFFATVAGLVAGFLIGQITEHYTSYDRKPTLRVANSCQTGSATNIITGFAKGMESTLWPVVIISIAIYIAFQLSGLYGIAIAAVGMLATLGISLSVDAYGPVADNAGGIAEMSHQKEEVRQITDTLDAVGNTTAAIGKGFAIGSAALTALALFASYGIAVGLSAIDVMNPNVFIGLTIGAMLPYLFSSMTILAVGNAAGEVVVEVRRQFREIAGLMEGKADPDYGKCIAISTHSALKEMIPPGLLAVIAPLLVGLVLGPGALGGLLAGSVASGFMIAITMSNAGGAWDNAKKYIELGNFGGKGSDAHKAGVTGDTVGDPFKDTAGPAINILIKLMSIVAVVFAPLFM

SEQ ID NO: 45596 - protein, 311 aa, Glycine max
MESSSIESSTVSSMTMMEEDEHPHHQFSSISKLHNSGPTTTSVHDLLECPVCTNSMYPPIHQCHNGHTLCSTCKTRVHNRCPTCRQELGDIRCLALEKIAESLELPCRYISLGCPEIFPYYSKLKHEAICNFRPYNCPYAGSDCSVVGDIPCLVAHLRDDHRVDMHSGCTFNHRYVKSNPMEVENATWMLTVFHCFGQYFCLHFEAFQLGMAPVYMAFLRFMGDEREARNYSYSLEVGGNGRKLTFEGSPRSIRDSHKKVRDSHDGLIIYRNMALFFSGGDRKELKLRVTGRIWKEQQNPEGGVCIPNLCS

SEQ ID NO: 45597 - protein, 256 aa, Gossypium hirsutum
MATSQLTASSVTASARNLASLQGLRLSTVKFSSFGTLKPGAVTSRSFRGLVVKAATVVAPKYTSVKPLGDRVLVKIKETEEKTEGGILLPTTAQSKPQGGEVVAVGEGKTIGNTKSESSVKTGAQVIYSKYAGTEVEFNGANHLLLKEDDIVGLLETDDIKDLKPLNDRVFIKVSEAEEKTAGGLLLTEASKEKPSIGTVIAVGPGTLDEEGNLKPLSVSPGNTVLYSKYAGNDFKGNDGSNYIALRASDVMAVLS

SEQ ID NO: 45598 - protein, 543 aa, Campylobacter jejuni subsp. jejuni NCTC 11168
MKQTKYIFVTGGVLSSLGKGIAAASIATLLKNSGLKVSILKADPYINVDPGTMSPFEHGEVFVTDDGAETDLDLGHYERFLDESLSQDNNFTTGRVYQSVIEKERRGEYLGKTIQVIPHIVGEIKDRIKKAGEGKDILIVEIGGTVGDIEGLPFLEAIRALRLEVGKNNAMNIHLTLVPFIKAAGELKTKPTQHSVGELRRIGISPDMIICRSEKALDRDLKDKIAISCGVEKNCVIESVDAASIYQIPLNFLKQDILSPIAEILDLKNLKPNMENWDSLVKRVIAPSNEVKIAFVGKYVDLKESYKSLTEAIIHAGAALDTKVELKWVDSEKLENMESSEVFKDVSGILVAGGFGYRGVEGKIKAIQYARENKIPFLGICLGMQLALVEFARNVLKLKDVNSSEFNEKCQNPVVYLIDEFMDTNGEKQIRTAKTPLGGTMRLGAYKCDIKEKSLLAKVYNEVKSVKERHRHRYEANPKYRADFEKYGLIVSGESKGLIEAVELNCHPFFLAVQFHPEFTSRLEHVNPVICSFIKAAINYEDN

SEQ ID NO: 45599 - protein, 443 aa, Yarrowia lipolytica CLIB122
MKPVALLTSCVATFAVLNGAIAAPSAPKVLQIPVTKHHESAAEVNRTLALARRDGAYTETVHNKEFWYSISISLGTPAQQFNVLLDTGSSDLWVFSTEDSTDCANGACEFTGQFNAKSSSTYHYLNSDYSITYVTGSAHGDWVTDSLSVGPVTLSNFQFAVADKAVGNTAIFGISLEGSESLNHGQQPEYPNFPVQLKNQGFIDRIVYSLYLEDVNSPQGTLLLGGIDYAKFQGPLNVLQLQNANAFQVEYQGVGINGAGPYGQPHVAVLDSGTSYTFLPDDIYYTIFDQVGLSSQVNQNTGLNYVACNTRVTLAFDFGNGAIINVDSSELVLKLSDILGDPHNNQCVFGVSSNDNTHGITLLGDTFLRSAYVVYDIENKEVGIAQAVYTSNSNVQPVTGALGGQGQQQSQGQGQGQGQGQQSQGQGQGQYPWDGQPFGSGFF

SEQ ID NO: 45600 - protein, 136 aa, Brassica napus
MDMEQKQAEIIDQLVRRASTCNGDSLVPIIIDATSHPSLFAFSEILALPNVAQLEGTSDSVYLDVLRLFAHGTWGDYKCNASRIPQLSPDQILKLKQLTVLTLAESNKVLPYDTLMAELDVTNVRELEVWLMDHWM

SEQ ID NO: 45601 - protein, 878 aa, Yersinia pseudotuberculosis IP 32953
MNEQYSAMRSNVSMLGTLLGDTIKEALGEHILDRVETIRKLSKSSRAGNEASRQELLTTLQNLSNDELLPVARAFSQFLNLTNTAEQYHSISPHGEAASNPEALAQLFTRLKDKKLSDQDMRSAVDDLSIELVLTAHPTEITRRTLIHKLVEVNTCLSQLDHNDLADYERNKIMRRLRQLVAQSWHTDEIRKLRPSPVDEAKWGFAVVENSLWEGVPAFLREFNEQLENSLDYRLPVEAVPIRFTSWMGGDRDGNPNVTAEITRHVLLLSRWKATDLFLRDIQVLVSELSMSECTPELRELAGGEEVLEPYRQLMKNVRTQLTNTQAYLEARLKGERVLPPHDLLVSNDQLWEPLYACYQSLKACGMEIIANGQLLDTLRRVRCFGVPLVRIDVRQESTRHTDAIAELTRYLGLGDYESWSESDKQAFLVRELNSKRPLVPLKWEPSAETQEVLETCRVIAEAPQGSIAAYVISMAKVPSDVLAVHLLLKEAGCPFTLPVAPLFETLDDLNNADDVMTQLLGIDWYRGLIQGKQMVMIGYSDSAKDAGVMAASWAQYRAQDALIKTCEKAGITLTLFHGRGGSIGRGGAPAHAALLSQPPGSLKGGLRVTEQGEMIRFKFGLPEVTISSLALYAGAILEANLLPPPEPKKEWIEVMDLLSDASCDMYRSYVRENPEFVRYFRAATPELELGKLPLGSRPAKRRPDGGVESLRAIPWIFAWTQNRLMLPAWLGAGAGLQRAIDAGKRDVLATMCRDWPFFSTRIGMLEMVFAKADLWLAEYYDQRLVDKSLWPLGQQLRDQLAADIKVVLAIANDDHLMADLPWIAESIALRNVYTDPLNVLQAELLHRSRQQEHPDACVEQALMVTIAGVAAGMRNTG

SEQ ID NO: 45602 - protein, 560 aa, Prochlorococcus marinus str. NATL2A
MAKLLSFSDESRGALEKGVNNLANALKVTIGPKGRNVVIEKKFGAPDIVNDGVTIAKEIDLEDPFENIGAKLIEQVASKTKEKAGDGTTTATVLAQFMVQEGLRNTAAGASPIELRRGMEKAVAQIVDDLKKKSKSVSGDAIKQVATVSAGGDEEIGSMIADAIDKVSFDGVITVEESKSLATELDITEGMAFDRGYSSPYFVTDEDRLICEFENPSILITDKKISSIADLIPVLETVQKNGTPLIILAEEVEGEALATLVVNKNRGVLQVAAVRAPSFGERRKAALGDIAVLTGGTLISEDKAMSLEKVQISDLGQARRVTITKDSTTIVANEAQNTELSNRIASIKRELEETDSEYDQEKLNERIAKLAGGVAVIKVGAPTETELKNRKLRIEDALNATRAAIEEGIVAGGGTTLLELSEGLGDLAKKLEGDQKTGVEIIKRALTAPTKQIAINAGFNGDVVVSDIKRLGKGFNAQTGEYEDLLEAGILDASKVIRLALQDAVSIASLLITTEVVIADKPEPPSAPGAEGGDPMGGMGGMGGMGGMGGMGGMGMPGMM

SEQ ID NO: 45603 - protein, 341 aa, Dehalococcoides ethenogenes 195
MAVGLVYNHIYLNHETGTHVENPDRLLAIMEYINTHGLKDRLVHVEPKRVGLGELEGFHTRKYISRVEEVGFSGGGWLDQDTVISVDSYETALYAVGGVLEGVDKVLSGELESAFVMCRPPGHHALPEASMGFCIFNNVALGALHALNKHRLKRVAVVDFDVHHGNGIQHVCLNDPRVTYISTHQIHHFPFTGDSCEDGPFQNILNIPLPAGCGDSHYQKVFDQLICPYLRKLSPELILVCAGYDAHFADDMGEMCLSQQGFAGITRALKKTADEVCGGKMVFSLEGGYHYLGLAESVGASLAVLLDEALPPPNTKAPEETADTPDISGLILELRGIFGIS

SEQ ID NO: 45604 - protein, 1137 aa, Prosthecochloris aestuarii DSM 271
MANGILFRSIPHRLRHIFLTFFFIHNYFYRDFMPKTRTTGQPEPQWYKDAIIYEAHVKTFFDSNNDGVGDFEGLRQKLPYLESLGITAIWLLPFYPSPLRDDGYDIADYMDINPDYGTIDDFRAFLNEAHERGLKVITELVINHTSDQHAWFQRARRAEQGSDERNFYVWTDDPKKYSETRIIFQDFESSNWTWDPIAGQYFWHRFYHHQPDLNFENPSVEKALYKVLDYWLEMGVDGLRLDAVPYLYEEEGSNCENLPRTHEFLKRLRKHVDDKFPNRMLLAEANQWPEDAAEYFGDGDECHMNFHFPLMPRMYMALEMEDRFPIIDILDQTPEIAETCQWASFLRNHDELTLEMVTDEERDYMRRVYAHDPKARINLGIRRRLAPLMSNDRRKIELMNIMLLSLPGTPVLYYGDEIGMGDNFYLGDRDGVRTPMQWNGDRNAGFSRANPQQLQLPVIIDPEYHYEATNVEVQDSNINSLLWWTRHMLSTSRRYKALSRGDIRFIACQNPQILIFSRTFEDETMLCIINLSRNAQAATVDLSEYEGHTPEEVFSLSHFPGITSRPYTVTLGPYGYFWFKLIRTEEEIGSRRYVDKPFAQVASLKDLFAGKALERLETKVLPEYIRGCRWFGGKARKIVRVSVEEHIPVTACDNTVYMIVEVRYPSGSNDTYQLPVTFLPAGEFNPDDDYFLKQVVCSVKIGDEEGYLCDSAYQKSFHSFLLDTIVSSKGLKGSTGKLTGEKGSRVEEFLETQDDGEMNSVLFGAEQSNTSIMYGDRLCLKIYRKISSGVSPEVEICRMLTEKTSFESSPAYLGALHFTRSRKDQCSLGILQNFIPNEGDAWSQTLHFVHRYYEDVLVMLPQISEVPVLPSTGGESVEMPEIIHGLIGEPYLEMVSRLAERTAGMHLALASPDLGQDFIPEPFTTLYQRSIYQSMREQVKRGMVLLREQMGGVAEEYQGLAAGLLKREGEILEQLSHIKARKIAASKIRIHGDYHLGQVLWTGKDFVIIDFEGEPARSLSERRIKRSAFRDLAGMMRSFHYAAFNVLIQDRSIRQEDVERLEPWAELWSFYTGQHFFDVYEDAVRGQGLIPEDVKEQHLLLRAYLMDKAIYELNYELNNRPEWVGIALKGLSRLLEL

SEQ ID NO: 45605 - protein, 333 aa, Yarrowia lipolytica CLIB122
MPTTLVTGATGFLAGHCVDQLLKDGHTVIGTVRNPSKAERLAEAFKSEVESGKLELETLKDIQNEDEFEAIFKKHPEIDYILHTASPLSFNVTDPEKDMLQPAIRGTTAVLKQAKAHAPNVKKVVITSSIAAMMNPDPSHVHNEHSWNPMTREQAAQKGNPVANYVGSKIFAEKAGLEFLNDEKPNFSITWINPAYILGPGITLDLGAINASNQLISSVLESKLGEEVKVQSGSFVDVRDCARAHVVALQPKFDRKRLMLCTAKVCTQDIEDICNKIPELKGKIAVGTPGEREKQLSKSIMDPSETKKLLDFEWIPLDKSVTDFAKQWLEIKQ

SEQ ID NO: 45606 - protein, 234 aa, Hordeum vulgare subsp. vulgare
MGRGRIEIKRIENTTNRQVTFCKRRNGLLKKAYELSVLCDAEVALVVFSSRGRLYEYSNNSVKATIERYKKANSDTSNSGTVAEVNAQYYQQESSKLRQQISSLQNSNSRSLVRDSVSTMTLRDLKQLEGRLEKGIAKIRARKNELMYAEVEYMQKREMELHNDNIYLRSKVSENERGQQPMNMMASGSTSSEYDHMVAPYDSRNFLQVNMQQQQHYSQQLQPTALQLGQQYFN

SEQ ID NO: 45607 - protein, 110 aa, Pyrococcus furiosus DSM 3638
MEWEMGLQEEFLELIKLRKKKIEGRLYDEKRRQIKPGDVISFEGGKLKVRVKAIRVYNSFREMLEKEGLENVLPGVKSIEEGIQVYRRFYDEEKEKKYGVVAIEIEPLEY

SEQ ID NO: 45608 - protein, 331 aa, Yarrowia lipolytica CLIB122
MLVLLTGGSGFIAAHILDGLVKRGIPVVTTVRSDNKAKFLAEKYPGHDLKFEIVPDVAQKDAFNNALKNHKITHILHTASPFFLNPKDPQKEILDPAINGTRGILEAAQEHGPGVEHVVITSSNAAITYYDARHKDPETVYTEKCWSNVPWEEAINNPASTYKASKQFAEEAMWNFQKEKNPKFRLTAINPPYVFGPMKHDVSAATLNTSNKIVWDIIKSSTIGKAGPTYWVDVRDVAEGHIRALERPEESANSRWYTVGGIFTPQDVLDVLNEMDEFKGKIPVGEPGSGVPLHSTIPKYDNSLTNKQSGLKYHTLEESVKDLAKQLNTLE

SEQ ID NO: 45609 - protein, 232 aa, Hordeum vulgare subsp. vulgare
MGRGRIEIKRIENTTNRQLTFCKRRNGLLKKAYELSVLCDAEVALVVFSSRGRLYEYSNNSVKATIERYKKATSDTSSAGTVAEINAQHYQQESAKLRQQITTLQNSNRTLIGDTMATMSHRDLKQLEGRLDKGLGKIRARKNELLSAEIEYMQRREMELQNNNFYLREKVAETERGQQQTLNMMGAASTSNEYDQNMIQCDPRTFLQFNIMQQPQYYTQQEDRKTLNSVER

SEQ ID NO: 45610 - protein, 565 aa, Shigella flexneri 2a str. 2457T
MKSPAPSRPQKMALIPACIFLCFAALSVQAEETPVTPQPPDILLGPLFNDVQNVKLFPDQKTFADAVPNSDPLMILADYRMQQNQSGFDLRHFVNVNFTLPKEGEKYVPPEGQSLREHIDGLWPVLTRSTENTEKWDSLLPLPEPYVVPGGRFREVYYWDNYFTMLGLAESGHWDKIADMVANFAHEINTYGHIPNGNRSYYLSRSQPPFFALMVELLAQHEGDAALKQYLPQMQKEYAYWMDGVENLQAGQQEKRVVKLQDSTLLNRYWDDRDTPRPESWVEDIATAKSNPNRPATEIYRDLRSAAASGWDFSSRWMDNPQQLNTLRTTSIVPVDLNSLMFKMEKILARASKAAGDNAMANQYETLANARQKGIEKYLWNDQQGWYADYDLKSHKVRNQLTAAALFPLYVNAAAKDRANKMATATKTHLLQPGGLNTTSVKSGQQWDAPNGWAPLQWVATEGLQNYGQKEVAMDISWHFLTNVQHTYDREKKLVEKYDVSTTGTGGGGGEYPLQDGFGWTNGVTLKMLDLICPKEQPCDNVPATHPTVKSATTQPSTKEAQPTP

SEQ ID NO: 45611 - protein, 467 aa, Lycopersicon esculentum
MAIFLIIFVVFFGFCILSTPLFRWIDIVYNKKNLPPGTMGWPIFGETREFLNQGPNFMKNQRARYGNFFKSHILGCPTVVSMDAGLNVYILNNEAKGLIPGYPQSMLDILGKCNIAAVHGATHKYIRGALLSLINPTMIKDHILPKIDKFMRSHLSGWDNCNVIDIQQMTKEMAFFSSLDQIGGFATSSSIAQEFRAGFLNIALGTISLPINFPTTNYYRGLQGRKTIVKLLRKIIEDRRGSKKIQQDMLGLMMNEEAKNRYTLSDEELIDQIITIMYSGFETVSTTSMMAVKYLHDHPKALEEIRKEHFAIREKKSLEDPIDYNDFKAMRFTRAVIYETLRLATIVNGVLRKTTQDMELNGYMIPKGWRIYVYTRELNYDPLIYPDPYTFNPWRWLENNLDHQSSFLMFGGGTRLCPGKELGVAEISTFLHYFVTRYRWEEVGGNKLMKFPRVEALNGLWIKVSAY

SEQ ID NO: 45612 - protein, 184 aa, Oryza sativa
  misc_feature (28)..(28): Xaa can be any naturally occurring amino acid
  misc_feature (39)..(39): Xaa can be any naturally occurring amino acid
  unsure (1)..(184): unsure at all Xaa locations
MDRQRQQSSRGNATATRGGGSSGKGGGXCVGKAAGKKPXKVVYISNPMRVKTSAAGFRALVQELTGRNADPSKYSPRASADDDDGGGGGGGGELAAASDGAGEPGPGAAAASPDTGAAAASDAADALVAAGHPAAATFDDEGGGGGGGYYDDDDDDIFRSQLLDTSYSVFSPPTLLYDHPHSKV

SEQ ID NO: 45613 - protein, 147 aa, Zea mays
  misc_feature (130)..(130): Xaa can be any naturally occurring amino acid
  unsure (1)..(147): unsure at all Xaa locations
PPPPPFFTSPRYLPPTKSDKCRIKDAIISHGCFLRECAIEHSIVGVRSRLNSGCELKNTMMMGADLYETEDEISRLLAEGKVPIGVGENTKISNCIIDMNARVGRNVSITNKEGVQEADRPDEGYYIRSXGIVVVLKNATIRDGTVI

SEQ ID NO: 45614 - protein, 152 aa, Oryza sativa
MVRPPCCDKDGVKKGPWTPEEDLVLVSYVQEHGPGNWRAVPTRTGLMRCSKSCRLRWTNYLRPGIKRGNFTDQEEKLIVHLQALLGNRWAAIASYLPERTDNDIKNYWNTHLKRKLQGGDETQLSAIESWLFADADGIESGSLLDAAMDYTF

SEQ ID NO: 45615 - protein, 90 aa, Oryza sativa
MAGTANCIDILIAIILPPLGAFVWYPDSAIMPGMRDVRTGTCIDILVAIILPPLGVFLKFGCGHEFWICLLLTFLGYIPGIIYAIYAITK

SEQ ID NO: 45616 - protein, 366 aa, Haloarcula marismortui ATCC 43049
MPAKSFTLAAAQVEPVYHDKEGTLDKTCRYIEQAGRDGADIVVFPETYFPGYPYWRGSVSISRWTDLMVDLQKNSLHVDDEAIEILGEAVAEADLTLVLGTNEISDRQGSETLYNSLFYFDNTGELMGRHRKLMPTHEERAIWGRGDPSSLATYETDVGRLGGLICYENHMTLSKAALTTMGEEIHAAVWPGFWEQHGHPGDKTRAETSEAVDSCDVYPAMREYAFETQSFVAACSAYMSEAVPDGFSEDELGFNVAAGGSMLVNPAGIVKAGPLIGEEGLLTAEFRDDERRATKAYFDAMGHYTRWDAVNLSISDETLAPSQPQEASKHAVAGNGSLSAARAQAIADEYDVPVEAVEAVVDELVG

SEQ ID NO: 45617 - protein, 376 aa, Uncultured archaeon
MEERGISKHELKLFLKEQKQRDLTYRKVLSSMCTYPHEIAVYAHNLFLDSNLGDSGLFPGTKEIEDELIRMIGALLGNENAHGYISAGGTESNIQAIRAIRNRKRKEGLQQMNIIVPKTAHFSFDKIEDLLSLEVKKAGLDDELRVDVNLVEDLIDDNTISIVGIAGTTEFGQIDPIKELADLAHNSDIFLHVDAAFGGFVIPFLDAEYLFDFSLDAVSSISIDPHKMGLSTIPAGCILFRDVSYLADLAVNTPYLTTNEQCSLIGTRSGAPVAATYAVLKYLGRNGLRAIVDECMQLTRMLVHGAKEMGIYPVIEPVMNVVTLRFPDVERVAKALEARGWQVSTTRAPKALRLVIMPHVTEDTIEMFLNDLENAK

SEQ ID NO: 45618 - protein, 312 aa, Triticum aestivum
  misc_feature (113)..(113): Xaa can be any naturally occurring amino acid
  misc_feature (305)..(305): Xaa can be any naturally occurring amino acid
  unsure (1)..(312): unsure at all Xaa locations
MARHFLLNTGAKIPSVGLGTWQADPGVVGDAVYAAVKAGYRHIDCARVYGNEKEIGLALKKLFEEGVVKREDLFITSKLWNDHHAPEDVPEALNESLNDLQLDYLDLYLIHWXPFRVKKGTNNNPENFVTPDIPATWGAMEKLHDAGKARAIGVSNFSSKKLGDLLAVARVPPAVDQVECHPCWQQTKLHNFCQSAGVHLSAYSPLGSPGTSWMNGNILKEPIIISISEKLGKTPAQVALRWNIQMGHSVLPKSTNQERIKQNLDVHDWSIPDDVLAKFSEIKEARLLRGNFAVNPQSVYKTHEXELWDGEI

SEQ ID NO: 45619 - protein, 310 aa, Vibrio vulnificus CMCP6
MKVAVIGAAGGIGQALALLLKNRLPAGSDLALYDIAPVTPGVAADLSHIPTHVSIKGYAGEDPTPALEGADVVLISAGVARKPGMDRADLFNVNAGIVKSLAERIAVVCPNACIGIITNPVNTTVPIAAEVLKKAGVYDKRKLFGVTTLDVIRSETFVAELKGQDPGEVRVPVIGGHSGVTILPLLSQVEGVEFSDEEIAALTKRIQNAGTEVVEAKAGGGSATLSMGQAACRFGLALVKALQGEEVIEYAYVEGNGEHASFFAQPVKLGKEGVEEILPYGELSDFEKAALDGMLETLNSDIQIGVDFVK

SEQ ID NO: 45620 - protein, 390 aa, Bacillus clausii KSM-K16
MKEQISEKLEQLRLTFWEVSQHIGHNPELGHEEFIACKTLTDLLKSHGFTVEVGTCGLETAFTATFDSGQPGPKVGFMAEYDALPQIGHACGHNLIGTMSAAAAIGLSDVLHKTGGKIYVYGTPAEETRGAKVTMADAGLFDDLDVAMMVHPNAHYEESGTSLAMDAIQFDFFGKAAHAAASPHEGINALDAVIATFNQINALRQHVTPDVRIHGIIPEGGQAANVVPDFARAQFYVRAASRKTLQPLLEKVKNCAKAAALATGAQLEISFYEFSYDDMNTNEALSKQFTANLVALGVDVDDIREKTLGGSLDMGNVSQRVPAIHPYVKITDGGYACHTPEFRDAALSEQGFEGLMLGAKTMAHTAFDVLTDQALLETIKQEYKTWKEKQ

SEQ ID NO: 45621 - protein, 402 aa, Ralstonia solanacearum
MDFLQSLLAPRLQNVETSAIRELFKVLGKPGLISFAGGFPDAALFDVEGLKAAADSALATDAARALQYGATEGFEPLREAIVTLMQARGATVANTDILVTTGSQQGLDLLGKVLIGEGDTVLTEAPTFLAAIQAFKLYGAKVAGVPTDEDGLDLDALERALAAGRPKFLYVIPNFGNPSGALMSLERRRRLLALAVRHDLLIVEDDPYGELYFDAPPPPSLFALSQQTDGAQGRVVYLGSLSKVVAPGLRVGWMIAPSLVLSNAVMVKQFADAHTSTFAQATAAAYLRSQRMETVLPRTRAAYAERAHAMADGLRALLPEAELTFNRPRGGMFLWGRLPGRNAADVARIAIERGVAFVPGAAFYPVDPDRSTLRLSYATSSLAQVEEGVRKLAGAIGELAAA

SEQ ID NO: 45622 - protein, 130 aa, Mesorhizobium loti MAFF303099
MNGAKARVLICDDDPLLLELMEFRLRAKGYEVITAVDGAEALAKAEQHGPDIIVLDAMMPKADGLEVLARLKGDPVLSDTPVVMLTARKAERDIVSALEKGADDYLVKPFIPEELLARLARLIARKNGKR

SEQ ID NO: 45623 - protein, 320 aa, Kluyveromyces lactis NRRL Y-1140
MEVSKMPFDADLKVLLASCLVGLVLSLYLVVLLLSNNPRKAFANELQYRSIKDGSVVHEPLPNIDDDSSDGIELSVVIPSYNETSRIKIMLEEAISFLQNEMKGKWEIIIVDDGSSDGTSEYCMDLAKNHFKLNDGEFRVVTLEKNRGKGGAVRHGMLHSRGEYLLFADADGASKFSDVAKLLANTKVDAPEVSIGSRAHMVNTDAVVKRTIIRNFLMYSLHALVFIFGIRSIKDTQCGFKLFNRKAAKEIFPKLHTEGWIFDVEILIVALRKNIPINELPISWHEVDGSKMDLARDSINMAKDLVIIRLAYILGIYSDK

SEQ ID NO: 45624 - protein, 492 aa, Streptococcus mitis
MVRGVDILADTVKVTLGPKGRNVVLEKSFGSPLITNDGVTIAKEIELEDHFENMGAKLVSEVASKTNDIAGDGTTTATVLTQAIVREGIKNVTAGANPIGIRRGIETAVAAAVEALKNNAIPVANKEAIAQVAAVSSRSEKVGEYISEAMEKVGKDGVITIEESRGMETELEVVEGMQFDRGYLSQYMVTDSEKMVADLENPYILITDKKISNIQEILPLLESILQSNRPLLIIADDVDGEALPTLVLNKIRGTFNVVAVKAPGFGDRRKAMLEDIAILTGGTVITEDLGLELKDATIEALGQAARVTVDKDSTVIVEGAGNPEAISHRVAVIKSQIETTTSEFDREKLQERLAKLSGGVAVIKVGAATETELKEMKLRIEDALNATRAAVEEGIVAGGGTALVNVIPAVADLELTGDEATGRNIVLRALEEPVRQIAHNAGFEGSIVIDRLKNAEVGTGFNAATGEWVNMIDQGIIDPVKVSRSALQNAAS

SEQ ID NO: 45625 - protein, 234 aa, Pyrococcus furiosus DSM 3638
MIKAVFFDFIGTLLSQEGEYETHLKIMEEVLGENKKISPEELLREYDALTREAFSQYAGKPFKPIRIIEEEIMKKLAEKYGFDYPENFWEIHLKAHQRYGKLYPEVVEVLNELKKREYHVGLITDSDTAYLRAHLEALGIAELFDSITTSEEAGFFKPHPRIFEVALKKAGVKGSEAVYVGDNPIKDCGGARQLDMLSILVDRKGEKKELWKECEFVISDLREVIQIVEELNGQ

SEQ ID NO: 45626 - protein, 893 aa, Saccharomyces cerevisiae
MAGHHHEHEQERDHEQEHEHDSLQRPTTGSERTRSISFSKLLTRSWKRNASSSNNMSVSSVNLYSDPENSRESDHNNSGSEGQSSRFSKLKSMFQSGNSSKNASAHNSSQSSLEGDSASSSSKLRYVKPMTSVANASPASPPLSPTIPETDVLQTPKMVHIDQHEHEREHSNCGSPIMLSSSSFSPTVARTGTGRRRSPSTPIMPSQNSNNSSSTSAIRPNNYRHHSGSQGFSSNNPFRERAGTVRSSNPYFAYQGLPTHAMSSHDLDEGFQPYANGSGIHFLSTPTSKTNSLTNTKNLSNLSLNEIKENEEVQEFNNEDFFFHDIPKDLSLKDTLNGSPSRGSSKSPTITQTFPSIIVGFDNEYEEDNNNDKHDEKEEQQTTTDNKTRNLSPTKQNGKATHPRIKIPLRRAASEPNGLQLASATSPTSSSARKTSGSSNINDKIPGQSVPPPNSFFPQEPSPKISDFPEPRRSRRLRTKSFSNKFQDIMVGPQSFEKIRLLGQGDVGKVFLVREKKTNRVYALKVLSKDEMIKRNKIKRVLTEQEILATSNHPFIVTLYHSFQSEDYLYLCMEYCMGGEFFRALQTRKTKCICEDDARFYASEVTAALEYLHLLGFIYRDLKPENILLHQSGHIMLSDFDLSIQAKDSKVPVVKGSAQSTLVDTKICSDGFRTNSFVGTEEYIAPEVIRGNGHTAAVDWWTLGILIYEMLFGFTPFKGDNTNETFTNILKNEVSFPNNNEISRTCKDLIKKLLTKNESKRLGCKMGAADVKKHPFFKKVQWSLLRNQEPPLIPVLSEDGYDFAKLSSNKKRQTSQDSHKHLDEQEKNMFEERVEYDDEVSEDDPFHDFNSMSLMEQDNNSMIYGNTNSYGKIAYTPNSNRSRSNSHRTFFKR

SEQ ID NO: 45627 - protein, 457 aa, Oryza sativa
MAAEICREEAAKSMPAAAAGATAIARRRRRVEGFRFAAGSLEPPQEDADAGVARCGKRQRVAGARAGAGAATAGPCRPSAGAEFGSRWWPRYGVTSVFGRRREMEDAVSIRPDFLRGSTSSGKHHFFGVFDGHGCSHVARMCQDRMHELVVDAYKKAVSGKEAAAAAPAWKDVMEKGFARMDDEATIWAKSRTGGEPACRCELQTPARCDHVGSTAVVAVVGPNRVVVANSGDSRAVLCRAGVPVPLSVDHKPDRPDELERIKAAGGRVIYWDGARVLGVLAMSRAIGDGYLKPYVTSEPEVTVTERADDDECLILASDGLWDVVTNEMACEVVRACFRSNGPPSPPGCSRPKAVLPPPAGASGGGGGDAVVKGVDKAESDKACADAALLLAKLAIARRSADNVSVVIVDLRRPVPGSAIIIGLFSSSSIFFHFFPPNLLLRSSSQRIYLVRPSCLV

SEQ ID NO: 45628 - protein, 447 aa, Escherichia coli O157:H7 EDL933
MDQTYSLESFLNHVQKRDPNQTEFAQAVREVMTTLWPFLEQNPKYRQMSLLERLVEPERVIQFRVVWVDDRNQVQVNRAWRVQFSSAIGPYKGGMRFHPSVNLSILKFLGFEQTFKNALTTLPMGGGKGGSDFDPKGKSEGEVMRFCQALMTELYRHLGADTDVPAGDIGVGGREVGFMAGMMKKLSNNTACVFTGKGLSFGGSLIRPEATGYGLVYFTEAMLKRHGMGFEGMRVSVSGSGNVAQYAIEKAMEFGARVITASDSSGTVVDESGFTKEKLARLIEIKSSRDGRVADYAKEFGLVYLEGQQPWSVPVDIALPCATQNELDVDAAHQLIANGVKAVAEGANMPTTIEATELFQQAGVLFAPGKAANAGGVATSGLEMAQNAARLGWKAEKVDARLHHIMLDIHHACVEHGGEGEQTNYVQGANIAGFVKVADAMLAQGVI

SEQ ID NO: 45629 - protein, 416 aa, Streptococcus pyogenes MGAS10394
MVYNMEYEVYETMKIIEKSSKLEHVAYDIRGPVLDEANRMIASGEKILRLNTGNPAAFGFEAPDEVIRDLIVNARLSEGYSDSKGIFSARKAIMQYCQLKGFPDVDIEDIYLGNGVSELISMSLQALLDNGDEVLVPMPDYPLWTACVSLGGGKAVHYLCDEEAGWYPDIADIKSKITSRTKAIVVINPNNPTGALYPKEILEDIVALAREHQLIIFADEIYDRLVMDGKEHIAIASLAPDVFCVSMNGLSKSHRIAGFRVGWMVLSGPKDHVKGYIEGLNMLANMRLCSNVLAQQVVQTSLGGHQSVDALLLPGGRIFEQRNFIYEAINAIPGLSAVKPEAGLYLFPKIDRQMYRIDDDEEFVLQLLKQEKVMLVHGRGFNWKDPDHFRIVYLPSVEELEDVQEKITRVLYQYRR

SEQ ID NO: 45630 - protein, 364 aa, Ganoderma applanatum
MFSKVFLSLVVLASSVAAAVPTVGRRATCANGKTTANDACCVWFDVLDDIQENLFHGGQCGEDAHESLRLTFHDAIAFSPALTAAGQFGGGGADGSIIAHSDVELTYPVNDGLDEIVEASRPFAIKHNVSFGDFIQFAGAVGVANCNGGPQLSFFAGRSNDSQPSPPNLVPLPSDTADTILSRFSDAGFDAVEVVWLLVSHTVGSQNTVDSSIPGAPFDSTPSDFDAQFFVETMLNGTLVPGNGLQDGEVLSPYPGEFRLQSDFALSRDSRTTCEWQKMIADRANMLEKFEITMLKMSLLGFDQSALTDCSDVIPTATGTVQDPFIPAGLTVDDLQPACSSSAFPTVTTVAGAVTSIPAVPLNS

SEQ ID NO: 45631 - protein, 297 aa, Daucus carota
MASGARELSTMEADIQMMCAAEVHLGTKNCDFQMERYVFKRRNDGIYIINLGKTWEKLMLAARVIVSIENPQDIIVQSARPYGQRAVLKFAQYTGAHAIAGRHTPGTFTNQLQTSFSEPRLLILTDPRTDHQPIKEAALGNIPTIAFCDTDSPMRYVDIGIPANNKGKHSIGCLFWLLARMVLQMRGVISQGHKWEVMVDLFFYREPEETKDQEEEDLPVGDYVADYAAAPIGGADQWNAIPDAQWGGDVVQPANSAVPAGTWTDAGPIAGDGWDAAAAPPVPGAVGLDVPAPTGWE

SEQ ID NO: 45632 - protein, 481 aa, Xylella fastidiosa Ann-1
MRPLPTLLTLSIAAAFGGFAATGMNAWLDNRAEAASNTNAISPISSLPTGTVPQTTAANQPLPSLAPMLQQVMPAVVSINSKQVVRVRNPFFDDPILRRLFPEIPQERINESLGSGVIIDARNGYVLTNHHVIENADAVQVTLADGRSFKAEFLGSDADTDIALIRIKANKLTEIKLADSNKLRVGDFVVAIGNPFGFTQTVTSGIVSAVGRSGILGLGYQNFIQTDASINPGNSGGALVNLHGQLVGINTASFNPQGSMAGNIGLGLAIPSNLARNVVEQLVTKGVVVRGTIGVQTQNIDARMAQSLGLSNPHGALVTRVLPNSAGAAAGLQPGDVILAANDQRVDNAETLHNYEGLQPVGSSVTLEVHRGGKPLKIRLTLKELPRTIAGETLDSRLSGAIFVDLPEFLRQSGIGGVMVNKVKHGSRAAANGLVAGDVIIAAPIGEFSDLASWQASFSRPPQRLILRVLRGNAQYDALMR

SEQ ID NO: 45633 - protein, 365 aa, Brassica napus
RPTRPCVCVGLWAGLIIGFVTEYYTSNAYSPVQDVADSCRTGAATNVIFGLALGYKSVIIPIFAIAVSIFVSFSFAAMYGVAVAALGMLSTIATGLAIDAYGPISDNAGGIAEMAGMSHRIRERTDALDAAGNTTAAIGKGFAIGSAALVSLALFGAFVSRAGVHTVDVLTPKVIIGLLVGAMLPYWFSAMTMKSVGSAALKMVEEVRRQFNTIPGLMEGSAHPADATCVKISTDASIKEMIPPGCLVMLTPLIVGFFFGVETLSGVLAGSLVSGVQIAISASNTGGAWDNAKKYIEAGVSEHAKSLGPKGSEPHKAAVIGDTIGDPLKDTSGPSLNILIKLMAVESLVFAPFFATHGGILFKYL

SEQ ID NO: 45634 - protein, 366 aa, Thermoactinomyces intermedius
MKIFDYMEKYDYEQLVMCQDKESGLKAIICIHVTTLGPALGGMRMWTYASEEEAIEDALRLGRGMTYKNAAAGLNLGGGKTVIIGDPRKDKNEAMFRALGRFIQGLNGRYITAEDVGTTVEDMDIIHEETRYVTGVSPAFGSSGNPSPVTAYGVYRGMKAAAKEAFGDDSLEGKVVAVQGVGHVAYELCKHLHNEGAKLIVTDINKENADRAVQEFGAEFVHPDKIYDVECDIFAPCALGAIINDETIERLKCKVVAGSANNQLKEERHGKMLEEKGIVYAPDYVINAGGVINVADELLGYNRERAMKKVEGIYDKILKVFEIAKRDGIPSYLAADRMAEERIEMMRKTRSTFLQDQRNLINFNNK

SEQ ID NO: 45635 - protein, 212 aa, Schizosaccharomyces pombe
KARHLIKLYEAEGIGRERVLIKIASTYEGIQAAKQLEEEGIHCNLTLLFSFVQAVACAEANVTLISPFVGRILDFYKAKNNRDYTAQEDPGVVSVSNIFNYYKKFGYKTIVMGASFRNVGEIKELAGVDFLTISPALLEQLNNSTDAVPKKLDASKASSLNLEKVSYLTDEPKFRFDFNNDEMAVVKLSTGIAAFAKDADTLRTILKAKLEA

SEQ ID NO: 45636 - protein, 589 aa, Legionella pneumophila subsp. pneumophila str. Philadelphia 1
MTVARNRFDAVIIGAGGAGMRAALQMTNSGLKVALLSKVFPTRSHTVSAQGGITAALGNADEDDWRWHMYDTVKGADYIGDQDCIEYLCKTGPEAVYELEHMGLPFSRMDNGKIYQRQFGGQSKHFGGEQAARTCAAADRTGHALLHTLYQQNLKAKTHVFSEWYALDLVKNSQGRIAGVTAMCMETGEIVFFQTRVCILATGGAGRIFQSTTNAFINTGDGFGMALRAGIPLQDMEMWQFHPTGIAGAGVLVTEGCRGEGGYLINKDGERFMERYAPRVKDLASRDVVARAMALEIRAGKGFDPKGVDHVKLKLDHLGADLIMSRLPGIRELSMKFAGVDPIVEPIPVVPTCHYSMGGIPTNMHGQVITKTDGKEHVVEGLYAVGECACVSVHGANRLGGNSLLDLVVFGRAAGIHVEELWQSNQLPDMSYVSEDDVAASLVRYERWENSKDGESHAVIRDEMQRVMQEDFGVFRTGEVMASGLKRLQALRDRLAHAKLDDKSQIFNTERVEAMELDNLMATAYATALSAIARTESRGAHSREDYPKRDDANWIKHTLYFEEGEVIDYRPVNTSPKYVEPFEPKERVY

SEQ ID NO: 45637 - protein, 167 aa, Streptococcus pyogenes MGAS8232
MPNLYDFTVKAQNGNDLSLAAYKEKVVLIVNTATKCGLTPQYQALQALYDTYHDKGFEVLDFPCNQFLNQAPGDAEEINHFCSLTYHTTFPRFAKIKVNGKDADPLFTWLKEEKSGPLGKRIEWNFTKFLIDQNGQVIKRYSSKTDPKLIEEDLKALLDKIQCYHHL

SEQ ID NO: 45638 - protein, 920 aa, Streptococcus pyogenes MGAS8232
MPLKKLESSNNQAIIAEEVALLKEMLENITRRMIGDDAFTVIESIMVLSEKQDYIELEKVVANISNQEMEVISRYFSILPLLINISEDVDLAYEINYQNNTDTDYLGKLALTIKDLAGKDNGKDILEQVNVVPVLTAHPTQVQRKTILELTTHIHKLLRKYRDAKAGVISLEKWRQELYRYVEMIMQTDIIREKKLQVKNEIKNVMQYYDGSLIQAVTKLTTEYKNLAQKHGLELDNPKPITMGMWIGGDRDGNPFVTAETLCLSATVQSEVILNYYIDKLAALYRTFSLSSTLVQPNSEVERLASLSQDQSIYRGNEPYRRAFHYIQSCLKQTQIQLTNQPAARMSSSVGLNTSACPSPASLENPILAYDSPVDFKADLKAIEQSLLDNGNSALIEGDLREVMQAVDIFGFFLASIDMRQDSSVQEACVAELLKGANIVDDYSSLSETEKCDVLVQQLMEEPRTLSSAAVAKSDLLEKELAIYTTARELKDKLGEEVIKQHIISHTESVSDMFELAIMLKEVGLVDQQRARVQIVPLFETIEDLDNACDIMAAYLSHDIVKSWIATNRNYQEIMLGYSDSNKDGGYLASGWTLYKAQNELTAIGEEHGVKITFFHGRGGTVGRGGGPSYDAITSQPFGSIKDRIRLTEQGEIIENKYGNKDVAYYHLEMLISASINRMVTQMITDSNEIDSFREIMDSIVADSNMIYRKLVFDNPHFYDYFFEASPIKEVSSLNIGSRPAARKTITEITGLRAIPWVFSWSQNRIMFPGWYGVGSAFKRYIDRAQGNLERLQHMYQTWPFFHSLLSNVDMVLSKSNMNIAFQYAQLAESQDVRDVFYEILDEWQLTKNVILAIQDHDDLLEDNPSLKHSLKSRLPYFNVLNYIQIELIKRWRNNQLDENDEKLIHTTINGIATGLRNSG

SEQ ID NO: 45639 - protein, 597 aa, Pseudomonas fluorescens PfO-1
MIPMLSSRHRRALRLTSSFLAPYRWPAFGALLALIVTAGITLSMGQGIKLLVDQGFMTQSPHLLNQSIGLFMLLVLGLAVGTFARFYLVSWIGERVVADIRRQVFNHLVYLHPGFYEDNRSSEIQSRLTADTTLLQSVIGSSLSLFLRNLLMVIGGVVLLFITNPKLTSIVVIALPLVIAPILIFGRRVRNLSRLSQDRIADIGSYVSETLGQIKTVQAYNHQVQDEQRFASTVEQAFETARKRIFQRAWLITLVIVLVLGAVAVMLWVGGMDVIAGRISAGELAAFVFYSLIVGSAFGTLSEVIGELQRAAGAAERIAELLRSENIIQPPTTGLVTLPERVKGELELQDVRFSYPSRPDSLAVDGLSLTINAGETLALVGPSGAGKSTVYDLLLRFYDPREGRILIDGVPLTSLDPLDLRRCFALVSQTPALFFGSVEENIRYGCPTATLEQVREAARIAHAHDFIEQMPDGYQTHLGDGGLGLSGGQRQRLAIARALLVDAPILLLDEATSALDAQSEHLIQQALPSLMQNRTTLVIAHRLATVKNADRIAVMDQGKLVAIGTHQELIASNPLYARLAALQFSDGRQVSTDPVTD

SEQ ID NO: 45640 - protein, 302 aa, Leptospira biflexa
RIGRLVLRSGIKDPNLEFVAINDLVTPDNLSYLFKYDSTHGRFDGDVSHTDNEIIIDGKKVKTFSERDPEKLPWKELGVDFVIESTGLFTDRVGAEKHIKAGAKKVVISAPAKDKDIPTFVMGVNHEKYDSAKDNVVSNASCTTNCLAPITKVVLDNFGIVEGLMTTIHAMTATQPTVDGPSKKDFRGGRGAAQNIIPASTGAAKAVGLCIPEVNGKLTGMSFRVPTPDVSVVDLTVRTEKPTSLAEIKKKMKEASEGSMKGILGYTEDMVVSNDFLGDIRSSIFDADACIELSPTFFKLVS

SEQ ID NO: 45641 - protein, 367 aa, Cryptococcus neoformans var. neoformans JEC21
MPVSITIEDPDLAIALQYAPSSGIPKLREWLADLQAHVHERPRGDYDISIGSGSQDLMFKGFQAVLNPGDPVLLETPMYPGVLPVLRVLKAESVEVDVDDQGLSAENLEKVLGEWPADKKRPRVLYTSPIGSNPSGCSAPKERKLEVLKVCKKYGVLIFEDDPYYYLAEKLIPSYFALEKQVYPEGGHVVRFDSFSKLLSAGMRLGFATGPKEILHAIDVSTAGANLHTSAVSQGVALRLMQYWGIEGFLAHGRAVAKLYAERRAQFEATAHKYLDGLASWVSPVAGMFLWIDLRPAGIEDSYELIRHEALAKGVLGVPGMAFYPTGRKSSHVRVSFSIVDLGEESDLGFQRLAEAIKDKRKALGLA

SEQ ID NO: 45642 - protein, 167 aa, Synechococcus elongatus PCC 6301
MKIRNVSMAPQVTDIAVTTIDGAAKSLSDYAGQVLLIVNVASYCGYTSQYSGLEALYRQYRDRGLQVLAFPCNDFGAQEPGSNEEIKTFCSTRFDVSFELFDKVHAKGADQHPLYAALTQTDPAGDVAWNFEKFLVGKDGTVLARFKSGVAPNDASLIQAIEAALAA

SEQ ID NO: 45643 - protein, 300 aa, Leptonema illini
RIGRMVFRAVVEQNRNVEIVGINDLLDAEYMAYMLRYDSTHGRFTGDVKVEGGQLIVNGKKIRVTAESDPANLKWNEIGAEYVIESTGLFTTLEKTQAHLKAGAKKVVISAPSADAPMFVMGVNHSSYKNDMDIVSNASCTTNCLAPITKVINDRWGVEEGLMTTVHAVTATQKTVDGPSKKDWRGGRGAYQNIIPSSTGAAKAVGKVIPELAGKLTGMSFRVPTSNVSVVDLTVRLKKPAKYEDICKAMKEESEGAMKGVLGYTDEEVVSNDFLHDARTSIFDAKAGIQLSDTFVKVVS

SEQ ID NO: 45644 - protein, 431 aa, Prosthecochloris aestuarii DSM 271
MPQLTRSAELFEKAKQFIPGGVNSPVRAFKSVGGTPIYMAKGQGAYMTDVDGNTYLDYVGSWGPFILGSMHPRITAALEHTLTKIGTSFGTPIEMEIEIAELLCQIVPSIEMVRMVNSGTEATMSAVRLARGYTSRDKIIKFEGCYHGHGDSFLIKAGSGALTLGAPDSPGVTKGTANDTLNAKYNDIESVRLLVNENKGNIAAIIIEPVAGNTGVIPAKPGFLQALRDLCTEEGIVLIFDEVMCGFRVALGGAQERYGVTPDLTTMGKIIGGGLPVGAFGGKREIMERIAPLGDVYQAGTLSGNPLALTAGLETLKILRDENPYPELERKAAFLEEGFRNNMNKLGLNYVQNRVGSMACLFFTETPVTDYDTAVTADLKKYGTYYHAMLDQGIYLAPSQFEAMFTSAVMTDEDLEKTVKANYVALQATQK

SEQ ID NO: 45645 - protein, 302 aa, Leptospira interrogans serovar Icterohaemorrhagiae
RIGRLVFRAGIKDPNLEFVAINDLVTPDNLAYLLKYDSTHGRFQGTVEHTEKELIVDGKKILCVSERDPEKLPWKDLKVDYVIESTGLFTDRVGAEKHIKAGAKKVVISAPAKDKDIPTFVMGVNNEKYNPSNDHIVSNASCTTNCLAPIVKVVLDNWGIEEGLMTTIHATTATQPTVDGPSKKDFRGGRGAMQNIIPASTGAAKAVGLCIPEVNGKLTGMSFRVPTPDVSVVDLTVRTTKETSLKEISAKMKAASEGAMKGILGYTEDMVVSNDFVSSTLSSIFDMDACIELNSRFFKLVS

SEQ ID NO: 45646 - protein, 197 aa, Glycine max
MSTTRFIKCVTVGDGAVGKTCMLISYTSNTFPTDYVPTVFDNFSANVVVDGSTVNLGLWDTAGQEDYNRLRPLSYRGADVFLLAFSLISKASYENISKKWIPELRHYAPTVPIVLVGTKLDLREDRQYLIDHPGTTAIATAQGEELKKAIGAAVYIECSSKTQQNVKAVFDAAIKVVLQPPKSKKKGKKKNTPCVFL

SEQ ID NO: 45647 - protein, 344 aa, Xanthomonas oryzae pv. oryzae KACC10331
MRRFVCSDRWRRPFVCAFPRITAMTILITGAAGFIGAYTCRALAARSEAVVGLDNYNRYYDPQLKHDRVAALCPGVDIRTLDLTDRDGLAALFDEIQPTRVVHLAAQAGVRYSLENPSAYVDSNLVGFVNMLELCRHRGVQHLVYASSSSVYGDSATPPFSEDQRVDQPRSLYAATKAANELMGYTYAQLYGLRATGLRFFTVYGPWGRPDMAPLIFSRAVLAGRPIEVFNHGKMQRDFTFVEDIVAGVLGALDTPSSEPVPHRVFNLGNHTPVELEYFIDVIAQAAGRPAEKVYRPMQPGDMIRTMADTQRAQAAFGFDPATPVERGLPQVVNWCRQYFGKRA

SEQ ID NO: 45648 - protein, 140 aa, Bartonella quintana str. Toulouse
MAVERTFSMIKPDATRRNLTGAITKMLEDAGLRVVASKRVWMNRREAERFYAVHRERPFFSELVEFMSSGPTLVQVLEGENAIAKNREVMGATNPADAQEGTIRKVHALSISENSVHGSDSAETAKTEITFWFSEMEIVG

SEQ ID NO: 45649 - protein, 113 aa, Pyrococcus furiosus DSM 3638 [sequence omitted]

SEQ ID NO: 45650 - protein, 377 aa, Sulfolobus solfataricus
MSVVSKGLENVIIKVTNLTFIDGEKGILRYRGYNIEDLVNYGSYEETIYLMLYGKLRTKKELNDLKAKLNEEYEVPQEVLDTIYLMPKEADAIGLLEVGTAALASIDKNFKWKENDKEKAISIIAKMATLVANVYRRKEGNKPRIPEPSDSFAKSFLLASFAREPTTDEINAMDKALILYTDHEVPASTTAALVAASTLSDMYSSLTAALAALKGPLHGGAAEEAFKQFIEIGDPNRVQNWFNDKVVNQKNRLMGFGHRVYKTYDPRAKIFKKLALTLIERNADARRYFEIAQKLEELGIKQFSSKGIYPNTDFYSGIVFYALGFPVYMFTALFALSRTLGWLAHIIEYVEEQHRLIRPRALYVGPEYQEYVSIDKR

SEQ ID NO: 45651 - protein, 149 aa, Arabidopsis thaliana
PTRPGKNKIDITVPTGAQIIYSKYAGTEVEFNDVKHLILKEDDIVGILETEDIKDLKPLNDRVFIKVAEAEEKTAGGLLLTETTKEKPSIGTVIAVGPGSLDEEGKITPLPVSTGSTVLYSKYAGNDFKGKDGSNYIALRASDVMAILS

SEQ ID NO: 45652 - protein, 342 aa, Thermosynechococcus elongatus BP-1
MVQERSLPSLSIPQTAITREQGLMLYEDMVLGRTFEDKCAEMYYRGRMFGFVHLYNGQEAVSTGVIKAMRPDDYVCSTYRDHVHALSAGIPAREVMAELFGKATGCSKGRGGSMHLFSAKHNFLGGFAFVAEGIPVATGAAFQTLYRRQVMGDAKADQVTACFFGDGASNNGQFFECLNMAALWKLPILFVVENNKWAIGMAHERASSETEIYKKAKVFGMVGEEVDGMDVLAVRTVAEAAIARARAGEGPTLIEALTYRFRGHSLADPDELRSKEEKEFWLKRDPIKKLGAYLVEQELATGEDLRAIEQKVQAIVEDAVTFAEQSPEPKPEELYDYIFADE

SEQ ID NO: 45653 - protein, 205 aa, Glycine max
MATRVIPPRILRNLRYNTATKPLNSSHPPLSPSLSPSLCIPAPPPISAVLPPSDDLSFRDVEKLFSSVPTTTLLRSTAVLHATALEPMVDFGTWLMRSNLMQVPGLSDLILATVRNTFFDHFCAGEDATTTADSVRHLNKAGLRGMLVYGVEDANNNDACHRNFKGFLHTIDVSRSLPPSSVTPSSSFSPTFLNQNPFSERIYKK

SEQ ID NO: 45654 - protein, 268 aa, Xanthomonas axonopodis pv. citri str. 306
MRRIDSCFAELRANGRKALIPFITAGDPSLEATVPVMHALVRAGADVIELGVPFSDPMADGPTIQRSSERALARGAGLAYVLEAVHEFRREDATTPVVLMGYLNPIEIHGTRRFAEAAVAAGVDGVLLVDLPPEEAGETRTIFTEVGLALIALASPTTSEQRLDMLCSTAQGYLYYVSFAGVTGASNLLDTHAASDRLRQLRRRAGAPVVAGFGIKDAASAAAMAVDADGVVVGSALVAALAEVNDVRSARERAEAFLAPLRQALDQG

SEQ ID NO: 45655 - protein, 308 aa, Yersinia pestis KIM
METGKLVVLGSINADHILNIEQFPRPGETVIGQQYNVAFGGKGANQAVAAGRSGADIAFIACVGDDDIGERVRQQLTADKIDTQPIEAIKGATTGVALIFVNSDGENVIGINAGANSAVTPEYLRRYQQQVIDADALLMQLESPLDTVIAAAKLAKQHQTQVILNPAPARKLPDELLTLVDMITPNETEAERLTGIHIEQDDDAAKAAQILHDKGIATVIITLGSRGVWLSEQGKGKLVAGFKVNAVDTIAAGDTFNGALLTALLEGQSMDVAVRFAHAAAAIAVTRPGAQPSIPWRAEIDSFLQERV

SEQ ID NO: 45656 - protein, 370 aa, Epidendrum stamfordianum
SDSGKDAGRLSAAWQLYKTQEELVKVAKEYGVKLTMFHGRGGTVGRGGGPTHIAILSQPPDTIHGSLRVTVQGEVIEQSFGEENLCFKTLQRYTAATLEHGMQVPFSPKPEWRALMDEMAIVATDEYRSIVFQEPRLVEYFRLATPELEYGRMNIGSRPSKRKPSGGIESLRAIPWIFAWTQTRFHLPVWLGFGAAFKHVIQKDLKNLQILREMYNEWPFFRVTIDLIEMVFTKGSPGIAALYDKLLVSPELLSFGEQLRAKYEETKRLLLKVAGHKELLEGDPYLKQRLRLRNPYITTLNVCQAYTLKRIRDPSYHLTGKPHPSTEMMNSNNQAAELVKLNPTSEYAPGLEDTLILTMKGIAAGMQNTG

SEQ ID NO: 45657 - protein, 310 aa, Escherichia coli O157:H7 EDL933
MDNLDVICIGAAIVDIPLQPVSKNIFDVDSYPLERIAMTTGGDAINEATIISRLGHCTALMSRIGKDAAGQFILDHCRKENIDIQSLKQDVNIDTSINVGLVTEDGERTFVTNRNGSLWKLNIDDVDFARFSQAKLLSLASIFNSPLLDGKALTEIFTQAKARQMNICADMIKPRLNETLDDICEALSYVNYAEAKLLTGKETLDEIADSFLACGVKTVVIKTGKDGCFIKRGDMTMKVPAVAGITAIDTIGAGDNFASGFIAALLEGKNLRECARFANATAAISVLSVGATTGVKNRKLVEQLLEEYEG

SEQ ID NO: 45658 - protein, 347 aa, Escherichia coli O157:H7 EDL933
MKNSKAILQVPGTMKIISAEIPVPKEDEVLIKVEYVGICGSDVHGFESGPFIPPKDPNQEIGLGHECAGTVVAVGSRVRKFKPGDRVNIEPGVPCGHCRYCLEGKYNICPDVDFMATQPNYRGALTHYLCHPESFTYKLPDNMDTMEGTLVEPAAVGMHAAMLADVKPGKKIIILGAGCIGLMTLQACKCLGATEIAVVDVLEKRLAMAEQLGATVVINGAKEDTIARCQQFTEDMGADIVFETAGSAVTVKQAPYLVMRGGKIMIVGTVPGASAINFLKINREVTIQTVFRYANRYPVTIEAISSGRFDVKSMVTHIYDYRDVQQAFEESVNNKRDIIKGVIKISD

SEQ ID NO: 45659 - protein, 311 aa, Nostoc punctiforme PCC 73102
MKLDTLPPIRETRKLTPISDDDLAIILMIRHFELSLLELFSSGKLNGTTHTCLGQEYIPVALKAVLTDSDFILSNHRGHGHYLARFEDPEGLLAEIMGKEGAVCHGVGGSQHIYRKNYLSTGIQGESLPVAAGIALHLRRQGNFGMAVVHIGDGTWGEGGVYEALNIAQLWGLPVLVIVENNKIAQSTPTQLQMAGTIAGRVQGFGINYLKVDSIDINEIRTLISSHIQSARTKSLPLVIEFDTNRVGPHSKGDDTRDIQELERIQKWDWYSVYQQQYSDQFERIELKVKTEISSLIRDVESRELVQWKLL

SEQ ID NO: 45660 - protein, 459 aa, Escherichia coli O157:H7 EDL933
MDQITKPHCGARLDRLPDCRWHSSMFAIVAFGLLVCWSNAVGGLILAQLKALGWTDNSTTATFSAITTAGMFLGALVGGIIGDKTGRRNAFILYEAIHIASMVVGAFSPNMDFLIACRFVMGVGLGALLVTLFAGFTEYMPGRNRGTWSSRVSFIGNWSYPLCSLIAMGLTPLISAEWNWRVQLLIPAILSLIATALAWRYFPESPRWLESRGRYQEAEKVMRSIEEGVIRHTGKPLPPVVIADDGKAPQAVPYSALLTGVLLKRVILGSCVLIAMNVVQYTLINWLPTIFMTQGINLKDSIVLNTMSMFGTPFGIFIAMLVMDKIPRKTMGVGLLILIAVLGYIYSLQTSMLLITLIGFFLITFVYMYVCYASAVYVPEIWPTEAKLRGSGLANAVGRISGIAAPYAVAVLLSSYGVTGVFILLGAVSIIVAIAIATIGIETKGVSVESLSIDAVANK

SEQ ID NO: 45661 - protein, 588 aa, Lentinula edodes
MDSDDIAPIAILMDELRSEDVQLRLNAIHSIPTIALALGPDRARDELVPFLQDSIDDEDEVLLALAEELGRSFEQYIGGSEYAHLLLAPLENLSSVEETLVRDKAAESITKIAAVLSNAQIEEYCIPLLKRLSGAEWFTSRTSSAALYPAVYDRVPTAIQDDLRKGYAALGSDDTPMVRRAAAKWLGPLLLKFSDPHILSDALPIYRRLESDDQDSVRLLTVEDLIAIAGKLKQSEIKEQLLKQIRHSIGDKSWRVRYMAATHFNELAKAVGKEITREELIGQYVQLLKDNEAEVRTAASSQIPGFSELLEKEVILARIVPCVRDLSQDSSQHVRAALAMQISGLAPLLGRESTIEHLLPLFLQLLKDDFPEVRLNIISKLEIVNNVIGIELLSENLLPAIVELAEDKSWRVRQAIIEYIPPLAKQLGKPFFDEQLGNLCMSWLGDTVYSIREAAIVNLKNLTDVFGVDWSRSAIVPKVMGMGQHPNYLFRMTTVQAITIIMPSLNLDIVRSEIIESLLQLASDPIPNIRFNVAKSLEVLLSAYGNTPEGEAFVQQRILPVLEQQKNDQDADVRYFAARALQKVAVVT

SEQ ID NO: 45662 - protein, 397 aa, SYNECHOCOCCUS SP. WH 8102
MSETPMKAMILAAGKGTRVQPITHVIPKPMIPILQKPVMEFLLELLKEHGFNEVMVNVSHLAEEIENYFRDGQRFGVEIAYSFEGRIEDGELIGSALGSAGGLKKIQDFQNFFDDTFVVLCGDALIDLDLTEAVRRHREKGALASLVTKRVPKEQVSSYGVVVTDAEDRISHFQEKPKVEEALSDTINTGIYIFEPGIFDHIPSGVSFDIGSDLFPKLAELGAPFYAIPMDFEWVDIGKVPDYWQAIRSVLLGDVRQVGIPGKEIQPGVYTGLNVAANWDKINVSGPVYVGGMTKIEDGATIVGPAMIGPSCHICEGAVIDNSIIFDYSRIGAGVQLVEKLVFGRYCVGKDGDHFDLQEAALDWLITDARRQDLVEPSPQQKAMAELLGTELTQAAS

SEQ ID NO: 45663 - protein, 451 aa, Arabidopsis thaliana
MLEAPSYLVSRDLPSSCEEESKWIYNAHCVLQLSLRKRLLDDTDVEGSSAKKMLRVDHGSRGESDKITDSLQLAKTYQSSNQSQQGGGGDQQSSPVTRLDQNALLNCLAHCSLSDFGSIASTNRTFRSLIKDSELYRLRRAKGIVEHWIYFSCRLLEWEAYDPNGDRWLRVPKMTFNECFMCSDKESLAVGTELLVFGKEIMSHVIYRYSILTNTWTSGMQMNVPRCLFGSASLGEIAVIAGGCDPRGRILSSAELYNSETGEWTVIPSMNKARKMCSSVFMDGNFYCIGGIGEGNSKMLLCGEVYDLKKKTWTLIPNMLPERSSGGGGDQAKEIAAATAASEAPPLVAVVKDELYAANYAQQEVKKYDKRLNVWNKVGNLPERASSMNGWGMAFRACGDQLVVVGGPRAIGGGFIEINACVPSEGTQLHWRVLASKPSGNFVYNCAVMGC

SEQ ID NO: 45664 - protein, 441 aa, Salmonella typhimurium LT2
MYHGQLKNILLLSLRFIMDKLSYASDSSTSAWNTYLQQIERVAPYLGELSPWVDTLRHPKRALIVDIPVQMDDGTIRHFEGYRVQHNLSRGPGKGGVRYHPDVDLNEVMALSAWMTIKCAALNLPYGGAKGGIRVDPFSLSEGELERLTRRYTSEIGIIIGPQKDIPAPDVGTNGKVMAWMMDTYSMNHGTTVTGVVTGKPIHLGGSLGREKATGRGVFVSGLEAARRANIAVEGARVAVQGFGNVGSEAARLFAGAGARVVAIQDHTATLFNATGIDMKALTAWQTEHKQIAGFPGAETIASDAFWRLEMDILIPAALEGQITRQRAEALTCKLVLEGANGPTYPDADDVLASRGILVVPDVVCNAGGVTVSYFEWVQDMASFFWSEEEINARMDKIMTDAIVHVWEKAAEKSCSLRTAAYIVACERILLARKDRGIYPG

SEQ ID NO: 45665 - protein, 570 aa, Salmonella typhimurium LT2
MIPPEIRRSVLLQKAIKLALAGTLLTFASFSATAADPSSDTETPQPPDILLGPLFNDVQNAKLFPDQKTFADAIPNSDPLMILADYRMQRNQSGFDLRHFVDVNFTLPKAGEKYVPPAGQSLREHIDGLWPVLTRSTKNVEKWDSLLPLPESYVVPGGRFREIYYWDSYFTMLGLAESGHWDKVADMVANFGYEIDAWGHIPNGNRTYYLSRSQPPFFAFMVELLAQHEGDDALKEYLPQLQKEYAYWMEGVETLQPGQQNQRVVKLEDGSVLNRYWDDRDTPRPESWVEDIATAKSNPNRPATEIYRDLRSAAASGWDFSSRWMDNPQQLSTIRTTTIAPVDLNALLYQLEKTLARASAAAGDRAKASHYDALANARQKAIEMHLWNNKEGWYADYDLKNNKIRDQLTAAALFPLYVNAAAKDRAAKVAAAAQAHLLQPGGLATTSVKSGQQWDAPNGWAPLQWVAAEGLQNYGQDDVAMEVTWRFLTNVQHTYDREKKLVEKNDVSSTGTGGGGGEYPLQDGFGWTNGVTLKMLDLICPQEKPCDSVPSTRPASLSATPTKTPSAATQ

SEQ ID NO: 45666 - protein, 589 aa, Pseudomonas syringae pv. tomato str. DC3000
MISLVSRRQRQAIRLAASFIAPYRWQALGALLALVVTAGITLSIGQGIKLMIDQGFMTRSPQLLERSIGFFMLLTVGLAIGTFSRFYLVSWIGERVVADLRKKVFDHLIELHPGFYENNRSSEIQSRLTADTTLLQSVIGSSLSMFLRNALMVVGGIVLLFITNPKLTSIVVVALPLIIAPILMFGRRVRTLSRESQDRVANVGSYVAEALGQIKTVQAYNHQQQDKQRFAHTVEQAFDTARKRILQRSWLITLVIVLVLGAVAVMLWVGGMDVISGRISSGELAAFVFYALVVGMAFGTLSEVIGELQRAAGAAERIGELLQARSEISAPTTGLQTLPQRISGGLALEGVSFAYPSRPERNAVDDLTLTVEPGETLALVGPSGAGKSTIFDLLLRFYDPGCGRILIEGVPAVQLDPHDLRRCFAMVSQTPGLFFGSVEDNIRYGNVNASFEQVQAAARIAHAHEFILEMADGYRTHLGEGGLGLSGGQRQRLAIARALLVDAPILLLDEATSALDAQSEHLIQQALPSLMKGRTTLVIAHRLATVQNADRIAVMDQGQLVAVGTHQQLIASNPLYARLAALQFNAGVE

SEQ ID NO: 45667 - protein, 319 aa, Erwinia carotovora subsp. atroseptica SCRI1043
MSGLVNGKWVNGDVAAEEIKNGAFHREETKFRQTELVPEAGRYQLFVSYLCPWASRTLIFRKLKGLENIISLSIANPRIADNGWEFATPQDAGEHAGEIHYLHQLYTASVPDYTGKVSVPVLWDRVEGRIVNNESADIIRMLNSEFNDLTGNHLDFYPSELHSEIDRWNETVYHNVNNGVYKTGFAKTQEHYNDAVTTLFTTLDELDDHLGSHRYILGDTLTEADWRLFVTLIRFDVAYHGAFKCNLKRIADYPNLSNYLRELYQWPGIAETVNIDHIKAGYYSIAWLNPTQIVPVGPQVDLYQPHNREILGTSRIATR

SEQ ID NO: 45668 - protein, 341 aa, Pseudomonas fluorescens PfO-1
MRSFFHPEQLLHHPRSYYSRGQMRTPQEVPERAQRLVQAAHGLGFSVEQPADAGLAPLLAVHGAPYLTFLQEAHARWKEIPEDWGDEVMSNIFVREPNALRGILAQAARYLADGSCPVGEQTWRSAYWSAQSAVAGAQALIDGEPAAYALCRPPGHHARAEAAGGFCYVNNAAVAAQVLRDKFEKVAVLDTDMHHGQGIQEIFYDRDDVLYVSVHGDPTNFYPGVAGFADERGSGAGEGFNLNLPMAHGSSEADFLGQLEVALAAVREFGAEVLVLSLGFDIYELDPQSKVAVTREGFAALGERIRSLDLPCLIVQEGGYHLESLEDNARAFFVNAEVWQI

SEQ ID NO: 45669 - protein, 1267 aa, Oryza sativa
MVFKGRFFSSRHKSSESSSPTDGSNSPRTPTSAPPAAGSPAAASSSSSSRSDKKKPKSETPRKRDKLFGGSASGSAASKGGAGAAPASASSSPSADGRKAAAAQLRDGGAGGASAAALSPILASSLGLNRIKTRSGPLPQEGHRIAAALGSSNLSRGQAQADPSAASAGGGGGGGRKAGSSWADSTSGSRGKGKAAEHPARGATATSLEGKSSAKVKPNALRNHSGDLRTPTHIPDNVCAYDPCETPKESESPRFKAIMQATSAPRKRVPADIKSFSHELNSKGVRPFPFWKPRGIYNLKEVLKVIQVRFEKAKEEVNSDLAVFAGDLVGVMEKYADSHPEWKETLEDLLILARSCCVMTPGEFWLQCEGIVQDLDDHRQELPMGVLKKLYTRMLFILTRCTRLLQFHKESGFAEDEVVMDQRDKIIQSADRQILAQPGDDTTTRGSKSDVRKSYSQEQHNLKWKRSQEIKPVKFLSPLDTTDVKKEVESPTRERISSWKPFPSPVPKPPKDPTPIKEESPNKKTDTPPAVSSQAELNSPVESTSHQSLPPKHQHKTSWGHWSDQPNISEEGSIMCRICEEYVPTHYVENHSAICASADRCDQKGVSVDERLIRVAEALEKLVESYTQKDLPNAVGSPDVAKVSNSSINEESDGPSPKLSDWSRRGSADMLDYLQEADSTISLDDIKNLPSMTCKTRFGPKSDHGMATSSAGSMTPRSPLTTPRSNHIDMLLAGRSAINESDDLPQIVELADIARCIATTPLDEERALSLLVTCIEDLQEIVNRRKHEALTVQTFGTRIEKLHREKYLLLCDSVDMDKVDSASTVMDEEDDVVRSLRASPVHPVKDRTSIDDFEIIKPISRGAFGRVFLAKKRTTGDLFAIKVLRKADMIRKNAVESILAERDILITVRNPFVVRFFYSFTSRENLYLVMEYLNGGDLYSLLRNLGCLDEDVARIYLAEVVLALEYLHSMHIVHRDLKPDNLLIAHDGHIKLTDFGLSKVGLINSTDDLSGPAVSGSSLYGDDEPQMSEFEEMDHRARRQKRSAVGTPDYLAPEILLGTGHGTSADWWSVGVILFELIVGIPPFNAEHPQTIFDNILNRKIPWPHVPEEMSSEAQDLIDKLLTEDPHQRLGANGASEVKQHQFFKDISWDTLARQKAAFVPSSDSAFDTSYFTSRYSWNPSDENIYEAYEFEDSSDNGSLSGSSSCVSNHQDDMGDESSGFTEFESSSNVNYSFSNFSFKNLSQLVSINYDLLTKGLKDDPPTKSET

SEQ ID NO: 45670 - protein, 537 aa, Rickettsia conorii str. Malish 7
MVHFIFVTGGVVSSLGKGLTAASLAMLLQAKGFRVSVRKLDPYLNIDPGTMNPHEHGEVYVTDDGAETDLDLGHYERFTGVSACKFDSITTGAIYSKLLKDERLGNYAGVTVQVIPHVTNIIKDFILSNTKGFDFIICEIGGTVGDIEGLPFFEAIRQIGNKLKSENCLFIHLTLLPYVKTARELKIKPTQHSVKALRAIGISPNILVCRAERNISKGEIDKISLLCNIESEYVVPAIDQKNIYLVPIAYHNSGLDNKVLKFFNINIMPSKLDKWHDIINRLKDSNSKVRIAIIAKYHKLKDAYKSVIEALDHAGIYYKYKIDLVWINAENLTEENINKKLLDIDGILVPGGFGERATKGTIIAIKYARTNNIPFFGICFGMQLATIEIAQNLIGIKDAVTEEFKVDGTKIIEKINKNCEDSKITIENVKKTMRLGSYPCSLVASTIAANAYKSLEINERHRHRYKFNNEFQNIFEKHGIVFSGFSKDEEIVEIIELPLLRWFVGVQFHPEFKSKPFEAHPLFIQFIKAAIEYNKCN

SEQ ID NO: 45671 - protein, 221 aa, Lactobacillus acidophilus NCFM
MLKGLIFDLDGVLTDSARFHLTAWNNLAKELGITLTNEQLDSLRGISRMDSLNLILKYGGQEDKYTEAEKEKFAAEKNAKFVEQVETMTPKDILPGIPELLSDAKKQNLKMVIASASKNAPKILTRLGIMDEFDGIVDPATLHHGKPDPEIYIKAQELVGLKANEVISFEDAQAGVEAIKAAHQFAVGIGNKKLLKEADYIVPTTADLKLSEIEKVFEEKE

SEQ ID NO: 45672 - protein, 271 aa, Euglena gracilis
MPFDRQPLLSGEKGMPATSLWLVGGAVIAAVCVIVNTSYNGTQLSVTARPIQAAVSQVSMARFAESGVSRGSGNRVSQAVPLMAASVGAESESRRWVASAILFPLSGLFAAVALKMAMMKPKVAAVLPFTSEKDMKVWNPVNNKKFETFSYLPPLSDAQIAKQVDMIIAKGLSPCLEFAAPENSFIANDNTVRFSGTAAGYYDNRYWTMWKLPMFGCTDASQVLREISECRRAYPQCYVRLAAFDSVKQVQVISFVVQRPSGSSSSSWGMA

SEQ ID NO: 45673 - protein, 573 aa, Lactobacillus acidophilus NCFM
MQLAALRHRTESEDSFVVDPKHVRVRFHTAKNDVEKVIVHYCDNYLPLKFAETTEMEKIGEGQVEDYWGITLDAPYHRLKYTFEVIGKDGTSVVYGDRAISDDIKDAINEDGSYFKIPYCHEIDMVKTPDWVKNTVWYQIFPERYANGDKSNDPKNIKPWNPTDHPGREDYYGGDLQGVLDHLDYLQKLGVNGLYFCPIFKASSNHKYDTIDYLQVDPEFGDKDLFAKVVNEAHARGMKIMLDAVFNHLGDQSMQWQDVVQNGSKSRFADWFHINEYPVEPYRNPLKGEKNPQYDTFAFEEHMPKLNTANPEVQDFLLEIATYWVKYFDIDAWRLDVANEVDHHFWKKFHKAVTDIKPDFYIVGEVWHSARPWLNGDEFTGVMNYPYTLQIEDHFFKHKLTADQMTTRLTDQLMKYRDSTNEAMMNMLDSHDTARILTVAKGDQDLALQALTFEFMQKGSPCIYYGTEMGMAGDNDPDCRKPMDWSKEDGPVWQRVHKLIKFRLAHDKTLSEGKIKLSVTENRLIEVIREGKESIHAYFNTTKNDVKLDGKAELSQDFEKGILAPKGFVIMVD

SEQ ID NO: 45674 - protein, 551 aa, Lactobacillus acidophilus NCFM
MSHWYDHAIIYQIYPKSFQDSNDDGIGDLNGIRKRIPYLQNLGVNAVWLNPVFVSPQVDNGYDVSNYFAIDSHMGTMEDMENLIKDLHKAGIHIIMDFVLNHTSDQHPWFQDAIKNPDSLYRDYYIFAGHDNKQPNNWGSFFGGSVWEPDPAGTGQSYFHLFDKRMPDLNWKNPEVRHAMLEIAEFWLKKGIDGLRLDAFIHIGKADLRQNYPAMDDKPVIAEPFFANLPQVQEWMRPFCEQIKEDYPDALLLGEAASASVNLAVDYTNKRNHLMDCVITFRYFTEDDSKIDKSYSAQYQPKELDLTAFKQNQVVWQQTLADISQPTLYWNNHDMARLATRIAKTSTQAKSLAMLMYLQRGIPIIYYGEELGLKNLHFTSVDQFEDQTVAPWIKEAQKAGISRDAAFAMVSDTHKLPARGPMPWNDTENNGFTSAKPWLNGISQDDVTVANEVNSDNSMFTFYKNMLNLKKEKLFQDGTYYMISTGKDSYVYQRDLGNESAIVAVSLSNKKISIDLPEEYIKELLKAGEYQLTNGKLTLMPYAGVVLKKEN

SEQ ID NO: 45675 - protein, 472 aa, Escherichia coli CFT073
MPLNKKDTQGKGVKNASTVSEDTASNQEPTLHRGLHNRHIQLIALGGAIGTGLFLGIGPAIQMAGPAVLLGYGVAGIIAFLIMRQLGEMVVEEPVSGSFAHFAYKYWGPFAGFLSGWNYWVMFVLVGMAELTAAGIYMQYWFPDVPTWIWAAAFFIIINAVNLVNVRLYGETEFWFALIKVLAIIGMIGFGLWLLFSGHGGEKASINNLWRYGGFFATGWNGLILSLAVIMFSFGGLELIGITAAEARDPEKSIPKAVNQVVYRILLFYIGSLVVLLALYPWVEVKSNSSPFVMIFHNLDSNVVASALNFVILVASLSVYNSGVYSNSRMLFGLSVQGNAPKFLTRVSRRGVPINSLMLSGAITSLVVLINYLLPQKAFGLLMALVVATLLLNWIMICLAHLRFRAAMRRQGRETQFKALLYPFGNYLCIAFLGMILLLMCTMDDMRLSAILLPVWIVFLFVAFKTLRRKVN

SEQ ID NO: 45676 - protein, 423 aa, Lactobacillus reuteri
MAHRDNVVLDVDERPAPWQWFGLSLQHMFSMFGSTVLVPILVGLNPGIALFSSGVGTLMYLLITKHKIPAYMGSSFSFVVPMMALMKTTGYPGIAQGTIAVGCVYLIVSVIVTLVGSQWIDRILPPIVVGPIVVVIGLSLAGTAAKDATINSATGHYDLRFFAVAMLTMAITVIFNMYFKGFLGLIPILMGIVAGYIIAVLFGIVDFSPVAHAHWFSLPDFQIPFVDYHPQLYWGAILSMAPIAFVTMTEHLGHIMVLNELTERNYFKEPGLNHTLAGDGTASIIAGFVGGPPVTSYGENIGVMAITRVHSVYVIAGAAVFAIFFSFIGKLSALIESIPSPVIGGISFLLFGVIASSGLRVMIENKIDFNEKRNLMISSVILVIGIGNAYLQLGKYQFSGLAVAAVLGIIMNLILPQKAKSEM

SEQ ID NO: 45677 - protein, 385 aa, Pyrocystis lunula
MSKPDHVLAEVRPFDGGKGSNHGASGEASNKKTSFTYNAERVLGSGSFGIVYQAQVVETGESVAIKKVFQDKRYKNRELQIMRELKHPNVVELKHAFYTSGDKPGESYLNVVMEYCSDTVYKMMKHYIKMKTPVPHIFVQLYSYQMNRACAYIHSVGICHRDIKPQNLLVDGTTHALKLCDFGSAKRLVKGEPNVAYICSRYYRAPELIFGATDYSTIIDIWSTACVTAELILAQPIFPGESGVDQLVEIIKVLGTPTREELMAMNPNYTEFKFPQIKPHPWHKVFLLQDHAGGRRLHLEAPRVRPEGAALGARVLCTPAVCDLRDRNTLISNAKGQALPSSIFAFSQEERALMDSDLRRKLIPDWVATRDKEQGPGAHDVGGSL

SEQ ID NO: 45678 - protein, 413 aa, Zea mays
NPSAARAEPEPEVERSHAPSAACSFLALATRHHHTHPNLARARSSGRFVAVASMTSAVSTKVENKKPFAPPREVHVQVTHSMPPHKIEIFKSLDDWARDNILTHLKPVEKCWQPQDFLPDPASEGFHDEVKELRERAKEIPDDYFVCLVGDMITEEALPTYQTMLNTLDGVRDETGASPTAWAVWTRAWTAEENRHGDLLNKYMYLTGRVDMRQIEKTIQYLIGSGMDPRTENNPYLGFIYTSFQERATFISHGNTARHAKDFGDLKLAQICGIIASDEKRHETAYTKIVEKLFEIDPDGTVVALADMMRKKISMPAHLMFDGQDDKLFEHFSMVAQRLGVYTARDYADILEFLVDRWKVANLTGLSGEGNKAQDYLCTLASRIRRLEERAQSRAKKAGTLPFSWVYGRDVQL

SEQ ID NO: 45679 - protein, 237 aa, Arabidopsis thaliana
MKIQCDVCEKAPATLICCADEAALCAKCDVEVHAANKLASKHQRLFLDSLSTKFPPCDICLEKAAFIFCVEDRALLCRDCDEATHAPNTRSANHQRFLATGIRVALSSTSCNQEVEKNHFDPSNQQSLSKPPTQQPAAPSPLWATDEFFSYSDLDCSNKKEQLDLGELDWLAEMGLFGDQPDQEALPVAEVPELSFSHLAHAHSYNRPMKSNVPNKKQRLEYRYDDEEEHFLVPDLG

SEQ ID NO: 45680 - protein, 357 aa, Xanthomonas axonopodis pv. citri str. 306
MSDGRRARVWVSQPLFDDVVAQLGEHFELTTTQRVSAYSPAELAAQLAPLDGALITLNERIGAAEIAAAPQLRAIANVGVGYNNLDLDALSAAGILASNTPDVLTETTADLGFALLMATARRITESERWLRDGQWGQWSFKTMLGADIHGSTLGILGMGRIGQGIARRGAHGFGMRVLYHNRSQLPAATEQALGARYVDFDTLLAQSDHLVLVLPYTKDSHHIVDAAALGKMRATATLVNIARGGIVDELALADALANGRLAGAGLDVYEGEPRVRPELLALNNVVLTPHIGSASLATRRAMVQLAVDNLIAALGKGPRAGHPPSALNAAAVAAAKRGGTGADAKKAGVTGTISTKR

SEQ ID NO: 45681 - protein, 542 aa, Bartonella quintana str. Toulouse
MARYIFITGGVVSSLGKGIAAATLAALLQARGYRVRLRKLDPYLNVDPGTMSPYQHGEVFVTDDGAETDLDLGHYERFTGHSANSQDNITTGRIYRNIIERERRGDYLGATVQVIPHVTDEIKRFITTGNEEFDFILCEIGGTVGDIEAMPFLEAIRQLHNELPRQSVIYVHLTLMPYISSVGELKTKPTQHSVKELQSIGISPDILLVRADRPIPETERCKLSLFCNVRPSAVIQALNMPTIYDVPMAYHKEGLDSEVLCAFGIDPTPKPKMDRWEDITYRIHHLEGEVTIAVVGKYTGLKDAYKSLIEAIAHGGLANKVKVNIEWIEAELFEKEDPASYLQKVHGILVPGAFGARGAEGKIQAIQFARERKVPFLGICFGMQLACIEVARNIAKIENASSSEFCETKNPIVGLMTEWLKEDVLEKRAKCGNLGGTMRLGAFAAELKEGSHIAKIYGMTRILERHRHRYEVNVDYKDKLEQCGLIFSGMSPDGVLPEAIEYADHPWFIGVQYHPELKSRPFDPHPLFSSFIEATVEQSRLV

SEQ ID NO: 45682 - protein, 215 aa, Candida albicans SC5314
MFKTLTTSKVIINKFNYKLIKPISLTNFKSISTTTTNLFNTNNNKMSFQYKQPEHKLTLIPGPIEFSDDVLASMATPSQAHTSPEFISTFQSVLKSLRKVFKSTDTNTQGYVLSGSGTLGWDVASSNLLNPGEKVLVLSTGFFSDSFAECLKVYGADVDVLTAEVGDVVPLDKIEQQLQKEKYSAITITHVDTSTSVVSDVEAISKVVKKFLSIL

SEQ ID NO: 45683 - protein, 212 aa, Halobacterium sp. NRC-1
MADNDIEEAVARALEDAPQRNFRETVDLAVNLRDLDLNDPSQRVDEGVVLPSGTGQETQIVVFADGETAVRADDVADDVLDEDDLSDLADDTDAAKDLADETDFFVAEAPMMQDIAGALGQVLGPRGKMPTPLQPDDDVVDTVNRMKNTVQIRSRDRRTFHTRVGAEDMSAEDIASNIDVIMRRLHANLEKGPLNVDSVYVKTTMGPAVEVA

SEQ ID NO: 45684 - protein, 848 aa, ASPERGILLUS NIDULANS FGSC A4
MNNDSFSSFKFRRPSSKLHKDPPGYGSRALNSQQSTTSLKRHPSAPVYPRSSAAGSREHLRTRSNAYGSSSSSLDQNSAGASPVLGSSDSGHFHSSHSSRSRPPYSGRFSLNDQSSDELIGAPFDSRGMLSALEEHTAEPDNRSYQPPDPAERYTEKPPNFRSQTTPNPRALRQSASFTTLPPRMEAFPNAAGNDRPTNTKRFSDEATPVRPPGPSRSKKSSFSSFVNSMLGSPRGIKISAPENPVHVTHVGYDNQTGQFTGLPKEWQRLLQESGITQKEQEEHPQTMVDIMRFYEKNARGDDEVWHKFDHAYPQQPTAASPISQPAGSTTYGTQRTSPPTSPRFPQNHEGSFENPRAPPPIPRAAPIAAHAMSPPLGGLVPNRAPPKPPTAAANLVPSRPAPQPPTSSPYSNISTRPSPETQSPQFSTPPIPETEPLPSESQRSRSNSRTNGAQGPWPSVSPSHYQQQQEQAMAVAQQALANKQLERSRSQRQQQQSPRPDQMPIAQPALPQHAPSPEDVALTQASQTARAAPAARPRQRPRQSNAMDVRARLVAICTPGDPTKLYYNLNKIGQGASGGVFTAYEQHTNNCVAIKQMNLDLQPKKDLIINEILVMKDSKHKNIVNFLDSYLHGLDLWVVMEYMEGGSLTDVVTFNIMSEPQIAAVCRETLNGLQHLHSKGVIHRDIKSDNILLSLDGNIKLTDFGFCAQINDSQNKRNTMVGTPYWMAPEVVTRKEYGRKVDIWSLGIMAIEMIEGEPPYLTESPLRALYLIATNGTPKIKDEHNLSPVFKDFLHFALRVDPEKRASAHDLLKHPFMNLCAPLNHLSPLVKAARISRAQEKAQKGGV

SEQ ID NO: 45685 - protein, 241 aa, Brassica napus
  misc_feature (217)..(217): Xaa can be any naturally occurring amino acid
  unsure (1)..(241): unsure at all Xaa locations
MAAKTARSKSTSTKENGVRVEEGLSLFKSDKFDADAYVQSKCSINEKDIKQLCSYLLDLKKASAEEMRRSVYANYPAFIRTSKEISDLEGELSSIRNLLSTQATLIHGLANGVNIDHDGSPANGVLSFEDNDLSDLEKWAAEYPDQLDALLAERRVDEALAAFDEGELLISQANENHTLSSSLLSSLQFAIAERKQKLADQLAKAACQPSTRGGELXRSAITALKRLGDGPRAHTVLLDAH

SEQ ID NO: 45686 - protein, 374 aa, ASPERGILLUS NIDULANS FGSC A4
MPGPAPNLFSFQDTDALAKQLRPYVLRNQNAALSRHNTFRVAVSGGSLPTVLAKALLAPGDGTPEDTAQFSKWEIFFADERAVPLDHEDSNYRLLKDELLSKIPSELGSPNVHTIDEKHVNGDPQELADLYQEELMRSFAAKDSVKLPVFDLILLGCGPDGHTCSLFPGHELLREKDAWVSAISDSPKPPPKRITLTLPVVTHAVSIAFVATGGGKKDILKQIFDAEEGRSLPSALVNQGGELKSIGQILMFHASTLKRVVGQYIKSFLYMAFYFVPLFLRLLLHVLAGIRPRLNRAPNIIVNGKLSLIYGLRNYGILAGHKWYMCETVSLGLSHAHACFSVTVSVKRDRLTLKPKLVRVQYLIPLISFKRVVV

SEQ ID NO: 45687 - protein, 462 aa, Silicibacter pomeroyi DSS-3
MATYDVIIIGAGPGGYVCAIRCAQLGLKTAVVEGRETLGGTCLNVGCIPSKALLHASHSLHEAQHNFAKMGLKGKSPSVDWKQMLAYKDEVIEGNTKGIEFLFKKNKIDWIKGWASIPAAGKVQVGDDTHEAKNIIIASGSEPASLPGVEVDEKTVVTSTGALELGKIPKSLVVIGAGVIGLELGSVYARLGAEVTVVEFLDVITPGMDGEVQKTFQRILKKQGLTFVMGAAVQKTEIARGKAKVTYKLLKKDTEHEIEADTVLVATGRKPYTAGLGLDKLGIEMTQRGQIKVGKDWQTNVPGIYAIGDVIEGPMLAHKAEDEGMAAAEQVAGKHGHVNYGVIPGVIYTTPEVANVGATEESLKAEGRAYKVGKFMFMGNGRAKANFASDGFVKILADKETDRILGAHIIGPAAGELIHEVCVAMEFGASAEDLALTCHAHPTYSEAVREAALACGDGPIHS

SEQ ID NO: 45688 - protein, 591 aa, Arabidopsis thaliana
MKYVLVTGGVVSGLGKGVTASSIGLLLQACGLRVTSIKIDPYLNTDAGTMSPFEHGEVFVLDDGGEVDLDLGNYERFLDSTLTRDNNITTGKIYQSVIDKERKGDYLGRTVQVVPHVTDAIQEWIERVANVPVDGKEGPPDVCVIELGGTIGDIESMPFIEALGQFSYKVGPGNFCLVHVSLVPVLSVVGEQKTKPTQHSVRGLRSLGLTPNILACRSTKALEENVKTKLSQFCHVPEVNIVTLYDVPNIWHVPLLLRDQKAHEAILRELNLSNAIKPDLTEWTARTKIYDTLQDPVRIAMVGKYTGLTDSYLSVLKALLHASVACHKKLVIEWVAASDLEEITAQETPDVHKAAWDLLKGADGILVPGGFGDRGVQGKILATKYARENQVPFLGICLGMQLAVVEFARSILGFHDANSTEFEPETSSPCIIFMPEGSTTHMGGTMRLGSRKTYFQVADCKSAKLYGNAKFVDERHRHRYEVNPDMISEIEKAGLSFVGKDETGRRMEIVELPSHPYFVGAQFHPEFKSRPGKPSALFLGLIAAASGCLESVLQTGGKVNIVSKNGVANGSAMGKVHQNGNVYSNGNGLHH

SEQ ID NO: 45689 - protein, 967 aa, Arabidopsis thaliana
MEATAVNPSIVTASRTVQPYRRLSTLSLRFPTYRNKRVSPFTLTITRCSTTKSREAGQDSSISLKRGLVFDLGVSKDSWHSEEIGSPVVKRFLSDNEERWYMWYHGSSKQNPVSDSIGLAVSNNGIHWERGNGKVESSEDVGLVMSCGEDWWGFDTASVRPGEVVIMSSSKVRANSSVYWMYYTGYTKETVEFQSQDFTSVLGNPERFHLCDENAEKSRVYYRSLPGLAISQDGRHWARIEGEHHSGALFDVGSEKDWDFLYIASPHVVFHGDGDLRMYYHSFDEKTGEFCIGMARSRDGIKWLKLGKILGGRKSEKDGLGFFDELGGRYPCVTRNKRDESYVMAYEGVDRTGKTSIGFAVSKDGIKDWKRVQDEEAVIAVGEGGAWDNEGVGCPYLIEMDGDSDHQWRLYYRGVGNGGRTAMRGEQFELEEDRDGPLELLQSLRSKATELLLREEWEESIKVYTEFIDLSRRQVSSTGGSDPDPDSIAKLRKSLCLALCNRAEARARLRDFLEAMRDCDQALEIEKTHFKTLLCKGKVLLGLSKYSLALECFKTALLDPQASDNLETVTVYIEKCKKLEFQAKTGAFDLSDWILSEFRGKCPELAEFIGSIEIKKSELSGRGLFATKNIVAGTLVLVTKAVAIERGILGNGECGEKAQLIMWKNFVEEVTESVRKCGRTRRVVSALSTGQGEDSLEIPEIALFRPDEAFETCGDWKQSLDTEKLLSILDVNSLVEDAVSGKVMGKNKEYYGVGLWTLASFINHSCIPNARRLHVGDYVIVHASRDIKTGEEISFAYFDVLSPLEKRKEMAESWGFCCGCSRCKFESVLYATNQEVREFEMGLERGVDAGNAVYMVEEGMKRWKVKGKDKGLLRASYWGVYDEIYNSERLMKRWGRKIPTMEVVVDSVSDVVGSDERLMKMAVEGMMKKHGGFSNIVEMEKIMKLGKGVYGKVVSKKKAMKTLLGIE

SEQ ID NO: 45690 - protein, 109 aa, Anabaena sp.
MQTLPKERRYETLSYLPPLTDAQIEKQVQYILNQGYIPAIEFNETSEPTEFYWTMWKLPLFNAQSTREVLGEVQACRSQYPTHYIRVVGFDNIKQCQILSFIVHKPSRY

SEQ ID NO: 45691 - protein, 715 aa, ASPERGILLUS NIDULANS FGSC A4
MAGWFSSASPLDEQIERATASSLEDIALNLEISDLIRSKGVQPKDAMRSLKRRLENKNPNIQIATLKLTDTCVKNGGTHFLAEIASREFMDNLVSLLKAEGVPLNSSVRDLMLALIQDWAMAAQGRMDLSYLGETYRKLQMEGFQFPPKSAISGSMLESSAPPEWIDSDVCMRCRTPFSFMNRKHHCRNCGNVFDAQCSSKTLPLPHLGILQPVRVDDGCYAKLTSKPFNQGSLADRSTFKNNSITKSNVLEPRAARVESGFDEDLRRALQMSLEEAQNKSSSGYVPQPKPAQAPANTQPQPSTDEEEDADLKAAIEASLRDMEEHKQKYAAALKNNTSAESSRETPAAASLPKNPYELSPVEVENIHLFSTLVDRLQHQPPGTILREPQIQELYESIGALRPKLARSYGETMSKHDTLLDLHAKLSTVVRYYDRMLEERLSSAYSQHNLGYGPVPGGAQYPNIYPSMPSTTAEVRPGAENFYYGNSGVEPPAPARTPYSQPPLERENGVVSSSMHPPLQQPSSGPYWNPNNHSIASPQPNVNAFNSNNTPYPGPGAPSQFYTSSAYQEPEKLFQQPRQGEPESPYQPSPVTNRDSYYQSAGLPSNPVEQQPPVDHGQSPGHAQPADSRSSQSGQPKATEPSAQSYYLPQEQQQQQQQQQQQSAQGTGYQGYPQGNTNYQAPYGGDVSPISAPPPVQYQQPAAPRPVVEESLIEL

SEQ ID NO: 45692 - protein, 424 aa, Burkholderia fungorum LB400
MHSVPSYLNKDDLGPWGNYLRQVDRVAPYLGSLSRWLETLKRPKRILIVDVPIELDNGTVAHFEGYRVQHNVSRGPGKGGVRYHQDVTLSEVMALSAWMSVKNAAVNVPYGGAKGGIRVDPRTLSRGELERVTRRYTSEIGIIIGPNTDIPAPDVNTNEQIMAWMMDTYSMNQGQTATGVVTGKPITLGGSLGRREATGRGVFVVASEAARRIGVDIEGARIAVQGFGNVGGIAARLFQEAGSKLVAVQDHTGSLYKSTGIDAVALLEHVAKHGGVGGFPEADAVSNEEFWTVESDILIPAALENQITEKNAAKIRTKIVVEGANGPTTTAADDILHDRGILVIPDVVANAGGVTVSYFEWVQDFSSFFWTEDEINQRLERVMREAFAAVWQVSSEQKVSVRTAAFIVACKRILEARELRGLYP

SEQ ID NO: 45693 - protein, 432 aa, Prochlorococcus marinus str. NATL2A
MTDALNTKRSEEIFGAAKNLMPGGVSSPVRAFKSVEGDPIVFDRVKGPYAWDVDGNRYIDYVGSWGPAICGHAHPEVIAALQETLEKGTSFGAPCVLENQLAEMVIDAVPSVEMVRFVNSGTEACMAVLRLMRAFTGRDKVIKFEGCYHGHADMFLVKAGSGVATLGLPDSPGVPRSTTANTLTAPYNDLEAVKELFAENPDAISGVILEPVVGNAGFITPEPGFLEGLREVTQENGALLVFDEVMTGFRISYGGAQERFGVTPDLTTMGKVIGGGLPVGAYGGRKEIMSMVSPSGPMYQAGTLSGNPLAMTAGIKTLELLKQEGTYEKLEAITKKLLDGILTAAKESNIPIYGQSISAMFGFYLCEGPVRNFEEAKSSDTELFSKIHRLMLQKGVYLAPSAFEAGFTSLAHSEDDINATIKAFKEIFSEMS

SEQ ID NO: 45694 - protein, 136 aa, Lilium longiflorum
MARTKQTARKSTGGKAPRKQLATKAARKSAPTTGGVKKPHRYRPGTVALREIRKYQKSTDLLIRKLPFQRLVREIAQDYKADLRFQSHAVLALQEAAEAYLVGLFEDTNLCAIHAKRVTIMPKDIQLARRIRGERA

SEQ ID NO: 45695 - protein, 418 aa, Cryptococcus neoformans var. neoformans JEC21
MSPYRLIEYDVGQPLYGVGFSNSVSHPHRVALTSLVTGPTNKLYIADLSHPPDTQPSSPYYPQANNGSSGPSHPPPAYRQLTSTNINLPATKVGWEPEGSVRVDQGGRGELVATTGESLHLWEVAKGWTEGSGHVGHNGWGNERYTLKSRSILSNTKGAHGSLPPVTSFSWNNKSPNKIVTCSIDTTATLWDINTAQAMTQLIAHDRAVYDLCWLPDSSDIFVSVGADGSLRAFDLRQLEHSTILYESSRDAPLARIAFSKKEQHMLACFGLDDSKILILDMRSPGKPVAELIGHQAPLGAIAWGSGGTRGRRESTGGGWLASCGDDSQLLLYDLTAPLPTSRSSSRSNFRNSNATSPYVLSPSATPSSQRTPSPADAVEMMPAKGWTARGEINNLAFTNDGDWVGCVTGTTLKVLHV

SEQ ID NO: 45696 - protein, 216 aa, Streptococcus pyogenes MGAS8232
MIKGIIFDMDGVLFDTEPFYLRRREDFFKTKGIPIDHLNSKDFIGGNLQELWKELLGKNRDDAIVKAITTDYDAYKQAHKPPYQKLLITEVNSCLGQLKKQGIKLAVASNSKRQDVLLALETTQIKDYFEIILAREDVSRGKPYPDIYNKAVQKLGLQKKQLLVVEDSQKGIAAAKAANLTVFAITDYRYGIDQSQADHKIDHLGQLCVKIGCFGS

SEQ ID NO: 45697 - protein, 313 aa, Arabidopsis thaliana
MLWQKEGNRKGLASSDHDIPKSSDPKTLRRLAQNREAARKSRLRKKAYVQQLESCRIKLTQLEQEIQRARSQGVFFGGSLIGGDQQQEAAVFDMEYARWLEEQQRLLNELRVATQEHLSENELRMFVDTCLAHYDHLINLKAMVAKTDVFHLISGAWKTPAERCFLWMGGFRPSEIIKVIVNQIEPLTEQQIVGICGLQQSTQEAEEALSQGLEALNQSLSDSIVSDSLPPASAPLPPHLSNFMSHMSLALNKLSALEGFVLQADNLRHQTIHRLNQLLTTRQEARCLLAVAEYFHRLQALSSLWLARPRQDG

SEQ ID NO: 45698 - protein, 199 aa, Sesamum indicum
MATLGGVHDSNSNPDTHSLARFAVDQHNTKENGLLELVRVVEAREQVVAGTLHHLVLEVLDAGKKKLYEAKIWVKPWMDFKQLQEFKHVRDVPSFTSSDLGAKTDDQVSGWRPVPVHDPVVQDAAHHAIKTIQERSNSLFPYELSEVVHANAEVVDTSAKFDMLLKVKRGGKEEKYKVEVHKSTEEGGFNLKKVDLDHS

SEQ ID NO: 45699 - protein, 434 aa, Oryza sativa
MESRGKILMERYELGRLLGKGTFGKVHYARNLESNQSVAIKMMDKQQILKVGLSEQIRREITTMRLVAHKNIVQLHEVMATRNKIYFVMEYVKGGELFEKVAKRGKLTEVVAHKYFQQLISAVDYCHSRGVYHRDLKPENLLLDENENLKVSDFGLSALSESKRQDGLLHTTCGTPAYVAPEVISKIGYDGAKSDIWSCGVILFVLVAGYLPFQGPNLMEMYRKIQHGEFRCPGWFSRKLQKLLYKIMDPNPSTRISIQKIKESTWFRKGPEENRILKERTLNENTTKNVAPVLGVRRKKNAHEDVKPMSVPNLNALEIISFSKGFDLSGMFIVKEWRNEARFTSDKSASTIISKLEDVAKALNLRVRKKDNGVVKMQGRKEGRNGVLQFDIEIFEVTTSYHIIEMKQTSGDSLEYRQLLEEGIRPALKDIVLA

SEQ ID NO: 45700 - protein, 138 aa, Acorus calamus
MTKTIPRIGSRRNGRIGLRKTGRRIPKGIIHVQASFNNTIVTVTDVRGRVVSWSSAGTCGFKGTRRGTPFAAQTAAGNAIRTVVDQGMQRAEVMIKGPGLGRDAALRAIRRSGILLNFVRDVTPMPHNGCRPPKKRRV

SEQ ID NO: 45701 - protein, 376 aa, Oryza sativa
MAASEQRVVAVIMVGGPTKGTRFRPLSLNVPKPLFPLAGQPMIPNLAQIYLVGFYEEREFALYVSSISNELRVPVRYLREDKPHGSAGGLYSFRDYIMEDSPSHIVLLNCDVCSSFPLPDMLEAHKKYGGMGTLLVNKVSAESANQFGELVADPETNELLHYTEKPETFVSDLINCGVYIFTPNIFNAIEDVLKQKKDRANLRRVSSFEALHSATKALPADYVRLDQDILSPLAGKKELYTYQTLDFWEQIKTPGMSLRCSGLYLSQFRHTSPHLLASGDGKRSATIIGDVYIHPSAKIGPNVSISANARIGAGARLIHCIILDDVEIMGEGDHNAKLGITILGEAVDVEDEVVVVNSIVLPNKTLNVSVQEEIIL

SEQ ID NO: 45702 - protein, 769 aa, Xanthomonas oryzae pv. oryzae KACC10331
MTAQTGGLRAWCIAATLAALTAALAACLQWSSLQGPWRAITAVAAVLAVVCGICAAAAAYRAAPAQHALAQRLEEAERARERLQQELQRHGELEQELLRAKQAAEAAMLAKGEFLATMSHEIRTPLNGIIPMLELISSGQLSLDQRDMLQTATSSSLQLLRIVDDILDYSKLEANKLELEITTFNLRELLDGVVQLLQRTAEGRQLRLSLDIEPSVRLLVRGDPIRLRQVLGNLIGNAIKFTERGSVDIQLRRLGETRAQHLLRFQVRDTGIGIAPDQQTRLFRSFAQADASTTRLYGGTGLGLAICKRIIDLMGGRIGVESEPGRGSTFWFEIPLLKVIGDLQQATRADAVRVMVISSDARLSQRLKRLLDSWGVSHVLMETTQEALERVRRHSDTEGFRCVIADHDTLRYSARAVHRALARPENANSARLIWLYGEEPVPAELRDHATLVPRQSPDETLRPLVLPPDPKPVPTATLASAMIPEPLPPPMANAREVRILLVEDNPVNLLVAQKLLAVLGFEADTATDGETALTRMESIRYDMVFMDCQMPVLDGYAATRRWRAMETESGSRPLPIVAMTANAMACDHERCLAAGMDDYLSKPVAREQLDACLQRWLPRQALLPGPSTAGQFTHDPESASAGAQACALPILDNSVIDELYEVAGADTITILQLFLEDAPPIIEQLEAAAANRDSMQLRDLAHTLKSSSANVGAQAVSNAARRIELAARTGTIERPSAMVALVIAEYARARLALLGQVARLQAAASTPNP

SEQ ID NO: 45703 - protein, 364 aa, Ustilago maydis 521
MASSNPQTVPCAYKTGRTLGQGTYAVVKEAVHIKTGQYYACKVISKKLMEGREHMVRNEIQALKRVSQGHRSIVTLVDYFETMNNLYLVTDLCVGGELFDRICERGNYYEKDAAHIVRTIVDAVVYLHDQGIVHRDLKPENLLFRDKTEESDLLIADFGLSRVVDDEKITVLSTTCGTPGYMAPEIFKKTGHGKPVDMWAIGVITYFLLCGYTPFDRDTTMEEMQAIINADYRFEPTQYWEDVSEDAKDFINKLLTIDPAKRLSAKEALQHRWLQEAAPTEGGAQPVASAEQKDLLPDIKSAFNAKRTFRKAVNGIRLINRLRTNEQQPNKEEIEKLRQTIREAEDESSNLDQVLLAQETRAAN

SEQ ID NO: 45704 - protein, 462 aa, Triticum aestivum
  misc_feature (455)..(455): Xaa can be any naturally occurring amino acid
  unsure (1)..(462): unsure at all Xaa locations
RHLDLSGLDKGKGLYFLFVKSETKTPSGLTARPVLTSYYKSEQFKNRPYDPYHNYTSPTAAILCADAFQSMYAQMVCGLCQRHEVLRVGAVFASGLLRAIRFLQLNWKELAADIEAGALSPRVTDASVREAVAGILRPDPELAQFVRDECCNDDWAGIVRRIWPNTRYLDVIVTGAMAQYIGTLKYYSGDLPMACTMYASSECYFGLNLRPLCDPSEVSYTIMPNMGYFEFLPVDSATGAASCVDAGNLVDLARVEAGREYELVITTYAGLNRYRVGDVLRVTGFHNAAPQFQFVRRKNVLLSIESDKTDEAELQRAVERASALLRPHGASVAEYTSQACTKSIPGHYVIYWELLTTGAGATAVDKATLDACCLEMEEALNTVYRQSRVADGSIGPLEIRVVRAGTFEELMDYAISRGASINQYKAPRCVTFPPIIELLDSRVVSSHFSPALPHXTPARRSG

SEQ ID NO: 45705 - protein, 431 aa, Candida glabrata CBS138
MNFNISSKETVELEQKYSAHNYHPLPVVFHKASGAHVWDPEGKEYLDFLSAYSAVNQGHCHPKIVKALVDQASTLTLSSRAFSNDVFAVFAKYVTEYFGYEMVLPMNTGAEAVETALKLARRWGYEVKKIPDNEAIVLGAQGNFHGRTFGAISLSTDEEDSRKHFGPFLTNTTAKNPSKGQAIRYGHIEDLEQAFESHGDKIAAVILEPIQGEAGIVVPPKGYLLDVQNLCKKYNSLFICDEIQTGIGRTGKLLCFEHTEGVKPDVVLLGKAISGGVLPVSCVLSSREIMSCFTPGSHGSTFGGNPMASRVAIAALDVIKEEKLVERAQKLGDLLQDELRKLQAQSDGMISEVRGVGLLTAIVIDSQKAQGRTAWDLCLLMKDKGVLAKPTHDHIIRLAPPLVISEEDLLKGVQAMKEALVELPSAPISGH

SEQ ID NO: 45706 - protein, 346 aa, Bartonella quintana str. Toulouse
MAERSKKNSASVVHTALSNTTKRAQIARFTKEEEIHSYREMLLIRRFEEKAGQLYGMGLIGGFCHLYIGQEAVVIGTLKAAKEGDQVITSYRDHGHMLAVGMSPRGVMAELTGRQGGFSKGKGGSMHMFSKEKNFYGGHGIVGAQVPIGSGLAFSNQYLGKDNVTLVYFGDGAANQGQVYESFNMASLWKLPVVYIIENNQYAMGTSVVRASAEIDFSRRGLSFDIPGIVVDGMDVRAVKGAADEAITWARSGKGPIILDMQTYRYRGHSMSDPAKYRSKEEVQKIKEEQDPIDQVKNRILTQGFASEGDLKSIDKEVRAIIADAADFAQSDQEPDASELYTDVLV

SEQ ID NO: 45707 - protein, 209 aa, Vibrio vulnificus CMCP6
MLNKQIMVDADNALAGRQEAMAVEPIHFVNGSDITASATQGQQEILFGMGCFWGAERLFWQLDGVVSTSVGYSGGFTLNPTYQEVCSGQTGHTEVVRVIFDPQVLPLEQLLEKFWERHDPTQGMRQGNDLGTQYRSAIYTFSDQQLDIALASQQAYQAALANQQHNTITTEIRPAGPYFYAETYHQQYLAKNPEGYCGLGGTGVCFPPA

SEQ ID NO: 45708 - protein, 806 aa, Coffea canephora
MAERVLTRVHSLRERLDATLAAHRNDVLLFMSRLETHGKGILKPHQLLAEFEEINKDGKQKIHDHAFEEVLKSTQEAIVLPPWVALAIRLRPGVWEYVRVNVHALVVEELTVPEYLHFKEELVDGSKNGNFVLELDFEPFTASFPKPTLTKYIGDGVEFLNRHLSAKMFHDKESMAPLLDFLRVHQYKGKTMMLNDRIKDLNTLQAVLRKAEEYLTTLSADTPYSEFEHKFQEIGLERGWGDTAERVLEMICMLLDLLEAPDSCTLEKFLGRIPMVFNVVILSPHGYFAQENVLGYPDTGGQVVYILDQVPALEREMLKRIKEQGLDVKPRILIITRLLPDAPGTTCGQRLEKVYGSEYSHILRVPFRTEKGVVRKWISRFEVWPYMETFTEDVAKEVTAELQAKPDLVIGNYSEGNLVASLLAHKLGVTQCTIAHALEKTKYPDSDIYLSKFDEKYHFSCQFTADLIAMNHTDFIITSTFQEIAGSKDTVGQYESHMAFTMPGLYRVVHGIDVFDPKFNIVSPGADTNLYYPHTEKEKRLTSFHPEIEELLFSDVENEEHLCVLKDKKKPILFTMARLDRVKNLTGLVELYAKNPKLRELVNLVVVGGDRRKESKDLEEQAEMKKMYSLIETYNLNGQFRWISSQMNRVRNGELYRYIADTKGAFVQPAFYEAFGLTVVEAMTCGLPTFATNHGGPAEIIIHGKSGFHIDPYHGEQVSELLANFFERCKKEPSYWDTISAGGLKRIQEKYTWQIYSDRLLTLAGVYGFWKCVSKLDRQEIRRYLEMFYALKYRKLAEAVPLAVDQ

SEQ ID NO: 45709 - protein, 130 aa, Brassica napus
MMRSCLSLALLVALSAAGCAAAQAADYDFFYLVLQWPGSYCDTKQSCCYPRSGKPAADFGIHGLWPNRDDGSYPQNCNPANAFDPSKVSDLLSSLRTEWPTLACPTSDGLQFWAHEWEKHGTCAQNLFNE

SEQ ID NO: 45710 - protein, 486 aa, Bartonella quintana str. Toulouse
MANLYDVIVIGSGPGGYVTAIRAAQCGFKTAIVEREHLGGICLNWGCIPTKALLRSAEIKHFSEHVKDYGLKINGSIEADIKDVVARSRRVSARLNAGVGFLMKKNKIDIIWGEAKLTKKAKESQLAEIMVSSSSKPVMQPQNSVPKETLGEGTYQAKHVIIATGARPRSLPGIEPDGKLIWTYFEAMIPHTIPNSLLVMGSGAIGIEFASFYHGMGAEVTVVEMMPHIMPTEDIEISAFARRQLEKKGIRILSQAKVTRVEKASNSVTAHIDVNGKIETITVDRLISAVGVQGNIENLGLEALGIRTDLECIVTDEWGWTGVKGIYAIGDVAGPPMLAHKAEKEGVICIEHLAGLKNAHPLDKKKIPGCIYCTPQVASVGFSEAAAKEAGYDIRVGRYSFSANGKAIALGEDQGLVKTIFDKKTGQLLGAHMVGAEVTELIQGFVIAMNLETTEEELIHTVFPHPTLSEMMKESVLDAYDQVLNA

SEQ ID NO: 45711 - protein, 444 aa, Kluyveromyces lactis NRRL Y-1140
MMQMQQRVALGDVTSQINNRANRFSVDGDSKKAFVDAGFLKEKRVKNAKENDLFSGHDDDLVVARAQKLREQTLVSSVSTESIRSQQLSSNSNETVQHHLIEVEADDEDDAETDSEALAFKEDEEAETGGDISEEMEDVDESFTPLVPVVTEHSERLYQYVYERLHREEPDPNDEDTWDPVMVSEYTIEIFEHLKFLERKFSPNPRYIEHQPELTWKYRSTLIDWIVQVHDRFQLLPETLFLTVNIIDRFLSKKQVTLNRLQLVGAAALFIASKYEEINCPTLKDMLYMLDNAYTREEILRAERFMINTLNFEFGWPGPMSFLRRVSKADDYEYDTRTVAKYLLETSIMEPEIIAAPPSWLAAGAYYLSKIIIGLTGWSDEHIYYSGYTEEQLIPLATMILDSCRHATERHKAIFDKYSRSRHRKSAFVVAKWISMAESRLEQK

SEQ ID NO: 45712 - protein, 498 aa, Hortaea acidophila
MAFLINNQFPGPMIKANWGDTVVVKLTNLLPNSIDNGTSLHFHGVRQNGTNEYDGVSSITQCPLAPGDTMTYTWRATSYGSSWWHSHFSLQTYEGMFGPLVIEGPSTLSYDEEQFVILQDWNHATADSLFDDSQVVVPGVRGGGLTLDTGLINGKNVWGNGGEYWSMTVTPGKSYRLRVLNAAIQSTFKFHIDGHSFQVIAMDFVPIHPYTTDIVSVNIGQRYDLILTANQAPANYWIRSDNQQPCGQLEQPNVQAILNYEGVKFATPTTTGLNYQPDCLDEPSASLVPYLAQDAGAQSAGEFVETSIIAANGAVPNLYKWTLSGSTFQANWNDPTLFSIWYDGDVPQYGGDLTVELPNAGEWVYFVIDSPMPLPHPIHLHGHDFLLLASGVGTYSADVPLQLTNPPRRDVAVMPADPLTGSGGYLVVAYQVSNPGVWLMHCHIGWHNTMGFALQIVEMIDSIKIENTCQLQETCVNWLNYANANSIFDAPFDDGSGG

SEQ ID NO: 45713 - protein, 176 aa, Triticum aestivum
  misc_feature (17)..(17): Xaa can be any naturally occurring amino acid
  unsure (1)..(176): unsure at all Xaa locations
YQHPTVMASSATFDAPXQGLKFTAGLPVSRRSNGASLGSVRNRGRIRCMLVWPIKGIKMCETLSYLPPVITKALLKQVHYLIRSKWVPCLEFSMVGYIFREHNAYPGYYYGRYWTMRKLPMFGCTDTTQVINEVKEVNKEYPDTNVRIIRFDNMRQVQSVSFIAFKPPCCEEYGKD

SEQ ID NO: 45714 - protein, 319 aa, Vibrio parahaemolyticus RIMD 2210633
MSISNTVSKVEEFEYDNASETTIDNELEKSSSTTEGKTAVREEFDASSKSLDATQLYLGEIGFSPLLTAEEEVLYARRALRGDEAARKRMIESNLRLVVKISRRYSNRGLALLDLIEEGNLGLIRAVEKFDPERGFRFSTYATWWIRQTIERALMNQTRTIRLPIHVVKELNIYLRTARELSQKLDHEPTAEEIAAQLDIPVEDVSKMLRLNERISSVDTPIGGDGEKALLDIIPDANNSDPEVSTQDDDIKSSLIHWLEELNPKQKEVLARRFGLLGYEPSTLEEVGLRLKKWDERLVLPVSVYVKFKWRVYVDFVKS

SEQ ID NO: 45715 - protein, 162 aa, Xylella fastidiosa Ann-1
MNRVMHYFKSLLLLELLAGLWLTLKYTFRPKYTVLYPMEKFPQSPRFRGLHALRRYPNGEERCIACKLCEAVCPALAITIDSAKREDGTRRTTRYDIDLFKCIFCGFCEESCPVDSIVETHILEYHFEKRGENIVTKPQLLAIGDRFEAEIAERRAADAAFR

SEQ ID NO: 45716 - protein, 108 aa, Oryza sativa
  misc_feature (49)..(49): Xaa can be any naturally occurring amino acid
  unsure (1)..(108): unsure at all Xaa locations
MARTSFKLEHPLERRQAESARIREKYSDRIPVIVEKADKTDVPEIDKKXFVYVVRKRIKLSPEKAIFVFVKNTLPPTASLMSAIYEENKDEDGFLYMTYSGENTFGSA

SEQ ID NO: 45717 - protein, 150 aa, Brassica napus
MTNYGSIPTSSHPSPPIDLEYISRAKHRIKSGLATRRPWKTMFDLQSTNLPHGFFDAISRIKTNLVYFRANYAVVVLLVLFLSLVYHPTSLLVLAVLVVFWIFLYFLRDEPLVVFRHQIDDRTVMICLSVLTIVMLLFTHATANVLGAVA

SEQ ID NO: 45718 - protein, 397 aa, Bacillus subtilis subsp. subtilis str. 168
MKKIPVTVLSGYLGAGKTTLLNSILQNREGLKIAVIVNDMSEVNIDAGLVKQEGGLSRTDEKLVEMSNGCICCTLREDLLIEVEKLAKDGRFDYIVIESTGISEPIPVAQTFSYIDEEMGIDLTKFCQLDTMVTVVDANRFWHDYQSGESLLDRKEALGEKDEREIADLLIDQIEFCDVLILNKCDLVSEQELEQLENVLRKLQPRARFIRSVKGNVKPQEILHTGLFNFEEASGSAGWIQELTAGHAEHTPETEEYGISSFVYKRRLPFHSTRFYRWLDQMPKNVVRAKGIVWCASHNNLALLMSQAGPSVTIEPVSYWVAALPKLEQEQVKQQEPEILEEWDPEFGDRLTQLVFIGTDLDEETITKELDQCLLTEYEFDSDWSLFEDPFKWKLNQ

SEQ ID NO: 45719 - protein, 383 aa, Desulfovibrio vulgaris subsp. vulgaris str. Hildenborough
MRAADAPDAPLPEDRRNAPVWFAHDLEAPRCTALFPRLADRRPALVVVGGFLGSGKTTFLNNCIEYHRARERFVAVIQNEVGATGVDARLMGDGAEVLALDEGCVCCSLAGSLAGGIRAITADFTPEVILLETTGLANPLNLLAELDTLRDMVRLDAVVTVVDAANIVPTLRDSDIARDQIRGADIIVCNKCDTVDETGRAALRATLTGLNGRAALHETSFGRIHPSLFMALEGERPPRGLMPAPHGTHATHADEGFAAVRLFFSGTIDEAALAPLLQQCPGAPFRIKGIVRVTDDEAPRLVQCVGARCEVERLDGGFEGTPFLVFIGRNPDETALLEHWAALGATAEPPAPQAEADTQPAQATKSASGGQSSDATRGCHDHH

SEQ ID NO: 45720 - protein, 587 aa, Coxiella burnetii RSA 493
MSSIRVKQYDALIVGAGGAGLRAALEMAQSRQYKVAVVSKVFPTRSHTVSAQGGIAAALGNVVPDKPIWHMFDTVKGSDYLGDQDAIQYMCEQAPPSVYELEHYGLPFSRLDDGRIYQRAFGGHTRDFGKEMARRTCACADRTGHAMLHTLYQKNVEAGTHFYYEWYGIDLVRGAQGGIAGMIAMNMETSELVFFKSRATIFATGGAGRIYETTSNAYTNTGDGIGMVLRAGLPVQDMEFWQFHPTGIYGVGCLITEGARGEGGYLINKDGERFMERYSPHLKDLDCRDVVARSILQEVMAGGGVGPKKDHVLLKLDHLGEKVLRERLPGIIELSEKFANVDITKEPIPILPTCHYMMGGIPTNIHGQALTVDENGKDQIIEGLFAAGECACVSVHGANRLGTNSLLDLVVFGRAIGLHLEEALKTELKHRSENPDDIDAAIARLKRWEKPNNVENPALLRQEMRKAMSEDFGVFREEQKMKQGLERLQKLNERLQRAKLTDTSRTFNNARIEALELDNLMEVSYATAVSAQQRTESRGAHSRYDYKERDDANWLKHTVYFRDGHIAYRPVNMKPKGMDPFPPKSRD

SEQ ID NO: 45721 - protein, 591 aa, Zea mays
MCGILAVLGVAEVSLAKRSRIIELSRRLRHRGPDWSGLHCHEDCYLAHQRLAIIDPTSGDQPLYNEDKTVVVTVNGEIYNHEELKAKLKTHEFQTGSDCEVIAHLYEEYGEEFVDMLDGMFSFVLLDTRDKSFIAARDAIGICPLYMGWGLDGSVWFSSEMKALSDDCERFITFPPGHLYSSKTGGLRRWYNPPWFSETVPSTPYNALFLREMFEKAVIKRLMTDVPFGVLLSGGLDSSLVASVASRHLNETKVDRQWGNKLHTFCIGLKGSPDLKAAREVADYLSTVHHEFHFTVQEGIDALEEVIYHIETYDVTTIRASTPMFLMSRKIKSLGVKMVISGEGSDEIFGGYLYFHKAPNKKEFHEETCRKIKALHLYDCLRANKATSAWGVEARVPFLDKSFISVAMDIDPEWKMIKRDLGRIEKWVIRNAFDDDERPYLPKHILYRQKEQFSDGVGYSWIDGLKDHASQHVSDSMMMNAGFVYPENTPTTKEGYYYRMIFEKFFPKPAARSTVPGGPSVACSTAKAVEWDASWSKNLDPSGRAALGVHDAAYEDTAGKTPASADPVSDKGLRPAIGESLGTPVASATAV

SEQ ID NO: 45722 - protein, 134 aa, Lilium longiflorum
RTKQTARKSTGGKAPRKQLATKAARKSALTTGGVKKPHRYRPGTVALREIRKYQKSTDLLIRKLPFQRLVREIAQDYKADLRFQSHAVLALQEAAEAYLVGLFEDTNLCAIHAKRVTIMPKDIQLARRIRGERA

SEQ ID NO: 45723 - protein, 95 aa, Rhodopseudomonas palustris
MAFKPLHDRVLVRRVQSDEKTKGGLIIPDTAKEKPAEGEVVACGEGARKDSGELIAMSVKAGDRVLFGKWSGTEVTIDGAELLIMKESDILGILS

SEQ ID NO: 45724 - protein, 546 aa, Rhodopseudomonas palustris
MAAKDVKFDTDARDRMLRGVNILADAVKVTLGPKGRNVVIDKSFGAPRITKDGVSVAKEIELSDKFENMGAQMVKEVASRTNDEAGDGTTTATVLAQAIIKEGLKAVAAGMNPMDLKRGIDLATAKVVESIKAASRPVNDQHEVAQVGTISANGEAQIGRFIADAMQKVGNEGVITVEENKGLETEVEVVEGMQFDRGYLSPYFVTNADKMTAELEDVFILLHEKKLSSLQPMVPLLESVIQAQRPLLIVAEDVEGEALATLVVNKLRGGLKIAAVKAPGFGDRRKAMLQDIAILTGGQVISEDLGMKLENVTIDMLGRAKKVSINKDNTTIVDGAGEKAEIEARVSQIRTQIEETTSDYDREKLQERVAKLAGGVAVIRVGGMTEVEVKERKDRVDDALNATRAAVQEGIVVGGGVALIQAGKVLDGLTGENPDQNAGITIVRRALEAPLRQIAQNAGVDGSVVAGKVRESDDKAFGFNAQTEEYGDMFKFGVIDPAKVVRTALEDAASVASLLITTEAMIADKPEPKSAPAGGMGGMGGMDGMM

SEQ ID NO: 45725 - protein, 615 aa, Helicobacter pylori J99
MQEVHDYGINFWSNNEFKIEKGLVKVCHGKNPSLLEIVQSVHDKGYRGPLLVRFPHLVQKQIKSLFDAFSLAIKEYQYSGAFKAVFPLKVNQMPSFVLPLVQGAKGLNYGLEAGSKSELIIAMSYTNPTAPITVNGFKDKEMIELGFIAKSMQHEITLTIEGLNELKTIIAVAKQNDFVACPKIGIRIRLHSAGTGVWAKSGGINSKFGLSSTEVLEAMRLLEENDLLEHFHMIHFHIGSQISDISPLKKALREAGNLYAELRKMGAKNLNSVNIGGGLAVEYTQHKHHQDKNYTLEEFSADVVFLLREIVKNKQEIEPDIFIESGRYISANHAVLVAPVLELFSHEYNEKSLKIKENNNPPLIDEMLDLLANINEKNAIEYLHDSFDHTESLFTLFDLGYIDLIDRSNTEVLAHLIVKKAVQLFYVKDHNDILRIQEQVQERYLLNWSFFQSLPDYWGLRQNFPVMPLNKLDEKPTRSASLWDITCDSDGEIAFDSTKPLFLHDIDIDEEEYFLAFFLVGAYQEVLGMKHNLFTHPTEFSVVFDEKGDYEVEDICEAQTILDVLDDLDYDTKEIERLLKQKIEDNNQLDMEEKKEIMGRLYVMLSENGYLRTIS

SEQ ID NO: 45726 - protein, 427 aa, Thermotoga maritima
  misc_feature (1)..(1): Xaa can be any naturally occurring amino acid
  misc_feature (13)..(13): Xaa can be any naturally occurring amino acid
  misc_feature (90)..(90): Xaa can be any naturally occurring amino acid
  misc_feature (201)..(201): Xaa can be any naturally occurring amino acid
  unsure (1)..(427): unsure at all Xaa locations
XGSDKIHHHHHHXDELLEKAKKVREAWDVLRNATTREKNKAIKKIAEKLDERRKEILEANRIDVEKARERGVKESLVDRLALNDKRIDEXIKACETVIGLKDPVGEVIDSWVREDGLRIARVRVPIGPIGIIYESRPNVTVETTILALKSGNTILLRGGSDALNSNKAIVSAIREALKETEIPESSVEFIENTDRSLVLEXIRLREYLSLVIPRGGYGLISFVRDNATVPVLETGVGNCHIFVDESADLKKAVPVIINAKTQRPGTCNAAEKLLVHEKIAKEFLPVIVEELRKHGVEVRGCEKTREIVPDVVPATEDDWPTEYLDLIIAIKVVKNVDEAIEHIKKYSTGHSESILTENYSNAKKFVSEIDAAAVYVNASTRFTDGGQFGFGAEIGISTQRFHARGPVGLRELTTYKFVVLGEYHVRE

SEQ ID NO: 45727 - protein, 278 aa, Arabidopsis thaliana
MADGGKVVCVTGASGYIASWIVKLLLFRGYTINATVRDPKDRKKTDHLLALDGAKERLKLFKADLLDEGSFELAIDGCETVFHTASPVAITVKTDPQVELINPAVNGTINVLRTCTKVSSVKRVILTSSMAAVLAPETKLGPNDVVDETFFTNPSFAEERKQWYVLSKTLAEDAAWRFAKDNEIDLIVLNPGLVTGPILQPTLNFSVAVIVELMKGKNPFNTTHHRFVDVRDVALAHVKALETPSANGRYIIDGPVVTIKDIENVLREFFPDLCIADR

SEQ ID NO: 45728 - protein, 528 aa, Geobacillus kaustophilus HTA426
MKKWLLGAIFAGVAAIGAACSNPSSMQGHDMSGMNMEKENTSAETSKQQLPLATNTEVLSGKEIHLTAKEALLPINGQIKLPVYTYNGSVPGAQIRVKQGDKVKIVVKNELPEPTTIHWHGYPVPNNQDGVPGVTMDAIKPGETFTYEFTATVPGTYWYHSHQKSAEQVDKGLYGTLIVEPKNEEKVDRDYTLVLDEWMSDPDAESHMDMNMSGMDHSNMNNGNSSDNQQMDMNSMGHNMNMYDIFTINGKSGAAVQPLKVKKGEKVRLRLINAGYMSHKLHLHGHEFKIVATDGQPLKNPQPIKDELLNIAPGERYDIEFIANNPGEWLLECHGNMKGTDGMKVKIQYEGQANNTDKANAKENLPVVDMTTYGKYETGPFTLDQKYDVEYTMDLGTAMGKNGMIFTINGKTYPDTAPIHVKTGDFVKVKIVNNSPMDVHPMHLHGHFFQVLSKNGKPVTGSPLIKDSLNVNPGEEYVVAFKADNPGNWMFHCHDLHHASAGMVTEVKYTDYKSDYTPDPNDTTNKGE

SEQ ID NO: 45729 - protein, 372 aa, Brassica napus
  misc_feature (204)..(204): Xaa can be any naturally occurring amino acid
  unsure (1)..(372): unsure at all Xaa locations
RPTRPRISNRAGLGDETYFPRGITSTPPKLNMSEARAEAEAVMFGALDSLFEKTGIKPAEIGILIVNCSLFSPTPSLSAMIVNRYKMREDIKSYNLGGMGCSAGLISIELANNLLKANPNSCAVVVSTENITLNWYFGNDRSMLLCNCIFRMGGAAILLSNRRQDRSKSKYELVNVVRTHKGSDDKNYNCVYQKEDERGTIGVXSLSKELMSVAGDALKTNITTLGPMVLPLSEQLMFLISLVKRKLFKLKVKPYIPDFKLAFEHFCIHAGGRAVLDEVQKNLDLKDWHMEPSRMTLHRFGNTSSSSLWYEMAYTEAKGRVKTGDRLWQIAFGSGFKCNSAVWKALRAVSTEELTGNAWAGSVEDYPVKIVQ

SEQ ID NO: 45730 - protein, 423 aa, Burkholderia fungorum LB400
MDIDQYMTDLGRRARQASRAMARASTAAKNAALAAVAEAIERDAASLKEANARDVAKAREKGHDAAFIDRLTLSDKALKTMVEGLRQVAALADPIGEISNLKYRPSGIQVGQMRVPLGVIGIIYESRPNVTIDAAALCLKSGNATILRGGSEALECNTALAKLIGEGLEAAGLPQDAVQVVATSDRAAVGKLITMTEYVDVIVPRGGKSLIERLMNEARVPMIKHLDGICHVYVDDRADLTKALTVCDNAKTHRYGTCNTMETLLVARGIAAEVLPPLGKLYRDKQVELRVDAAARAVLADAGVGPLGDATEEDWRTEYLAPVLAIKVVDDLDAAIEHINEYSSQHTDAIVTEDHDRAMRFLREVDSASVMVNASTRFADGFEFGLGAEIGISNDKLHARGPVGLEGLTSLKYVVLGHGEGRQ

SEQ ID NO: 45731 - protein, 420 aa, Prochlorococcus marinus str. NATL2A
MLKEKQTSKNISINQDPKNNSKKIKKTAAKLNVTKETQTLPQESSNDLKIDLDLEADKLIAEANKVPEADIDLDDDDDNASVLSSAQEAAAKALASIKIGPKGVYTEDSIRVYLQEIGRIRLLRPDEEIELARKIADLLQLEEEAAQFESENGHFPSVKEWAVLADMPLARFRRRLMLGRRAKEKMVQSNLRLVVSIAKKYMNRGLSFQDLIQEGSLGLIRAAEKFDHEKGYKFSTYATWWIRQAITRAIADQSRTIRLPVHLYETISRIKKTTKVLSQEFGRKPTEEEIAESMEMTIEKLRFIAKSAQLPISLETPIGKEEDSRLGDFIEADIENPEQDVAKTLLREDLEGVLATLSPRERDVLRLRYGLDDGRMKTLEEIGQIFDVTRERIRQIEAKALRKLRHPNRNGVLKEYIKLN

SEQ ID NO: 45732 - protein, 767 aa, Ustilago maydis 521
MILSKLGFALVRLISVLILCTCSHALPSSSSIPATRRLAPRRVTVRHYTLNVTTATLFSACDPFGPTTLIDSSFPGRVLRARAGEILSVRVYNHLDANGESGGNLTMHFHGLSMRMHPVMDGTMLVSQWPITPGKFFDYRIPLTAEDKGTYYYHSHVGVQSMTAYGALVVEDPEEQELWDPSQATLLKSKHAESVEFVHVYGEEALHKNGKSGQNSPYSYDQDRVLAIGDWFSYSSVKQVQKQLLADPFVWPGSATKLLVNGKSSPVNISALSAPACNQTKADAIGVKCTSAPAQCARPVYPTIELDYDKTYRFRLVGATSLMYVSLGILKPTKTAYTSINATSSVVAQPVQFDKMTLIEADGSYLDRLDVDHIELTSGQRYSVLYKSLSRKQVKQDGTGGVYWMRLESRWRAGPSMWLKIVYPSHNTSAVQPPIRLASGQKDLQLLPAETFGWKTSQLSPLSKPYGPHWWYSDRMPSDSEVTRTVLIDTQQVKFFASGKGVKWDQNGVALNETSPGTRTPYLVRTFLGDIQLPTATQIESAMYNPVSYKYRDSNGNDTGTSRMMIDMNNATEVEAASRRHWGQAYSSKLNMYFGGAGEVIDIVLVNQASQLSSSVEIHPWHMHSHKHFTRTIQAGTFSFSRLASLYASSSSSKAFSNPIQRDTTVAYASPGAAFLNQTIPNPQVDHGGWTVLRYKVDPKNAGVFLLHCHIAFHLEMGMATVWTMAPDQLARTARFNWPTLHSDHPNIQGLNADRYLHYANNVNAVL

SEQ ID NO: 45733 - protein, 935 aa, Mycobacterium avium subsp. paratuberculosis K-10
MVEASEGTLEPIGAVQRTLVGREATEPMRADIRLLGAILGDTVREQNGQQVFELVERARVESFRVRRSEIDRAELARMFAGIDIHQAIPVIRAFSHFALLANVAEDIHRERRRAIHVAAGEPPQDSSLAATYAKLDRAQLDSAMVAEALRGAVVSPVITAHPTETRRRTVFVTQHRITELMRLHAEGHTETDDGRNIELELRRQVLTLWQTALIRLSRLQITDEIEVGLRYYAAAFFKVIPQVNAEVRNALRARWPGADLLDEPIVAPGSWIGGDRDGNPNVTADVVRRATGDAAYTALAHYLAELTACEQELSMSARLVAVTPELAALAEDCAEKARADEPYRRALRVIRGRLTATAAEILDRRPQHELDLGLPPYATPAELRADLDTVDASLRAHGSALLADDRLALLREGVRVFGFHLCGLDMRQNSDVHEEVVAELLAWAGVHPDYRSLPEDERVELLAAELGTRRPLVGDRAELSELADKELGVVRAAAHAIRRYGPAAVPNYVISMCRSVSDVLEAAILLKEAGLIDASGPEPYCPVGISPLLETIEDLHNGAAILHAMLELPLYRALVAARGQSQEVMLGYSDSNKDGGYLASSWAVYRAELALVEVARKIGIRLRLFHGRGGTVGRGGGPSYEAILAQPPGAVNGSLRLTEQGEVIAAKYAEPQVAQRNLESLVAATLESTLLDVEGLGDTAEPAYAVLDEVAVLAQRAYAELVHETPGFVDYFMASTPVSEIGSLNIGSRPTSRKPTESIADLRAIPWVLAWSQSRVMLPGWYGTGSAFEQWIAAGPQSRAERVDILHDLYRRWPFFRSVLSNLAQVLAKSDLGLAAQYAELVDDAALRRRVFGKIADEHRRTIAMHKLITGQDNLLADNPALARSVFNRFPYLEPLNHLQVELLRRYRSGDDDELVQRGILLTMNGLASALRNSG

SEQ ID NO: 45734 - protein, 411 aa, Candida albicans
  misc_feature (207)..(207): Xaa can be any naturally occurring amino acid
  unsure (1)..(411): unsure at all Xaa locations
MDNHQQQQQLQQYQQQFQQPQQQLYPGEQIVHPAAAQTGQNTTNVTAVSSSNITQSATSSLHSQQLQHVDVSKSAAEEAIRRSLLPERSTVSKGKYSLTDFSIMRTLGTGSFGRVHLVRSVHNGRYYAIKVLKKHQVVKMKQVEHTNDERRMLKLVEHPFLIRMWGTFQDSKNLFMVMDYIEGGELFSLLRKSQRFPNPVAKFYAAXVTLALEYLHSHDIIYRDLKPENILLDRNGHIKITDFGFAKEVSTVTWTLCGTPDYIAPEVITTKPYNKSVDWWSLGVLIFEMLAGYTPFYDSTPMKTYEKILAGKIHYPSFFQPDVIDLLTKLITADLTRRLGNLINGPADIRNHPWFSEVVWEKLLAKDIETPYEPPITAGVGDSSLFDHYPEEQLDYGSQGEDPYASYFLDF

SEQ ID NO: 45735 - protein, 222 aa, Streptococcus pneumoniae R6
MKKFVAELIGTFMLVFVGTGAVVFGNGLDGLGHLGIAFAFGLAIVVAAYSIGTVSGAHLNPAVSIAMFVNKRLSSSELVNYILGQVVGAFIASGAVFFLLANSGMSTASLGENALANGVTVFGGFLFEVIATFLFVLVIMTVTSESKGNGAIAGLVIGLSLMAMILVGLKITGLSVNPARSLAPAVLVGGAALQQVWIFILAPIAGGVLAALVAKNFLGTEE

SEQ ID NO: 45736 - protein, 290 aa, Saccharomyces cerevisiae
MSNIIARFHKIQVQDGVKVWYREAGAAGNPTILLLHGFPTSSNMFRNLIPLLAGQFHIIAPDLPGFGFTETPENYKFSFDSLCESIGYLLDTLSIEKFAMYIFDYGSPVGFRLALKFPSRITGIVTQNGNAYEEGLDDRFWGPLKEYWKSYQSDPVFVKSLIPYLEDPANVICQYHDGVPAIESVDPAAYTLDIALIQRTGQTDIQLRLFFDYQNNIKLYPAFQKFLRDSKIPVLVAWGANDTIFSVAGAEAYRKDVDNLKVVYYDTGHFALETHVVAIAEEIISMFAEN

SEQ ID NO: 45737 - protein, 491 aa, Buchnera aphidicola str. Bp (Baizongia pistaciae)
MGSNYFNSLNFRQKLIQLRQCTLIRKEEFSETFKILKGKNIVIVGCGSQGLNQGLNMRDSGLNVKYALRKNSIISQRSSWKRAIDNKFLVGTCEELIPTADLVINLTPDKQHEHVVDVLQNLMKKNSILGFSHGFNIIEFGQKIRQDITVIMVAPKCPGTEVREEYKRNFGVPTLISVHLDNDCHNIGLEVAKEWATAIGGHRAGVLHSSFSAEVKSDLMGEQTILCGLLQTGSVLCYDKLISQGHDCHYAVKLVQSGWEVITESLKHGGITLMFDRLSNTAKIRAYKLSNDLKKILSPIFKKHMDDILSGYYSKNMMLDWKNDDKQLKIWRRSIQNTSFEQCSISHITLLEHEYFENGLLMVAIIRAGVELAFEIMIEAGIKEESAYYESLHELPLIANTIARKRLYEMNLIISDTAEYGSHLFFQSAFPLLQDFMNTLEHGDLGNKMLDQAINNVDLNYINTTIRNHPVEHIGQKLRRYMTNIKQINCY

SEQ ID NO: 45738 - protein, 309 aa, Bartonella vinsonii subsp. berkhoffii
ITYIDGNKGVLLYRGYPIEQLAEKGDFLESCYLLLYGELPTQQEKSDFDRCIMQHTMVHEQFARFFHGFRRDSHPMAVMVACLGAMSAFYHDSIDIIDPQQRMIASVRLISKVPTLAAMAYKYSIGQAFVYPRNDLSYAANFLRMCFSVPCEEYKTNPVLTRAMDRIFILHADHEQNASTSTVRLAGSSGANPFACIAAGVACLWGPAHGGANEACLKMLLEIGSVKRIPEFIARAKDKNDPFRLMGFGHRVYKNYDPRAKIMQKTCHEVLKELNIQNDPLLDIAIELEKIALNDEYFVEKKLYPSVDF

SEQ ID NO: 45739 - protein, 695 aa, Candida glabrata CBS138
MVGILSKTLSEVHPTLLTNGMGITNTHRRISLGFFPPNRKNPLVRKYRRKRANLNTNDQRSFQSLVDDFGSSVHEPSQFLNYINEDEEDLYYNDIEEGGELSRTVSLPSLVSETPDLSPPDTDWIIQEHERRYSSVYNSDNENDLADEPVSIGGSMTNRELEYDEFMNRIKAQKQVYDSIASHKYRRRPSLISVSSRGTVPTIYQEINGTDGADVCLPEKITFREEAKVLSSFSFPLIFTFLLEQIFPMVCSLTVGHLGKNQLAAVSLASMTSNITLAVFEGIATSLDTLCPQAYGAGRYYSVGIHFQRCVLFSFIIFLPFALFWFFSEPILFLVVPEKELIALTSQFLRVLIFGAPAYILFENLKRFLQAQGIFDAGIYVLTICAPLNIFVSYTLVWNKYIGIGFIGSAVAVVINFWLMFILLLLYTIYIDGKKCWGGFSKKAFTHWKDLGHLAFSGIIMLEAEELSYEILTLFSAYFGTSYLAAQSAVSTMAALLYMVPFAIGISASTRIANFIGAKRVDLAHNASEVGLVFSFGAGLTNCCVLFFGRNIIAHVFSRDDEVIDLMTGLLRLVAVVQIFDSLNAVAGSCLRGQGMQSLGSIVNLLGYYLFGIPLALILGWVFNMKLYGLWIGIGCAMLLIGLIEAYNVLYPNWDYILNYAEILKETEEDDDDDSYFTDSDDNDEEPTERSPLLD

SEQ ID NO: 45740 - protein, 367 aa, Geobacillus stearothermophilus
MELFKYMETYDYEQVLFCQDKESGLKAIIAIHDTTLGPALGGTRMWMYNSEEEALEDALRLARGMTYKNAAAGLNLGGGKTVIIGDPRKDKNEAMFRAFGRFIQGLNGRYITAEDVGTTVADMDIIYQETDYVTGISPEFGSSGNPSPATAYGVYRGMKAAAKEAFGSDSLEGKVVAVQGVGNVAYHLCRHLHEEGAKLIVTDINKEVVARAVEEFGAKAVDPNDIYGVECDIFAPCALGGIINDQTIPQLKAKVIAGSADNQLKEPRHGDIIHEMGIVYAPDYVINAGGVINVADELYGYNRERAMKKIEQIYDNIEKVFAIAKRDNIPTYVAADRMAEERIETMRKARSPFLQNGHHILSRRRAR

SEQ ID NO: 45741 - protein, 482 aa, Neisseria meningitidis
GSADAEYDVVVLGGGPGGYSAAFAAADEGLKVAIVERYKTLGGVCLNVGCIPSKALLHNAAVIDEVRHLAANGIKYPEPELDIDMLRAYKDGVVSRLTGGLAGMAKSRKVDVIQGDGQFLDPHHLEVSLTAGDAYEQAAPTGEKKIVAFKNCIIAAGSRVTKLPFIPEDPRIIDSSGALALKEVPGKLLIIGGGIIGLEMGTVYSTLGSRLDVVEMMDGLMQGADRDLVKVWQKQNEYRFDNIMVNTKTVAVEPKEDGVYVTFEGANAPKEPQRYDAVLVAAGRAPNGKLISAEKAGVAVTDRGFIEVDKQMRTNVPHIYAIGDIVGQPMLAHKAVHEGHVAAENCAGHKAYFDARVIPGVAYTSPEVAWVGETELSAKASARKITKANFPWAASGRAIANGCDKPFTKLIFDAETGRIIGGGIVGPNGGDMIGEVCLAIEMGCDAADIGKTIHPHPTLGESIGMAAEVALGTCTDLPPQKK

SEQ ID NO: 45742 - protein, 169 aa, Streptomyces avermitilis MA-4680
MTTDNAATSVLDTEIDALQGGSADLSQYAGKAVLIVNVASKCGLTPQYAGLERLQERYAAQGFTVLGVPCNQFLGQEPGTSEEIAEFCSATYGVTFPLTEKVEVNGDARHALYESLVGFADGEGHTGDIRWNFEKFLIGRDGKVVARFSPQTEPESAEVVTAVERQLAG

SEQ ID NO: 45743 - protein, 446 aa, Chlamydomonas reinhardtii
MAAKLRKFLLRYYPPGIILQYERDGVMKQKPIDLLDLTPDVDVEVLLSQIIRQEPLISENRRPALRQLIHRLIDKMLEQQHHSFTLFKVLRAHILPLTNCAFNKSGDRFITGSYDRTCKVWNTFTGEEVFTLEGHKNVVYAIAFNNPYGDKIVTGSFDKTCKLWDAYTGQLYYTLKGHQTEIVCLSFNPQSTIIATGSMDNTAKLWDVETGQERATLAGHRAEIVSLGFNTGGDLIVTGSFDHDSRLWDVRTGQCVHVLSGHRGEVSSTQFNYAGTLVVSGSIDCTSRLWDVRSGRCLSVKQGHTDEVLDVAFDAAGTKMVSASADGSARLYHTLTGVCQHTLVGHEGEISKVAFNPQGTRLITASSDKTCRLWDCDTGECLQVLEGHTDEIFSCAFNYEGDFIITGSKDNTCRIWKALTASSQPAGPGGAGGGLARPTTAFSYND

SEQ ID NO: 45744 - protein, 546 aa, Vibrio parahaemolyticus RIMD 2210633
MTTNYIFVTGGVVSSLGKGIAAASLAAILEARGLKVTMMKLDPYINVDPGTMSPTQHGEVFVTEDGAETDLDLGHYERFIRTKMTKRNNFTAGRVYADVLRKERRGDYLGATIQVIPHITNAIKDRVIAGSEGHDIAIVEVGGTVGDIESLPFMEAIRQLAVELGRERAMFMHLTLVPYLAAAGEVKTKPTQHSVKELLSIGIQPDILVCRSDRMIPANERKKIALFCNVPEKAVISMKDVDSIYKIPQLVKSQGLDDLVCTRFGIDAPEADLSEWEQVIYEEANPTGEVTIGMVGKYIELPDAYKSVNEALKHAGLKNRLNVTIKYVDSQDIETKGVELLEGLDAILVPGGFGDRGVEGKIRAAQYARENKVPYLGICLGMQVALIEYARNVAGMEGAHSTEFNKDTKYPVVGLITEWVDETGNVEERTESSDLGGTMRLGSQLCHLEKGTKARELYGSATIHERHRHRYEVNNVLRPQIEKAGLKVSGLSADKKLVEMIENPAHPWFVAAQFHPEFTSTPRDGHPLFAGFVKAAGQYSRGEFEK

SEQ ID NO: 45745 - protein, 282 aa, Pseudomonas fluorescens PfO-1
MTANLSFTTPQTLAERAHNIRRHALRMGQVQGQGYVGQALGAADLLAVAYFHALSYRPEDPAWEPRDRFYLSIGHYAIALYAALIEAEIIPLDELETYGSDDSRLPMSGMAAYTPGMEITGGSLGQGLGIAVGACLGLKRKGSTSFVYNLLSDGELNEGSTWEAVMSASHWKLDNLIAIVDVNNQQADGHSSEILSFEPIVDRWKAFGWFTQRVDGNDLDALVEAFDAARHHPGTQPRVIICDTTMGKGVPFLENREKTHFIRVDEHEWDLALTTLEEGKNQ

SEQ ID NO: 45746 - protein, 466 aa, Mycobacterium smegmatis
MAATKASPATEEPVKRTATKTPAKKAPAKRAAKSAAAKAGGKAPAKKAPAKRAAKGTAAKPEDGVTDDLEVTDDLEAEPGEDLDVEDTDLELDDLDSDDDTAVEDEEEEADAATPAVATAKAADDDIDEPSEKDKASGDFVWDEEESEALRQARKDAELTASADSVRAYLKQIGKVALLNAEEEVELAKRIEAGLYATQKLAELAEKGEKLPVQQRRDMQWICRDGDRAKNHLLEANLRLVVSLAKRYTGRGMAFLDLIQEGNLGLIRAVEKFDYTKGYKFSTYATWWIRQAITRAMADQARTIRIPVHMVEVINKLGRIQRELLQDLGREPTPEELAKEMDITPEKVLEIQQYAREPISLDQTIGDEGDSQLGDFIEDSEAVVAVDAVSFTLLQDQLQSVLETLSEREAGVVRLRFGLTDGQPRTLDEIGQVYGVTRERIRQIESKTMSKLRHPSRSQVLRDYLD

SEQ ID NO: 45747 - protein, 456 aa, Xanthomonas axonopodis pv. citri str. 306
MSARYDYDVVILGGGSGGLAAGFRAAKHGARVAIMEPDELGGTCVNLGCVPKKAMWLAADLAGKIELASALGFDVPRPTLVWQELVTHRQGYIANIHASYRRRLNEDGVVLIPQRGVLQDRHTVMGSDGVPVTAGHIVIATGAHALRPDVEGAEHGEVSDDFFNLCHAPEQVAIIGGGYIAVEIAGLLQALGSRVHLFVQGERLLERFDAELTLQLADNLRHLGVRLHFGFTTTALERDMHGALRVHGHSVHPREQGNDVFDKVFFAVGRRANTAGLGLDTVGVALGDKGEVVVDDRQTTNVPNIHAIGDVGGKVGLTPVAIAAGRKLMDRLFGHQPDARMDYENVPSVVFSHPPLGNVGLTEEQARARYNGAVRVYRSNFRPMLHALADAPQRSLFKLVCVGEEERVVGVHLLGESADEMLQGFAVAVKMGATKRDFDETVAIHPTSSEEIVLMH

SEQ ID NO: 45748 - protein, 163 aa, Triticum aestivum
IFISGIAYGVTNITDQISCVTGLNPYVIAFTALAAGTSWPDLVASKIAAERQVTADSAIANITCSNSVNIYVGIGVPWLINTVYNFFAYQEPLYIDNAAGLSFSLLVFFATSFGCITVLVLRRIVFGAELGGPRLWAWATSAYFMVLWVVFVLLSSLRVSGVI

SEQ ID NO: 45749 - protein, 444 aa, Corynebacterium glutamicum ATCC 13032
MEQGIAARKAEAESNASTKGESPDYPGQQVIWRLIQEAGESLRDELRTLAFTLHDHPEEAFEEVFATEEITKLLQNHGFEVQSGVYGVKTALETSFETPGYDPAQHPSIAILAEYDALPEIGHACGHNIIAAAGVGAFLAVTNMIKTAEVKGVDHLDFEGRIVLLGTPAEEGHSGKEYMIRNGAFDGIDASIMMHPFGFDLAEHVWVGRRTMTATFHGVSAHASSQPFMGKNALDAASLAYQGFGVLRQQMPPSDRLHAIITEGGNRPSIIPDTATMSLYVRSLLPEALKDISKRVDDVLDGAALMAGVGVEKQWDVHPASLPVRNNHVLARRWAKTQNLRGRTALSEGILPDTLAASTDFGNVSHLVPGIHPMVKISPENVALHTKEFAAYARTEEAIDAAVDAAIGLAQVAVDALADPQMLIDATLEFTNSGDVLKVGDYLA

SEQ ID NO: 45750 - protein, 435 aa, Blastocystis hominis
MGKEKPHINLVVIGHVDSGKSTTTGHLIYACGGIDKRTIERFEEGGQRIGKGSFKYAWVLDKMKAERERGITIDISLWKFQTEKYFFTIIDAPGHRDFIKNMITGTSQADVAILIIAAGTGEFEAGYGKNGQTREHALLANTLGVKQMICCVNKMDDKSVNYSEARYKEIKAEMTSFLTKVGYQKVEERIPFIPISGFNGDNMLERSANMPWYKGPTLIEALDNIHPPKRPVDKPLRLPLQDVYKIGGIGTVPVGRVETGILKPGMTVTFAPVGVTTEVKSVEMHHESIPQALPGDNVGFNVKNVSVKDIHRGNVCGDAKNDPPCRVESFTAQVIVMNHPSGIRPGYCPVMDCHTAHIACKFEKIMSEMDKRTGKVLRENPDIVKNGKSMMAELVPSKPLCVESFQDYPPLGRFAVRDMRQTVAVGIIKSTVRAK

SEQ ID NO: 45751 - protein, 352 aa, Arabidopsis thaliana
MEEQNLSSYAMILSSSSVLPMVLKTAIDLGLFDILAESGPSSASQIFSLLSNETKKHHDSSLVNRILRFLASYSILTCSVSTEHGEPFAIYGLAPVAKYFTKNQNGGGSLAPMVNLFQDKVVTDMWYNLKDSVLEGGLPFNNTHGSSAVELVGSDSRFREVFQSSMKGFNEVFIEEFLKNYNGFDGVKSLVDVGGGDGSLLSRIISKHTHIIKAINFDLPTVINTSLPSPGIEHVAGDMFTNTPKGEAIFMKWMLHSWDDDHCVKILSNCYQSLPSNGKVIVVDMVIPEFPGDTLLDRSLFQFELFMMNMNPSGKERTKKEFEILARLAGFSNVQVPFTSLCFSVLEFHKNK

SEQ ID NO: 45752 - protein, 635 aa, Geobacillus kaustophilus HTA426
MCGFIGCIHDRPRAIEQTWKTTLVEMNRLITHRGPDDEGYFFDDYVSFGFRRLSIIDLEAGHQPLSYENDRYWIIFNGEIYNYLELREELAAKGYSFATHSDTEVIVALYSAEKEKAVEKLRGMFAFVIWDKQEKTVFAARDPFGIKPFFYAEQGDRTFFASEKKSILLALRQESPNGDSLQHYLTFQYVPEPLTMSAGIYKLEPGHYLKKKVGKPLTIHRYWKASFEPIRQSEEELVKKIRDALFDSVNVHMRSDVPVGAFLSGGIDSSFIVAIAKQFHPHLKTFSVGFEREGFSEIDVAKETAEKLGVDNISYVISPQEYMEELPKIMWHMDDPLADPAAVPLYFVAREARKHVTVVLSGEGADELFGGYNIYREPESLRLFARMPNIVKAVLRVIAKMLPDGMKGKSFLERGTTPLEERYVGNAKIYSEKEKAALLKTYQEGREYTAVTAPFYRETLHYPPVNRMQYIDLHTWLRGDILVKADKMTMAHSLELRVPFLDKKVFEVARQIAPDMKTANGTTKYILRKAAEGIVPDHVLNRKKLGFPVPIRHWLKNEMYDWARQLINESETDHLFHKDVLYRLLDEHARHKADHSRKLWTVLAFMVWHQVYVEKKYDFAQSVQNEKRPASVLEA

SEQ ID NO: 45753 - protein, 282 aa, Yersinia pestis KIM
MSQTASSTLKGQCIAEFLGTGLLIFFGAGCVAALKLAGASFGQWEISIIWGLGVAMAIYLTAAISGAHLNPAVTIALWLFACFERRKVLPYIVAQVAGAFCAAALVYGLYYSLFVDFEQTHQMVRGSTESLQLAGIFSTYPNPHISVVQAFLVETVITAILMCLILALTDDGNGIPRGPLAPLLIGILIAVIGASMGPLTGFALNPARDLGPKAFSYLAGWGDIAFTGGRDIPYFLVPIFGPIVGALLGAFGYRALIGRHLPCDVCTLEDEESTTITTERKA

SEQ ID NO: 45754 - protein, 304 aa, Triticum aestivum
VIKPATMAGAAAQQQQQKGGGAVRVGGGGPAPFLTKTHQMVEERGTDEVISWGEQGRSFVVWKPVELARDLLPLHFKHCNFSSFVRQLNTYGFRKVVPDRWEFANENFRRGEQGLLSGIRRRKATATTTTPQSSKTSGTGVNVAFPPPLPALPPASASTSGTGNDHSSSSASSPTRPDLSSENEQLRKDNHALAAELALARRHCEELLGFLSRFLDVRQLDLRLLMDGDMQGAAGAGGARSADQEHCCEKKVKLFGVILKDASARKRGRCDEAAASERSMKMTRIGEPWVGVPSSCPARCGGGN

SEQ ID NO: 45755 - protein, 319 aa, Mycobacterium smegmatis
MANATTSRVDTDLDAQSPAADLVRVYLNGIGKTALLNAADEVELAKRIEAGLYAQHLLDTKKRLGEARKRDLQAVVRDGEAARRHLLEANLRLVVSLAKRYTGRGMPLLDLIQEGNLGLIRAMEKFDYTKGFKFSTYATWWIRQAITRGMADQSRTIRLPVHLVEQVNKLARIKREMHQNLGREATDEELAEESGIPVEKINDLLEHSRDPVSLDMPVGTDEEAPLGDFIEDSEAMSAENAVISELLHTDIRYVLATLDEREQQVIRLRFGLDDGQPRTLDQIGKLFGLSRERVRQIEREVMAKLRNGERADQPAVYAS

SEQ ID NO: 45756 - protein, 235 aa, Glycine max
MGRSPCCEKAHTNKGAWTKEEDHRLISYIRAHGEGCWRSLPKAAGLLRCGKSCRLRWINYLRPDLKRGNFSLEEDQLIIKLHSLLGNKWSLIAGRLPGRTDNEIKNYWNTHIRRKLLSRGIDPATHRPLNDSSHQEPAAVSAPPKHQESFHHERCPDLNLELTISPPHHPQPDHPHLKTLVTNSNLCFPCSLGLHNSKDCSCALHTSTANATATGYDFLALKTTVVLDYRTLHMK

SEQ ID NO: 45757 - protein, 229 aa, Ralstonia solanacearum
MTEVSHLAPAGRRFDAILFDCDGVLVDSEPLVNRLIWQMLNELGIDISLEDSTRRFLGKAIREELDAIAAMRGAPLPAGWLSTFHARRNALLEAEVQAVPHVTQAIEALSALGLPMAVASGADRLKVELQLNRTGLIHRFQPTDARIFSATEVERSKPAPDVYLLAARRLGVAPSRCVVIEDSPTGVTAGHTAGMTVLAYAGRNAPGPLIAAGAAHTFTDMRHLPALLA

SEQ ID NO: 45758 - protein, 309 aa, Mycobacterium avium subsp. paratuberculosis K-10
MATLLLHHPDFAAHRTAPGHPERPDRYRAVAAALSRPGFDALVRETAEPAELAATRYVHSNRYVDAPEAARPQHGYVYLDGGDTMMEPSTWETALRGVGATLQAVDRVLAGDVQNAFVACRPPGHHAETERAMGFCLFNNISIGARHAQRKHGLMRVAIVDFDVHHGNGTQQIFYSDPSVLYASTHQMPLFPGTGAAAETGVGNIFNSPLAPGDGGAELRAAFTDRFVPALQAFSPELIIVSAGFNAHERDPLGSLTMTTDDFGWVTRELMKSAEKLCDGRLVAVLEGGYDLQALADSVTAHVGELLKG

SEQ ID NO: 45759 - protein, 251 aa, Campylobacter jejuni subsp. jejuni NCTC 11168
MKRIVVKVGSHVISEENTLSFERLKNLVAFLAKLMEKYEVILVTSAAISAGHTKLDIDRKNLINKQVLAAIGQPFLISVYNELLAKFNKLGGQILLTGKDFDSRKATKHAKNAIDMMINLGILPIINENDATAIEEIVFGDNDSLSAYATHFFDADLLVILSDIDGFYDKNPSEFSDAKRLEKITHIKEEWLQATIKTGSEHGTGGIVTKLKAAKFLLEHNKKMFLASGFDLSVAKTFLLEDKQIGGTLFE

SEQ ID NO: 45760 - protein, 335 aa, Prochlorococcus marinus str. NATL2A
MTNKTNAASLDIVGIGNAIVDVLTTTDDSFLKKLSFDKGSMTLIDEKKAKELYEMTTNRIQKSGGSVANSLACVAQLGGKAAFIGRVRDDKLGEIFTEEISTTGTIFKTPPSSVGPSTARCIIFVTPDAQRTMCTYLGASVLLEPKDIDLSLVREAKILYLEGYLWDNPAAKNAFIKAAEIAKNAGRKVALSLSDSFCVSRHRESFIKLVEEHIDILFANEDEITNLYETSSLSNALEKLKKKCDLAAITIGEKGSILISNGKEIKIDPFILGKAIDTTGAGDLYAGAFLKGYADGLKPELSAKIGSICAGQIVTQLGSRSNTDLLNLINSHLEA

SEQ ID NO: 45761 - protein, 267 aa, Arabidopsis thaliana
MEVLIPVDEMTEGGEYSPAMMSAEPFLTMKKMKKSNHNKNNQRRFSDEQIKSLEMMFESETRLEPRKKVQLARELGLQPRQVAIWFQNKRARWKSKQLETEYNILRQNYDNLASQFESLKKEKQALVSELQRLKEATQKKTQEEERQCSGDQAVVALSSTHHESENEENRRRKPEEVRPEMEMKDDRGHHGVMCDHHDYEDDDNGYSNNIKRECFGGFEEEPDHLMNIVEPADSCLTSSDDWRGFKSDTTTLLDQSCNNYPWRDFWS

SEQ ID NO: 45762 - protein, 251 aa, Mycobacterium avium subsp. paratuberculosis K-10
MSTRIEIFPDSQALVTAAAARLADTIADAVAARGRALIVLTGGGNGIGLLKSLAGRPIDWSAVHLFWGDERYVPEDDDERNEKQAREALLSHVDIPSSQVHPMPASDGEFGSDLAAAALAYEQLLAANAAPGQPVPNFDVHLLGMGPEGHINSLFPDTPAVLETTRMVVPVEDSPKPPPQRITLTLPAIARSREVWLMVSGAGKADAVAAAINGAAPVSVPAAGAVGLDTTLWLLDREAAAKLPPGTAVQG

SEQ ID NO: 45763 - protein, 1043 aa, Ralstonia eutropha JMP134
MLETLHSQERARVKAERQAALHAVTRMIGMLREDGETRLRTIIENPYQIDLARRIAAAPGDQALRAEYEAWITPVFRSRGFEGYSLISPQRVIVAASSRAYVGKPVSTAVVIEALARAQHADYAATRPNRSPMPILTAEGEQPPGTLFQQVCARIGTPEAPIAFLCLRTDPQDRLFEILRVGWSGKSGKAYVIDAAGRLLSPGLPGDRALQPSAKPRVSAPFGLWAQVPTRPRGGGPSVPADGNGQLTELAAALIDARDGETRVFDHYLDYRGRRVIGVAHWFPDTAMGVIVELDTDEAYRSFHLARQAIIALTALAICLILALTALHWRSRREMRQNAERWQAFRKNVPAGLAYMSPGGRVDMANDIYCEFAGLPLHDLLGRNAWTALPDRRVAGICERGHADVLRTGQTHVDEHTLNVRAHGQRVYRVARFPVRSRHDAVIMGVGTVVTDISEQERTRQALENLASTLEWKVAERTRELMEARESAEAAARAKSQFLANMSHEIRTPLNGISGMTHLAIGEPDSGRQGQYLARIEESCQHLQRIVNDILDFSKMEAGMLAVDAASFPLARLLDHVLSLFREQVRKKGLVLQMEVDPALPLHVIGDSQRIGQILINLLGNALKFTDAGEIRLRVRACNADDDTVAVRFEVSDTGIGIAEDALLVLFSPFHQADSSAARRFEGTGLGLAISKRLAELMGGRITVQSQAGVGSLFTLEIGLGVSKPPAWQGRAARLPAVTPKQDAVQSSAEHVHDDLPGAARTATPHALRGRTVLLVEDNPINQEVAQALLTQAGMQVTQANNGQHALGLLAQGRFDLVLMDVQMPMLDGLETTQRIRRDPRHASMPVVALTASALEDDRQRCLAAGMDDYVSKPIEPRKLYQVMARLVGGDAQSLQSAAAIMSTPAQAVAKVPCIVSLRAIPALDVGPALERLQGRREIYVGLVQRILAERMDFHRQLHQAVSEARYRDASLLAHNMHAILATLGAVELAPMLRTLERQLLDDRPDEALLSAFMDQFESLLSSLSTALKFVDAPTPTQSCAAE

SEQ ID NO: 45764 - protein, 142 aa, Erwinia carotovora subsp. atroseptica SCRI1043
MTIERTFSIVKPNAVAKNAIGAIYARFESAGFTIVASKMLRLSREQAEGFYAEHKGKPFFDGLVEFMMSGPIMVQALEGENAVQRNRDIMGATNPANALAGTLRADYADSFTANAVHGSDSIESAQREIAYFFSDDEICPRA

SEQ ID NO: 45765 - protein, 226 aa, Ralstonia solanacearum
MPHRIKELFENNRKWVERVNAEDPAFFSGLANQQNPEYLWIGCSDSRVPANQIIGLPPGEVFVHRNIANVVVHSDLNCLSVLQFAVEVLKIRHITVVGHYGCSGVKAALTNQRFGLADNWIRHVRDVAEQHDTYLGTVIREQDRHDRLCELNVIHQVNNVCLTTVVQDAWERGQPLTVHGWIYGVKDGLLRNLGMAVNSNEELHGQLASAWLNYGKKGSVPTPVGY

SEQ ID NO: 45766 - protein, 457 aa, Lactobacillus acidophilus NCFM
MAKKAPELKRSMTAGQMEMISLGGAIGVGLFMGASSTIKWTGPSVLLAYIFVGVILYIVMRALGEMLYIDPGTGSFADYASEHVHPIAGYLAEWANVFQYIVVGISEVVATTEYLRFWWKGTSDWIAGIIIILFLLIANLASAKAYATLEFWFAMIKVVTITLMILLGLAVILFGFGNGGHPVGFSNLWSHGGFFTGGIKGFFFSMAIIVGSYEGIELIGISAGEVSDPHKAIIKSVKSVLWRILIFYVGAIFVIVTIYPWNKLDSIGSPFVTTFAKVGITAAASVINFVVLTAALSGANSGIYSSSRMLYKLAHEGEAPKTFGYISKRIVPSHAIIGITSGILIGFMLNVLAQFLNKSLANIFVIVYSSSVLPGMVAWFVILLAELRFRRKNPDLMEDHPFKLPLYPYSNYFALIMLVVIVIFMFINPETQISVSVGALVLIVAAIVYVIKHRKEN

SEQ ID NO: 45767 - protein, 373 aa, Mycobacterium avium subsp. paratuberculosis K-10
MTAQNPNLAALSAAGVSVWLDDLSRDRLRSGNLQELIDTKCVVGVTTNPSIFQKAFAEGHAYDSQIAELAARGADVDATIRTVTTDDVRNACDVLTREWENSDGVDGRVSIEVDPRLAGDTDKTIAQAVELWKIVDRPNLFIKIPATQAGLPAITAVLAEGISVNVTLIFSVERYRAVMDAYLAGMEKAREAGHDLSKIHSVASFFVSRVDTEIDKRLEKIGGERALALRGQAGVANARLAYAAYQEVFEGGQRYQALKADGARVQRPLWASTGVKNPDYSDTLYVTELVAPNTVNTMPEKTIDAVADHGVIRGDTVTGTGPDAQRVFDELAAVGVDLPDVFVVLENEGVEKFVDSWTELMEETQKQLGSASK

SEQ ID NO: 45768 - protein, 449 aa, Lactobacillus acidophilus NCFM
MNENTKLKRGLKSRHVTMIAIGGAIGTGLFLGSGSAIHSAGPSIILSYLIVGIITFFMMRALGELILADPDSHSFLESIKKYLGKRAEFVAGWTYWACWLSLAMADLTATGIYLRYWFPWLPQWVGPLVIVVLLMLINMVNVGLFGELESWFSMIKVIAIIALIVVGAVMIIFHTPVKGGTVSLTNLVSYGGFFPTGVWGFLLSFQMVVFAFVGVEIVGQTASETANPHQDIPKAINTLPVRIGLFYVGSMMAIMSVYPWNQIKTTSSPFVQVFTGIGVTAAAGILNFVVLTAALSATNSAIFSTSRSLYSLARNGHAPKKLGNLTKKAIPMNALITSSLILFVVVILNYVMPAEIFAVVSTVSTICFVIVWIMIMFTHIVYRRHNKNNLGEFRMPGYPLTSWLTIVFYIAILILLFFIESTKLALIISIVFVLILTVSYNFVSKNTNN

SEQ ID NO: 45769 - protein, 126 aa, Buchnera aphidicola str. Bp (Baizongia pistaciae)
MAYSKKVIDHYENPRNVGSFKTIDANVGSGLVGAPACGDVMKLQIKVNKNGIIQDACFKTYGCGSAIASSSLVTEWIKGKSLIEAENIKNTNIAEELDLPPVKIHCSILAEDAIKAAITDYKNKNK

SEQ ID NO: 45770 - protein, 699 aa, Mycobacterium avium subsp. paratuberculosis K-10
MTTLEEISALTQPHLPDDWSELDSAAVDTIRVLAADAVQKVGNGHPGTAMSLAPLAYTLFQRVMRHDPSDTHWLGRDRFVLSAGHSSLTLYLQLYLGGFGLELSDIESLRTWGSKTPGHPEFRHTKGVEITTGPLGQGLASAVGMAMASRYERGLFDPDAAAGTSPFDHFIYVIASDGDIEEGVTSEASSLAAVQQLGNLIVFYDHNQISIEDDTNIALCEDTAARYEAYGWHVQRVEGGENVVAIEEAIAAAKAVTDRPSFIELRTIIGYPAPNAMNTGKAHGAALGEEEVAAVKKILGFDPDKTFQVRDEVIAHTRKLVDRGREAHQKWQTDFDAWAQREPERKALLERLTAEKLPDGWDADLPHWEAGSDAIATRKASGAVLNAVAPKLPELWGGSADLAESNLTTINNADSFGPPSISTKEFTASWYGRVLHFGVREHAMGAILSGIVLHGPTRAYGGTFLQFSDYMRPAVRLASLMDIDTIYVWTHDSIGLGEDGPTHQPIEHLAALRAIPKLSVVRPADANETAYAWRTILARGNGSGPVGLVLTRQGLPVLEGTDADGVARGGYILGSDGEEAGQEPDVILIATGSEVQLAVEAQKLLADKDIVARVVSMPCVEWFESQPDDYRDSVLPPSVSARVAVEAGVAQSWHKLVGDTGKIISIEHYGESADYKTLFREFGFTAEAVAAAAEEVVDN

SEQ ID NO: 45771 - protein, 482 aa, Photobacterium profundum SS9
MNLNDPSLFKQKCYIAGQWVTAENGKVEPVTNPSTGEIIGYVPVMGQEETLHAIEVAQQAFLSWKKVSAKERSNTLRKWYELILENVDDLATIMTTEQGKPFAEAKGEVVYAANFIEWFAEEAKRTYGEVIPSHKTDARIVVSKEPIGVVGAITPWNFPAAMITRKCGPAFAAGCAVVLKPAPDTPFSAFALAELAERAGLPSGLFNVITGDAVAIGGELTKNKVVKKISFTGSTAVGKLLMAQSAPTVKKLSLELGGNAPFIVFEDADLDAAIDGVMVAKFRNAGQTCVCANRLYVHETVYDVFVEKLVQRVSTLIMADGFTDGATIGPLINRASAEKVQSHVTDALDKGATLAFGEKADPATNFFPPHVITHVTDEMRVATEETFGPLAAVFSFATEDEVIARANDTDSGLASYVYTRSLQRAWRMGESLEFGMVGINEGLISTEVAPFGGVKESGLGREGARQGICDYMETKYMLMGGL

SEQ ID NO: 45772 - protein, 179 aa, Acorus calamus
MFPMVTGFMNYGQQTVRAARYIGQSFMITLSHANRLPVTIQYPYEKLITSERFRGRIHFEFDKCIACEVCVRVCPIDLPVVDWRLDTDVRKKQLLNYSIDFGVCIFCGNCVEYCPTNCLSMTEEYELSTYDRHELNYNQIALGRLPMSVIEDYTIRTTTNLTPIKIAKNKPLGSRTITN

SEQ ID NO: 45773 - protein, 504 aa, Kluyveromyces lactis NRRL Y-1140
MITRTQNGSMLLNRINHEPSNDSAEGSCNSLFKPKTLKRKNLKHLTLESSCSSSSSSPDEIPKGFSNGNGPTLSLMLEKLPVREEISPISRDTSFQTVSFLQGSSSTSDISSIVSGTTPTTRDAPMSLTPTGVSMMQQETDETATLTTQIARLSLTPENGIQLENLVRLSKIGAGNSGTVVKTLHVPDSRIIAKKTIPVENKEVLKNQLVRELTIMKNVSAHDNIVGFYGAFYNPSTTNEIVILMEYMDCGSLDKILSVYRSDCHRKNVSISCKTSWFNEMPLSRISFCVLNGLIYLYDCYKIIHRDIKPSNILINSKGDVKICDFGVSTTLINSLADTFVGTSTYMSPERIQGGRYTTKGDVWSLGLMIIELSSGEFPLGGHHDTPEGILDLLQRIVNEPAPKLSKNEHYSIEMTDFVNRCCIKEERGRSSLKELICHDFICKYNNRDTIAKEFRHWCKKVKKRIKEDKMIRREETERSKIEKRQLEKAALAVTAARSSSTRR

SEQ ID NO: 45774 - protein, 208 aa, Candida glabrata CBS138
MIARKKNILKVIILGDSGVGKTSLMHRYVNDKYSQQYKATIGADFLTKEVVLDDDKVVTMQVWDTAGQERFQSLGVAFYRGADCCVLVYDVTNAKSFENIKSWKDEFLVHANISSPESFPFVILGNKVDIEDSKKVVSEKAGQELAKSLGDVPLFLTSAKSAINVDTAFEEIAKSALQQNQNDAHAFEDDFNDAINIQLEGESNSCSC

SEQ ID NO: 45775 - protein, 961 aa, Magnaporthe grisea 70-15
MAPVMLEQAGGGATGRSGLDTGTDIATGATATTDLDPKGRNWWRMTSAQGTRSRQQDADRASRPDDLLQQQQQQQQQQSLHKNKPTHSWRKLVDVASDRSWLSKYQVQRSDGSIVIPTRRSSRNEHVRRGREKEPRYPFSPNWIPAWNFRPRDDAHTLEGEAGPTREEIEAAKRILERFPMAGSQRPVTRSSHNGGQRNAPRQRHSMIQTGEDVTVLQRMSATPPPIVRQRLVIRDDSFEESFSDDDQDIDMNMNTSRNTRRPSADQGRLRGLIKSESSLRDRRLSLQSTETQRRIDHPSLPPLREISFNSENTNGNGIHSRGSERSPVLDHIRLYEDAPTDNILPLTRPDYHPPDSPEDLNGFRPDSPHDFDNFDGCYIDNFYSEGQPGLPRGDIPRRKSSFKGTQKASSKKGSFQERLNSAQSGQRQPNVLRRRRHSDELGDVRRGGSTKSKESDGQHSVATSGSARMPDFFGPNIYQVVLQDPITAHQLLKFSESRLCGENLEFLQKVDNYHRLMNELVDTVSSIQKDYVSDSSPRQVNLQGAVLNRLDGDMRALMSQTLPQMQRMFTGAQKGVEDLIYAGVYPAFVRHQLALSASRALACDRTRYQGLGDSFTMTDPRLADNPIIFASDGFASLTGHPLSDIISKNCRVLQGKQTDKQAVARIRAAVREETEVVELVLNYKKNGDPFWNLLYIAPLFDEQGQLAFFIGGQVNCSTTIHSSADVMRVLSMSSDPSETDAKESPAKPGETTAKLPQATPQPPPPRKSSARKVLLKAFGVRTQDENEPSAQAVPAMAVAGMGKKLLSKMEGQDIGTQMREFYSSYSKYLVVDATFKIRFHSDGILTMLHPANNVGELAGTDIFHFLRQNTLTSSSASGNGHGHGAHTGAGATLPSPVAYKGRVRAALRAGSAISIQVRLQTRRSAAFRGDEMFAAHWTPLKDAKGEVCWFVLCLGAMLGE

SEQ ID NO: 45776 - protein, 331 aa, Mycobacterium avium subsp. paratuberculosis K-10
MPGHDKHMHAIEVSETGGPEVLRYVETPTPTAGPGQVLIKAEAIGVNYIDTYFRSGQYPRELPFIIGQELCGTVAAAGDGVDGFNVGDRVVSAAATGGYAEYATAPASLTAHVPDGVAADVAASALLKGLTAHYLLKSVYPVQAGDTVLVHAGAGGVGLILTQWAHLLGARVITTVSTPEKARRSAQAGADEVLSYPDDADEFGSRIRALTDGAGVAAVYDGVGASTFDASLASLAVRGTLALFGAASGPVPPFDPQRLNAAGSVFLTRPSLAHFIRTGQEFSWRAEELFAAIAAGDITVEVGGRYPLADAARAHRDLQGRKTTGSIVLLP

SEQ ID NO: 45777 - protein, 337 aa, Yarrowia lipolytica CLIB122
MRPILLQGHERPLTQLKYNREGDLLFSVARDKTICVWYSHNGERLGTLEGSGGANFSVDADPTTTIVATGSADQTARLWDIKTGKTIHSWNFKTTVKRVEFSPDGTKLIVLSEKMMGYPGGISVFNVKADVNATQETEPIMDIKPEEGADKFSFAVWSYGGKYIITAHADGSLSKYDGATGEFIASTQIHEEKFPITDLQPSPDKTYVITSSKDKTARLTDVDSLKLLKTYKTDTSMNSACITSKKDFVILGGGQDAKDVTTTSSRDGKFEARFYHKIFEDEVGRVKGHFGPLNCVVAHPNGGSYASGGEEGYIRIHHFDPSYFDFTYDVERFAAKE

SEQ ID NO: 45778 - protein, 266 aa, Bacillus cereus G9241
MKRINKNRNKKYWLVAFIGLNIGGILTYYIFPLINDYSKVNREISSVTSNTHQINNDNMAPDIIERAQNSTVKITNHDYNNAIINNASGVIYKKTNNKAYIITNNHVIQNTKKILVTLRNKNTIVAKLIGTDKLTDISILEIHNKHVDTVANLGESKNIKTGDRVFAIGSPLGLIGTVTSGIISNTNRTITKSLNDDDPLNQEKELIQTDAATNPGNNGGGLFDINGKLIGITSQKISKTNIEGISFAIPISIVRKSIQDIEKPSK

SEQ ID NO: 45779 - protein, 372 aa, Pisum sativum
MQHPSSNPNSGSIPNPHNANTASKFPPPPPPSTAATTAACKASMLPRSGGNGGSLHRRAHSEVSFRLPDDMMDLSPSDPFTGGSSTASLDEIGSEDDLFSTYIDMDKLGGSNDMGDAGADPGRNDEAEKNQGRSRHRHSSSVDGSSSFGEIMDGKKAMPPDKLAELWSIDPKRAKRILANRQSAARSKERKARYIHELERKVQTLQTEATTLSAQLTLYQRDTTGLSNENTELKLRLQAMEQQAHLRDALNDALKKEVERLKVATGDIRSHTESFNLGMHQMPFTESNYLPISPQSGHPGHRNTQLPLFGHSPILAWQLINWQPNKILIHFQNYAKWIQIGRFQGLDISSKGTTIVKSEDPSLSASESSTTF

SEQ ID NO: 45780 - protein, 205 aa, Eucalyptus globulus
MGRGRVQLKRIENKINRQVTFSKRRCGLLKKAHEISVLCDADVALIVFSTKGKLFEYATDCCMERILERYERYSYAESQVLTNNAETNGNWTLEHAKLKARMEILQKNQKNLMGEELDSLSLKELQNLEHQLDTALKNIRSRKIQLMCESISELQRKDKALQEQNNMLAKKVKEKEKALAQQTQWDNPQDDGLTSSSGSLPSEWN

SEQ ID NO: 45781 - protein, 342 aa, Bartonella quintana str. Toulouse
MRALQLFDERRLEITHIAPPPPPGPNEVTVRIKAVALNHIDVWGWRGMAFAKRKMPLIIGAEASGEVVQLGDNVENLQLEQIVSIYGAHTCGVCKACHEGRDNLCSHVKGIYGFHLDGFACEFVNLPARLLVPAPAKCNELQAAVAPITFGTVEHMLFDNAKLQAEETILIQAGGSGIGSAAIQLAKHMSCTVITTVGSDEKIAKAKSLGADYVINYCKDRFEGVVRKLTKKQGVDVVFEHVGANTWNGSLLCMKRGARLVTCGSTSGVTAPLNLMQLFQQQFKIFGSFGCRVKNMQNAMQKMAQGVVHPVIDTIVQFEEIDTALKRMESRNVFGKIILKID

SEQ ID NO: 45782 - protein, 424 aa, Bartonella quintana str. Toulouse
MQYNDHLGRPLVAITGAGVVTSLGQGKHKNWQKLTNGVSGIHKITRFPVEGLKTQIAGTIDFLKESTLGASALSEKLADLAAEEALAQAVFDKKNFNGPLFLAAPPVELEWNARFTLDQEGVLNDVPSYKHLLEVCSHQLHETLFETTQFGAIAAKLQEKFGTKGLPVTLSTACASGATAIQLGVESIQRGETDRALTIATDGSVSAESLIRFSLLSALSTHNDPAEKAAKPFSRDRDGFVMAEGSGALVLESLKSALDRNATILGILAGCGETADDFHRTRSKPDASPAIEAVRKALDDAQITINEIDYINAHGTSTPENEKMEHLALSTVFGDVLEHIPVSSNKSMIGHTLTAAGAIEAVFSLLTIQAGILPPTINYNDPDPAIPLDVVPNHSRKARVNTVLSNSFGFGGQNTSLVITAYKG

SEQ ID NO: 45783 - protein, 218 aa, Pisum sativum
MGRGGATTAAAAVEPVFFKEPRYRGVRKRPWGRFAAEIRDPLKKARVWLGTFDTAEEAARAYDTAARNLRGPKAKTNFPLAQPFYQNPEAGNPFGELRFYAGGAGEGFQDHRRPTSSGMSSTVESFGGPRPVRPPMPPSAVTGRRYPRTPPVAPGDCRSDCDSSSSVVDDADNDNAASSTMLSFKRQPLPFDLNAPPLEEGDVANGLGEDLHCTLLCL

SEQ ID NO: 45784 - protein, 561 aa, Yarrowia lipolytica CLIB122
MKLMHLLPLVALFQPLVAQNVKVYEGDDHVHSARCLSGFIDDACGATFENVEATNAEVRPLLKELVKEDYFRYYKIDLNGERCPFVWDDGLCGNKACALNLESEEDLPEVWKPKRLGALTKDSVSRDKNVRQNERFAEFDLEQEYDSRGDNGGSNYCYPEDEFAHGGVYVSLLDNPERFTGYAGPHAQRVWRAVYAENCFTGMSSLPGEVSSPLNLGSGLVPFGQQDFDLAEIDSYANDLPHQCLEQRIFYRLLSGMQASISTHLCYEYLDMDAGEWRPNSTCFESRVGTHRDRLSNLFFNYALVSRAVSKLNDHLNDIKFTDDTKHNEETREIVAKLTGLLQNTTSAIFNETLVFSTPEAITLKSEFRQRFRNVSALMDCVGCDRCKLWGKVQTAGYGTALKLLFELGDNTDEVIKNLRRTELVALFNTFDRLSKSVEAVEYFENLKEGARQESAFATFLYYVRRATSQVSRVFSTIKNSIFNRFRWIKHTEFWEDVEREMYATKVGLRFILRSYWNFPRNMLMLTFNWIAPKWDKFVGRDKYQDRIIPTRGVYTLTNTN

SEQ ID NO: 45785 - protein, 524 aa, Arabidopsis thaliana
MDSFSYSSMKSMLIQARGSLNSRLSEFEPLVLLLVPLVSLFLAQIIGSVFGVVHEKGLKACLIGFIMGLLKMIPGVQNYIDAEKQKVVDQLQSGSSSKKKNKTEVLPVKGLGVEVLEKMENEKRNDAIWQGKCSGTVFAHTNPLHIDVFQSVVRFESEVVAMTAALLGSKETASGGQICGNMTSGGTESIVLAVKSSRDYMKYKKGITRPEMIIPESGHSAYDKAAQYFKIKLWRVPVDKDFRADVKATRRHINRNTIMIVGSAPGFPHGIIDPIEELGQLALSYGICFHVDLCLGGFVLPFARKLGYQIPPFDFSVQGVTSISVDVHKYGLAPKGTSTVLYRNHEIRKHQFVAVTEWSGGLYVSPTIAGSRPGSLVAGAWAAMMSLGEEGYLQNTSKIMEASKRLEEGVREIHELFVIGKPDMTIVAFGSKALDIFEVNDIMSSKGWHLNALQRPNSIHICITLQHVPVVDDFLRDLREAVETVKANPGPITGGLAPIYGAAGKMPDRGMVNELLVSFMDSQY

SEQ ID NO: 45786 - protein, 446 aa, Pseudomonas fluorescens PfO-1
MTTQRIHPVDEVLPLRQLFTFGLQHVLVMYAGAVAVPLILGSAMGLTSAQVVLLINANLLTSGVATLIQTLGFWKFGARLPLIQGCSFIALAPMIMIGKEFGLSQIFGAVIAAGFITVALAPVFSRLLRFFPPVVIGSLITIIGISLMPAAAIWLGGGNPDSADFGNPANLLLGLATVSVTLVIYARFKGFIGNLSVLIGLFVGSLIAAACGMTHFNRVSEAAWFELSAPMAFGAPEFAPVPILIMTLAMLVIMAETTGNCLAIGKLTGKPTTQQTLGNAFRADGLSTMLGGLFNSFPYNAFTQNTGLIALSNVKSRFVVAAAGAIMVLMGLFPKLGALIAAVPTPVLGGCAIVMFGMTTVAGIQELSRVQFEGTRNGIIVAVSVSAGVLPMSFPALFEHVGPTLKLVLDSGIFLGAITAIVLNVLLNDEKKPTETIGATSAELAD

SEQ ID NO: 45787 - protein, 105 aa, Brassica napus
  misc_feature (10)..(10): Xaa can be any naturally occurring amino acid
  misc_feature (14)..(14): Xaa can be any naturally occurring amino acid
  misc_feature (30)..(30): Xaa can be any naturally occurring amino acid
  misc_feature (52)..(53): Xaa can be any naturally occurring amino acid
  misc_feature (61)..(61): Xaa can be any naturally occurring amino acid
  misc_feature (69)..(70): Xaa can be any naturally occurring amino acid
  misc_feature (76)..(77): Xaa can be any naturally occurring amino acid
  misc_feature (85)..(85): Xaa can be any naturally occurring amino acid
  misc_feature (87)..(87): Xaa can be any naturally occurring amino acid
  unsure (1)..(105): unsure at all Xaa locations
GIICIASLIXPYRXDRDICRTLLPEGDFVXVYMDVSLEVCEARDPKGLYKLXXAGKIKGFXGIDDPYEXXLNCEIXXGQEGTGTXPXEMAETVVAYLEHKGYLNA

SEQ ID NO: 45788 - protein, 219 aa, Pseudomonas fluorescens PfO-1
MRDIIDGFLRFQREVYPQRVELFRQLATEQNPKALFVTCSDSRVVPELLTQREPGELFVIRNAGNIVPSYGPEPGGVSATVEYAVAVLGVRDIVICGHSDCGAMGAISRCTCLDHLPAVANWLRHSDAAKAINAAHEFDTPRDKLDGLVRENVIAQLANLRTHPSVALALEQGRLNLHGWVYDIEAGCIDALDGATRRFVPLSDSPTTVAVAARNGGQI

SEQ ID NO: 45789 - protein, 149 aa, Physcomitrella patens
MADDLTEEQIAEFKEAFSLFDKDGDGSITTKELGTVMRSLGQNPTEAELQDMINEVDADGNGTIDFPEFLNLMARKMKDTDSEEELKEAFKVFDKDQNGFISAADVRHVMTNLGEKLTDEEVDEMIRDADVDGDGQVDYDEFVKMMKAK

SEQ ID NO: 45790 - protein, 473 aa, Corynebacterium glutamicum ATCC 13032
MKFWIPQRKRIFKMALVLGIDSSTQSCKALLVDAATGQVIDEGRASHPSGSEVDPRAWIAALDQATEGLLERADAVSIAGQQHGMVALDENDEIVRPALLWNDTRSAQAALDLNEEIGGDQAAVDATGSVYVASLTATKMRWMRDHEPENAARTASVMLPHDFLTWHLMGRGRKVTDHGDASGTGYYSTRDRAWRTDLAALALGHEVELPELLAPNAIAGTTPGGVKVAAGTGDNAAAALGLDLQPGDVSVSIGTSGVAGMTVQHSVHDPSGLVTGFADATGAYFPLACTLNGAPVLEFGRRILGVEWEEFDALALAAQPGSGGVTLQPYLEGERTPNRPAARGVLAGLNCATTREDFARATVEGLLLALDDAVTALVEATGVPVQRIQLIGGGARSQAVREIAPEIFGHEIVVPEPAEYVALGAARQAAWALSGEATPPQWPTPGSDPHRAPKNTELSTRYAKLRAATQGWY

SEQ ID NO: 45791 - protein, 478 aa, Streptomyces coelicolor A3(2)
MRRAKIVCTLGPATDSYDQIKDLVDAGMDIARFNFSHGTHAEHEERYHRVRKASDETGRSVGALADLQGPKIRLGHFGEGPVLLERGDSFTITVEEGVEGDRYICGTTYAGLAEDVTPGERVLVDDGKVCLEVTGVDGTRVRTRVIEGGMVSDHKGLNLPGVAVSVPALSKKDEDDLRWALRAGFDVVALSFVRSGRDILDVHRIMDEEGRRLPVIAKVEKPQAVENIEDIVAAFDGIMVARGDLGVEMPLEQVPTVQKRAVKLAKRNAKPVIVATQMLDSMIDNARPTRAEASDVANAVIDGTDAVMLSGETSVGKHPTDTVRTMARIVEAAEEDILAKGLPPLTERNKPRTQGGAVARAAAEMGDFLGAKFLVAFTQSGDTVRRLSRYRSPIPLLAFTPEPATRSQLSLTWGVETFLGPHADSTDAMVDQVDELLTRYGRCEKGDVVVITAGSPPGVSGTTNLVRVHHIGEDDIPK

SEQ ID NO: 45792 - protein, 479 aa, Glycine max
MILLFGYILSKGNNIHSRLLCPSCISIGYRAPPRVSYVGPPPTTPTPEIESKPEIMEKVGVAVNSKNQESKATSTITIKGFMSLLMKSVDENGDGSKRVISLGMGDPTLTTYFPISNVAEKAVAEALQSHRFRGYAPTAGLPQARIAIAEYLSRDLPYQLSSDDVYITCGCTQAIDVSVAMLARPGANIILPRPGFPLYELSASFRGVEVRHYDLLPEKGWEVDLDAVEALADQNTVALVIINPGNPCGNVYSYHHLEKIAETAKRVGTIVIADEVYGHLAFAGKPFVPMGVFGSIVPVLTLGSFSKRWIVPGWRLGWFVTNDPSGTFRNPKVDERFKKYFDLLGGPATFIQAAVPQIIEHTEKVFFKKTIDNLRHVADICCKELKDIPYIICPYKPEGSMAMMVKLNLSLLEDISDDIDFCFKLAKEESVIILPGTAVGLNNWLRIIFATDPVALVEGLKRVKSFCERHARKWSMTTE

SEQ ID NO: 45793 - protein, 406 aa, Arabidopsis thaliana
MKNKTQKYIDKKTWNYINMDHHHAFASHSYNSVFISKKAMEESRSYRKERKQTKKKTGRGSGSRSIHIKMRKLRVLIPGGRRLNQPDLLLSKTADYIMHLELRISILHLLVRYYLKKKRSNLSSSPNESNQNPEFSDSDTYQRQLQQLFHLHDSGLDQALIDALPVFLYKEIKGTKEPFDCAVCLCEFSEDDKLRLLPNCSHAFHIDCIDTWLLSNSTCPLCRGTLFSLGHQFEYPDFNFGFFAGDDGGGGVRVSPVQKPAENEIGKRVFSVRLGKFRSSNIVNNGEVVVGGGGETSSSSLDNRRCFSMGSYQYIVAESDLVVALCPNNEGLKNNKDVEGKKINMRSKGESFSVSKIWQWSNKRSKFPNNHPSETNLVVGGSSSSSSYVCSGSDGLSLNGRRFQGP

SEQ ID NO: 45794 - protein, 359 aa, Oryza sativa
  misc_feature (97)..(97): Xaa can be any naturally occurring amino acid
  unsure (1)..(359): unsure at all Xaa locations
MSAYCGKYKDELIKNAAYIGTPGKGILAADESTGTIGKRFASINVENVEDNRRAFRELLFCTPGALQYISGVILFDETLYQKTKDGKPFVDILKEGXGALPGIKVDKGTIEVAGTDKETTTQGHDDLGKQCAKYYEAGARFAKWRAVLKIGPNQPSQLAIDLNAQGLACYAIICQENGLVPIVEPEILVDGPHDIDRCAYVSEVVLAACYKALNEHHVLLEGTLLKPNMVTPGSDAKKVAPEVIAEYTVRTLQRTVPPAVPAIVFLSGGQSEEEATLNLNAMNKLSAKKPWSLSFSFGRALQQSTLKAWAGKTENVEKARAAFLVRCKANSEATLGTYKGDAVLGEGAAESLHVKDYKY

SEQ ID NO: 45795 - protein, 476 aa, Cryptococcus neoformans var. neoformans B-3501A
MPSFEPAVSSHIAPLPSASKPLPLTTSTEGLQALADKHITKGLGRLRDHVFKEGKGLRVLTTENQKLLDFTSGIGVTSLGHAHPDVTAAIISQAQSIIHVQCAIGLSEPYVQLVESLLTMMPDPSLDSFFFWNSGSEAIEAAIKVSRTKTKRNNIVVMQGGYHGRTSGAAALTRSKTSFFRGTGPLMPCVYTTPFPYWHAMGLPKDTPEEVLTEQAILGIENLLQQQTAPEDTAAIFLEPVIGEGGYIPAPTAYVKHLRKLCDKYGIMLVIDEIQTGFGRTGKTFAIEHTGVTPDIMVYAKGFANGMPISGIVTRKEIMDVMAPGSLGGTYSGNVVACAAALATTRYMRTHDILGNVQARSEQLFKGLREIQEDEANGGWMIEEVRGKGLMIAIEFKDPNSKLTSSHNRGDISLPGNLNKLVQDACYDRGLLVLTTSIYPVLRLIPALVLSEEEVDEALKIIKESVKEVASVIEGN

SEQ ID NO: 45796 - protein, 662 aa, Burkholderia fungorum LB400
MANAIRALSMDAVQKANSGHPGMPMGMAEIGVALWSRHLRHNPKNPQWADRDRFVLSNGHGSMLLYSLLHLTGYDLPIEELKNFRQMHSKTPGHPEYGITPGVETTTGPLGQGLANAVGMALAESLLATEFNKPDATIVDHHTYVFVGDGCLMEGISHEACSLAGVLKLNKLIAFYDDNGISIDGEVVHWFHDDTPKRFEAYGWNVIPNVVGHDVEAVDAAIKQAKQSDKPTLICCKTVIGEGSPNKAGSHDSHGAALGDKEVAATREKIGWKWEPFVIPQEVYAAWDATEAGARNESEWDKAFAAYAAKYPQEAAEFKRRNAKQLPADWKEKAKAIIAGANERAETVATRKASQQAIEALSAVLPELLGGSADLTGSNLTNWKAAKPVRVNAEGKAAGNYVNYGVREFGMSAAINGVALHGGFKAFGGTFLTFSDYSRNALRVAALMKAPSIFVFTHDSIGLGEDGPTHQSIEHVASLRLIPHLQVWRPADTVETAVAWTHAVEHHGPSCLIFSRQNLPFSERTDAQIANIEKGGYVLRDWNDEIVARKIILIATGSEVELALNAVEPLAREGIAARVVSMPSTTVFDKQDAEYRERVLPQGVRRVAIEAGVTDFWRKYVGLEGGVVGIDTFGESAPAGVLFKHFGFTVEHVVETAKAALG

SEQ ID NO: 45797 - protein, 518 aa, Arabidopsis thaliana
MESCFPAMKLNQCTFGLNNEIVSERVSAFWGTQVVKPNHLRTTKLRSAPQKKIQTNLIRSVLTPFVDQESHEPLLRTQNADPKNVASIILGGGAGTRLFPLTSKRAKPAVPIGGCYRLIDIPMSNCINSGIRKIFILTQFNSFSLNRHLSRTYNFGNGVNFGDGFVEVLAATQTSGDAGKKWFQGTADAVRQFIWVFEDAKTKNVEHVLILSGDHLYRMDYMNFVQKHIESNADITVSCLPMDESRASDFGLLKIDQSGKIIQFSEKPKGDDLKAMQVDTSILGLPPKEAAESPYIASMGVYVFRKEVLLKLLRSSYPTSNDFGSEIIPLAVGEHNVQAFLFNDYWEDIGTIGSFFDANLALTEQPPKFQFYDQKTPFFTSPRFLPPTKVDKCRILDSIVSHGCFLRECSVQHSIVGIRSRLESGVELQDTMMMGADFYQTEAEIASLLAEGKVPVGVGQNTKIKNCIIDKNAKIGKNVVIANADGVEEGDRPEEGFHIRSGITVVLKNATIRDGLHI

SEQ ID NO: 45798 - protein, 391 aa, Candida albicans
MFLKNIFIALAIALLVDASPAKRSPGFVTLDFDVIKTPVNATGQEGKVKRQAIPVTLNNEHVSYAADITIGSNKQKFNVIVDTGSSDLWVPDASVTCDKPRPGQSADFCKGKGIYTPKSSTTSQNLGTPFYIGYGDGSSSQGTLYKDTVGFGGASITKQVFADITKTSIPQGILGIGYKTNEAAGDYDNVPVTLKNQGVIAKNAYSLYLNSPNAATGQIIFGGVDKAKYSGSLIAVPVTSDRELRITLNSLKAVGKNINGNIDVLLDSGTTITYLQQDVAQDIIDAFQAELKSDGQGHTFYVTDCQTSGTVDFNFDNNAKISVPASEFTAPLSYANGQPYPKCQLLLGISDANILGDNFLRSAYLVYDLDDDKISLAQVKYTSASNIAALT

SEQ ID NO: 45799 - protein, 282 aa, Bacillus licheniformis ATCC 14580
MMTAKNLQDRIKLNNGTAMPWFGLGVFKVEEGPELVQAVKTAIKHGYRSIDTAAIYGNEEGVGQGIREGLKEAGISREDLFVTSKVWNDDLGYDETIAAYEASLEKLGLDYLDLYLIHWPVEGRYKAAWKALETLYEQGRVKAIGVSNFQIHHLEDLLKDAAVKPAINQVEYHPRLTQKELQAFCRAHGIQLQAWSPLMQGQLLSHPLLKDIADKYGKTPAQVILRWDLQNGVVTIPKSTKAERIAQNADIFDFELTTEEMKQIDALNENTRVGPDPDNFDF

SEQ ID NO: 45800 - protein, 389 aa, Geobacillus kaustophilus HTA426
MKEIVQQMKAELWEIFDHLHRHPEISWEEWQTTEFLRRELEREGYRARTFADCPGVVAEIGTGPLMVGVRSDMDALWQEVDGVWQPNHACGHDAHMTIVLGVAKLLRRIGYEPPGTLRFLFQPAEEKGTGALKMIEKGAADGLTFLYGVHLRPIQEVKGGYASPAIIHGAAQCIEGRIRGVAAHAARPHLGVNVIEVGSAIVQELGKIHIDPQVPASIKMTKFHAGEKDANTIPDYAEFALDLRAQTNEAMERLVEGLRHVINGVAAIYGADIELVERTRIVAADPDPDAVRLMEEAIITTLGTEKCVPPVVTSGGEDFHFYSFKKPELKTTMLGLGCDLRPGLHHPNMTFRRDDLLSGVEILARVVMNTFATFAPQGENERASVAANH

SEQ ID NO: 45801 - protein, 205 aa, Arabidopsis thaliana
IRLELHTRIDGCAVCSGSEIRSVVLAGRRFYEKEGLPAFPMGNIDQTRMWKVGERVRKSRPAGDLGPLYPFTAGVYVALMMAQIEILRKKGHSYSEIINESVIESVDSLNPFMHARGVSFMVDNCSTTARLGSRKWAPRFDYILTQQALVAVDSGAAINRDLISNFFSDPVHGAIEVCAQLRPTVDISVPADADFVRPELRQSSN

SEQ ID NO: 45802 - protein, 448 aa, Zea mays; identical to SEQ ID NO: 847

SEQ ID NO: 45803 - protein, 428 aa, Bacillus cereus ATCC 10987
MVAEKGTQTKTQQQREQHFELLNSTQIVISEALEKLGYPNEVYELLKEPVRMMTVKIPVRMDDGTVKIFTGYRAQHNDAVGPTKGGIRFHPNVTENEVKALSIWMSLKCGIVDLPYGGGKGGIICDPREMSFRELERLSRGYVRAISQIVGPTKDIPAPDVFTNSQIMAWMMDEYSRIDEFNSPGFITGKPLVLGGSHGRETATAKGVTICIREAAKKRDIDIKGARVVVQGFGNAGSFLAKFMHDAGAKVIAISDAYGALHDPNGLDIDYLLDRRDSFGTVTKLFNNTISNKELLELDCDILVPAAIENQITEENANDIKAKIVVEAANGPTTLEATKILTDRGILLVPDVLASAGGVTVSYFEWVQNNQGYYWTEEEVEQRLEKVMVRSFDSIYETAQVRKVNMRLAAYMVGVRKMAEASRFRGWV

SEQ ID NO: 45804 - protein, 387 aa, Ustilago maydis 521
MQIFVKTLTGKTITLEVESSDTIDNVKAKIQDKEGIPPDQQRLIFAGKQLEDGRTLSDYNIQKESTLHLVLRLRGGMQIFVKTLTGKTITLEVESSDTIDNVKAKIQDKEGIPPDQQRLIFAGKQLEDGRTLSDYNIQKESTLHLVLRLRGGMQIFVKTLTGKTITLEVESSDTIDNVKAKIQDKEGIPPDQQRLIFAGKQLEDGRTLSDYNIQKESTHSPCSTLHLVLRLRGGMQIFVKTLTGKTITLEVESSDTIDNVKAKIQDKEGIPPDQQRLIFAGKQLEDGRTLSDYNIQKESTLHLVLRLRGGMQIFVKTLTGKTITLEVESSDTIDNVKAKIQDKEGIPPDQQRLIFAGKQLEDGRTLSDYNIQKESTLHLVLRLRGGK

SEQ ID NO: 45805 - protein, 332 aa, Prochlorococcus marinus str. NATL2A
MESLLSQLSSMTVVVADTGDLEAIKKYHPRDATTNPSLILAAAQMPAYQSLIDQALTTSREMLGTSAAKADVVKEALDELCVVFGKEILKLIPGRVSTEVDARLSFDTDATIEKARKIIAKYNADGISNDRVLIKIASTWEGIKAAEVLEKENIHCNLTLLFNFYQAVACAEAGVTLISPFVGRILDWYKSATGRDSYPATEDPGVVSVTKIFNFFKSNGYKTEVMGASFRNIEEITELAGCDLLTISPKLLQQLNETHMDLPIKLNAQKPLVIEEKIHLDQTSFELMMAGDKMATEKLDDGISGFSKAIDKLENQLNERLELIEGEVALTH

SEQ ID NO: 45806 - protein, 509 aa, Agrobacterium tumefaciens str. C58
MRILAVTAEMFPFVKTGGLADATSALPQALERKGADVRTLLPLYRGLTPLVRGRKPVLVANILEQPVSVYYVVSDGHKLLLLEAASLFDRDGHPYGVKGEPFADNDLRFAVLSKVAAEIALGAIDGWQPDVVHVHDWHAALTCVYLADSTPSVASVLTLHNLAFQGQYPLERAGMLGLPSHLCTVDCLEYYDDMSFLKGGLTTASAVTTVSPTYAREILTPEMGMGMHGVLARRRGDLRGIVNGVDHDVWNPATDPYILANFTAATATRRSLNKYALLQALGLAPTQGPVFGVVSRLTWQKGIDLLPHVVPLIIERKGRLIVHGEGDTALEDSLQALAKRYPELVCAHIGYDERLAHMIQAGSDFIIQPSRFEPCGLTQLYALRYGALPIVSRTGGLAETIIDANDAAIEAGVATGFQFEPANEDDLRAALERAISAYNDRELFRRLQTQAMQANFSWDKSAAQYMALFESLVGNSTRETDAVADIRTETFAKIRADRRLAGTPGSPTG

SEQ ID NO: 45807 - protein, 128 aa, Erwinia carotovora subsp. atroseptica SCRI1043
MAYSEKVIDHYENPRNVGSFDNADPSIGSGMVGAPACGDVMKLQIKVNNEGIIEDARFKTYGCGSAIASSSLVTEWVKGKSLNEAEAIKNTQIAEELELPPVKIHCSILAEDAIKAAIADYKSKRDAQ

SEQ ID NO: 45808 - protein, 150 aa, Brassica napus
MAEEYKNASEEFKNVPEHETPKITTTEEPSAATGEVKDRGLFDFLGKKEEVKPQETTTPLASEVEHKAQITEEPAFVAKHEEEEHKPTLLEQLHQKHEEEEENKPSLLQKLHRSNSSSSSSSEEEGEDREKRKKEKKKKMVEGDEKKGVM

SEQ ID NO: 45809 - protein, 464 aa, Listeria monocytogenes str. 4b F2365
MLYSKENKESYLEPVFGSSAEDRDIPKYTLGKEPLEPRIAYRLVKDELLDEGSARQNLATFCQTYMEDEATKLMSETLEKNAIDKSEYPRTAELENRCVNIIADLWHAPKNQKFMGTSTIGSSEACMLGGMAMKFAWRKRAEKLGLDIYAQKPNLVISSGYQVCWEKFCVYWDIDMRVVPMDKDHMQLNTDQVLDYVDEYTIGVVGILGITYTGRYDDIYALNEKLEEYNSKTDYKVYIHVDAASGGFFTPFVEPDIIWDFRLKNVISINTSGHKYGLVYPGIGWVLWKDESYLPEELIFKVSYLGGEMPTMQINFSRSASHIIGQYYNFLRYGFEGYRTIHQKTSDVAQYLAHAVEQTGYFDIYNDGSHLPIVCYKLKDDANVKWTLYDLADRLQMRGWQVPAYPLPKNLENIIIQRYVCRADLGFNMAEEFIQDFQASIQELNNAHILFHDTQQSGVHGFTH

SEQ ID NO: 45810 - protein, 182 aa, Mesembryanthemum crystallinum
MASSMVSSAAVATVNRTPAQASMVAPFNGLKSVAAFPVTKKNNDITSVATNGGRVQCMQVWPPLGKKKFETLSYLPPLSEESLMKEVQYLLNNGWVPCLEFEPTHGFVYREHGNTPGYYDGRYWTMWKLPMFGCTDPSQVVAELEEAKKAYPEAFIRIIGFDNVRQVQCISFIAYKPASYDA

SEQ ID NO: 45811 - protein, 325 aa, Arabidopsis thaliana
MHSLNETVIPDVDYMQSDRGHMHAAASDSSDRSKDKLDQKTLRRLAQNREAARKSRLRKKAYVQQLEDSRLKLTQVEQELQRARQQGVFISSSGDQAHSTGGNGGALAFDAEHSRWLEEKNRQMNELRSALNAHAGDTELRIIVDGVMAHYEELFRIKSNASKNDVFHLLSGMWKTPAERCFLWLGGFPSSELLKLLANQLEPMTERQVMGINSLQQTSQQAEDALSQGMESLQQSLADTLSSGTLGSSSSDNVASYMGQMAMAMGKLGTLEGFIRQADNLRLQTLQQMLRVLTTRQSARALLAIHDYSSRLRALSSLWLARPRE

SEQ ID NO: 45812 - protein, 372 aa, Burkholderia vietnamiensis G4
MRSIIADSKRLVVKVGSSLVTNDGKGLDHAAIGRWAAQIAALRAQGKEVVLVSSGAIAEGMQRLGWNKRPREIDELQAAAAVGQMGLAQVYESRFTEHHIRTAQILLTHADLADRERYLNARSTLLTLLRLGVVPIINENDTVVTDEIKFGDNDTLGALVANLIEGDALIILTDQTGLFTADPRKDPNATLVAEASAGAPELESMAGGAGSSLGRGGMLTKILAAKRAAHSGANTVIASGREADVLVRLAAGEAIGTQLIARTARMAARKQWMADHLQVRGHVVIDAGAVEKLRDGGKSLLPIGVIDVQGAFARGEVIACVGPDGREVARGLTNYSSAETKLIHRKPSGEIETVLGYMLEPELIHRDNLVLV

SEQ ID NO: 45813 - protein, 180 aa, Mesembryanthemum crystallinum
MASMMSNAAVVGRTTPAQASMVAPFTGLKSVSAFPVTKKSNDITSIASNGGRVQCMQVWPPLGKKKFETLSYLPPLSEESLMKEVQYLLNNGWVPCLEFEPTHGFVYREHGNTPGYYDGRYWTMWKLPMFGCTDPSQVVAELEEAKKAYPEAFTRIIGFDNVRQVQCISFIAYKPASYDA

SEQ ID NO: 45814 - protein, 183 aa, Mesembryanthemum crystallinum
MASSLMSNAATTMAAATTTAQANMVAPFNGLKSVSAFPVTRKNNDITSVASNGGRVQCMQVWPPLGKKKFETLSYLPPLSEESLMKEVQYLLNNGWVPCLEFEPTHGFVYREHGNTPGYYDGRYWTMWKLPMFGCTDPSQVVAELEEAKKAYPEAFIRIIGFDNVRQVQCISFIAYKPASYDA

SEQ ID NO: 45815 - protein, 183 aa, Mesembryanthemum crystallinum
MASSLMSNAATTMAAATTTAQANMVAPFNGLKSISAFPVTRKNNDITSVASNGGRVQCMQVWPPLGMKKFETLSYLPPLSEESLLKEVQYLLNNGWVPCLEFEPTHGFVYREHGNTPGYYDGRYWTMWKLPMFGCTDPSQVVAELEEAKKAYPEAFIRIIGFDNVRQVQCVSFIAYKPASYGA

SEQ ID NO: 45816 - protein, 205 aa, Yarrowia lipolytica CLIB122
MRDSEEVETVEETVEETVDTHEAPEEENNAQIKESGASTETPTTAADKTPNIKLPLARTKRIVNQDDDVSLVSVAAYAAINAATQDFVRYLSEQAGLMARMDQRKTLAYKDVAEAIAKNPKLEFLQDIIPRTIPARSLQSRGVQVPKEPTGNISLTNFFKPSGAGASAGSNAGTGTSTPVRASTATSTPVPEDSVEGSAVAIEID

SEQ ID NO: 45817 - protein, 258 aa, Streptomyces avermitilis MA-4680
MGKLDGRVVLISGAARGQGEQEARLFVEEGAKVVVADVLDDQGEALAKEIGARYVHLDVGREDDWQAAVTVAKDAYGHIDGLVNNAGILRFNDLVGTPLAEFQQIVQVNQVGVFLGIKTVAPEIEAAGGGTIVNTASYAGLTGMAYVGAYTATKHAIVGLTRVAALELAAKKIRVNAVCPGAIDTAMSNPSQLDPGADPEETARALSELYGRLVPLGRIGRPEEVARLALFLSGEDSSYITGQPFVIDGGWLAGVSVI

SEQ ID NO: 45818 - protein, 500 aa, Cryptococcus neoformans var. neoformans B-3501A
MPSLTQTKDLASLLSDASHFKQKGYINGEWVSASDGATFPLYNPATGAKLADMPHMPRSQVAEAINAAKAAFPAWAALTAYQRQNYLLKLFKEMEEHSEDLAIILCTENGKPLAESRVEISYGASFLTWNAAEALRTYGQTIPSPFPGTRNTVIKQPIGVCGLITPWNFPNAMITRKMAPALAAGCTVVIKAPAETPLSALAMCVLCERVGIPPGVVNVVTMDKGQREMAAGLELCENVKVSKISFTGSTPVGRLLMKQSSGTLKKLSFELGGNAAFIIFDDADLDLAVNGVILSKFRAAGQTCICANRIFVHSKIYDDFARRLVERVKAFKVGNGIEEGVTIGPLVSQRGVEKVERHVQDAVGLGAKVLVGGKRIDKGEGSCFYEPTVLVDVPRQCAVSNEETFGPLAPLFKFDDEDDVVERANSSEVGLAAYFFTKDLARTHRVAEKLEVGMVAVNTGAIAQACVPFGGVKQSGFGREGGPSGIDEFMVEKLITIGGL

SEQ ID NO: 45819 - protein, 136 aa, Triticum aestivum
MQLPYADELFLNHPPAGLPNRSSSDEPASHAVDRQRAEERRKRRMVSNRESARRSRVRKQKQLGQLWAQVVHLRDANRDLLDQLNRAIVDCDRVVRDNSRLRDEREELQRRLRELPVVDAGDAEGVAVGEDDQSTV

SEQ ID NO: 45820 - protein, 408 aa, SYNECHOCOCCUS SP. WH 8102
MCRSKQRMRWDMRRCFLDSPIGSLHAVQDKLTLMIPGPTPVPESVLKAMGRHPIGHRSGEFQAVVQRTTEQLKWLHQTQGDVLVITGSGTAAMEAGIINTLSRGDKVLCGDNGKFGERWVKVARAYGLEVEVIQAEWGQPLDTEAFRLALEADSAKAIKAVILTHSETSTGVINDLETIARHVKAHGTALTIADCVTSLGATDVPMDAWGVDVVASGSQKGYMLPPGLSFVAMGERAWQAYERSDLPKFYLDLGPYRKTATKNSNPFTPAVNLYFGLEAALEMMQNEGLEAIFARHARHRSAAQAGMKAIGLPLFAAEGHGSPAITAVAPDGIDAEQLRKAVKERYDILLAGGQDHLKGKVFRIGHLGYVCDRDVLTAVSAIEATLQSLGLHSGNMGAGVAAAATALS

SEQ ID NO: 45821 - protein, 405 aa, Cryptococcus neoformans var. neoformans JEC21
MTSLTQALKRAQQTYANRNRKSYEAHQAASRHLPGGSTRSSIFIHPFPLCIQKGQGVKITDLDGHEYVDFVSDFTSGIYGKSHPVLIDAIKEALDNGLQLGAHTLAETTLASHFTSRFPSIELVRFANSGTEANILAISTAIKHTGRKKVLVFEGGYHGSVMSHFHMKGGDGDDLKVPFDFVVCSYNDRKATDALISQHPSEIGAILVEPMLGAGGCIPGDPAFLQFLREKASSIGAVLIFDEVQTARLSTGGRQKILGITPDLTTVGKFFGGGFAFGAFGGKKEIMEKFDARKGGAISHGGTFNNSPLTMVAGATAMEKILTEDALKNLNKLGDWMREEINRMFTSDGSPFLVLDLLFFYLLERGFWIAQRGLVSLSFAMTKEDVQRFIEAAIEATQKVKATLK

SEQ ID NO: 45822 - protein, 592 aa, Aloe arborescens
MESMMKSLRGDDVSVLDLDPKTAVGGGVGDVYGEDRATEEQQVTPWTVSVASGYSLLRDPHHNKGLAFSEKERDAHYLRGLLPPTCISQEIQVKKMLHNLRQYQVPLQRYMAMMDLQEMNERLFYKLLIDHVEELLPVVYTPTVGEACQKYGCIFRRPQGLYISLKEKGKILEVLKNWPERNIQVIVVTDGERILGLGDLGCQGMGIPVGKLSLYTALGGIRPSACLPVTIDVGTNNEQLLKDEFYIGLRQKRATGQEYAELLHEFMAAVKQNYGEKVLIQFEDFANHNAFELLAKYSTSHLVFNDDIQGTASVVLAGLVAALKLVGGTLAEHTFLFLGAGEAGTGIAELIALEMSKQTKAPVEETRKKIWLVDSKGLIVSSRKDTLQHFKKPWAHEHEPVDTLLGAVKTIKPTVLIGSSGVGRTFTKEVIEAMSSFTEKPVILALSNPTSQSECTAEEAYTWSKGRAIFASGSPFDPVLYNGKLFVPGQANNAYIFPGLGLGLVISGAIRVHDDMLLAASEALAQQVTQENFANGLIYPPFSIIRKISAQIAANVAAKAYELGLATRLPRPADLVKYAESCMYTPAYRSYR

SEQ ID NO: 45823 - protein, 310 aa, Arabidopsis thaliana
  misc_feature (307)..(307): Xaa can be any naturally occurring amino acid
  unsure (1)..(310): unsure at all Xaa locations
MEIASQEDPIPINTSYGNSGGGHGNMNHHHHANSAPSSLNITTSNPLLVSSNSNGLGKNHDHSHHHHVGYNIMVTNIKKEKPVVIKYKECLKNHAATMGGNAIDGCGEFMPSGEEGSIEALTCSVCNCHRNFHRRETEGEEKTFFSPYLNHHQPPPQQRKLMFHHKMIKSPLPQQMIMPIGVTTAGSNSESEDLMEEEGGGSLTFRQPPPPPSPYSYGHNQKKRFRTKFTQEQKEKMISFAERVGWKIQRQEESVVQQLCQEIGIRRRVLKVWMHNNKQNLSKKSNNVSNNVDLSAGNNDITENLAXTNP

SEQ ID NO: 45824 - protein, 431 aa, Arachis hypogaea
GRGEFGVTYLCIDRGSRELLACKSISKRKLRTAVDVEDVRRKVAIMRHLPRSSSIVSLREACEDDNAVHLVMELCEGGELFDRIVARGRYTERAAAVVARTVVEVVQLCHRHGVIHRDLKPENFLFANKKENSPLKAIDFGLSVFFKPGEKFSEIVGSPYYMAPEVLKRNYGPEIDIWSAGVILYILLCGVPPFWAESEQGGAQAILRGLIDFKREPWPSISESAKSLVKQMLEPDPKLRLTAKQVLEHPWIQMLRRAPNIPLGDAVKSRLKQFSMMNRFQKKALRVIADFLSNEEVEDIKDIFQKMDTDNDGIVSIEELKAEFQNFGSQLAESEIQMLLEAVNTNGKGTLDYGEFVAVSLHLKRMANDEHLRKAFSYFDKDGNGYIEPDELRNALMEDGTDDCADVANDIFQEVDTDKDGRISYEEFVAM

SEQ ID NO: 45825 - protein, 289 aa, Salmonella enterica subsp. enterica serovar Typhi Ty2
MEYSILSNNLKMPMVGFGVFKVTDKEECQQSVLSAIRSGYRLIDTAAVYGNEDAVGDAVREAIATGLCTREELFITSKLWVQDMANYDLAKAGIEASLKKSGLDYFDLYLLHQAMGDYFSAWRALEDAYEAGKLKAIGVSNFYAHVLANFCETVRITPMVNQVELHPYFAQPAALETMKHYNVQPEAWAPLGGGRHKPYENVMLQRIADAHQKTIAQVVLRWNVQRGVTVIPKSTRQERIEENFAIWDFSLTDNEMAQINALDLGYVGEAVKHFNPEFVRGCLGVKIHD

SEQ ID NO: 45826 - protein, 699 aa, Arabidopsis thaliana
MAEGQSPENSPPAPPPPSPPSPPSSNDQQTTSPPPSDNQETTSPPPPSSPDIAPPPQQQQESPPPPLPENSSDGSSSSSPPPPSDSSSQSQSPPPPSTSPPQQSDNNGNKGNNNENNKGNDGSSGDGGNKNMSHTPPPPSKTSDHSSHSQPRSLAPPTSNSGSNSSSNDGLNIGAVIGLVAAAGILFIVMILLCVCCFRKKKKKSKLDQMPYYGSNAYPAGKTGGDQYYNQNAATQQQQHYNQNDHIVNLPPPPGSMGTNWVSSPPPPPPGNWQPMPSPPAPVSGGANVIQSGEMSSNFSSGPYAPSLPPPHPSVALGFNNSTFTYEELASATQGFSKDRLLGQGGFGYVHKGILPNGKEIAVKSLKAGSGQGEREFQAEVEIISRVHHRHLVSLVGYCSNAGGQRLLVYEFLPNDTLEFHLHGKSGTVMDWPTRLKIALGSAKGLAYLHEDCHPKIIHRDIKASNILLDHNFEAKVADFGLAKLSQDNNTHVSTRVMGTFGYLAPEYASSGKLTEKSDVFSFGVMLLELITGRGPVDLSGDMEDSLVDWARPLCMRVAQDGEYGELVDPFLEHQYEPYEMARMVACAAAAVRHSGRRRPKMSQIVRTLEGDASLDDLDDGVKPKQSSSGGEGSSDYEMGTYGAEMRKFRKVTLESRDYGASSEYGATSEYGLDPSSSSSEEMHIGGSTSKTTTTNRGI

SEQ ID NO: 45827 - protein, 182 aa, Mesembryanthemum crystallinum
MASSLMSNAATTMAAATTTAQANMVAPFNGLKSISAFPVTRKNNDITSVASNGGRVQCMVWPPLGMKKFETLSYLPPLSEESLLKEVQYLLNNGWVPCLEFEPTHGFVYREHGNTPGYYDGRYWTMWKLPMFGCTDPSQVVAELEEAKKAYPEAFIRIIGFDNVRQVQCVSFIAYKPASYGA

SEQ ID NO: 45828 - protein, 186 aa, Mesembryanthemum crystallinum
MASSMLSNAAVATTAASRSAGAQASMVAPFTGLKSVSAFPVTRKSSNDLSTVPSNGGKVQCMQVWPPLGKKKFETLSYLPPLSEESLLKEVQYLLNNGWVPCLEFEPTHGFVYREHGNTPGYYDGRYWTMWKLPMFGCTDPSQVVAELEEAKKAYPEAFIRIIGFDNVRQVQCVSFIAYKPASYDA

SEQ ID NO: 45829 - protein, 246 aa, Bifidobacterium longum DJO10A
MTYKLVLLRHGQSAWNKTNQFTGWVDVPLTEQGEAEAKRGGELLKEKNVLPDIVFTSLLRRAINTANIALDAADRLWIPVQRDWRLNERHYGALQGKNKTEIREEYGDEKFMLWRRSYATPPPEIDPNDQYAQNNDPRYAGDPVPEAECLANVVERVKPYFESAIEPELKAGKTVLIAAHGNSLRAIVKMLDNLSEEEIAKVNIPTAIPLLYELDENFKPIKPRGEYLDPEAAAAGAAAVAAQGQK

SEQ ID NO: 45830 - protein, 168 aa, Brassica napus
MVQTDSDKMGLNLNLSMYSLAKPLSQFLDEVSRIKDYDSKLSEIDGYVGKLEEERRKIDVFKRELPLCMLLLNEAIETLKEEASSSVMMASDGKLDVGEGAKVESDNKKNWMSSAQLWISNPNSQLQSTNEKEDRSVTHRPNQRGAFTPFNLPPPPPPPLSLRTPPSE

SEQ ID NO: 45831 - protein, 219 aa, Magnetospirillum magnetotacticum MS-1
MSKVPGIDRLLANNKVWAEETERTKPGFFAHLAEQQTPGYLWIGCADSRVPANEIVGLEPGEVFVHRNVANQVHHADMNCLSVLQYAIDVLKVEHIIVCGHYGCGGVRAALQDSRLGVTEYWIRPVRDICECHRHELDMLPNEAAQVDRLCELNVMAQVRNLCRSPVIQDAWQRGQQLEVHSWVYGLTDGMVRTLGPVVTGLKSLDELGASYLMRGAAF

SEQ ID NO: 45832 - protein, 631 aa, Desulfovibrio desulfuricans G20
MQVIYTDVLCIGAGLAGERVAVEAAMAGFDVVCLSIVPPRRSHSSAAQGGMQAALGNAIMGDGDSTDVHFADTVKGSDWGCDQEVARLFADTAPIVMREMAHWGVPWNRVVAGMHTYYKGGKPFDAEEKKEKHGLIHARAFGGTAKWRTCYTSDGTGHSVLYTLDNICLQYGVNIHDRVQAEAIIHDGQTCMGCIARSLRTGELIAYFASATLIATGGYGRIYRATTNAVICDGGGQIAALDTGIVPMGNMEAVQFHPTGTVPTDILVTEGCRGDGGTLLDVNEYRFMPDYEPEKAELASRDVVSRRMTEHMRKGLGVKSPYGDHLWLDIRHLGEKHITTNLREVYDICTNFLGVNPIHQLIPVRPTQHYSMGGVRTDKDGAAYGLTGLFAAGEAACWDMHGFNRLGGNSLAETVVAGRHIGKKIVEFLQGHSTSFSTGAMRDAANKMNQRISDIAAGRKGKESAVTLRNELQDIMMEGVGIFRNAKDLQTAVDKLTALHERSMKIGLQSNSAGFTPEMSLALRVPGMIKLALCTAYGALMRTESRGAHTREDFPERNDRDWLNRTLAYWKEGAALPTLEYEEASPYFEMPPGERGYGGGKIIYADIPEEKLRKPGAAPTAKSETTSKKKA

SEQ ID NO: 45833 - protein, 118 aa, Ustilago maydis 521
MRSAFKNEHSFEKRKAEAERIRQKYPDRIPVICEKADRTDIPTIDKKKYLVPSDLTVGQFVYVIRKRIKLAPEKAIFIFVDEVLPATAALMSAIYEEHKDEDGFLYVSYSGENTFGQL

SEQ ID NO: 45834 - protein, 511 aa, Glycine max
MEAAWVNILMLILILALIWVWKKFNSLWLTPKRLEKILREQGLRGSPYRFKVGDTKETLKMQMQAMSKPMNLFSNDIGPRVSPYDHYIVNKHGKNSFIWNGQTPRVTLTDPELIKDVFNKIYDFGKPNMGPNIRSLIPGLAMHEGEKWSKHRKIINPAFNLEKLKNMLPLFIQCCDDLISKWEEMLSSDGSSEIDVWPFVKNLTADVISRTAFGSSYLEGRRIFQLLKEKIELTLKMRGQRLVPKRMKEIDRDIKASLMDIINKRDKALKAGEATKNNLLDILLESNHKEIEEHGNNKNVGMNIEEVIEECKLFYFAGQDTTSVLLVWTMILLSRYPDWQARAREEVSQVFGNQKPTFDGLNQLKIVTMILYEVLRLYPPGVGVPRKVIKDVKLGNLSFPAGVEIFISTILVHHDSELWGDDAKEFKPERFSEGVLKATNGRFSFFPFGGGPRICIAQNFALLEAKIALSMILQCFSFELSPTYTHAPTMVMTIQPQYGAPVILHKVEKYE

SEQ ID NO: 45835 - protein, 446 aa, Kluyveromyces lactis NRRL Y-1140
MREVISVNVGQAGCQIGNACWELYSLEHGIAPDGYLQEGLKKPTGGEEGFSTFFNETGSGKFVPRAVYVDLEPNVIDEVRTGAYRDFFHPEQLISGKEDAANNYARGHYTVGRELLDDILDRVRKISDQCDGLQGFLFTHSLGGGTGSGLGSLLLEHLSLDYGKKSKLEFAVYPAPQVSTSVVEPYNTVLTTHTTLEHADCTFMVDNEAIYEMCKKNLDIQRPSFSNLNNLIAQVVSSVTASLRFDGSLNVDLNEFQTNLVPYPRIHFPLVSYAPILSKSKAHHESNSVAEITNACFEPGNQMVKCDPRTGKYMATCLLYRGDVVTRDVQNAVAQIKTKKTVQLVDWCPTGFKIGICYQAPTATPNSQLSSVNRAVCMLSNTTAIADAWKRIDKKFDLMYAKRAFVHWYVGEGMEEGEFTEAREDLAALERDYYEVGADSYADEEF

SEQ ID NO: 45836 - protein, 118 aa, Methylococcus capsulatus str. Bath
MSDMQDYKSSLSDSGSRKFETFSYLPPMNPEKIRRQVEYIVSRGWNPAIEHTEPENAFDHYWYMWKLPMFGETDVDAILAEAEACHKAHPNNHVRLVGYDNFRQTQGAAMVIYRGPSV

SEQ ID NO: 45837 - protein, 160 aa, Brassica napus
LQPGTDFGWPPVRSYRKNTLATTCKNSDEVDGKPGSAALFVKVSMDGAPYLRKVDLRSYTNYGELSSALEKMFTTFTLGQCGSNGAAGKDMLSETKLKDLLNGKDYVLTYEDKDGDWMLVGDVPWEMFIDVCKKLKIMKGPDAIGLAAAPRAMEKSKMRA

SEQ ID NO: 45838 - protein, 108 aa, Brassica napus
  misc_feature (91)..(91): Xaa can be any naturally occurring amino acid
  unsure (1)..(108): unsure at all Xaa locations
FEAFQLGMAPVYMAFLRFMGDENDARNYSYSLEVGANGRKMIWEGTPRSIRDSHRKVRDSHDGLIIQRNMALFFSGGERKELKLRVTGRIXKEQQNPDSGACIPNLFS

SEQ ID NO: 45839 - protein, 358 aa, Raphanus sativus
QSDKPEQVQAPPPPPEQSNVHVYHHDWAAMQAYYGPRVAIPPQYYNSNGHAPAPPPPYIWGSPSPMMAPYGTPYPPFCPPGGVYAHPGLQMGSQPQGPVSQATPVVTTTPLNLEAPANSPGNTDQGFMKKLIEFDGLAMSISNNKAGSAEHSSGPRNSQSSENDDSSNGSDGNTTGGEQSRKKRSREGSPNDDGKPSSQIVPLLRDENEKPAVTMGTPVMPTAMDFPQPCHGAPHEVWNEKEVKREKRKQSNRESARRSRLRKQAETEELSLKVDALVAENMTLRSKLAQLNDESEKLRLENEASLAQLKATQTQAAGKTENLISRVDNNNNSVSGSSKNVEQQLLNVSLRTDSVAAS

SEQ ID NO: 45840 - protein, 324 aa, Oceanobacillus iheyensis HTE831
MKYKKVRWGIIGCGDVTEVKSGPAFQKVDHSELVAVMRRTGELAKDYAKRHNVPTWYDDADALINDANVDAVYIATPPGSHKEYTLKVAQAGKPVYVEKPMALNEAECQQMIQACKDAGVPLYVAYYRRAQPRFKKVKELLDAKTIGDVRFVSTTQYQKVSEDIKASSLPWRLQPEISGGGLFFDLASHTLDILDFLLGPIEEVHGMKSNQAEYYEAEDIVTGTYRFQSGVHGVGNWCFTAFENIDKNEIVGSKGKITFSTFGDDPIILTTADGQEEWTFERPKHVHQPLIESIVKDLTSDSKQAPSTGESGARTNWVMDQLTE

SEQ ID NO: 45841 - protein, 238 aa, Lactococcus lactis subsp. lactis Il1403
MTLQILGEFLGTFILVLLGNGVVAANVLGKTKSENAGWVTIAIGWGLAVAVAVWVVGFFSPAYLNPALVIGFLVLGKIKIGLAFAFIVAEFLGAMLGAVAVWLHYYPHWEETKDSSLILASFATAPAIRYSWSNFLGEAFDGALLMILIMAMGHYRLEGGFGPIIVGFLIMAVGFSLGPTTGYAMNPARDLGPRIMHALLPIKNKGTSGWGYAWIPATGSIVGAVIAGLLYQWMLTLH

SEQ ID NO: 45842 - protein, 673 aa, Oceanobacillus iheyensis HTE831
MSNQEQNKKNQQLDQFRVNDKDKSLTTNQGLKMNEDEFSLKAGERGPSLLEDFHLREKITHFDHERIPERVVHARGFAAHGEFEVYESLAPYTKANFLGEAGKKTPVFVRFSTVAGSRGSGDMARDVRGFATKFYTDEGNYDLVGNNIPVFFIQDGIKFPDLIHAVKPEPHNEIPQAQSAHDTFWDFVANNQETAHMIMWHLSDRAIPRSFRMMEGFGVHTFRFVNEEGQAFFVKFHWKPVLGVHSVIWDEALKLNGNDPDFQRRDLYDAIENGQYPEYELGLQIIKEEDEFNFDFDVLDPTKIWPEEDVPVKIVGKMTLNQNIDNYFAETEQVAFHPGHVVPGIDFTNDPLLQARLFSYTDTQLIRLGGPNFHEIPINRPVCPFHNNQRDGYGRQTINSGQVSYHKNSLADNTPTPVSEENGGYKHYQEKVEGKKVRARSISFEDHFTQAALFWNSMSDVEKNHIIDAFSFELGKCKEVAIREQVLDMFSNVSHDLVTGIAENLGLAIPKKKEIDYTKSSPALSQANTKKKADTRKVGIIVADGFDEELFSHIKALNEANINPEIISDHQGSISSKEGNKIPVHHTFKTADSVLFDSILIASKEGTKPLFTKEAPNFVKEAYMHYKPISALQDGASVLHDLGLTDEKGVVTNNASQFVEAVAEARFWNRDGK

SEQ ID NO: 45843 - protein, 549 aa, Oryza sativa
  misc_feature (214)..(214): Xaa can be any naturally occurring amino acid
  unsure (1)..(549): unsure at all Xaa locations
MVLWPWEKLLIPFLLGVSVVVLFLCSSSLFLLCETMQGIGRRYGRIKVYAVLGDDEAQHAKNNMRGALFHVDNPGPMAPIAKGNFLDVNQALEVVRFGIQYCDWRARQDLLTIMVVEVLKSLAIEFKSNGTLRKELAELQEELAKAHNQVHLSETRASSALDKLAQADNLVNDRLLQDGGSSASIDNYVSLASRTSSASRFVNKKTLRPSLDVXGPVQPYNPNLKNFWYPVVFSGDLKDDTMVPIDCFEEQWVIFRGKDGRPGCVQNTCAHRACPLHLGSVSEGRIQCPFHGWEYSTDGKCEKMPATKLLNVRIRSLPCFEQEGMVWIWPGDGTPESTIPSLQPPSGFTIHAEMVMELPVEHGLLLDNLLDIAHAPFAHTSTFAKGWSVPSLVKFLTPASGLQGYWDPYPIDMEFRPPCMVLSTTGISKPGKLEGKSIKQCSTHLHQLHICLPSSRNKTRMLYQMSLNFAPWLKHIPFMHILWSHFAEKVLNEDFRLVLGQQERMINGANVWNWPVSYDKLGIRYRLWRDAIERGVDRLPFSTQSERGS

SEQ ID NO: 45844 - protein, 84 aa, Arabidopsis thaliana
MSSCCGGKCGCGSSCSCGSGCNGCGMYPDVETAATSSVKTTVLAAPTTKASAGGFEAATEGGGCDCNTCKCGTSCGCSCCRHAS

SEQ ID NO: 45845 - protein, 435 aa, Neurospora crassa
  misc_feature (84)..(84): Xaa can be any naturally occurring amino acid
  misc_feature (155)..(155): Xaa can be any naturally occurring amino acid
  misc_feature (174)..(174): Xaa can be any naturally occurring amino acid
  misc_feature (226)..(226): Xaa can be any naturally occurring amino acid
  misc_feature (303)..(303): Xaa can be any naturally occurring amino acid
  misc_feature (328)..(328): Xaa can be any naturally occurring amino acid
  misc_feature (332)..(332): Xaa can be any naturally occurring amino acid
  misc_feature (345)..(346): Xaa can be any naturally occurring amino acid
  misc_feature (349)..(349): Xaa can be any naturally occurring amino acid
  misc_feature (356)..(356): Xaa can be any naturally occurring amino acid
  misc_feature (384)..(384): Xaa can be any naturally occurring amino acid
  misc_feature (422)..(422): Xaa can be any naturally occurring amino acid
  misc_feature (434)..(434): Xaa can be any naturally occurring amino acid
  unsure (1)..(435): unsure at all Xaa locations
MRRVVVTGLGAITPLAVGIRPTWRRLLDSHSGIVSVADLEPQDKWKELTSTVGGLVPTPARNKQNVDEQHTWKAADWLEPSDQXRMSLFAQYSVAATEMALQDAGWKPTRQEDLEATGVCMGSGIGNLDDFYNTSVTYDKEGYKRVSPLFVPKIXINLGAGHIAMRYGFRGPNXSATTACTTGAHSIGDASRFIAFGDADVMVAGGSESCIHPLTFAGFGRSRSLXTAYNHDPTSACRPFDKDRAGFVVSEGAAVLILEELEHAKRRGARILAELTGYGCSGDAHHMTAPRDDGSGAFLSMNXALKNAGCQPGDVDYINAHATGTAVXDAAXAIAIRSLMMGEEXXDDXSRITVNXTKGAIGHLLGAAGAIESVFSILAIAEGXIPPTLNLTSPNVGVGFNFVPVQAQQKEVKVAMSNSFGXGGTNASLVFSKXE

SEQ ID NO: 45846 - protein, 282 aa, Streptococcus pyogenes M49 591
MEMTWTVKYITEFIATAFLIILGNGAVANVDLKGTKGHNSGWLVIAFGYGLGVMMPALMFGNVSGNHINPAFTVGLAVSGLFPWAHVLQYVVAQLLGAIFGQLVVVMVYKPYFMKTENPNHVLGSFSTISSLDNGQKDSRKASYINGFLNEFVGSFVLFFGALALTKNYFGVELVGKLIEAGYDQTTAATQISPYVTGSLAVAHIGIGFLVMVLVTSLGGPTGPALNPARDFGPRLLHRFLPKSVLGQAKGDSKWWYAWVPVVAPILAAIVAVAAFKYLYIR

SEQ ID NO: 45847 - protein, 448 aa, Helicobacter pylori J99
MYVEKILQSLQKKYPYQKEFHQAVYEAITSLKPLLDSDKSYEKHAVLERLIEPEREIFFRVCWLDDNHQIQVNRGCRVEFNSAIGPYKGGLRFHPSVNESVIKFLGFEQVLKNSLTTLAMGGAKGGSDFDPKEKSEHEIMRFCQAFMNELYRHIGATTDVPAGDIGVGEREIGYLFGQYKKLVNRFEGVLTGKGLTYGGSLCRKEATGYGCVYFAEEMLQERNSSLEGKVCSVSGSGNVAIYTIEKLLQIGAKPVTASDSNGMIYDKDGIDLELLKEIKEARRGRIKEYALEKTSAKYTPTENYPKGGNAIWHVPCFAAFPSATENELSVLDAKTLLSNGCKCVAEGANMPSSNEAIELFLQAKISYGIGKAANAGGVSVSGLEMAQNASMHPWSFEVVDAKLHHIMKEIYKNVSQTAKEFKDPTNFVLGANIAGFRKVASAMIAQGV

SEQ ID NO: 45848 - protein, 510 aa, Sorghum bicolor
MAVFISSSGSPGRATATTTTTTTLLLAVLAAAAAAGLLLAPVAARGSPPEHDKQLQLQQQEDDRIPGLPGQPNGVAFGMYGGYVTIDDNNGRALYYWFQEADTADPAAAPLVLWLNGGPGCSSIGLGAMQELGPFRVHTNGESLLLNEYAWNKAANILFAESPAGVVFSYSNTSSDLSMGDDKMAQDTYTFLVKWFERFPHYNYREFYIAGESGHFIPQLSQVVYRNRNNSPFINFQGLLVSSGLTNDHEDMIGMFELWWHHGLISDETRDSGLKVCPGTSFMHPTPECTEVWNKALAEQGNINPYTIYTPTCDREPSPYQRRFWAPHGRAAPPPLMLPPYDPCAVFNSINYLNLPEVQTALHANVSGIVEYPWTVCSNTIFDQWGQAADDLLPVYRELIQAGLRVWVYSGDTDSVVPVSSTRRSLAALELPVKTSWYPWYMAPTEREVGGWSVQYEGLTYVSPSGAGHLVPVHRPAQAFLLFKQFLKGEPMPAEEKNDILLPSEKAPFY

SEQ ID NO: 45849 - protein, 312 aa, Burkholderia vietnamiensis G4
MTTLICGSLAYDNIMTFEGRFREHILPDQVHLLNVSFLVPTMRREFGGCAGNIAYALHLLGGDARIMATVGANDADRYLERLDSLGLSKANVRVVPDAHTAQAMITTDLENNQITAFHPGAMMESHLNRADEVPGVKLGIVAPDGFDGMVQHAEQFAKAGIPFIFDPGQGLPLFDGATLRRIIELATFVAVNDYEGKLVSDKTGWSEKEIASRVQALIVTRGEHGATILHKNGEEQIPVVQAERIVDPTGCGDAFRGGLLYGIENGLDWATTGRLASLMGSIKIAHQGPQTYALTRADVDARFEAAFGYSLK

SEQ ID NO: 45850 - protein, 414 aa, Cryptococcus neoformans var. neoformans JEC21
MTRLPSLKQLSEHLHYTPPTPPSQQPNLHEQSPGSSSSNPLRISTNPVPLQSSSAASHTSIVMTPTSTGRLKLPASAMMRSLSAGSSGSATGGLAPVTSSPAIAPNLGSVQGQGHSPTSAHSPTPAQQLAKFVPGGLGDFRPESGPEASTSMSRSASHEVHAEHHREIPSLDEIKKKVNVSKGEDQHRLDLPNERVTEKEKSKTSVESTGERISISSAKGGKKEHPLQHSWTLYYDSKTYKPDPSLIASKQGDKILADYEMTLLTIGKFDTVEGFARHFNNVRLPSQLTPSSNYHLFKSGIRPMWEDPANANGGKWVILFRSSPGTLDIAWANLTMALVGEILDPENQVCGIVGSTRPKVDRLQVWTRGKDDVEGLNQLGKRIVEVMALEGRDADSMSMEYQVSHKIWASKSQL

SEQ ID NO: 45851 - protein, 490 aa, Bifidobacterium longum DJO10A
MAQSKLDEVVSLAKRRGFVFPAGEIYGGTRSAWDYGPLGVALKDNIKREWWRSMVVTRPDVVGVDTSIILPPEVWVASGHVSVFNDPLVECLNCHKRNRADKLEESYAEKHGDKMPENGMKDIVCPNCGTRGQWTEPRDFNMMLRTHLGPVEDENSLHYLRPETAQGIFVDFKNVMTSSRSRPPFGIANMGKSFRNEITPGNFIFRTREFEQMEMEFFVTPGTDEEWHQYWIDARTRWYIDLGVKPENLRHYEHPKEKLSHYSKRTVDIEYKFGFQGSDWGELEGIANRTDYDLSAHSKHSGEDLSYFNQATGEKYVPYVIEPAAGLTRSLMCFLVDAYDVDEAPNTKGGVDKRTVLRLDPRLAPVKAAVLPLSKKPELQTVAQSLADDLRFNEWMIDYDESGAIGRRYRRQDEIGTPLCITVDFDTLEDHAVTIRERDTMAQERVALDKVADYVAARIGEKRTRVPLKPVEMGGEPWPESGVQEAGGLY

SEQ ID NO: 45852 - protein, 313 aa, Agrobacterium tumefaciens str. C58
MLELLWSGQTATKITAEDIRSQLGKARLRAFELMQLLFPGLAALTSVEALRLLLSWLPDDETTPHHLVAVAAVPVFATAIIRNRQGFAPIAPDASLTHSADFLRMLSGTLPSTEKVRALDTYLTTVADHGLNASTFTARVIASTGAGLFSSVVGALCALKGPLHGGAPGPVLDMLDAIGAEAEIEPWLLDALGRGERLMGFGHRIYRVRDPRADVLKHAVSTLKEGSDRIAFAGKVEEAALALLKEKKPLRPLQTNVEFYTALVLEAVGFPRDSFTNVFAAGRMAGWTAHVLEQERTGRLIRPQSHYIGPHPR

SEQ ID NO: 45853 - protein, 551 aa, Arabidopsis thaliana
MVETGHHHQHPPAPAAAGHPPVPSMAMARNMGTTWPPAEQLHHLQYCIHSNPSWHETVVLAFQHYIVMLGTTVLIANTLVSPMGGDPGDKARVIQTILFMSGINTLLQTLIGTRLPTVMGVSFAYVLPVLSIIRDYNNGQFDSEKQRFRHTMRTVQGSLIISSFVTSLIGYGQAWGNLIRIFSPIIVVPVVSVVSLGLFLRGFPLLANCVEIGLPMLILLIITQQYLKHAFSRISMILERYALLVCLAIIWAFAAILTVSGAYNNVSTATKQSCRTDRAFLMSSAPWIRIPYPFQWGTPIFKASHVFGMFGAAIVASAESTGVFFAASRLAGATAPPAHVVSRSIGLQGIGVLLEGIFGSITGNTASVENVGLLGLTRIGSRRVVQVSTFFMIFFSIFGKFGAFFASIPLPIFAGVYCILLGIVVAVGISFIQFTDTNSMRNMYVIGVSLFLSLSIAQYFLANTSRAGYGPVRTAGGWFNDILNTIFASAPLVATILATILDNTLEARHASDDARGIPWWKPFQHRNGDGRNDEFYSMPLRINELMPTRFL

SEQ ID NO: 45854 - protein, 166 aa, Bacillus cereus ATCC 10987
MCVGIYNYIHNSEVERFFMEKTFLMVKPDGVQRAFIGEIVARFEKKGFQLVGAKLMQVTPEIAGQHYAEHTEKPFFGELVDFITSGPVFAMVWQGEGVVDTARNMMGKTRPHEAAPGTIRGDFGVTVAKNIIHGSDSLESAEREIAIFFKEEELVDYSKLMNEWIY

SEQ ID NO: 45855 - protein, 425 aa, Zea mays
FLVRTQTHPWRLELIWRGGQCRREMSFRSLIQDMKDEFGSISRHSLRSRSHRSAGNAARAAAAGPSEAMDQSCWSQLPPELLREVLVRIEASESWWPARKDVVSGAGVCRTWRGIMKEAVRVPEVSGKLTFPISLKQPGPRDGTLKCFIRRNRTTQTYYLYIGLTEALADDGKFLLAARKCRKPTCTDYLISLDKVDMSKGSSTYIGKLRSNFLGTKFTVYDAHPPYDGAAVSKSRSARVVGLKQVSPRVPAGNYPVSHISYELNVLGSRGPRRMNCVMDSIPASAVKEGGKTPTQTEFPLSSLDSFPSFPFFRSKSARIDSSTSQSSSQREDRLVLKNKSPRWHEQLQCWCLNFRGRVTVASVKNFQLVASEDNGPESQESDKVILQFGKIGKDLFTMDYGYPISAFQAFAICLSSFDTKIACE

SEQ ID NO: 45856 - protein, 410 aa, Pinus taeda
MASNIMQRCNVFMSERVKLHAAMLALQFGYAGFHIVSRAALNMGVSKVVFPVYRNILALMLIGPCAYFLEKKERPALTLSFLIQFFLLALCGITGQSRILSLRIVLHIPTFASAIQNSVPAITFIMAAALRLEKVHISRRDGLAKIIGTVACVSGATIITLYKGPPITHIWRPNLEVTASYFKAFQGNDLSAKSENWTLGCIYLLGNCLAWSGWIVLQAPVLKRYPARLSVTSFTCFFGVIQFLIIAAFFETDLEHWKIHSGGELFTILYAGFVASGIAFSVQIWCIDRGGPVFVAVYQPVQTIAVAIMASIILGEQFYLGGIFGAILIIIGLYLVLWGKSEEKRLGLLQAKSSMVPENQPDNMDQSATLIINSSNGIKPNTSSSLTQPLLLDTSYKTVNIPSPSDEPQP

SEQ ID NO: 45857 - protein, 461 aa, Xanthomonas oryzae pv. oryzae KACC10331
MVFMSVSSAPPSATPGFASEVRTTGLLALPLVLGHVSTGLIGFVDNVIAGHHGTATLAAVTIGTSLLWLPMLVPIGTLISLTTSVSQLMGAGREREIGPLFRQALWLSLGLSALMFVFLSVVPPLLPTFGIAPDIVPGATDFLHTVRWGVPALTFYFCMRYLSEGMHWTLPTMLLGFGGLLVLAPTGYALTYGKFGFAEHGAEGLGMASAITLWVQASVFALYLWRARRFAHLQLFTHLEGPRWRAIGELLRTGLPIGITVLMEGGLFIVTALLIGRLGSTEAAAHQIAINVAQLCFMIPMGVAEATTVRVGHAVGRGDPLGMRRAAWAGYAIVLGTQALSASALLLGHDAIVGVYTDDVAVAALASVLLLFAATFQFPDGIQVLSAGALRGLKDTHVPMFLAMFSYWGVGMPIGAGLGLGLGWGPQGMWVGLILGLTVASLLMGLRFRQTSRRLTATATP

SEQ ID NO: 45858 - protein, 438 aa, Arabidopsis thaliana [sequence omitted]

SEQ ID NO: 45859 - protein, 417 aa, Vibrio sp. Ex25
MKNALQGAQMLFVAFGALVLVPLLTGLDPNVALFGAGVGTLLFQLMTKRSVPIFLASSFAFIAPIMFGIQTWGIGATMGGLMAAGLVYVALGAMIKVRGVGFIHKILPPVVVGPVIMVIGLGLAPTAVNMAVGKTGDGVAQLVNGDAAIIISAVSLLTTIVLSVFAKGFLKLVPIVGGILAGYSVSLFYGVVDFTPVTQAAWLAMPNFTAPEFNINAILFMIPVAIAPAVEHVGDMLAISNVTGKNYLKKPGLHRTIAGDGVATIAASMVGAPPNTTYSEVTGAVMLTKAFNPVIMTWAAITAIVLALVGKLGAVLQTIPVPVMGGIMILLFGSIATVGLNTLIKNNVDLHKSRNLVIVAVTLVFGIGGMAFGIGEFSLQGVSLCGIVAIILNLVLPNDLGENHVVDNAQMEEENAK

SEQ ID NO: 45860 - protein, 275 aa, Lactococcus lactis subsp. lactis Il1403
MIELTDEILAKVIKKRKKASYKGTYGRLLVIGGNRQYGGAAILVTTSAVYSGAGLVSVALAKENHSALQARLPEAMTLDFDDLIKLREVAKAADVIVIGPGLGLERLDLLTEVLNLLTENQKLVIDGSALTLFAREHLDLPFPENTVFTPHEMELERLSGLKIGQQTKEEVQDFVNQLGAIVVAKSSETRIFAPNRESFILKIGSPAQATGGMGDTLAGMVGGFLAQFHGETEEVVAAATYLHSLIASVLARKTYVVLPSRLIEEIPLFMKKYEC

SEQ ID NO: 45861 - protein, 163 aa, Bartonella quintana str. Toulouse
MSGLIQAAKSLLLLEFVSAFFLAMRQFFSPKPTINYPYEKGVVSQRFRGEHALRRYPNGEERCIACKLCEAICPAQAITIEAGPRGNDGTRRTVRYDIDMVKCIYCGFCQEACPVEAIVEGPNFEFATEMREELYYDKEKLLMNGDRWEREIARNILIDAPYR

SEQ ID NO: 45862 - protein, 664 aa, Vibrio parahaemolyticus RIMD 2210633
MSSRKHLANAIRALSMDGVQQANSGHPGAPMGMADIAEVLWRSHLNHNPANPEWADRDRFVLSNGHGSMLIYSLLHLSGYELSIDDLKNFRQLHSKTPGHPEYGYAPGIETTTGPLGQGITNAVGMALAEKALAAQFNKEGHDIIDHFTYVFMGDGCLMEGISHEACSLAGTLGLGKLIAFWDDNGISIDGHVEGWFSDDTPKRFEAYGWHVIPAVDGHDSDAINAAIEAAKADPRPTLICTKTIIGFGSPNKSGSHDCHGAPLGAEEIAAAREFLGWEHPAFEIPADVYAEWDAKAAGAEKEAAWNAKFEAYAAAYPTEAAELKRRLNGELPAEWEEKANQIIADLQANPANIASRKASQNALEAFGQMLPEFMGGSADLAPSNLTMWSGSKSLEANDFSGNYIHYGVREFGMTAIMNGIALHGGFVPYGATFLMFMEYARNAMRMAALMKIQNIQVYTHDSIGLGEDGPTHQPVEQMASLRLTPNMNTWRPCDQVESAVAWKLAIERKDAPTALIFSRQNLAQQERTAEQVTDIAKGGYILKDSDGKPELILIATGSEVELAVKAAEQLTAEGKKVRVVSMPSTDAFDKQDAAYREAVLPSDVTARIAIEAGIADFWYKYVGFDGRIIGMTTFGESAPADQLFEMFGFTVENVVNTAKELLA

SEQ ID NO: 45863 - protein, 178 aa, Zea mays
MAEAPASPGGGGGSHESGSPRGGGGGGSVREQDRFLPIANISRIMKKAIPANGKIAKDAKETVQECVSEFISFITSEASDKCQREKRKTINGDDLLWAMATLGFEDYIEPLKVYLQKYREMEGDSKLTAKSSDGSIKKDALGHVGASSSAAEGMGQQGAYNQGMGYMQPQYHNGDISN

SEQ ID NO: 45864 - protein, 394 aa, Lactococcus lactis subsp. lactis Il1403
MNDQIEENYAGHAVIKTFNHEASAEKEFAKRNDNFYKSAWKAQFVSTLIYPTMRFVNNLDYLAMAVIGGLKVISGTVNLGDVQAMLQYTNQFAQPITNISNMLNTIQATVASAERIFEVLDEKEMTDGIPVSEKVADESSKKAVSNLGATDKTDFINFDQVAFSYNENQSLMTDVNFSVEVGQMIAIVGPTGAGKTTMINLLERFYDVTSGKILLEGKDIREIDREQLRGRMAMVLQETWLFSGTIMDNLQYGRLEATQEEVIQAAKMAHADEFITTLPQGYQTLLNEAASNISQGQRQLLTIARAFLANPEILILDEATSSVDTRTERLIQSAMNRLLKGRTSFVVAHRLSTIRDANQILVMENGNIVEMGNHESLLKENGLYASLYNSQFAK

SEQ ID NO: 45865 - protein, 462 aa, Bacillus subtilis subsp. subtilis str. 168
MPDQLTVYNPATGEEIKTIPQQSATEVEEAIERSHQAFKTWSKTSANERTSLLKKWYELIVEHKEELADLITKENGKPYQEAVGEVLYGAGYIEWFAEEAKRVYGRTVPAPTTGKRIVVTRQPVGPVAAITPWNFPNAMITRKAAPALAAGCTFIIKPAPDTPLSAYELARLAYEAGIPKDVLQVVIGDGEEIGNVFTSSPKIRKITFTGSTPVGKILMKNSADTVKHVSMELGGHAPLIVDEDADIDLAVEQAMASKYRNAGQTCVCANRLIVHESIKDEFAAKLSEQVSKLKVGNGLEEGVNVGPIINKRGFEKIVSQIDDAVEKGAKVIAGGTYDRNDDKGCYFVNPTVLTDVDTSMNIMHEETFGPVAPIVTFSDIDEAIQLANDTPYGLAAYFFTENYRRGIYISENLEYGIIGWNDGGPSAVQAPFGGMKESGIGREGGSEGIEPYLETKYLSIGL

SEQ ID NO: 45866 - protein, 449 aa, ASPERGILLUS NIDULANS FGSC A4
MREVISLNVGQAGCQIANSCWELYCLEHGIQPDGYLTEERKKEDPDHGFSTFFSETGQGKYVPRTIYADLEPNVVDEVRTGTYRSLFHPENLITGKEDASNNYARGHYTVGKEMIDQVLDKVRRMADSCSGLQGFLVFHSFGGGTGSGFGALLMERLSVDYGKKSKLEFCVYPAPQNATSVVEPYNSILTTHTTLEHSDCSFMVDNEAIYDICRRNLGIERPSYENLNRLIAQVVSSITASLRFDGSLNVDLNEFQTNLVPYPRIHFPLVAYSPVISADKASHEANSVQDITMSCFEPNNQMVKCDPRNGKYMATCLLYRGDVVPKETHAAVATLKTKRTIQFVDWCPTGFKIGICYQPPQQVPNGDLAKVNRAVCMLSNTTAISEAWSALDHKFDLMYSKRAFVHWYVGEGMEEGEFSEAREDLAALERDYEEVASDSLEEEGEEVEY

SEQ ID NO: 45867 - protein, 1081 aa, Candida albicans
MNPTKKPRLSPMQPSVFEILSDPELYSQHCHSLRETLLDHFNHQATLIDTYEHELEKSKNANKAFQQALSEIGTVVISVAMGDLSKKVEIHTVENDPEILKVKITINTMMDQLQTFANEVTKVATEVANGELGGQAKNDGSVGIWRSLTDNVNIMALNLTNQVREIADVTRAVAKGDLSRKINVHAQGEILQLQRTINTMVDQLRTFAFEVSKVARDVGVLGILGGQALIENVEGIWEELTDNVNAMALNLTTQVRNIANVTTAVAKGDLSKKVTADCKGEILDLKLTINQMVDRLQNFALAVTTLSREVGTLGILGGQANVQDVEGAWKQVTENVNLMATNLTNQVRSIATVTTAVAHGDLSQKIDVHAQGEILQLKNTINKMVDSLQLFASEVSKVAQDVGINGKLGIQAQVSDVDGLWKEITSNVNTMASNLTSQVRAFAQITAAATDGDFTRFITVEASGEMDALKTKINQMVFNLRESLQRNTAAREAAELANSAKSEFLANMSHEIRTPLNGIIGMTQLSLDTELTQYQREMLSIVHNLANSLLTIIDDILDISKIEANRMTVEQIDFSLRGTVFGALKTLAVKAIEKNLDLTYQCDSSFPDNLIGDSFRLRQVILNLAGNAIKFTKEGKVSVSVKKSDKMVLDSKLLLEVCVSDTGIGIEKDKLGLIFDTFCQADGSTTRKFGGTGLGLSISKQLIHLMGGEIWVTSEYGSGSNFYFTVCVSPSNIRYTRQTEQLLPFSSHYVLFVSTEHTQEELDVLRDGIIELGLIPIIVRNIEDATLTEPVKYDIIMIDSIEIAKKLRLLSEVKYIPLVLVHHSIPQLNMRVCIDLGISSYANTPCSITDLASAIIPALESRSISQNSDESVRYKILLAEDNLVNQKLAVRILEKQGHSVEVVENGLEAYEAIKRNKYDVVLMDVQMPVMGGFEATEKIRQWEKKSNPIDSLTFRTPIIALTAHAMLGDREKSLAKGMDDYVSKPLKPKLLMQTINKCIHNINQLKELSRNSRGSDFAKKMTRNTPGSTTRQGSDEGSVEDMIGDTPRQGSVEGGGTSSRPVQRRSATEGSITTISEQIDR

SEQ ID NO: 45868 - protein, 365 aa, Thermobifida fusca YX
MADTAKPKATGKTGSRRRAARNNADSHFNGEKPEVLLDYYRQMLLIRRFEERAAQAYTQARIGGYCHLNLGEEATIVGLMEALQERDYLFTNYREHGYAIAKGTHPREVMAELYGRSTGVSKGWGGSMHLFDARTRLLGGYGIVGGQLPLAVGAALAITYRGSDEVVMCQMGDGTTNIGAFHESLNIASLWNLPVIFVVINNFTGMGTPVERSSAEPELYKRGSAYRIEGVRVDGRDVLAVRDTATTLVERARSEHRPFLLEAFSYRMKGHSVVDPAKYRTKEEAEEALANDPIAMFEERLTEAGILTDEIKKEIAESVKAEVADAADFAENSPHPEVSTLFDYTYATPVANESRRMPADPVFAE

SEQ ID NO: 45869 - protein, 168 aa, Malus x domestica
MAGHSESKSIHDFTVKDAKGNDVDLSTYKGKVLLIVNVASQCGLTNSNYTELAQLYEKYKTQGLEILAFPCNQFGAQEPGTNDEIVEFACTRFKAEYPIFDKVDVNGDNAAPIYKFLKSSKGGLFGDSIKWNFSKFLVDKEGKVVDRYAPTTSPLSIEKDVKKLLGVA

SEQ ID NO: 45870 - protein, 391 aa, Candida albicans
MFLKNIFIALAIALLVDASPAKRSPGFVTLDFDVIKTPVNATGQEGKVKRQALPVTLNNEHVSYAADITIGSNKQKFNVIVDTGSSDLWVPDASVTCDKPRPGQSADFCKGKGIYTPKSSTTSQNLGTPFNIGYGDGSSSQGTLYKDTVGFGGASITKQVFADITKTSIPQGILGIGYKTNEAAGDYDNVPVTLKNQGVIAKNAYSLYLNSPNAATGQIIFGGVDKAKYSGSLIAVPVTSDRELRITLNSLKAVGKNINGNIDVLLDSGTTITYLQQDVAQDIIDAFQAELKSDGQGHTFYVTDCQTSGTVDFNFDNNVKISVPASEFTAPLSYANGQPYPKCQLLLGISDANILGDNFLRSAYLVYDLDDDKISLAQVKYTSASNIAALT

SEQ ID NO: 45871 - protein, 153 aa, Glycine max
MSLIPSFFGGRRSSVFDPFSLDVWEPFKDFPFPSSLSAENSAFVSTRVDWKETPEAHVFKADIPGLKKEEVKLEIQDDRVLQISGERNVEKEDKNDTWHRVERSSGKFMRRFRLPENAKVDQVKASMENGVLTVTVPKEEIKKPDVKAIDISG

SEQ ID NO: 45872 - protein, 295 aa, Arabidopsis thaliana
MYSAIRSLPLDGGHVGGDYHGPLDGTNLPGDACLVLTTDPKPRLRWTTELHERFVDAVTQLGGPDKATPKTIMRTMGVKGLTLYHLKSHLQKFRLGRQAGKESTENSKDASCVGESQDTGSSSTSSMRMAQQEQNEGYQVTEALRAQMEVQRRLHDQLEVQRRLQLRIEAQGKYLQSILEKACKAFDEQAATFAGLEAAREELSELAIKVSNSSQGTSVPYFDATKMMMMPSLSELAVAIDNKNNITTNCSVESSLTSITHGSSISAASMKKRQRGDNLGVGYESGWIMPSSTIG

SEQ ID NO: 45873 - protein, 270 aa, Geobacillus kaustophilus HTA426
MTIRIACLQLDIAFGDPNENERCAESAIESAVKDGANIIVLPELWTTGYDLTRLDEIADEGAERAKAFASRLAQAHNIHLVAGSVAKKTTTGVTNTMIVADRSGQIVGEYSKLHLFQLMDEHLYLQPGSSLGLFSLDGLACAGVICYDIRFPEWIRAHALAGAEVLFVVAEWPLPRLHHWRTLLMARAIENQCYVVACNRAGRDPNNVFAGHSLVIDPWGEVIAEADEKPGILSADIDPALVADVRTRIPVFADRRPHDYETAKNFFKTY

SEQ ID NO: 45874 - protein, 102 aa, Cryptococcus neoformans A/D
HLDEGQSLHWHGLRQLGTAFMDGVPGITQCPIPPGGSFTYNFTVSHQSGTYWWHSHYSNSMADGIWGPLIVHSPNEPLQRGRDYDEDRIVFITDWMHDNSEI

SEQ ID NO: 45875 - protein, 102 aa, Cryptococcus neoformans A/D
HLDEGQSLHWHGLRQLGTAFMDGVPGITQCPIPPGGSFTYNFTVSHQSGTFWWHSHYSNSMADGIWGPLIVHSANEPLQRGRDYDEDRIVFITDWMHDNSEI

SEQ ID NO: 45876 - protein, 691 aa, Arabidopsis thaliana
MEESVASEGLEFKWGKKKGVGGKKKDVQFYESFTYDGDEYRLYDCVLVGNASEPDSTEPFIGMIIKIWEHANKHIPKKVKLLWFFKPSEIAPYLEGVPNVLANEVFLASGEGLGLANTNQLEAIGGKCSVLCISKDKRNPQPSDEKFNSADFVFCRAFDVGSCKVVDTIDDKIAGVDVKFIFNRACSEKEATAVQNIEADVNGKSDSLKPNGPLARGASGSVRKIEDSAFESSDCKENSNGCKEEKEKGHYQLAIKKSTLAEERSNKDSGSRGNHYNGKDQESEVKKQLTKQKSMPGEERYSNSFEASGSRTIHSISKKAQENDVKKQLTKQKSMPAGERYSQESSGLDDRPLKKQKLDGSVTVRDGWDTTILQNITSDGKKDTGSFKRPRDKVTIEEVPPEKRSFVKNRDLVVSVSEGKTTKTVTEKGISKKPSFGRAEDKMSADDNERNYQVTEVCRRPDARVVKSLDARMWFCKNTILKGAVLFYSPSHCMLYSCSDVLSFFSSYYVTTMLGNIEPWEESMREAEKKGTVVLLQNLDPTYTSDEVEDIVYSALNQQCEARMIERTSVTIPHIGEALVIFKTREVAERVIRRLDEGCLLLSSGRPLVASFAKITPPGKPSLFSGHIKLHKTQTRREMRDAVATSHSSQPNNLEFDMAMEWCLHQARHEQASESVSKVIRLSRRLLPLFY

SEQ ID NO: 45877 - protein, 481 aa, Neurospora crassa
MGNNPSTSRDSKTPNPQSSSSSSQSQSQHQSLASIQNDSARAVKRDTKHPIPVPNQRVAAPPEPSLTQAQGTAVQPPSTTARPKSLHSRMPPSQSGSPGSSVPTSSATPTKPVEVRQLRPEDSHEPAKPVAVPTPCHASSCSPRSPVRSPLSERSDAFETAAMQLSSLQDVSYLTRPPRLPLPIEEEVHTPGSPIIAPTDIGVPLEDADTFTALTRRSSNLSNSSTLDEEDTEELRVDKTRPTVPTRLEWLRGGEKVYVTGTIFQWNRKTRLHPVEGRPGVFAAIINILPGTHHVRFLVDGQMQTSPDLPTTVDFGNNLVNYIEVSPDDVGRTAAQAAAASAAKDSQQPTEPKTSASETEESKAPRDRPVPPAELFENKIPQYLLDFDAPEESPPYLSAVNAIEKLPTPPALPGFLGKPILNAATLIKDDNSVLNMPNHTVLNHLATSSIKNNILAVSATTRYKNKYVTTIMYKPTTTEGI

SEQ ID NO: 45878 - protein, 402 aa, Pseudomonas fluorescens PfO-1
MENLQSAVDTLVHSSNTLFILIGAVMVLAMHAGFAFLEVGTVRQKNQVNALSKILSDFAVSTLAYFFIGYWLSYGVTFLHPAAVLSADHGYGLVKFFFLLTFAAAIPAIISGGIAERARFVPQLCATALIVAFIYPFFEGMIWNGNYGLQAWLTAQFGAPFHDFAGSVVVHAMGGWLALAAVLLLGPRTGRYRDGKLVAFAPSSIPFLALGSWILIVGWFGFNVMSAQTLQGVSGLVAVNSLMAMVGGTVAALIVGRNDPGFLHNGPLAGLVAVCAGSDLMHPVGALVNGAIAGALFVWCFTAAQVKWRIDDVLGVWPLHGLCGVWGGIACGIFGSTTLGGLGGVSLISQLIGTALGVAVALIGGFAVYGSIKALHGLRLSQEQEYYGADLSLHKIGAVSQD

SEQ ID NO: 45879 - protein, 281 aa, Xanthomonas oryzae pv. oryzae KACC10331
MGHACASTAQQRPFSCVLKRGTHVTTHRWRLDGQTALITGASAGIGLAIARELLGFGADLLMVARDADALAQARDELAEEFPQRELHGLAADVSDDEERRAILDWVEDHADGLHLLINNAGGNVSRAAIDYTEDEWRGIFETNVFSAFELSRYAHPLLTQHAASAIVNVGSVSGITHVRSGAPYGMTKAALQQMTRNLAVEWAEDGIRVNAVAPWYIRTRRTSGPLSDPDYYEQVIERTPMRRIGEPEEVAAAVGFLCLPAASYITGECIAVDGGFLRYGF

SEQ ID NO: 45880 - protein, 729 aa, Methanosarcina barkeri str. fusaro
MSGIDISKKVLLITFLIFGVLTVVFTLTHNMQLSNFLELEKVDTADNVERVQNAISTEQGYLNRTVQDWACWDDAYRFVEDKNQNYTDVNLQNQTLTGIKVNVMIFVDKSESVVYAKSVDIYTGEEKPVPEKLLRMVEDGTLLSKSENDRKSGFVLLDENPMFIACHPILTTKYNGPMKGTLIFGRYFDDILLNSFKESTRSSLLMYTVNEDLPLDFQTKLKSISENPDITIVEPLSENTVAGYFELLDVSGKPALIMRADFPRELYEYGEKTLDNMYFFLLLTAIMTGVGVKFVFDRLFISRLIRIDNFVTKVRSEKDLSRRLPLKDDDELYRLSKEINGMLNEIDLAQQELKAQEREKKVLLDSLNELVIFVNPQLYIIWANKAALEFMKIDLQKAVGLRLNDTLDISIPLSYSLDLEQVFMTGNKKSGEFSGKDDRVWIVQAIPVTEEGGKIIGVLEMCRDITESKAAETLLQEKQIAEAANRTKSEFLANMSHELRTPLNSIIGFADLLYEQVYGELNERQLKSVGNISKSGKHLLNLINGILDLSKIEAGKMELSYKQFELASKLNIIKNLLSPIADRKNVQIEISIDSSLSSIYADEARFVQIMYNLVDNAIKFSYENGLVKIEARKKGDLVEITVTDTGIGIKPEDQSKLFKPFSQVDSFLSKQFQGTGLGLSLVKQIVQLHGGDIWFRSKPGEGSTFAFVIPIECIKVENGTTRSDSKVQG

SEQ ID NO: 45881 - protein, 330 aa, Oryza sativa
MGRPPCCDNGVGVKKGPWTPEEDIILVSYIQQHGPGNWRSVPENTGLMRCSKSCRLRWTNYLRPGIKRGNFTPHEEGIIIHLQALLGNKWAAIASYLPQRTDNDIKNYWNTHLKKKVKRLQQQQQSHPDHHHHHSFQTTPSSSNAAAVATTSPNYYNPNNSNSNSSNYLHNNNHNLESMQSMATAPSNEATTIPKLFQFQTWMKPSPATTSSAATAAAGSCYKQAMAMQELQEEQEGSAAAAAMASSIDGVSKDQDYHMCAVISGDDKSSSSEMMTAAAMAGHGEAATTTFSLLENWLLDDMPGQAAMSAAMDGFLEHEAGYCCADPIMF

SEQ ID NO: 45882 - protein, 83 aa, Raphanus sativus
MASQQEKKQLDERAKKGETVVPGGTGGKSFEAQQHLAEGRSRGGNTRKEQLGSEGYQQMGRKGGSTPDKTDKEDAEDEPSTRT

SEQ ID NO: 45883 - protein, 593 aa, Dechloromonas aromatica RCB
MTMSNLVEVKVPDIGDFAEVPIIDLFVKVGDSIKVDDAICTLESDKATMDVPSPVAGVVKEVLVQLGAKVAEGSLLIKVESGAAAAAPAPQAAAPAAAPAAVPVAAPVAGSHAGGADIECEMLVLGAGPGGYSAAFRSADLGMKTVIVERYATLGGVCLNVGCIPSKALLHVAAVMEEAEHANDLGVTFAAPTVDIDKLRAHKDKVVGKLTGGLAGMAKGRKVEIVRGYGTFIDPHHIEVEVTDGTGQDKTGAKKIVKFQKCIIAAGSAAMHLPFIPKDPRIVDSTGALELRFVPEKMLVIGGGIIGLEMATVYSTLGAKVDVVEMMDGLMQGPDRDAVKVWEKQNAKRFDKIMLKTKTVAVDAKDDGLYVKFEGEGVSPEPVKYDMILQAAGRTPNGNKIGADKAGVAVTERGFINVDAQMRTNVPHIFAIGDLVGQPMLAHKAVHESHVAAEAAAGQKSAFDASVIPSVAYTHPEVAWVGVTEDQAKKDGRKIEAAKFPWAASGRAIANGADYGFTKLIFDAETHRVIGGAIVGPNAGDMIGEVCLAIEMGCDSVDIGKTIHPHPTLGETVGMAAEVAHGTCTDVPAPRKK

SEQ ID NO: 45884 - protein, 222 aa, Photobacterium profundum SS9
MIDLYTAATPNGFKISIALEEMGLEYRVHHLDLMSAEQKLPDFLAINPNGRIPAIVDRDNEDFAVFESGAILLYLAEKSGKFIPSEPKKRSQVIQWLMFQMGGVGPMMGQANVFYRYLPEKIPTAIERYQNESRRLFEVMDAQLANNKYLAGDEYSIADMSTWPWVRTYDWSGVSIEGLPHLQRWVDELAERPACQKGIVTPPPSELSDEDRAKEIRKMVSQ

SEQ ID NO: 45885 - protein, 191 aa, Zea mays
MAIAGQCSSCCYTSPTLQLQLQRRHSHLPRQPQAARRARRPRLQVAAAAGSGAIRAATDAEFFQPSDTRPIMLFDGVCNLCNGGVRFVREHDPNRSIRYVPLQSESGRKLLQRSGRSPDDISSVVLVEKDRSFIKSEAVLRIMEYLNLPFPQLAVFLKFVPLFLRDFAYDNVANNRYAMFGRAEAEACEIL

SEQ ID NO: 45886 - protein, 272 aa, Oryza sativa (japonica cultivar-group)
MGRRACCAKEGMKRGAWTSKEDDVLASYIKSHGEGKWREVPQRAGLRRCGKSCRLRWLNYLRPNIKRGNIDDDEEELIVRLHTLLGNRWFLIAGRLPGRTDNEIKNYWNSTLSRKIGTAATAAAGSRGGSTPDTARATDAASSSSVVQPGQQQQPASRADTDTATAAAAAAATTTTVWAPKAVRCTRGFFFHDRETAPLAAAAPAPAGELGDGDDVDCDYYCSGSSSAATTTSSSSLPAVVEPCFSAGDDWMDDVRALASFLDTDDAWNLCA

SEQ ID NO: 45887 - protein, 237 aa, Methylococcus capsulatus str. Bath
MRRTDSPLTGLKAAILDMDGLAIDTEATYVAAWRGAAAALGFELDEAFCQSLFGCHAEAVKRRIGDCAGPGFDLRRFDALATRIWRRHVETHGIAAMPGLENLLRFFRERNLPYALATNSEARFAAICLDRSGLTRWFPLIVTRDQVAEGKPAPDLYLEAARRLGVEPDQCLALEDSETGIESAASAGTFAILVNGRRKASPRERCLARLRVASLQEIPPLWNQGTAADETCPRLSV

SEQ ID NO: 45888 - protein, 109 aa, Mycoplasma genitalium
KASDGIMVARGDLGLEIPYYQVPYWQRYMIKACRFFNKRSITATQMLDSLEKNIQPTRAEVTDVYFAVDRGNDATMLSGETASGLYPLNAVAVMQKIDKQSETFFDYQY

SEQ ID NO: 45889 - protein, 198 aa, Oryza sativa (japonica cultivar-group)
MGRRACCAKEGMKRGAWTSKEDDVLASYIKSHGEGKWREVPQRAGLRRCGKSCRLRWLNYLRPNIKRGNIDDDEEELIVRLHTLLGNRWSLIAGRLPGRTDNEIKNYWNSTLSRKIGTAATAAAGSRGGSTPDTARATDAASSSSVVPPGQQQQPASRADTDTAAASLPRPCGARAGSSSTTVKRRRSPRRRRRRQGN

SEQ ID NO: 45890 - protein, 447 aa, Cucurbita moschata
MFILSSSSSLPSPLSLSSSRVSLPPPSSSSLNLLPLSPHFQPPNLACSCSVASRSTAELLHDFKHSAHTAASADEARNHLPHSRAFLDVRSEQELLSYIRREAEAGKLPSNVAAGMEELYQNYKNAVLKSGNPKADEIVLSNMTVALDRILLDVEEPFVFSPHHKAVREPFDYYTFGQNYVRPLIDFGNSFVGNPFLFKDIEEKLHQGHNVVLISNHQTEADPAIISLLLEKTSPYIAENMIYVAGDRVIVDPLCKPFSIGRNLICVYSKKHMFDIPELAETKRKANTRSLKEMALLLRGGSQLIWIAPSGGRDRLDPSSGEWLPAPFDASSMDNMRRLIQHSGVPGHLCPLALLCYDIMPPPSKVEIEIGEKRVISFNGVGLSLAPAISFEAIAATHRNPDEAREAYSKALFDSVSMQYNVLKAAIYGRQALRASTADVSLSQPWI

SEQ ID NO: 45891 - protein, 462 aa, Cucurbita moschata
MFILSSSSSTLPSAPPFSSTTSIFLSFSRVSLPPSSSSLKLLPLSLQFGPPKLASSCSLRFSASRAMAELIQDKESAQSAATAAAASSGYERRNEPAHSRKFLDVRSEEELLSCIKKETEAGKLPPNVAAGMEELYQNYRNAVIESGNPKADEIVLSNMTVALDRILLDVEDPFVFSSHHKAIREPFDYYIFGQNYIRPLIDFGNSFVGNLSLFKDIEEKLQQGHNVVLISNHQTEADPAIISLLLEKTNPYIAENTIFVAGDRVLADPLCKPFSIGRNLICVYSKKHMFDIPELTETKRKANTRSLKEMALLLRGGSQLIWIAPSGGRDRPDPSTGEWYPAPFDASSVDNMRRLIQHSDVPGHLFPLALLCHDIMPPPSQVEIEIGEKRVIAFNGAGLSVAPEISFEEIAATHKNPEEVREAYSKALFDSVAMQYNVLKTAISGKQGLGASTADVSLSQPW

SEQ ID NO: 45892 - protein, 198 aa, Chlorogloeopsis fritschii PCC 6912
MVVSIAKKYMNRGLSFQDLIQEGSLGLIRAAEKFDHEKGYKFSTYATWWIRQAITRAIADQSRTIRLPVHLYETISRIKKTTKLLSQEMGRKPTEEEIATRMEMTIEKLRFIAKSAQLPISLETPIGKEEDSRLGDFIESDGETPEDQVSKNLLREDLEKVLDSLSPRERDVLRLRYGLDDGRMKTLEEIGQIFNVTR

SEQ ID NO: 45893 - protein, 206 aa, Oryza sativa (indica cultivar-group)
MGRRACCAKEGMKRGAWTSKEDDVLASYIKSHGEGKWREVPQRAGLRRCGKSCRLRWLNYLRPNIKRGNIDDDEEELIVRLHTLLGNRWSLIAGRLPGRTDNEIKNSRSAARSAPPPPPPPAAAVAARRTPPERRTRRRPAPSCRRASSSSQPPAPTPTQQRQRRRRRRRRPPCGRPRPCGARAGSSSTTVKRRRSPRRRRRRQGN

SEQ ID NO: 45894 - protein, 281 aa, Lactococcus lactis subsp. lactis Il1403
MTLTDTYTLNNGIKIPKVGFGTWQSASGEEAYNAVKAALEAGYRHIDTAAVYKNEESVGQAIADSGIPREELFVTTKLWGVGTTEDAAKALDESLKKLGLDYVDLYLIHWPNPKAFRPDFETRNLAVWKAMEAGVKAGKIRAIGVSNFHPRHLKPLLKFAEIKPAVNQIMVNPSDQQEEIVSFNVDNNILTEAYSPLGTGKIFEVPELADLASKYNKSIAQVVLRWSLHKGYLPLPKSVTPARIKENAEIFDFDLSIEDIAFIDSLHGKAGLAKNPDEVDF

SEQ ID NO: 45895 - protein, 203 aa, Anabaena planctonica NIES-810
VQSNLRLVVSIAKKYMNRGLSFQDLIQEGSLGLIRAAEKFDHEKGYKFSTYATWWIRQAITRAIADQSRTIRLPVHLYETISRIKKTTKLLSQEMGRKPTEEEIATRMEMTIEKLRFIAKSAQSPISLETPIGKEEDSRLGDFIESEGETPEDQVSKNLLREDLEKVLDSLGPRERDVLRLRYGLDDGRMKTLEEIGQIFNVT

SEQ ID NO: 45896 - protein, 203 aa, Gloeobacter violaceus PCC 8105
VQSNLRLVVSIALKYMNRGLSFQDLIQEGSLGLIRAAEKFDHEKGYKFSTYATWWIRQAITRAIADQSRTIRLPVHLYETISRIKKTTKLLSQELGRKPTEEEIATRMEMTIEKLRFIAKSAQLPISLETPIGKEEDSRLGDFSEADGETPEDKVAKNLLREDLEAVLNTLSPRERDVLRLRYGLDDGRMKTLEEIGQLFNVT

SEQ ID NO: 45897 - protein, 321 aa, Pseudomonas fluorescens PfO-1
MKKTILAFSRVSPSLLEPYKDDYEVIIISPELGDMDAQFEAAISNAHGLIGGSRRLGEAELAAAVNLEIVSSISVGYDNYDLDYLNRRGIMLTNTPDVLNETTADLALALILATARRIPELDSWTKEGNWTQTIDASQFGCDVHGKTLGIIGLGKIGEAIARRGRFGFGMTILYSGNSRKPKLEQELGARFVPQEELLSASDFVCPVVPLTDATRNLIGRKELALMGPESILINISRGPVVDQDALIEALQEKTIRAAGLDVYVKEPLTNSELFNLRNVVTVPHIGSATTDTRNAMAKRALENLLAGLEGRQPRDLVHFKK

SEQ ID NO: 45898 - protein, 432 aa, Oceanobacillus iheyensis HTE831
MTVKELREQLITWRRDFHQYPEKGFLEMRTASIVADTLHHLGFSLQLGKEVMSEAECMGKPNDEETKAHIEWALDNGAQEAYMDHFSEGYTGVVASIDTNRPGPTIALRFDMDALPIHESEEANHIPNKEGYRSKVPNTMHACGHDSHTAMGLGLATLIAENKEKLQGKIKLIFQPAEEGTRGAKSMTSAGVVDDVDYFIATHIGTGVPHHHFVAANNGFLATSKLDIQFDGIASHAGGKPEEGKNALLAAASAILNIHAIPRHSKGSSRVNVGEIHGGSGRNIIASHANLLVETRGETSEINDYIKDHVFSIVEGAANMHQINYGIDVVGEALDCKCSVELAEIVQKCADSHAVIEKSILESNESAGSEDATYFMEKVQQNGGLATYCVFGTELAAGHHNEKFDIDESSLLVGVEVLYQAVKELVVTEIKR

SEQ ID NO: 45899 - protein, 784 aa, Bacillus cereus E33L
MKGVILAGGKGRRLRPLTCNTPKPMLPLLEKPVLEYNIELLRQHGIREIAITVQYMSTAIKQYFGDGSKWGVNLYYFEDSPPLGTAGSIKQAEKFLDETFVVISGDALTDFQLSKGITFHEQQKRMVTMFVKEVENPLSFGLVVMNKEQEVTRYIEKPSWNEVVSNIVNTGIYIMEPEIFSYIPPREFFDFSQDVFPLLANKNALFAYLSEGYWLDIGTFDQYRQAQFDLLTKKLQVPIPYTEVLPMVWMGEGVTIGKGTKIHGPSFIGEGAKIGAGAVIEPYSIIGKNSIVSSYSHLQKSIVFANVHIGQYCELLETTIGEHTMVEDDVTLFQKSIVADHCHIGKSTVIKQKGKLWPYKAIDSYSVVGSAGVQESEKSAGWLQKSRIVGRGNVEITPQFIVKVAMAYGSLFTKGESILIGSQEHIETTSYKNLFLHAIHGIGIHTMECKEMNESLFQYSIQDLQCAGGVFIQVENEKEVIIKLYGQDGAQLTYKQQKAIEQVYMSESFYYVCEKEMGRNKLVHVSLHDYIEAVLERIDIEKIQKQKFHLLINKRNDMLQHLLMLFLQRLGCTVTWIYAGEQKNHVKALMKSSKANMALMFSEQGNYFELYDNHSNIYQGTDFEEVDIPDLLLESAGNIYPMSLKLGECYLLFYTQDEKKSFQARWKRDILYRIGKLFELIALQGKTFLSIVEQSPPLYLLCDEVVCSWNEKGKVMRKLLADMERKEEGIFEGVQFKYTEKEWSYIVSDTKQPKFLVYSHARNPVIARENMKNLIEKIRQYQKV

SEQ ID NO: 45900 - protein, 203 aa, Fischerella major NIES-592
VQSNLRLVVSIAKKYMNRGLSFQDLIQEGSLGLIRAAEKFDHEKGYKFSTYATWWIRQAITRAIADQSRTIRLPVHLYETISRIKKTTKLLSQEMGRKPTEEEIATRMEMTIEKLRFIVKSAQLPISLETPIGKEEDSRLGDFIESDGETPEDQVSKNLLREDLEKVLDSLSPRERDVLRLRYGLDDGRMKTLEEIGQIFNVT

SEQ ID NO: 45901 - protein, 309 aa, Glycine max
  misc_feature (190)..(190): Xaa can be any naturally occurring amino acid
  unsure (1)..(309): unsure at all Xaa locations
MDQYEIMEQIGRGAFGAAILVHHKAEKKKYVLKKIRLARQTERCRRSAHQEMALIARIQHPYIVEFKEAWVEKGCYVCIVTGYCEGGDMAELMKKLNGAYFPEEKLCKWFTQLLLAVDYLHSNYVLHRDLKCSNIFLTKDRDVRLGDFGLAKTLKADDLASSVVGTPNYMCPELLADIPYGFKSDIWSLXGCWIYEMAAHRPAFKAFDMAGLISKINRSSIGPLPPCYSPSLKTLIKGMLRKNPEHRPTASEVLKHPYLQPYLDQYRPSFSPPTSCSPEKPISAVNNHPKNMAESQNSNSSSSDKDSWM

SEQ ID NO: 45902 - protein, 551 aa, Gloeobacter violaceus PCC 7421
MSLLLEPLIYTSLPGRGFATLTSDAVDEATRQVFFDEIVSRHWNAYDPPPANFRAAFLHWDPACGRTLFGWLYNDGRDEIGRANVPYFLCYRLRDPLDTVRLERVFAALERGPLAFVERASLPTALVSVAWGEETTADAARPGVALPAPIKAFAREGWRRGEPVRLFVAGEEPAATTDATARAIEALTARLPVAVRERRQSLERRKARRTPRLAIAGALVLVASLAGAAVALWQPGPPAPARIASSPAARCQGNNCPSWQQARARTVGAHPGPVWASAVRPDGRMYASGDDDGAIRLWSPAGTLLQTLEGHTGTVRAVVFTPDGRALASAGSDRRVRLWDVGTGKLRHTLKGHSQPVWTLAMAPDGRILASGSGDRSVRLWDIASGRQLYRLRGHGDWVFAVAFSPDGRTLASAGKDETIRLWNSADGKLLATLRGHSAPVRALDWSKDGRTLASASWDKTVALWDVPGRTVRTRLSGHTGRVTAVSLAPDGQLVASGSIDGTVRLWRPDTRRQIHRFDLPDWVLSLGFSPDGRMLIAGGKDSTLRLWQHL

SEQ ID NO: 45903 - protein, 344 aa, Helicobacter pylori J99
MALLFTGACGYIGSHTARVFLEKTKENIIIIDDLSTGFLEHIKALERYYPNRVAFIQANLNETQKLDAFLNKQQLKDPIEAVLHFGAKISVEESMRLPLEYYTNNTLNTLGLVKLCLKHAIKRFIFSSTAVVYGESGSSLSEESPLNPINPYGASKMMSERILLDASKVADFKCVILRYFNVAGACMHNDYTTPYTLGQRTLNATHLIKIACECAVGKRKKMGIFGTNYPTRDGTCIRDYIHVDDLANAHLASYHTLLEKNKSEIYNVGYNQGHSVKEVIEKVKEISNKDFLVEILDKRQGDPASLIANNSKILQNTPFKPLYNNLDTIIKSALSWEEHLLKFQ

SEQ ID NO: 45904 - protein, 248 aa, Oryza sativa
RAAGIRTRGKFFFQQLISGVSYCHSMQICHRDLKLENTLLDGSIAPRLKICDFGYSKSSLLHSQPKSTVGTPAYIAPEVLARKEYDGKGAGVWSCGVTLYVMLVGAYPFEDPDEPRNFRKTITRILSVQYMVPDNVRVPMECKLLLSRIFVANPEQRITIPEIKNHPWFLKNLPIEMTDEYQMSVQMNDINTPSQGLEEIMAIIQEARKPGDGSKFSGQIPGLGSMELDDVDTDDIDVEDSGDFVCAL

SEQ ID NO: 45905 - protein, 329 aa, Clostridium acetobutylicum ATCC 824
MSILVCGGAGYIGSHTVHELIESGKEVVIVDNLQSGHLQAVNKKAKFYKGDIRDSEFLDKVFSENKIQSIIHFAANSLVGESMEKPLLYFNNNVYGMQILLESMVKHNIKNIVFSSTAAVYGEPKKIPILESDDTNPTNTYGETKLTMEKMMKWSSKAYGINYVALRYFNVAGALDDGSIGEDHNPETHLIPLILQVPLKKRPFITVFGTDYPTPDGTCIRDYIHVIDLAAAHIKAVEYLENGGKSSIFNLGNGVGFSVKEMIDAAREVTKQNIKVVLGERRSGDPAQLVASSQKAKEVLGWSPKFTNVKDIIKDAWKWHETHPNGFDA

SEQ ID NO: 45906 - protein, 542 aa, Fusobacterium nucleatum subsp. vincentii ATCC 49256
MAKKSYEVLNDPFLNKGTAFTKEERKELELTGLLPPQIQTIEEQAEQVYAQYKSKEPLINKRRFLMEIFDTNRTLFYYLFSQHVVEFMPIVYDPVIAENIENYSELFVNPQNAVYLSIDSPETIEESLRNATKDREIRLIVATDAEGILGIGDWGTNGVDISVGKLMVYTAAAGIDPKSVLPVVLDAGTNRETLLEDKLYLGNRHKRVYGDEYYDFVDRFVQTAEKLFPRLYLHFEDFGRSNAANVLHKYWKTYPVFNDDIQGTGIITLAGILGALKISGEKLTDQRYMCFGAGTAGAGIADRIYQEMLQQGLSENEARSRFYLVDKQGLLFDDMNDLTPEQKPFARKRTEFNNANELTNLEAAVKAVRPTILVGTSTQPNTFTETIVKEMASYTARPIIFPLSNPTKLAEATAENLIKWTEGKALVATGIPADPVEYNGVTYEIGQANNALIYPALGLGAIASTAKLMTNEMISKAAHSLGGIVDTTKPGAATLPPVSKLTEFSQRVAEAVGQCALDQKLNREDITDIKEAIEKIKWTPKY

SEQ ID NO: 45907 - protein, 868 aa, Ginkgo biloba
MMSRSYTNLMDLATGNFPAFGRATKRLPRVMTVPGIISELDDDNSNSVSSDVPSSICQERMIIVANQLPLRAQRRPDNRGWAFSWDEDSLLLQLKDGLAEDMEVVYVGSLKVEVDLSEQDDVAQILLENFKCVPAFLPPELLTKFYHGFCKQQLWPLFHYMLPLSPDHGGRFDRSLWQAYVSANKIFADKVMEVISPDDDYVWVHDYHLMVLPTFLRKRSNRVKLGFFLHSPFPSSEIYRTLPVRDEILRALLNSDLIGFHTFDYARHFLSCCSRMLGLEYESKRGYIGLEYYGRTVGIKILPVGIHMGQLESVLNLADTEWRVGELRDQFKGKILLLGVDDMDIFKGISLKFLAMEQLLKLHPEWRGKVVLVQIANPARGRGKDVEDVQAETHSTAKRINETFGRPGYEPVVLIDRPVPFYERIAFYTIAECYVITAVRDGMNLTPYEYIVCRQGSPRLNETLGVSPNVSKKSMLVVSEFIGCSPSLSGAIRVNPWNIDAVAEAMSTAITMPETEKQLRHEKHYRYVSTHDVGYWAHSFMQDLERACKDHFRRRCWGIGFGLGFRVVALDPNFRKLSTEHIVSAYKRTKSRAILLDYDGTMMPQTSINKTPGSEVLFILNSLCSDPKNVVFIVSGRGRQTLSQWLSPCEMLGIAAEHGYFIRWTRDAEWETCVQGVDFGWKQITEPVMKLYTETTDGSVIETKESALVWHHQDADPDFGSCQAKELLDHLESVLANEPVVVKSGQHIVEVKPQGVSKGLVAERLLSIMVQNDKRPDFVMCIGDDRSDEDMFEGITSAMAGPSLSPIAEVFACTVGQKPSKAKYYLDDTVEVLRMLQGLAAASDQTAKTSSDQAAKNPSAQVALECSL

SEQ ID NO: 45908 - protein, 555 aa, Nostoc punctiforme PCC 73102
LLEPDFFDEAGHRVATQYLMATLHGDLPAEQLLHYRQAHSHLPGHPELGLTPGVKFSSGRLGHVWPYINGVAMANPGKAVFCLGSDGSQQEGNDAEAARLAVAQHLNVKLIIDDNDVTIAGHPSKYLPGFSVAKTLEGHGLKVLQGDGEDLDDLYRRMSEAVNTPGAIAIINKRPMCPGIEGLEGSTHGHDVISVDLAVKYLESRGQTAAVEYLKSIEKPKQTYTFLGSSDKWGANRNVFGEAVVGVLSRMSESERKEKVKVIDSDLEGSCGLKKIHDTYPEIFIPSGIMERSNFSAAAGFGMEKGKQGIFATFSAFLEMCISEITMARLNYSNVLCHFSHAGIDDMADNTCHFGLNNMFADNGLDDGYETQLYFPADVNQMTACVEAIFFEPGLRFIFSTRSKVPNIQDSDGNDLFGSGYKFVPGKDEVVREGTQGYIISFGDALYRSLDAVERLKQEGLDVGLINKPTLNTIDEEMITKIGNAPFVLIVEAFNRRTGLGSRFGSWLLERGLAPKYAHLGTHKEGCGGLWEQYPYQGIDPVSIINKVKELVGGQ

SEQ ID NO: 45909 - protein, 416 aa, Streptococcus pyogenes M49 591
MTDMRRLGQRAKQASLLIAPLSTQIKNRFLSTLAKALVDDTQTLLAANQKDLANAKEHGISDIMMDRLRLTSERIKAMAQGVQQVADLADPIGQVIKGYTNLDGLKILQKRVPLGVIAMIFESRPNVSVDAFSLAFKTNNAIILRGGKDALHSNKALVKLIRQSLEKSGITPDAVQLVEDPSHAVAEELMQATDYVDVLIPRGGAKLIQTVKEKAKVPVIETGVGNVHIYVDAQADLDMATKIVINAKTKRPSVCNAAEGLVIHEAVAARFIPMLEKAINQVQPVEWRADDKALPLFEQAVPAKAEDFETEFLDYIMSVKVVSSLEEAIFWINQHTSHHSEAIITRDIKVAETFQDLVDAAAVYVNASTRFTDGFVFGLGAEIGISTQKMHARGPMGLEALTSTKFYINGDGHIRE

SEQ ID NO: 45910 - protein, 799 aa, Arabidopsis thaliana
MVAADAAWSSTNFFIHKFVNQQIFLGDLQLDPDELPLLITFLYCVGALDGTHVPVRPPSQTAKKYKGRKLEPTMNVLAICNFDMKFIYAYVGVPGRAHDTKVLNYCATNEPYFSHPPNGKYYLVDSGYPTRTGYLGPHRRMRYHLGQFGRGGPPVTARELFNRKHSGLRSVIERTFGVWKAKWRIVDRKHPKYGLAKWIKIVTATMALHNFIRDSHREDHDFLQWQSIEEYHVDDEEEEEEEEGEEEEEGEEEEGEGEEEEEHVAYEPTGDRAMEALRDNITNESEKKEAMDVEQKKPLIESSDRNLPDFKKSVKLKYVKLGYHYLITHGMYLFLSPLVLVIAAQISTFSVTDLRSLWEHLQYNLISVVVCSMLLVFLMTIYFMTRPRPVYLVNFSCFKPDESRKCTKKIFMDRSKLTGSFTEENLEFQRKILQRSGLGESTYLPEAVLNVPPNPCMKEARKEAETVMFGAIDELLAKTNVNPKDIGILIVNCSLFNPTPSLSAMVVNHYKLRGNILSYNLGGMGCSAGLISIDLAKHLLHSIPNTYAMVISMENITLNWYFGNDRSKLVSNCLFRMGGAAILLSNKRWDRRRSKYELVDTVRTHKGADDKCFGCITQEEDSASKIGVTLSKELMAVAGDALKTNITTLGPLVLPTSEQLLFFATLVGRKLFKMKIKPYIPDFKLAFEHFCIHAGGRAVLDELEKNLKLTEWHMEPSRMTLYRFGNTSSSSLWYELAYSEAKGRIKKGDRIWQIAFGSGFKCNSSVWRAVRSVNPKKEKNPWMDEIHEFPVEVPKVSTI

SEQ ID NO: 45911 - protein, 273 aa, Streptococcus pyogenes M49 591
MMKRQFEDVTRIVIKIGTSSLVLPTGKINLEKIDQLAFVISSLMNKGKEVILVSSGAMGFGLDILKMEKRPTNLAKQQAVSSVGQVAMMSLYSQIFAHYQTNVSQILLTRDVVVFPESLANVTNAFESLISLGIVPIVNENDAVSVDEMDHATKFGDNDRLSAVVAGITKADLLIMLSDIDGLFDKNPTIYEDAQLRSHVAVITQEIIASAGGAGSKFGTGGMLSKIQSAQMVFENKGQMVLMNGANPRDILRVLEGQLLGTWFKQIEEVRHD

SEQ ID NO: 45912 - protein, 246 aa, Streptococcus pneumoniae TIGR4
MPKTLTEKLNAIKAAGKGIFVPYIMAGDHEKGLDGLAETIHFLEDLGVSAIEVGIPFSDPVADGPVIEEAGLRSLAHGTSTQALVETLKTIETEIPLVIMTYFNPLFQYGVENFVKDLADTAVKGLIIPDLPHEHANFVEPFLANTDIALIPLVSLTTGIERQKELIEGAEGFIYAVAINGVTGKSGNYRADLDKHLAQLHQVADIPVLTGFGVSSQADLERFNAVSDGVIVGSKIVKALHQGEPI

SEQ ID NO: 45913 - protein, 383 aa, Campylobacter jejuni
MNLIPEILDLQGEFEKIRHQIHENPELGFDELYTAKLVAQKLKEFGYEVYEEIGKTGVVGVLKKGNSNKKIGLRADMDALPLQECTNLPYKSKKENVMHACGHDGHTTSLLLAAKYLASQNFNGTLNLYFQPAEEGLGGAKAMIEDGLFEKFDSDYVFGWHNMPFGSDKKFYLKKGAMMASSDSYSIEVIGRGGHGSAPEKAKDPIYAASLLVVALQSIVSRNVDPQNSAVVSIGAFNAGHAFNIIPDIATIKMSVRALDNETRKLTEEKIYKICKGIAQANDIEIKINKNVVAPVTMNNDEAVDFASEVAKELFGEKNCEFNHRPLMASEDFGFFCEMKKCVYAFLENENDIYLHNSSYVFNDKLLARAASYYAKLVLKYLK

SEQ ID NO: 45914 - protein, 475 aa, Listeria monocytogenes str. 1/2a F6854
MAKEYDVVILGGGTGGYVAAIQAAKNGQKVAVVEKGKVGGTCLHRGCIPTKALLRSAEVLQTVKKASEFGISVEGTAGINFLQAQERKQAIVDQLEKGIHQLFKQGKIDLFVGTGTILGPSIFSPTAGTISVEFEDGSENEMLIPKNLIIATGSKPRTLSGLTIDEEHILSSDGALNLETLPKSIIIVGGGVIGMEWASMMHDFGVEVTVLEYADRILPTEDKEVAKELARLYKKKKLNMHTSAEVQAASYKKTDTGVEIKAIIKGEEQTFTADKILVSVGRSANTENIGLQNTDIATENGFIQVNDFYQTKESHIYAIGDCIPTIQLAHVAMEEGTIAANHIAGKAAEKLDYDLVPRCIYTSTEIASVGITEEQAKERGHEVKKGKFFFRGIGKALVYGESDGFIKIIADKKTDDILGVSMIGPHVTDMISEAALAQVLNATPWEVGNTIHPHPTLSESFREAALAVDGNAIHG

SEQ ID NO: 45915 - protein, 383 aa, Campylobacter jejuni
MNLIPEILDLQGEFEKIRHQIHENPELGFDELYTAKLVAQKLKEFGYEVYEEIGKTGVVGVLKKGNSNKKIGLRADMDALPLQECTNLPYKSKKENVMHACGHDGHTTSLLLAAKYLASQNFNGTLNLYFQPAEEGLGGAKAMIEDGLFEKFDSDYVFGWHNMPFGSDKKFYLKKGAMMASSDSYSIEVIGRGGHGSAPEKAKDPIYAASLLVVALQSIVSRNVDPQNSAVVSIGAFNAGHAFNIIPDIATIKMSVRALDNETRKLTEEKIYKICKGIAQANDIEIKINKNVVAPVTMNNDEAVDFASEVAKELFGEKNCEFNHRPLMASEDFGFFCEMKKCAYAFLENENDIYLHNSSYVFNDKLLARAASYYAKLVLKYLK

SEQ ID NO: 45916 - protein, 194 aa, Brassica napus
MVDAQSSAKDVLLLSVDRVQVVTWRDLRDGSFTEELKRLISFAAPMAAVVIAQFSLQIISMVMVGHLGNLALASASLASSFCNVTGFSFIIGLSCALDTLSGQAYGAKLYRKLGVQTYTAMFCLTLVCFPISIIWFNMEKLLVFLGQDHSIAHEAGWYASWLIPGLFSYAVLQPLTRYLQNQSMIRPLLVTCCF

SEQ ID NO: 45917 - protein, 512 aa, Oryza sativa
MHAAHGGGGRQPVTILPISSSQLVVTGGDWPLLAYLEKALMALEAVVFPQEHLSCAAAMYAAPPSSLGCGVDMDEFEENGGVVLQEEAGVAVHGGGGGGAGGMMSLWVNAATCARSIAASGAVEEFWDERQYPVSSPPAAPTPAASGGGGGHAKAAARRRRRRPKVVKNKEEAESQRRNHIAVERNRRRQMNEYLAVLRSLMPPSYAQRGDQASIVAGAINFVKELEQLLQSLEAQKRRAEHAPPAPPFAGFFTFPQYSTTVGDNNAAGSGAADGEGGCGARPGAADIEVAMAESHANVRVLAPRRPRQLLRMVVALQCLGLTVLHLNVTTTADHLALYSFSLKMEDECRLSSVDEIAGAVNQMMSESEDEKSLSDEITDTSHLPWDPFWTRKCKYPSGGRSDNGWQRTEGWRAVGGASAGRRRGAAGGSEASAGRWVEQWGGRWKWSVGGAVGRATAGTRGGGRSERSGARRREIGETAGGREEHRAVGLPSSPSVIRGEEMGWKRGRSEQ

SEQ ID NO: 45918 - protein, 393 aa, Photobacterium profundum SS9
MFKQLTQAQLDPILSLSIAYRADDRADKMDLGIGVYKNSQGETPIMQAVQQAQQQVLATQTTKSYVGLAGSEVFNQSMMDLLLSGTSAHSRAAAVQTPGASGALRMLADLMHLAQPDTTVWLTNPSYVNHKPVMEAAGLTVKYYPYFDHATKQVNSDAMLAELAKAGPKDVVLLHGCCHNPTGADISFSDWQAITALANKNGFLPFVDIAYLGFGDGLEQDGAGLKYMADNVEEMIVAASCSKNFGLYRERTGAAIVISDSLPEAQKAKGRILQLARASYTMPPDHGAALVATILTDDALTATWKQELDQMHKRLLSLRSGLTKAVRAQGSDAFNFIEQHKGMFSVTGLSPEQIERLRAEYGIYAVGDGRINIAGLQEQQLDYLANALITVTK

SEQ ID NO: 45919 - protein, 252 aa, Zea mays
  misc_feature (219)..(219): Xaa can be any naturally occurring amino acid
  unsure (1)..(252): unsure at all Xaa locations
PSTSRLPALPQKKTARLLLLLRRAGITCGILAVLGCSDWSQAKRARILACSRRLKHRGPDWSGLYQHEGNFLAQQRLAVTKRHLVETEAAEKFGTELHSFVVGLEGSPDLKAAREVADYLGTIHHEFHFTVQDGIDAIEEVIYHDETYDVTTIRASTPMFLMARKIKSLGVKMVLSGEGSDELLGGYLYFHFAPNKEEFHRETCRKVKALHQYDCLRAXKATSAWGLEVRVPFLDKEFINVAMGMDPEWKMY

SEQ ID NO: 45920 - protein, 272 aa, Oryza sativa (indica cultivar-group)
MGRRACCAKEGMKRGAWTSKEDDVLASYIKSHGEGKWREVPQRAGLRRCGKSCRLRWLNYLRPNIKRGNIDDDEEELIVRLHTLLGNRWSLIAGRLPGRTDNEIKNYWNSTLSRKIGTAATAAAGSRGGSTPDTARATDAASSSSVVPPGQQQQPASRADTDTATAAAAAAATTTTVWAPKAVRCTRGFFFHDRETAPLAAAAPAPAGELGDGDDVDCDYYCSGSSSAATTTSSSSLPVVVEPCFSAGDDWMDDVRALASFLDTDDAWNLCA

SEQ ID NO: 45921 - protein, 217 aa, Photorhabdus luminescens subsp. laumondii TTO1
MMKKIEELLANNKQWSESVNEENPIFFKELAKSQKPHFLWIGCSDSRVPAEKLIDAAPGDLFVHRNVANLVIHTDLNCLSVIQYAVDVLEVEHIIICGHYGCGGIEAAIDGTELGLINNWLLHIRDLWYKHSSMLGELPPNERLNRLCEINVVEQVYNLGHSTIMQAAWKRGQKVMIHGWVYGIHNGQLQDLEVTADSREKLELAYRQTISKLTHKK

SEQ ID NO: 45922 - protein, 478 aa, Oceanobacillus iheyensis HTE831
MKEFVEDYLRKHQAYFTKVSEYVFNHPETRFEEYESSSYLANECEKQGFTVTRNVAGIDTAFVATYGSGKPVIGFLGEFDALSGLSQQAGETQYQPLENDVGHGCGHNLLGTGSFAAACAVKCYLEEHQLPGTVTFFGCPGEEGGSGKTFMVREGVFDEVDIALTWHPSPSNSIMNRPTLANYQVLFKFKGTAAHAANSPHLGRSALDAVELMNVGVNYLREHVVDDARIHYAVTNTGGISPNVVQSHAEVLYLVRAAKVEQAENIYQRVHRIAQGAALMTDTKLTVEFDKACSNYIPNRNLEEIMHNYLRDIKIEPLTEEEEVFAKAISDTLTDEERDFTVDLMKGFGYEGDGSELEGKYVSDSVSDYHATEELLHGSTDVADVSWVVPTAQLTTATSVLGTPLHTWQMTTQGLSSIANKGMLRAASTMALTGLDMLIHEERFQKVQKEFTAFKEKNPYTCPIPTDVKPSTLSGKAI

SEQ ID NO: 45923 - protein, 189 aa, Arabidopsis thaliana
MTNYGAIPTSSHPSPAIDLEYISRAKHRIKSGLATRRPWKSMFDFESMTLPHGFFDAISRIKTNLGYFRANYAIGVLFILFLSLLYHPTSLIVLSILVVFWIFLYFLRDEPLVVFGYQIDDRTVLIGLSVLTVVMLLLTHATSNILGSLLTAAVLVLIHAAVRRSDNLFLDEEAAAVTEASGLMSYPSS

SEQ ID NO: 45924 - protein, 272 aa, Oryza sativa (indica cultivar-group)
MGRRACCAKEGMKRGAWTSKEDDVLASYIKSHGEGKWREVRQRAGLRRCGKSCRLRWLNYLRPNIKRGNIDDDEEELIVRLHTLLGNRWSLIAGRLPGRTDNEIKNYWNSTLSRKIGTAATAAAGSRGGSTPDTARATDAASSSSVVPPGQQQQPASRADTDTATAAAAAAATTTTVWAPKAVRCTRGFFFHDRETAPLAAAAPAPAGELGDGDDVDCDYYCSGSSSAATTTSSSSLPAVVEPCFSAGDDWMDDVRALASFLDTDDAWNLCA

SEQ ID NO: 45925 - protein, 241 aa, Methanosarcina mazei Go1
MIITGHLILVRHGEPGLKPGERLSGWIDIPLSRKGIEEALECAKALENIEIDIAFASDLVRTQETLFIILSGQKKTGVVVHEKTEDKVPPEKLDWYSYPEKLGEDLIPVYTTPALNERYYGKLQGRKKQKMEEKYGAEQVANWRWNFEPGPPEGESLKAVYERTVPYFRKKVMPALEGGKNVLICAHQSSLRALVKYIEDISDKDIREVRLSTGELAIYHFSEGKLVRENEELGPELKRNI

SEQ ID NO: 45926 - protein, 107 aa, Bacillus subtilis
SEVGLAIEAQAELAKENIDVSVVSMPSMDRFEKQSDEYKNEVLPADVKKRLAIEMGSSFGWGKYTGLEGDVLGIDRFGASAPGETIINEYGFSVPNVVNRVKALINK

SEQ ID NO: 45927 - protein, 272 aa, Oryza rufipogon
MGRRACCAKEGMKRGAWTSKEDDVLASYIKSHGEGKWREVPQRAGLRRCGKSCRLRWLNYLRPNIKRGNIDDDEEELIVRLHTLLGNRWSLIAGRLPGRTDNEIKNYWNSTLSRKIGTAATAAAGSRGGSTPDTARATDAASSSSVVPPGQQQQPASRADTDTATAAAAAAATTTTVWAPKAVRCTRGFFFHDRETAPLAAAAPAPAGELGDGDDVDCDYYCSGSSSAATTTSLSSLPAVVEPCFSAGDDWMDDVRALASFLDTDDAWNLCA

SEQ ID NO: 45928 - protein, 194 aa, Magnetospirillum magnetotacticum MS-1
MSRLLPTNPLGSFVASVVAAIGLAGGVAWGATGDHLDWSSLPLPAIAGGQVPADAFKGKVVLVVNTASQCGFTPQYQGLEALWREYRGRGLVVLGVPSNDFGAQEPGSNPEVASFCEINYGVDFPLLEKQVVTGTGAHPFYRWAAERTGALGVPRWNFHKILVGRDGQLVDWFASTTAPDSARLRAAIDKALTP

SEQ ID NO: 45929 - protein, 209 aa, Glycine max
  misc_feature (62)..(62): Xaa can be any naturally occurring amino acid
  unsure (1)..(209): unsure at all Xaa locations
MAIRNSLTGQFLRRSSVAGARLMSSSSSWFRSIEPAPKDPILGVTEAFLADQSPNKVNVGVXEYLPMGGSIKMIEESLKLAFGDNSEFIKDKRIAAVQALSGTGACRLFAAFQQRFHPNTQIYIPVPTWANHHNIWRDAGVPMKTFRYYHPESRGLDFSGLMDDIKNAPDGSFFLLHACAHKPTGVDPFEEQWRENSSQIKGKGHFPFF

SEQ ID NO: 45930 - protein, 666 aa, Mycoplasma mycoides subsp. mycoides SC str. PG1
MIYLLNIRRKMKTSKNDNLNALRILGVSAINKAKSGHPGIVLGAAGIVYVLFNKIMNFNPKNPEWFNRDRFILSAGHGSALLYSALHLSGYDLSIDDLKQFRQWDSKTPGHPEKTLTCGVEVTTGPLGQGVGMGVGMAVAEAHLASVYNKHDFNLIHHYTYVLCGDGDLQEGISQEAISFAGKHRLNKLILIHDSNDVQLDSNVVDVQIEDMHKRFKACNWNTIKVSDGEDLNSIYKAIRKAQLSDKPTYIEVKTVIGLGSTKQGTKDIHGAPLNDDITKVKKYFDWDYDDFIIPDSVYKHWSINAKKGEIKEEYWNQLKAKYSLKYPELSSYLDNAINKNITFDFSSLLKDIPNNDEATRLSSGKIFEKIANHEKMLIGGSADLSSSTRIKGADNQFTNLNKTGRNIMYGVREFGMGAINNGIAAHKGLIPVASGFFVFADYLKPAMRLASIMQLQQLYVFTHDSIAVGEDGPTHQPIEQLAMLRTIPNHVVLRPADFSETIACYKVALTKLTKTPASIILTRQNVKQLQHNDVLNQVERGAYIISDQTDATISLIASGSEVGLAIDVQKELLNHNIKSKVISMVSTNLFDKQDKEYQDLIINKNTKRIAIEMGSNAIWYKYVGDDGLVFGIDRFGESAPANSVIKEFGFTKENLTKKILEYLNK

SEQ ID NO: 45931 - protein, 188 aa, Scytonema sp. IAM M-262
MNRGLSFQDLIQEGSLGLIRAAEKFDHEKGYKFSTYATWWIRQAITRAIADQSRTIRLPVHLYETISRIKKTTKLLSQEMGRKPTEEEIATRMEMTIEKLRFIAKSAQLPISLETPIGKEEDSRLGDFIESDSETPEDQVSKNLLREDLEKVLDSLSPRERDVLRLRYGLDDGRMKTLEEIGQIFNVT

SEQ ID NO: 45932 - protein, 272 aa, Oryza rufipogon
MGRRACCAKEGMKRGAWTSKEDDVLASYIKSHGEGKWREVPQRAGLRRCGKSCRLRWLNYLRPNIKRGNIDDDEEELIVRLHTLLGNRWSLIAGRLPGRTDNEIKNYWNSTLSRKIGTAATAAAGSRGGSTPDTARATDAASSSSVVPPGQQQQPASRADTDTATAAAAAAATTTTVWAPKAVRCTRGFFFHDRETAPLAAAAPAPAGELGDGDDVDCDYYCSGSSSAATTTSSSSLPAVVEPCFSAGDDWMDDVRALATFLDTDDAWNLCA

SEQ ID NO: 45933 - protein, 188 aa, Fischerella sp. IAM M-263
MNRGLSFQDLIQEGSLGLIRAAEKFDHEKGYKFSTYATWWIRQAITRAIADQSRTIRLPVHLYETISRIKKTTKLLSQEMGRKPTEEEIATRMEMTIEKLRFIAKSAQLPISLETPIGKEEDSRLGDFIESDGETPEDQVSKNLLREDLEKVLDSLSPRERDVLRLRYGLDDGRMKTLEEIGQIFNVT

SEQ ID NO: 45934 - protein, 384 aa, Lactococcus lactis subsp. lactis Il1403
MINLIEIRRQLHQIPEIGLEEYETQKYLLAIIQELTQNKPFIQVRTWQTGILVYLAGSQSQKTIGWRTDIDGLPIEELTDLPYASKNGRMHACGHDIHMTVALGLLEKMSESQPRDNLLFLFQPAEENEAGGKLMYDARAFENWLPDEFYGLHVRPDLKVGDIATNQHTLFAGTCEVELSFIGTGGHAAFPHTANDALVAAAYFITQVQTIVSRNVDPLASAVVTFGKMEAGTTNNIIAERAFLHGTIRSLTQEVNELTQKRLRELANGIAQSFNMEIELKLKQGGYLPVENHPKLAKELMEFFKKETKANLIDIAPAMTGEDFGYLLSKIPGVMFWLGIDSDAPLHSQKMNPDEHVLNFSVDTISQFLQFKVNRLSEGEKTIN

SEQ ID NO: 45935 - protein, 207 aa, Zea mays
MEVEACYNYGFLPADRGRHQPPPPPHATLPHAAEDAGELWEYFPCPFCYIEVEVPFICNHLQEEHCFDTRNAVCPICANNLGKDMAAHFRLQHTHLLKRRKPYRPSSCPAAATSPATYQVNSYYEEAEPQQHYSRPYKDPAPDPLLSQFICSVDAVPGDDNAQKDDKRLKLNKGATASDDDASSKLGLEERLQRIDFLTEILMSTIL

SEQ ID NO: 45936 - protein, 226 aa, Triticum aestivum
KVRAGSRFAEPRLLDDPGFVSVFSDESESDDDEQGARGVAVKSARQPERRARRVRAAMKAAKSFSDRRPVTASSRKKRVKGCRNSLGCFYKMSGRKLLTAKQEVELSQGIQDLLKLEAVQKEVAHYNGGEPTFGQWAAAAGTDENTLRKRLSHGIYCKNMMVKSNVRLVISFAKEFEGPGTEFSDLIQEGIQGLIRGAEKFDASKGFRFSTYSHWWIKQAIRKSVL

SEQ ID NO: 45937 - protein, 729 aa, Burkholderia vietnamiensis G4
MSAHLLKCRALQPRPSAPSASRPSGAASRAGNVRRSSFRMPPCSRFLDSFSGLDMTTSSPASTTLMANAIRALAMDAVQQANSGHPGMPMGMAEIGVALWSRHLKHNPTNPHWADRDRFVLSNGHGSMLLYSLLHLTGYDLPIEELKNFRQLHSKTPGHPEYGITPGVETTTGPLGQGLANAVGMALGEALMADEFNRDGAKIVDHHTYVFLGDGCLMEGISHEACSLAGTLKLNKLIALYDDNGISIDGDVVNWFHDDTPKRFEAYGWNVIPNVNGHDVDAVDAAIAKAKLSDKPTLICCKTVIGKGAATKAGGHDVHGAALGAEEIAKTRAALGWTWEPFVIPQEVYAAWDAKDAGQRAEAAWSDTFAQYRAKYPAEAAEFERRMANKLPADWAEKAAAIVAGANQRGETVATRKASQQAIEGLAAVLPELLGGSADLTGSNLTNWKASKAVRANPEGAGVVLGNHINYGVREFGMSAAINGLALHGGHKPFGGTFLTFSDYSRNALRVASLMKVPSIFVFTHDSIGLGEDGPTHQSIEHVSSLRLIPNHDVWRPADTVETAVAWTHAVAADRPSSLIFSRQNLAFNSRTDAQIANIEKGGYVLKDWDDEIVARKIILIATGSEVELAMKAVEPLAQQGIAARVVSMPSTNVFDRQDAEYRERVLPHGVRRVAIEAGVTGFWHKYVGLEGGVVGIDTFGESAPAGVLFKYFGFTVEHVIETAKAVLA

SEQ ID NO: 45938 - protein, 103 aa, Cryptococcus neoformans A/D
HLEEGQSVHWHGLRQLGTAFMDGVPGITQCPIPPGSSFTYQFTVSHQSGTFWWHSHYSNSMADGIWGPLIIHSPNEPLQRGRDYDEDRIVFITDWVHDNSEVV

SEQ ID NO: 45939 - protein, 197 aa, Neurospora crassa
MSTTAFPSSPVTVPEGAEKATVAAGCFWGVEHLYRKHFADKGLYDARVGYIGGDASNPSYKQVCSGNTGPCSLDCVADKTKDAEATLLIYDPTRLSYTQILEFFYKMHDPTTHNQQGPDRGAQYRSGIFYHNDEQKKVAEEITKKANEQWWGGKIVTEILPAKEWWDAEQYHQLYLVNNPDGYECPSHFLRKFPELK

SEQ ID NO: 45940 - protein, 917 aa, Pseudomonas chlororaphis
MLKKLGIKGRVLLLTLLPTSLMALVLGGYFTWMQQSDLQTQLLQRGEMIAEQLAPLVAPALAHKNIALLERIATQSLEQQDVRAVTFLAPDRTPLAHAGPSMLNQAPTGNGSQMLQRTGSDATRYLLPVFGRHRNLAGDLIPDESDRLLGWVELELSHNSMLLRGYRSLFASLLLIIAGLICTGLLALRMGRTINNPLSQIKHAVTQLKDGNLETRLPLLGSQELDELASGINRMAGTLQNAQEELQHSIDQATEDVRQNLETIEIQNIELDLARKEALEASRIKSEFLANMSHEIRTPLNGILGFTHLLQKSELTPRQLDYLGTIEKSADSLLGIINEILDFSKIEAGKLVLDSIPFNLRDLLQDTLTILAPAAHAKQLELVSLVYRDTPLSLVGDPLRLKQILTNLVSNAIKFTREGTIVARAMLEEEHEDSVQLRISIQDTGIGLSNQDVRALFQAFSQADNSLSRQPGGTGLGLVISKRLIEQMGGEIGVDSTPGEGSEFWISLRLPKTRDDAEDLPAPPLLGRRIAVLENHELARQALQHQLEDCGLEVTPFNTLEALTNGVTGVHQTEQAIDLAVLGITSNDMPPERLNQHIWDLEHLGCKVLVLCPTTEQTLFHLSVPNPHSQLQAKPACTRKLRRALADLVNPKVVRNEPSEPIASRPPRVLCVDDNPANLLLVQTLLEDMGAKVLAVDSGYAAVKAVQNESFDLVMMDVQMPGMDGRQSTEAIRQWESERNCTPLPVIALTAHAMANEKRALLQSGMDDYLTKPISERQLAQVVLKWTGLALRNQGPERTGEPSGNGLELQVLDHDEGLRLAAGKADLAADMLAMLLASLEADREAIRAARAANDHNALIERVHRLHGATRYCGVPQLRAACQRSETLLKQEDVKAFAALDELERAINRLATEARINA

SEQ ID NO: 45941 - protein, 338 aa, Sinapis alba
MADKKIKIGINGFGRIGRLVARVILQRNDVELVAVNDPFITTEYMTYMFKYDSVHGQWKHNELKVKDEKTLLFGEKPVTVFGIRNPEDIPWGEAGADFVVESTGVFTDKDKAAAHLKGGAKKVVISAPSKDAPMFVVGVNEHEYKSDLNIVSNASCTTNCLAPLAKVINDRFGIVEGLMTTVHSITATQKTVDGPSMKDWRGGRAASFNIIPSSTGAAKAVGKVLPQLNGKLTGMSFRVPTVDVSVVDLTVRLEKAATYDEIKKAIKEESQGKLKGILGYTEDDVVSTDFVGDNRSSIFDAKAGIALSDNFVKLVSWYDNEWGYSTRVVDLIIHMSKA

SEQ ID NO: 45942 - protein, 213 aa, Erwinia chrysanthemi
MIANFDKTQPIGQSDALPGRTTPMPVARLHVVNQHSMTHVPDHMEVAIFAMGCFWGVERLFWQQPGVYSTASGYCGGYTPNPTYREVCTGKTGHAEAVRVVFDPAVVSYPQLLQLFWENHNPAQGMRQGNDIGTQYRSAIYTLTTEQETAAKESYQRFQQAMRDAGNDHDITTEIQPAGPFYYAEDEHQQYLHKNPDGYCGLGGIGVCLPPQG

SEQ ID NO: 45943 - protein, 645 aa, Triticum aestivum
VVYLPQGHLDHLGDAPAPSPAAVPPHVFCRVVDVTLHADASTDEVYAQLSLLPENEEVVRRMREATEDGSGGEDGETVKQRFARMPHMFCKTLTASDTSTHGGFSVPRRAAEDCFPPLDYSQQRPCQELVAKDLHGTEWKFRHIYRGQPRRHLLTTGWSAFVNKKKLVSGDAVLFLRGDDGELRLGVRRAVQLKNGSAFPALYSQCSNLGTLANVAHAVATKSMFQIFYNPRLSQSEFIVPYWKFTKSFSQPFSVGSRFKMRYESEDAAERRYTGIITGTGDADPMWRGSKWKCLLVRWDDDGEFRRPNRVSPWEIELTSSASGSHLAAPTSKRMKPYLPHANPEFTVPHGGGRPDFAESAQVRKVLQGQELLGYRTHDGTAVATSQPCEARNLQYIDERGCSNNGSNNVLGGVPSHGVKTPLGIPYHCSGFGESQRFQKVLQGQEVFRPYRGSLVDARMRSGGFHQQDGPYASALLDKWRTQQQHAFGFGSSAPVLPSQPSLSPPSVLMFQQADPKVSRFEFGQGHLDKNMDDPYARFVSAEAIGRGEQTLSLRPHLGSEVIDTRVAVENKGVAPTNSCKIFGISLAEKVRARDEMGCDDGGANYPSSTQPLKQQVPKSLGNSCATVHEQRPVVGRAIDVQQWI

SEQ ID NO: 45944 - protein, 87 aa, Arabidopsis thaliana
IDVDVVFGIIDYAIYTYILIQRKLENRRTKAMEKTPNQMAKAQRKAEERRTPAEGKRGTEVSRVFEVANFIRALGRPPAQPSFFSLS

SEQ ID NO: 45945 - protein, 234 aa, Antirrhinum majus
MGRGKIVIQRIDKSTSRQVTFSKRRSGLLKKAKELAILCDAEVGVVIFSSTGKLYEFSSTSMKSIIERHTKTKEDHHQLLNHGSEVKFWQREAATLRQQLQDLQENHRKLMGEELQGLNVEDLHRLENQLEMSLRGVRMKKVQMLTDEVHELRRKGHLIHQENNELYEKVKLLQQENKELCKKAYGTRDVSAANGTALVPFGFAIGREQFEPIQLHLSQPEPENIETSRASGSK

SEQ ID NO: 45946 - protein, 272 aa, Oryza rufipogon
MGRRACCAKEGMKRGAWTSKEDDVLASYIKSHGEGKWREVPQRAGLRRCGKSCRLRWLNYLRPNIKRGNIDDDEEELIVRLHTLLGNRWSLIAGRPPGRTDNEIKNYWNSTLSRKIGTAATAAAGSRGGSTPDTARATDAASSSSVVPPGQQQQPASRADTDTATAAAAAAATTTTVWAPKAVRCTRGFFFHDRETAPLAAAAPAPAGELGDGDDVDCDYYCSGSSSAATTTSSSSLPAVVEPCFSAGDDWMDDVRALASFLDTDDAWNLCA

SEQ ID NO: 45947 - protein, 370 aa, Pseudomonas aeruginosa UCBPP-PA14
MSLPNANLIASSRKAAAQMATRDTSFIFNEWYVAAFAEEVGRELLARTLLGKRVVLYRTLAGQAVALEDRCAHRSFPLSRSRLEGDGIVCGYHGFRYDSQGELIETPSQKACPRGVGIRHYPLLERGPLVWIWLGDPRLADPKRLPQRPWLEDPGWACSKGYFLHPGNYVSMHENLMDLTHLTYLHANTIGTPDYAGAPYELDLKEGHYRLVRHVLPTTLSPVWGRTTGLDGCPTAARITTSEFLSPGLHQVSATFYDTALPAERRPEFHIRTAHILTPETHGSMHYFIVHGRDFAQDDETVGAFMHEQLFAAFVEDVEGLGALEKVLAEADEDSYEISVASDAPAVATRTYLKRRADEEAHQRAAHRVA

SEQ ID NO: 45948 - protein, 249 aa, Elymus abolinii
LTGITGIVNGMNVSEWDPTKDKFLAVNYDVTTALEGKALNKEALQAEVGLPVDRKVPLVAFIGRLEEQKGPDVMIATIPEIVKDEDVQIVLLGTGKKKFERLLKSVEERFPGKVRAVVRFNAPLAHQMMAGADVLAVTSRFEPCGLIQLQGMRYGTPCACASTGGLVDTIVEGKTGFHMGRLSVDCNVVEPADVKKVATTLKRAIKVVGTPAYQEMVKNCMIQDLSWKGPAKNWEDVLLELGVEGSEPG

SEQ ID NO: 45949 - protein, 249 aa, Elymus abolinii
LTGITGIVNGMDVSEWDPTKDKFLAVNYDITTALEGKALNKEALQAEVGLPVDRKVPLVAFIGRLEEQKGPDVMIAAIPEILKDEDVQIVLLGTGKKKFERLLKSVEEKFPGKVRAVVRFNAPLAHQMMAGADVLAVTSRFEPCGLIQLQGIRYGTPCVCASTGGLVDTIVEGKTGFHMGRLSVDCNVVEPADVKKVATTLKRAVKVVGTPAYQEMVKNCMIQDLSWKAPAKNWEDVLLELGVEGSEPG

SEQ ID NO: 45950 - protein, 93 aa, Brassica napus
MAAGMGTRAGASLVGGNRILPGINDRLNLNFFGVEKAAFGAGQCQMLDLTFPGVGPMPKVNFVAKTESVLIQNSKVLQDGFNRFQITKPLGIN

SEQ ID NO: 45951 - protein, 618 aa, Magnaporthe grisea 70-15
MRLSAFASVGLSSLAVVTNAAIVTYDWTIDWVRAAPDGFSRPVIGVNNQWPCPAIRANVGDTVVVNIKNNLGNQTTGIHFHGIHQIGSNEMDGPTGVTQCPVPPGNTLTYSFYADAPGTYWYHSHSPGQYPDGLRGPLIIDDPNDPYKGKYDEEVIFSVSDWYHSETLPLVRAMLTPANDRFLPPFPDSIIVNDGQNTNFSFVKGKTYRFRMISYAAFASAMIQFDSHTMQIIAADGAYTTQTQAYQIRLSPAQRYDVLISAIDRDNRNYPILVNLDINRDYEVAPVWTKNYTAQLVMDPAKPFTTYTVNQWRPQDDSTIKPYDVVGDAILPPADKVITLDFTFCKDENNYPRACFNNQTFIMPHTPTLYTAATVGEANTDAIVYGNVLPEIVSYGQVVDIVINNIDAAIHPFHLHGHHFQLLERPKSNTGVWPGRSGGYNTLPALRDVVHVNAHSYAVLRFKATNPGVFLFHCHIEWHVEMGLTATIIEAPERIRGKTFPPDHMAACKVMGMPTAGNAAGNTVNVYDTSGYKEVPDTVYHGAMYYPLGIPGPTPPDSPVPPTNAAPTSTTGATVQSTTTAAASATSSINVDDLVESLALDDPLPVRRSIRQSRPARL

SEQ ID NO: 45952 - protein, 112 aa, Nostoc punctiforme PCC 73102
MELLLDGCLRESQLQDQHCLTYLLFPDNSIKVAQAEEKTAGGILLPDTAKEKPQIGEVVQVGPGKRNEDGSRQPMEVKIGERVLYSRYAGTDIKLGSEEYVLSEKDVLAIVE

SEQ ID NO: 45953 - protein, 815 aa, Clostridium acetobutylicum ATCC 824
MKAIIMAGGQGKRLRPLTCNLPKPMMPIMQKPVLQYIIELLKKHGINEIGITLHYLPDEVMDYFGDGKELGVNIHYFIEQSPLGTAGSVRNAESFLDETFVVISGDALTDVNLTNILQYHKEKNAMVTIVLKKVTIPLEYGVAITDTEGRISNFIEKPGWGEIFSDKANTGIYVMEPGIFEFYNKDKKFDFSEELFPELLKSGKEIFGYVVNDYWRDIGNIEQFMKCNFDILNGYVDVDVDIDASQHQKGVWIGKNTIVSDNVKVIPPVYIGDNSEIRYGAEIGPFAVIGRNNIISEMATIKRSIIFENCYIGSGAELRGSVVSNNVQVGGGVSTFEESAIGTGSLVGEKSVVKAGVKIWPDKVIGSKTIIKTNVVWGENRCKVLFGKEGISGEINVELTPEFVSKLASAFASNLRMNSKVVVCSDYNLAAEMLKYSFVSGLISMGIEVYSAKEMTIPMLRFSTAYFKADAAVYIYCKGSNKEKVNILFIDKDGIMISRSMEKKIANSFLREDFRRTRANNFKRLRDFGECMGYYEDYIKENLCIQEIRNSGLKVAVSMENKLIKNEVKSIFSDLKIQYSIYDNYADLEGLKKEVIEKKMDFGVCISENCDKAIIIDENANIISTQMYESIKALILISVYKFKTIVAPVNSSKALKYIAKRYNCKYVKSKISERYILNEYILNEKDKNIKEVLFSYLSSTDALNIVINIINILARGKIKLSELMERIPNYILREKEIACSWDNKGKIMRSLIEENISKSIELIEGIKVNYEDAWVLIIPDSDEPICKIYAESNDEEKTDKIINEFESEIELFMKN

SEQ ID NO: 45954 - protein, 124 aa, Lactobacillus delbrueckii subsp. lactis
QRERRGDYRGGTVQVIPHVTNMIKEKVMRAAQMTDTDVVISEIGGTVGDMESTPFMEAIRQMRREVGSENVMYVHVTFVPYLRAAKELKSKPTQQSVSMLRSIGIQPNMLVLRSEMPVPQEMKD

SEQ ID NO: 45955 - protein, 103 aa, Cryptococcus neoformans A/D
HLEEGQSIHWHGLRQLGTAFMDGVPGITQCPIPPGSSFTYQFTVSHQSGTFWWHSHYSNSMADGIWGPLIIHSPNEPLQRGRDYDEDRIVFITDWVHDNSEVV

SEQ ID NO: 45956 - protein, 157 aa, SYNECHOCOCCUS SP. WH 8102
MAISVSNVTVTTPDGSSKSLGDYSGKVLLIVNVASRCGFTKQYAGLQGLNAAYADKGLAVLGFPCNDFGAQEPGSLEEIKSFCSTTYGADFELFEKVHAMGSTTEPYSTLNQMDPTGDVAWNFEKFLVGKDGTVIARYKSGVDPEELKAPIEAALAA

SEQ ID NO: 45957 - protein, 322 aa, Nicotiana paniculata
MSTASINSCLTISPAQASLKKPIRPVAFARLSNTSSSSSSVPSLIRNEPVFAAPTPIINPILREEMAKESYEQAIAALEKLLSEKGELGPIAAARVDQITAELQSSDGSKPFDPVEHMKAGFIHFKTEKYEKNPALYGELSKGQSPKFMVFACSDSRVCPSHVLNFQPGEAFVVRNIANMVPAYDKTRYSGVGAAIEYAVLHLKVENIVVIGHSACGGIKGLMSLSADGSESTAFIEDWVKIGLPAKAKVEGEHADKCFADQCTACEKEAVNVSLGNLLTYPFVREGLVKKTLALKGGHYDFVNGGFELWGLEFGLSPSLSV

SEQ ID NO: 45958 - protein, 423 aa, Burkholderia vietnamiensis G4
MDIDQYMTDLGRRARHASRAMARASTAAKNAALDAVARAIERDASALKEANARDVARARDKGLDAAFIDRLTLSDKALKTMVEGLRQVASLADPIGEISNLKYRPSGIQVGQMRVPLGVIGIIYESRPNVTIDAAALCLKSGNATILRGGSEALESNAALAKLIGEGLEAAGLPQDAVQVVATADRAAVGKLITMTEYVDVIVPRGGKSLIERLINEARVPMIKHLDGICHVYVDDRADLAKALTVCDNAKTHRYGTCNTMETLLVSSGIAAALLPPLGKLYRDKQVELRVDAAARAVLADAGVGPLVDATDADWHTEYLAPVLAIKVVDGLDAAIEHINHYGSHHTDAIVTEDHDRAMRFLREVDSASVMVNASTRFADGFEFGLGAEIGISNDKLHARGPVGLEGLTSLKYVVLGHGEGRQ

SEQ ID NO: 45959 - protein, 446 aa, Avicennia marina
MDVRGGEDVTGGSGAGRKVHSEDMAVEVPETAHQISNDSWLQAGFVLTTGVNSAYVLGYSGAVMVPLGWIGGVVGLILATLVSLHANALVAQLHEYGGKRHIRYRDLAGRIYGRRAYSVTWGMQYVNLFMINVGFVILAGNSLKAVYTLFRHDHVMKLPHFIAIAAIACGLFAISIPHLSAMRIWLAFSMFFSLVYIIVGFALSLKDGIEAPPRDYTLPEKGADKVFTIIGAAAELVFSFNTGMLPEIQATVRPPVIGNMMKALYFQFTVGVVPMYSIIFVGYWAYGSKTTSYLLNNVHGPIWLMTVANIAAFLQSVISLHIFASPMYEIWIPDLESKEVLWPIRNLSFRVVVRGGYVATTAFVSALLPFLGDFMSLTGAISTFPLTFILANHMYLVAKGNKLSPLHKTGLWLNIGFFGCLAVAAAVAALREIVVDSKTYHLFADI
